(19) United States
(12) Patent Application Publication
(10) Pub. No.: US 2007/0143875 A1
(43) Pub. Date: Jun. 21, 2007

(54) Polynucleotides and Other Molecules Associated With Plants

(76) Inventors: Timothy W. Conner, Wildwood, MO (US); James D. Masucci, Ballwin, MO (US)

Correspondence Address: ARNOLD & PORTER, LLP, 555 TWELFTH STREET, N.W., ATTN: IP DOCKETING, WASHINGTON, DC, 20004, US

(21) Appl. No.: 11/314,006

(22) Filed: Dec. 22, 2005

Related U.S. Application Data
(63) Continuation of application No. 09/540,234, filed on Apr. 3, 2000, now abandoned.

(51) Int. Cl. A01H 5/00; C07H 21/04; C12N 9/24; C12N 15/82

(52) U.S. Cl. 800/278; 435/200; 536/23.2; 800/312; 800/315; 800/320.1; 800/320.3

(57) ABSTRACT

Expressed Sequence Tags (ESTs) isolated from wheat are disclosed. The ESTs provide a unique molecular tool for the targeting and isolation of novel genes for plant protection and improvement. The disclosed ESTs have utility in the development of new strategies for understanding critical plant developmental and metabolic pathways. The disclosed ESTs have particular utility in isolating genes and promoters, identifying and mapping the genes involved in developmental and metabolic pathways, and determining gene function. Sequence homology analyses using the ESTs provided in the present invention, will result in more efficient gene screening for desirable agronomic traits. An expanding database of these select pieces of the plant genomics puzzle will quickly expand the knowledge necessary for subsequent functional validation, a key limitation in current plant biotechnology efforts.

### CROSS REFERENCE TO RELATED APPLICATION

[0001] This application is a continuation under 35 U.S.C. § 120 of U.S. application Ser. No. 09/540,234 filed Apr. 3, 2000, herein incorporated by reference in its entirety.

### INCORPORATION OF SEQUENCE LISTING

[0002] This application contains a sequence listing, which is contained on three identical CD-ROMs: two copies of the sequence listing (Copy 1 and Copy 2) and a sequence listing Computer Readable Form (CRF), all of which are herein incorporated by reference. All three CD-ROMs each contain one file called “15726C seq list.txt” which is 8,060,928 bytes in size (measured in Windows XP) and which was created on Dec. 21, 2005.

### FIELD OF THE INVENTION

[0003] The present invention is in the field of plant biochemistry. More specifically the invention relates to nucleic acid molecules that encode proteins and fragments of proteins produced in plant cells, in particular, wheat plants. The invention also relates to proteins and fragments of proteins so encoded and antibodies capable of binding the proteins. The invention also relates to methods of using the nucleic acid molecules, proteins and fragments of proteins.

### BACKGROUND OF THE INVENTION

I. Expressed Sequence Tag Nucleic Acid Molecules

[0004] Expressed sequence tags, or ESTs, are short sequences of randomly selected clones from a cDNA (or complementary DNA) library which are representative of the cDNA inserts of these randomly selected clones. McCombie, et al., Nature Genetics, 1:124-130 (1992); Kurata, et al., Nature Genetics, 8: 365-372 (1994); Okubo, et al., Nature Genetics, 2: 173-179 (1992), all of which references are incorporated herein in their entirety.

[0005] Using conventional methodologies, cDNA libraries can be constructed from the mRNA (messenger RNA) of a given tissue or organism using poly dT primers and reverse transcriptase (Efstratiadis, et al., Cell 7:279-288 (1976), the entirety of which is herein incorporated by reference; Higuchi, et al., Proc. Natl. Acad. Sci. (U.S.A.) 73:3146-3150 (1976), the entirety of which is herein incorporated by reference; Maniatis, et al., Cell 8:163 (1976) the entirety of which is herein incorporated by reference; Land, et al., Nucleic Acids Res. 9:2251-2266 (1981), the entirety of which is herein incorporated by reference; Okayama, et al., Mol. Cell. Biol. 2:161-170 (1982), the entirety of which is herein incorporated by reference; Gubler, et al., Gene 25:263 (1983), the entirety of which is herein incorporated by reference).

[0006] Several methods may be employed to obtain full-length cDNA constructs. For example, terminal transferase can be used to add homopolymeric tails of dC residues to the free 3′ hydroxyl groups (Land, et al., Nucleic Acids Res. 9:2251-2266 (1981), the entirety of which is herein incorporated by reference). This tail can then be hybridized by a poly dG oligo which can act as a primer for the synthesis of full length second strand cDNA. Okayama and Berg, report a method for obtaining full length cDNA constructs. This method has been simplified by using synthetic primer-adapters that have both homopolymeric tails for priming the synthesis of the first and second strands and restriction sites for cloning into plasmids (Coleclough, et al., Gene 34:305-314 (1985), the entirety of which is herein incorporated by reference) and bacteriophage vectors (Krawinkel, et al., Nucleic Acids Res. 14:1913 (1986), the entirety of which is herein incorporated by reference; and Han, et al., Nucleic Acids Res. 15:6304 (1987), the entirety of which is herein incorporated by reference).

[0007] These strategies have been coupled with additional strategies for isolating rare mRNA populations. For example, a typical mammalian cell contains between 10,000 and 30,000 different mRNA sequences. Davidson, Gene Activity in Early Development, 2nd ed., Academic Press, New York (1976). The number of clones required to achieve a given probability that a low-abundance mRNA will be present in a cDNA library is N=(ln(1−P))/(ln(1−1/n)) where N is the number of clones required, P is the probability desired, and 1/n is the fractional proportion of the total mRNA that is represented by a single rare mRNA. (Sambrook, et al., Molecular Cloning: A Laboratory Manual, 2nd ed., Cold Spring Harbor Laboratory Press (1989), the entirety of which is herein incorporated by reference.).

[0008] A method to enrich preparations of mRNA for sequences of interest is to fractionate by size. One such method is to fractionate by electrophoresis through an agarose gel (Pennica, et al., Nature 301:214-221 (1983), the entirety of which is herein incorporated by reference). Another such method employs sucrose gradient centrifugation in the presence of an agent, such as methylmercuric hydroxide, that denatures secondary structure in RNA (Schweinfest, et al., Proc. Natl. Acad. Sci. (U.S.A.) 79:4997-5000 (1982), the entirety of which is herein incorporated by reference).

[0009] A frequently adopted method is to construct equalized or normalized cDNA libraries (Ko, Nucleic Acids Res. 18:5705-5711 (1990), the entirety of which is herein incorporated by reference; Patanjali, S. R. et al., Proc. Natl. Acad. Sci. (U.S.A.) 88:1943-1947 (1991), the entirety of which is herein incorporated by reference). Typically, the cDNA population is normalized by subtractive hybridization. Schmid, et al., J. Neurochem. 48:307-312 (1987) the entirety of which is herein incorporated by reference; Fargnoli, et al., Anal. Biochem. 187:364-373 (1990) the entirety of which is herein incorporated by reference; Travis, et al., Proc. Natl. Acad. Sci (U.S.A.) 85:1696-1700 (1988) the entirety of which is herein incorporated by reference; Kato, Eur. J. Neurosci. 2:704 (1990); and Schweinfest, et al., Genet. Anal. Tech. Appl. 7:64 (1990), the entirety of which is herein incorporated by reference). Subtraction represents another method for reducing the population of certain sequences in the cDNA library. Swaroop, et al., Nucleic Acids Res. 19:1954 (1991), the entirety of which is herein incorporated by reference).

[0010] ESTs can be sequenced by a number of methods. Two basic methods may be used for DNA sequencing, the chain termination method of Sanger et al., Proc. Natl. Acad. Sci. (U.S.A.) 74: 5463-5467 (1977), the entirety of which is herein incorporated by reference and the chemical degradation method of Maxam and Gilbert, Proc. Nat. Acad. Sci. (U.S.A.) 74: 560-564 (1977), the entirety of which is herein incorporated by reference. Automation and advances in technology such as the replacement of radioisotopes with fluorescence-based sequencing have reduced the effort required to sequence DNA (Craxton, Methods, 2: 20-26 (1991), the entirety of which is herein incorporated by reference; Ju et al., Proc. Natl. Acad. Sci. (U.S.A.) 92: 4347-4351 (1995), the entirety of which is herein incorporated by reference; Tabor and Richardson, Proc. Natl. Acad. Sci. (U.S.A.) 92: 6339-6343 (1995), the entirety of which is herein incorporated by reference). Automated sequencers are available from, for example, Pharmacia Biotech, Inc., Piscataway, N.J. (Pharmacia ALF), LI-COR, Inc., Lincoln, Nebr. (LI-COR 4,000) and Millipore, Bedford, Mass. (Millipore BaseStation).

[0011] In addition, advances in capillary gel electrophoresis have also reduced the effort required to sequence DNA and such advances provide a rapid high resolution approach for sequencing DNA samples (Swerdlow and Gesteland, Nucleic Acids Res. 18:1415-1419 (1990); Smith, Nature 349:812-813 (1991); Luckey et al., Methods Enzymol. 218:154-172 (1993); Lu et al., J. Chromatog. A. 680:497-501 (1994); Carson et al., Anal. Chem. 65:3219-3226 (1993); Huang et al., Anal. Chem. 64:2149-2154 (1992); Kheterpal et al., Electrophoresis 17:1852-1859 (1996); Quesada and Zhang, Electrophoresis 17:1841-1851 (1996); Baba, Yakugaku Zasshi 117:265-281 (1997), all of which are herein incorporated by reference in their entirety).

[0012] ESTs longer than 150 bases have been found to be useful for similarity searches and mapping. (Adams, et al., Science 252:1651-1656 (1991), herein incorporated by reference.) EST sequences normally range from 150-450 bases. This is the length of sequence information that is routinely and reliably generated using single run sequence data. Typically, only single run sequence data is obtained from the cDNA library, Adams, et al., Science 252:1651-1656 (1991). Automated single run sequencing typically results in an approximately 2-3% error or base ambiguity rate. (Boguski, et al., Nature Genetics, 4:332-333 (1993), the entirety of which is herein incorporated by reference).

[0013] EST databases have been constructed or partially constructed from, for example, C. elegans (McCombrie, et al., Nature Genetics 1:124-131 (1992), human liver cell line HepG2 (Okubo, et al., Nature Genetics 2:173-179 (1992)), human brain RNA (Adams, et al., Science 252:1651-1656 (1991); Adams, et al., Nature 355:632-635 (1992)), Arabidopsis, (Newman, et al., Plant Physiol. 106:1241-1255 (1994)); and rice (Kurata, et al., Nature Genetics 8:365-372 (1994).

II. Sequence Comparisons

[0014] A characteristic feature of a protein or DNA sequence is that it can be compared with other known protein or DNA sequences. Sequence comparisons can be undertaken by determining the similarity of the test or query sequence with sequences in publicly available or propriety databases (“similarity analysis”) or by searching for certain motifs (“intrinsic sequence analysis”)(e.g. cis elements)(Coulson, Trends in Biotechnology, 12: 76-80 (1994), the entirety of which is herein incorporated by reference; Birren, et al., Genome Analysis, 1: 543-559 (1997), the entirety of which is herein incorporated by reference).

[0015] Similarity analysis includes database search and alignment. Examples of public databases include the DNA Database of Japan (DDBJ)(on the Worldwide web at ddbj.nig.acjp/); Genebank (on the Worldwide web at ncbi.nlm.nih.gov/web/Genbank/Index.htlm); and the European Molecular Biology Laboratory Nucleic Acid Sequence Database (EMBL) (on the Worldwide web at ebi.ac.uk/ebi_docs/embl_db.html). A number of different search algorithms have been developed, one example of which are the suite of programs referred to as BLAST programs. There are five implementations of BLAST, three designed for nucleotide sequences queries (BLASTN, BLASTX, and TBLASTX) and two designed for protein sequence queries (BLASTP and TBLASTN) (Coulson, Trends in Biotechnology, 12: 76-80 (1994); Birren, et al., Genome Analysis, 1: 543-559 (1997)).

[0016] BLASTN takes a nucleotide sequence (the query sequence) and its reverse complement and searches them against a nucleotide sequence database. BLASTN was designed for speed, not maximum sensitivity, and may not find distantly related coding sequences. BLASTX takes a nucleotide sequence, translates it in three forward reading frames and three reverse complement reading frames, and then compares the six translations against a protein sequence database. BLASTX is useful for sensitive analysis of preliminary (single-pass) sequence data and is tolerant of sequencing errors (Gish and States, Nature Genetics, 3: 266-272 (1993), the entirety of which is herein incorporated by reference). BLASTN and BLASTX may be used in concert for analyzing EST data (Coulson, Trends in Biotechnology, 12: 76-80 (1994); Birren, et al., Genome Analysis, 1: 543-559 (1997).

[0017] Given a coding nucleotide sequence and the protein it encodes, it is often preferable to use the protein as the query sequence to search a database because of the greatly increased sensitivity to detect more subtle relationships. This is due to the larger alphabet of proteins (20 amino acids) compared with the alphabet of nucleic acid sequences (4 bases), where it is far easier to obtain a match by chance. In addition, with nucleotide alignments, only a match (positive score) or a mismatch (negative score) is obtained, but with proteins, the presence of conservative amino acid substitutions can be taken into account. Here, a mismatch may yield a positive score if the non-identical residue has physical/chemical properties similar to the one it replaced. Various scoring matrices are used to supply the substitution scores of all possible amino acid pairs. A general purpose scoring system is the BLOSUM62 matrix (Henikoff and Henikoff, Proteins, 17: 49-61 (1993), the entirety of which is herein incorporated by reference), which is currently the default choice for BLAST programs. BLOSUM62 is tailored for alignments of moderately diverged sequences and thus may not yield the best results under all conditions. Altschul, J. Mol. Biol. 36: 290-300 (1993), the entirety of which is herein incorporated by reference, uses a combination of three matrices to cover all contingencies. This may improve sensitivity, but at the expense of slower searches. In practice, a single BLOSUM62 matrix is often used but others (PAM40 and PAM250) may be attempted when additional analysis is necessary. Low PAM matrices are directed at detecting very strong but localized sequence similarities, whereas high PAM matrices are directed at detecting long but weak alignments between very distantly related sequences.

[0018] Homologues in other organisms are available that can be used for comparative sequence analysis. Multiple alignments are performed to study similarities and differences in a group of related sequences. CLUSTAL W is a multiple sequence alignment package available that performs progressive multiple sequence alignments based on the method of Feng and Doolittle, J. Mol. Evol. 25: 351-360 (1987), the entirety of which is herein incorporated by reference. Each pair of sequences is aligned and the distance between each pair is calculated; from this distance matrix, a guide tree is calculated, and all of the sequences are progressively aligned based on this tree. A feature of the program is its sensitivity to the effect of gaps on the alignment; gap penalties are varied to encourage the insertion of gaps in probable loop regions instead of in the middle of structured regions. Users can specify gap penalties, choose between a number of scoring matrices, or supply their own scoring matrix for both the pairwise alignments and the multiple alignments. CLUSTAL W for UNIX and VMS systems is available at: ftp.ebi.ac.uk. Another program is MACAW (Schuler et al., Proteins, Struct. Func. Genet, 9:180-190 (1991), the entirety of which is herein incorporated by reference, for which both Macintosh and Microsoft Windows versions are available. MACAW uses a graphical interface, provides a choice of several alignment algorithms, and is available by anonymous ftp at: ncbi.nlm.nih.gov (directory/pub/macaw).

[0019] Sequence motifs are derived from multiple alignments and can be used to examine individual sequences or an entire database for subtle patterns. With motifs, it is sometimes possible to detect distant relationships that may not be demonstrable based on comparisons of primary sequences alone. Currently, the largest collection of sequence motifs in the world is PROSITE (Bairoch and Bucher, Nucleic Acid Research, 22: 3583-3589 (1994), the entirety of which is herein incorporated by reference.) PROSITE may be accessed via either the ExPASy server on the World Wide Web or anonymous ftp site. Many commercial sequence analysis packages also provide search programs that use PROSITE data.

[0020] A resource for searching protein motifs is the BLOCKS E-mail server developed by S. Henikoff, Trends Biochem Sci., 18:267-268 (1993), the entirety of which is herein incorporated by reference; Henikoff and Henikoff, Nucleic Acid Research, 19:6565-6572 (1991), the entirety of which is herein incorporated by reference; Henikoff and Henikoff, Proteins, 17: 49-61 (1993). BLOCKS searches a protein or nucleotide sequence against a database of protein motifs or “blocks.” Blocks are defined as short, ungapped multiple alignments that represent highly conserved protein patterns. The blocks themselves are derived from entries in PROSITE as well as other sources. Either a protein or nucleotide query can be submitted to the BLOCKS server; if a nucleotide sequence is submitted, the sequence is translated in all six reading frames and motifs are sought in these conceptual translations. Once the search is completed, the server will return a ranked list of significant matches, along with an alignment of the query sequence to the matched BLOCKS entries.

[0021] Conserved protein domains can be represented by two-dimensional matrices, which measure either the frequency or probability of the occurrences of each amino acid residue and deletions or insertions in each position of the domain. This type of model, when used to search against protein databases, is sensitive and usually yields more accurate results than simple motif searches. Two popular implementations of this approach are profile searches (such as GCG program ProfileSearch) and Hidden Markov Models (HMMs)(Krough et al., J. Mol. Biol. 235:1501-1531 (1994); Eddy, Current Opinion in Structural Biology 6:361-365 (1996), both of which are herein incorporated by reference in their entirety). In both cases, a large number of common protein domains have been converted into profiles, as present in the PROSITE library, or HHM models, as in the Pfam protein domain library (Sonnhammer et al., Proteins 28:405-420 (1997), the entirety of which is herein incorporated by reference). Pfam contains more than 500 HMM models for enzymes, transcription factors, signal transduction molecules, and structural proteins. Protein databases can be queried with these profiles or HMM models, which will identify proteins containing the domain of interest. For example, HMMSW or HMMFS, two programs in a public domain package called HMMER (Sonnhammer et al., Proteins 28:405-420 (1997)) can be used.

[0022] PROSITE and BLOCKS represent collected families of protein motifs. Thus, searching these databases entails submitting a single sequence to determine whether or not that sequence is similar to the members of an established family. Programs working in the opposite direction compare a collection of sequences with individual entries in the protein databases. An example of such a program is the Motif Search Tool, or MoST (Tatusov et al. Proc. Natl. Acad. Sci. 91: 12091-12095 (1994), the entirety of which is herein incorporated by reference.) On the basis of an aligned set of input sequences, a weight matrix is calculated by using one of four methods (selected by the user); a weight matrix is simply a representation, position by position in an alignment, of how likely a particular amino acid will appear. The calculated weight matrix is then used to search the databases. To increase sensitivity, newly found sequences are added to the original data set, the weight matrix is recalculated, and the search is performed again. This procedure continues until no new sequences are found.

### SUMMARY OF THE INVENTION

[0023] The present invention provides a substantially purified nucleic acid molecule that encodes a wheat protein or fragment thereof comprising a nucleic acid sequence selected from the group consisting of SEQ ID NO: 1 through SEQ ID NO: 11840.

[0024] The present invention also provides one or more substantially purified nucleic acid molecules comprising a nucleic acid sequence selected from the group consisting of SEQ ID NO: 1 through SEQ ID NO:11840 or complements thereof.

[0025] The present invention also provides a substantially purified wheat protein or fragment thereof, wherein said wheat protein is encoded by a nucleic acid molecule that comprises a nucleic acid sequence selected from the group consisting of SEQ ID NO: 1 through SEQ ID NO: 11840.

[0026] The present invention further provides a substantially purified protein, peptide, or fragment thereof encoded by a nucleic acid sequence which specifically hybridizes to a nucleic acid molecule comprising a nucleic acid sequence selected from the group consisting of a complement of SEQ ID NO: 1 through SEQ ID NO:11840.

[0027] The present invention further provides a substantially purified antibody capable of specifically binding to a protein or fragment thereof encoded by a nucleic acid sequence which specifically hybridizes to a nucleic acid molecule having a nucleic acid sequence selected from the group consisting of a complement of SEQ ID NO:1 through SEQ ID NO:11840.

[0028] The present invention also provides a transformed plant transformed to contain a nucleic acid molecule which comprises: (A) an exogeneous promoter region which functions in plant cells to cause the production of an mRNA molecule; which is linked to (B) a structural nucleic acid molecule, wherein said structural nucleic acid molecule comprises a nucleic acid molecule that encodes a protein, peptide, or fragment thereof which hybridizes to a nucleic acid sequence selected from the group consisting of a complement of SEQ ID NO:1 through SEQ ID NO:11840 expressed in an effective amount to produce a desirable agronomic effect; which is linked to (C) a 3′ non-translated sequence that functions in plant cells to cause the termination of transcription and the addition of polyadenylated ribonucleotides to the 3′ end of the mRNA sequence.

[0029] The present invention also provides a transformed plant cell containing a nucleic acid molecule whose non-transcribed strand encodes a protein or fragment thereof, wherein the transcribed strand of said nucleic acid is complementary to a nucleic acid molecule that encodes a protein or fragment thereof. The present invention also provides bacterial, viral, microbial, and plant cells comprising a nucleic acid molecule of the present invention

[0030] The present invention also provides a method of producing a plant containing one or more proteins encoded by sequences comprising SEQ ID NO:1 or complement thereof through SEQ ID NO:11840 or complements thereof, expressed in a sufficient amount and/or fashion to produce a desirable agronomic effect.

[0031] In accomplishing the foregoing, there is provided, in accordance with one aspect of the present invention, methods of producing genetically transformed plants, comprising the steps of:
[0032] (a) inserting into the genome of a plant cell a recombinant, double-stranded DNA molecule comprising
   [0033] (i) a promoter which functions in plant cells to cause the production of an RNA sequence,
   [0034] (ii) a structural DNA sequence that causes the production of an RNA sequence which encodes a desired protein.
   [0035] (iii) a 3′ non-translated DNA sequence which functions in plant cells to cause the addition of polyadenylated nucleotides to the 3′ end of RNA sequence; where the promoter is homologous or heterologous with respect to the coding sequence and adapted to cause sufficient expression of a protein in desired plant tissues to enhance the agronomic utility of a plant transformed with said gene.
[0036] (b) obtaining a transformed plant cell with said nucleic acid molecule that encodes one or more proteins, wherein said nucleic acid molecule is transcribed and results in expression of said protein(s); and
[0037] (c) regenerating from the transformed plant cell a genetically transformed plant

[0038] The present invention also encompasses differentiated plants, seeds, and progeny comprising said transformed plant cells and which exhibit novel properties of agronomic significance.

[0039] The present invention also provides a method of producing a plant containing reduced levels of a protein comprising: (A) transforming a plant cell with a nucleic acid molecule that encodes a protein, wherein said nucleic acid molecule is transcribed and results in co-suppression of endogenous protein synthesis activity, and (B) regenerating plants and producing subsequent progeny from the transformed plant.

[0040] The present invention also provides a method of determining an association between a polymorphism and a plant trait comprising: (A) hybridizing a nucleic acid molecule specific for a polymorphism to genetic material of a plant, wherein said nucleic acid molecule comprising a nucleic acid sequence selected from the group consisting of SEQ ID NO: 1 through SEQ ID NO:11840 or complements thereof; and (B) calculating the degree of association between the polymorphism and the plant trait.

[0041] The present invention also provides a method of isolating a genetic region, or nucleic acid that encodes a protein or fragment thereof comprising: (A) incubating under conditions permitting nucleic acid hybridization: a marker nucleic acid molecule, preferably an EST, with a complementary nucleic acid molecule obtained from a plant cell or plant tissue; (B) permitting hybridization between said marker nucleic acid molecule, preferably an EST, and said complementary nucleic acid molecule obtained from said plant cell or plant tissue; and (C) isolating said complementary nucleic acid molecule.

[0042] The present invention also provides a method for determining a level or pattern in a plant cell of a protein in a plant comprising: (A) incubating, under conditions permitting nucleic acid hybridization, a marker nucleic acid molecule, the marker nucleic acid molecule selected from the group of marker nucleic acid molecules which specifically hybridize to a nucleic acid molecule having the nucleic acid sequence selected from the group consisting of SEQ ID NO: 1 through SEQ ID NO: 11840 or complements thereof or fragments of either, with a complementary nucleic acid molecule obtained from the plant cell or plant tissue, wherein nucleic acid hybridization between the marker nucleic acid molecule and the complementary nucleic acid molecule obtained from the plant cell or plant tissue permits the detection of an mRNA for the enzyme; (B)

[0043] permitting hybridization between the marker nucleic acid molecule and the complementary nucleic acid molecule obtained from the plant cell or plant tissue; and (C) detecting the level or pattern of the complementary nucleic acid, wherein the detection of the complementary nucleic acid is predictive of the level or pattern of the protein.

[0044] The present invention also provides a method for determining the level or pattern of a protein in a plant cell or plant tissue comprising: (A) incubating under conditions permitting nucleic acid hybridization: a marker nucleic acid molecule, the marker nucleic acid molecule comprising a nucleotide sequence selected from the group consisting of SEQ ID NO: 1 through SEQ ID NO:11840 or complements thereof, with a complementary nucleic acid molecule obtained from a plant cell or plant tissue, wherein nucleic acid hybridization between the marker nucleic acid molecule, and the complementary nucleic acid molecule obtained from the plant cell or plant tissue permits the detection of said protein; (B) permitting hybridization between the marker nucleic acid molecule and the complementary nucleic acid molecule obtained from the plant cell or plant tissue; and (C) detecting the level or pattern of the complementary nucleic acid, wherein the detection of said complementary nucleic acid is predictive of the level or pattern of the protein synthesis.

[0045] The present invention also provides a method for determining a level or pattern of a protein in a plant cell or plant tissue which comprises assaying the concentration of a molecule, whose concentration is dependent upon the expression of a gene, the gene having a nucleic acid sequence which specifically hybridizes to a protein marker nucleic acid molecule, the molecule being present in a plant cell or plant tissue, in comparison to the concentration of that molecule present in a plant cell or plant tissue with a known level or pattern of said protein, wherein an assayed concentration of the molecule is compared to the assayed concentration of the molecule in a plant cell or plant tissue with a known level or pattern of said protein.

[0046] The present invention also provides a method of determining a mutation in a plant whose presence is predictive of a mutation affecting a level or pattern of a protein comprising the steps: (A) incubating, under conditions permitting nucleic acid hybridization, a marker nucleic acid, the marker nucleic acid selected from the group of marker nucleic acid molecules which specifically hybridize to a nucleic acid molecule consisting of the nucleic acid sequence selected from the group consisting of SEQ ID NO: 1 through SEQ ID NO: 11840 or complements thereof or fragments of either and a complementary nucleic acid molecule obtained from the plant, wherein nucleic acid hybridization between the marker nucleic acid molecule and the complementary nucleic acid molecule obtained from the plant permits the detection of a polymorphism whose presence is predictive of a mutation affecting the level or pattern of the protein in the plant; (B) permitting hybridization between the marker nucleic acid molecule and the complementary nucleic acid molecule obtained from the plant; and (C) detecting the presence of the polymorphism, wherein the detection of the polymorphism is predictive of the mutation.

[0047] The present invention also provides a method for determining a mutation in a plant whose presence is predictive of a mutation affecting the level or pattern of protein synthesis comprising the steps: (A) incubating under conditions permitting nucleic acid hybridization: a marker nucleic acid molecule, the marker nucleic acid molecule comprising a nucleic acid molecule that is linked to gene, the gene having a nucleic acid sequence which specifically hybridizes to a sequence selected from the group consisting of SEQ ID NO: 1 through SEQ ID NO:11840 and complements thereof, and a complementary nucleic acid molecule obtained from a plant tissue or plant cell of the plant, wherein nucleic acid hybridization between the marker nucleic acid molecule and the complementary nucleic acid molecule obtained from the plant permits the detection of a polymorphism whose presence is predictive of a mutation affecting said level or pattern of a protein synthesis in the plant; (B) permitting hybridization between said marker nucleic acid molecule and said complementary nucleic acid molecule obtained from said plant; and; (C) detecting the presence of the polymorphism, wherein the detection of the polymorphism is predictive of the mutation.

[0048] The present invention also provides a method for reducing expression of a protein in a plant cell, the method comprising: growing a transformed plant cell containing a nucleic acid molecule whose non-transcribed strand encodes a protein or fragment thereof, wherein the transcribed strand of said nucleic acid is complementary to a nucleic acid molecule that encodes the protein in said plant cell, and whereby the strand that is complementary to the nucleic acid molecule that encodes the protein reduces or depresses expression of the protein.

[0049] The present invention provides wheat nucleic acid molecules for use as molecular tags to isolate genetic regions (i.e. promoters and flanking sequences), isolate genes, map genes, and determine gene function. The present invention further provides wheat nucleic acid molecules for use in determining if genes are members of a particular gene family.

[0050] The present invention also provides a method of obtaining full length genes using wheat ESTs or complements thereof or fragments of either.

[0051] The present invention also provides a method of isolating promoters and flanking sequences using wheat ESTs or complements thereof or fragments of either.

[0052] The present invention also provides wheat ESTs or complements thereof or fragments of either for use in marker-assisted breeding programs.

[0053] The present invention also provides a method of identifying tissues comprising hybridizing nucleic acids from the tissue with wheat ESTs or complements thereof or fragments of either.

[0054] The present invention also provides a method for production of antibodies targeted against the proteins, peptides, or fragments produced by the disclosed or complements thereof or fragments of either.

[0055] The present invention also provides a method for the transformation and regeneration of plants comprising sequences hybridizable to the disclosed ESTs or complements thereof or fragments of either.

[0056] The present invention also provides a method of modifying plant protein expression by inserting in a chimeric gene sense or antisense constructs of the wheat ESTs.

### DETAILED DESCRIPTION OF THE INVENTION

Agents

[0057] (a) Nucleic Acid Molecules

[0058] Agents of the present invention include nucleic acid molecules and more specifically EST nucleic acid molecules or nucleic acid fragment molecules thereof. Fragment EST nucleic acid molecules may encode significant portion(s) of, or indeed most of, the EST nucleic acid molecule. Alternatively, the fragments may comprise smaller oligonucleotides (having from about 15 to about 250 nucleotide residues, and more preferably, about 15 to about 30 nucleotide residues).

[0059] A subset of the nucleic acid molecules of the present invention includes nucleic acid molecules that are marker molecules. Another subset of the nucleic acid molecules of the present invention include nucleic acid molecules that encode a protein or fragment thereof. Another subset of the nucleic acid molecules of the present invention are EST molecules.

[0060] The term “substantially purified”, as used herein, refers to a molecule separated from substantially all other molecules normally associated with it in its native state. More preferably a substantially purified molecule is the predominant species present in a preparation. A substantially purified molecule may be greater than 60% free, preferably 75% free, more preferably 90% free, and most preferably 95% free from the other molecules (exclusive of solvent) present in the natural mixture. The term “substantially purified” is not intended to encompass molecules present in their native state.

[0061] The agents of the present invention will preferably be “biologically active” with respect to either a structural attribute, such as the capacity of a nucleic acid to hybridize to another nucleic acid molecule, or the ability of a protein to be bound by antibody (or to compete with another molecule for such binding). Alternatively, such an attribute may be catalytic, and thus involve the capacity of the agent to mediate a chemical reaction or response.

[0062] The agents of the present invention may also be recombinant. As used herein, the term recombinant means any agent (e.g. DNA, peptide etc.), that is, or results, however indirect, from human manipulation of a nucleic acid molecule.

[0063] It is understood that the agents of the present invention may be labeled with reagents that facilitate detection of the agent (e.g. fluorescent labels (Prober, et al., Science 238:336-340 (1987); Albarella et al., EP 144914, chemical labels (Sheldon et al., U.S. Pat. No. 4,582,789; Albarella et al., U.S. Pat. No. 4,563,417, modified bases (Miyoshi et al., EP 119448, all of which are hereby incorporated by reference in their entirety).

[0064] It is further understood, that the present invention provides bacterial, viral, microbial, and plant cells comprising the agents of the present invention.

[0065] Nucleic acid molecules or fragment thereof of the present invention are capable of specifically hybridizing to other nucleic acid molecules under certain circumstances. As used herein, two nucleic acid molecules are said to be capable of specifically hybridizing to one another if the two molecules are capable of forming an anti-parallel, double-stranded nucleic acid structure. A nucleic acid molecule is said to be the “complement” of another nucleic acid molecule if they exhibit complete complementarity. As used herein, molecules are said to exhibit “complete complementarity” when every nucleotide of one of the molecules is complementary to a nucleotide of the other. Two molecules are said to be “minimally complementary” if they can hybridize to one another with sufficient stability to permit them to remain annealed to one another under at least conventional “low-stringency” conditions. Similarly, the molecules are said to be “complementary” if they can hybridize to one another with sufficient stability to permit them to remain annealed to one another under conventional “high-stringency” conditions. Conventional stringency conditions are described by Sambrook, et al., In: Molecular Cloning, A Laboratory Manual, 2nd Edition, Cold Spring Harbor Press, Cold Spring Harbor, N.Y. (1989), and by Haymes, et al. In: Nucleic Acid Hybridization, A Practical Approach, IRL Press, Washington, D.C. (1985), the entirety of which is herein incorporated by reference. Departures from complete complementarity are therefore permissible, as long as such departures do not completely preclude the capacity of the molecules to form a double-stranded structure. Thus, in order for an nucleic acid molecule or fragment of the present invention to serve as a primer or probe it need only be sufficiently complementary in sequence to be able to form a stable double-stranded structure under the particular solvent and salt concentrations employed.

[0066] Appropriate stringency conditions which promote DNA hybridization are, for example, 6.0× sodium chloride/sodium citrate (SSC) at about 45° C., followed by a wash of 2.0×SSC at 50° C., are known to those skilled in the art or can be found in Current Protocols in Molecular Biology, John Wiley & Sons, N.Y. (1989), 6.3.1-6.3.6. For example, the salt concentration in the wash step can be selected from a low stringency of about 2.0×SSC at 50° C. to a high stringency of about 0.2×SSC at 50° C. In addition, the temperature in the wash step can be increased from low stringency conditions at room temperature, about 22° C., to high stringency conditions at about 65° C. Both temperature and salt may be varied, or either the temperature or the salt concentration may be held constant while the other variable is changed.

[0067] In a preferred embodiment, a nucleic acid of the present invention will specifically hybridize to one or more of the nucleic acid molecules set forth in SEQ ID NO: 1 through SEQ ID NO: 11840 or complements thereof under moderately stringent conditions, for example, at about 2.0×SSC and about 65° C.

[0068] In a particularly preferred embodiment, a nucleic acid of the present invention will include those nucleic acid molecules that specifically hybridize to one or more of the nucleic acid molecules set forth in SEQ ID NO:1 through SEQ ID NO: 11840 or complements thereof under high stringency conditions.

[0069] In one aspect of the present invention, the nucleic acid molecules of the present invention have one or more of the nucleic acid sequences set forth in SEQ ID NO: 1 through SEQ ID NO:11840 or complements thereof. In another aspect of the present invention, one or more of the nucleic acid molecules of the present invention share between 100% and 90% sequence identity with one or more of the nucleic acid sequences set forth in SEQ ID NO: 1 through SEQ ID NO:11840 or complements thereof. In a further aspect of the present invention, one or more of the nucleic acid molecules of the present invention share between 100% and 95% sequence identity with one or more of the nucleic acid sequences set forth in SEQ ID NO: 1 through SEQ ID NO:11840 or complements thereof. In a more preferred aspect of the present invention, one or more of the nucleic acid molecules of the present invention share between 100% and 98% sequence identity with one or more of the nucleic acid sequences set forth in SEQ ID NO: 1 through SEQ ID NO:11840 or complements thereof. In an even more preferred aspect of the present invention, one or more of the nucleic acid molecules of the present invention share between 100% and 99% sequence identity with one or more of the sequences set forth in SEQ ID NO: 1 through SEQ ID NO:11840 or complements thereof. In a further, even more preferred aspect of the present invention, one or more of the nucleic acid molecules of the present invention exhibit 100% sequence identity with one or more nucleic acid molecules present within the cDNA libraries designated LIB29, LIB30, LIB31, LIB103 and LIB104 (Monsanto Company, St. Louis, Mo., United States of America).

[0070] In a preferred embodiment of the present invention, a wheat protein or fragment thereof of the present invention is a homologue of another plant protein. In another preferred embodiment of the present invention, a wheat protein or fragment thereof of the present invention is a homologue of a fungal protein. In another preferred embodiment of the present invention, a wheat protein or fragment thereof of the present invention is a homologue of mammalian protein. In another preferred embodiment of the present invention, a wheat protein or fragment thereof of the present invention is a homologue of a bacterial protein. In another preferred embodiment of the present invention, a wheat protein or fragment thereof of the present invention is a homologue of an algal protein. In another preferred embodiment of the present invention, a wheat protein or fragment thereof of the present invention is a homologue of a soybean protein. In another preferred embodiment of the present invention, a wheat protein or fragment thereof of the present invention is a homologue of a maize protein.

[0071] In a preferred embodiment of the present invention, the nucleic molecule of the present invention encodes a wheat protein or fragment thereof where a wheat protein or fragment thereof exhibits a BLAST probability score of greater than 1E-12, preferably a BLAST probability score of between about 1E-30 and about 1E-12, even more preferably a BLAST probability score of greater than 1E-30 with its homologue.

[0072] In another preferred embodiment of the present invention, the nucleic acid molecule encoding a wheat protein or fragment thereof exhibits a % identity with its homologue of between about 25% and about 40%, more preferably of between about 40 and about 70%, even more preferably of between about 70% and about 90% and even more preferably between about 90% and 99%. In another preferred embodiment, of the present invention, a wheat protein or fragment thereof exhibits a % identity with its homologue of 100%.

[0073] In a preferred embodiment of the present invention, the nucleic molecule of the present invention encodes a wheat protein or fragment thereof where the wheat protein exhibits a BLAST score of greater than 120, preferably a BLAST score of between about 1450 and about 120, even more preferably a BLAST score of greater than 1450 with its homologue.

[0074] Nucleic acid molecules of the present invention also include non-wheat homologues. Preferred non-wheat homologues are selected from the group consisting of alfalfa, Arabidopsis, barley, Brassica, broccoli, cabbage, citrus, cotton, garlic, oat, oilseed rape, onion, canola, flax, an ornamental plant, maize, pea, peanut, pepper, potato, rice, rye, sorghum, soybean, strawberry, sugarcane, sugarbeet, tomato, poplar, pine, fir, eucalyptus, apple, lettuce, lentils, grape, banana, tea, turf grasses, sunflower, oil palm and Phaseolus.

[0075] The degeneracy of the genetic code, which allows different nucleic acid sequences to code for the same protein or peptide, is known in the literature. (U.S. Pat. No. 4,757,006, the entirety of which is herein incorporated by reference).

[0076] In an aspect of the present invention, one or more of the nucleic acid molecules of the present invention differ in nucleic acid sequence from those encoding a wheat protein or fragment thereof in SEQ ID NO: 1 through SEQ ID NO: 11840 due to the degeneracy in the genetic code in that they encode the same protein but differ in nucleic acid sequence.

[0077] In another further aspect of the present invention, nucleic acid molecules of the present invention can comprise sequences, which differ from those encoding a protein or fragment thereof in SEQ ID NO: 1 through SEQ ID NO: 11840 due to fact that the different nucleic acid sequence encodes a protein having one or more conservative amino acid changes. It is understood that codons capable of coding for such conservative amino acid substitutions are known in the art.

[0078] It is well known in the art that one or more amino acids in a native sequence can be substituted with another amino acid(s), the charge and polarity of which are similar to that of the native amino acid, i.e., a conservative amino acid substitution, resulting in a silent change. Conserved substitutes for an amino acid within the native polypeptide sequence can be selected from other members of the class to which the naturally occurring amino acid belongs. Amino acids can be divided into the following four groups: (1) acidic amino acids, (2) basic amino acids, (3) neutral polar amino acids, and (4) neutral nonpolar amino acids. Representative amino acids within these various groups include, but are not limited to, (1) acidic (negatively charged) amino acids such as aspartic acid and glutamic acid; (2) basic (positively charged) amino acids such as arginine, histidine, and lysine; (3) neutral polar amino acids such as glycine, serine, threonine, cysteine, cystine, tyrosine, asparagine, and glutamine; and (4) neutral nonpolar (hydrophobic) amino acids such as alanine, leucine, isoleucine, valine, proline, phenylalanine, tryptophan, and methionine.

[0079] Conservative amino acid changes within the native polypeptides sequence can be made by substituting one amino acid within one of these groups with another amino acid within the same group. Biologically functional equivalents of the proteins or fragments thereof of the present invention can have 10 or fewer conservative amino acid changes, more preferably seven or fewer conservative amino acid changes, and most preferably five or fewer conservative amino acid changes. The encoding nucleotide sequence will thus have corresponding base substitutions, permitting it to encode biologically functional equivalent forms of the proteins or fragments of the present invention.

[0080] It is understood that certain amino acids may be substituted for other amino acids in a protein structure without appreciable loss of interactive binding capacity with structures such as, for example, antigent-binding regions of antibodies or binding sites on substrate molecules. Because it is the interactive capacity and nature of a protein that defines that protein's biological functional activity, certain amino acid sequence substitutions can be made in a protein sequence and, of course, its underlying DNA coding sequence and, nevertheless, obtain a protein with like properties. It is thus contemplated by the inventors that various changes may be made in the peptide sequences of the proteins or fragments of the present invention, or corresponding DNA sequences that encode said peptides, without appreciable loss of their biological utility or activity. It is understood that codons capable of coding for such amino acid changes are known in the art.

[0081] In making such changes, the hydropathic index of amino acids may be considered. The importance of the hydropathic amino acid index in conferring interactive biological function on a protein is generally understood in the art (Kyte and Doolittle, J. Mol. Biol. 157, 105-132 (1982), herein incorporated by reference in its entirety). It is accepted that the relative hydropathic character of the amino acid contributes to the secondary structure of the resultant protein, which in turn defines the interaction of the protein with other molecules, for example, enzymes, substrates, receptors, DNA, antibodies, antigens, and the like.

[0082] Each amino acid has been assigned a hydropathic index on the basis of its hydrophobicity and charge characteristics (Kyte and Doolittle, 1982); these are isoleucine (+4.5), valine (+4.2), leucine (+3.8), phenylalanine (+2.8), cysteine/cystine (+2.5), methionine (+1.9), alanine (+1.8), glycine (−0.4), threonine (−0.7), serine (−0.8), tryptophan (−0.9), tyrosine (−1.3), proline (−1.6), histidine (−3.2), glutamate (−3.5), glutamine (−3.5), aspartate (−3.5), asparagine (−3.5), lysine (−3.9), and arginine (−4.5).

[0083] In making such changes, the substitution of amino acids whose hydropathic indices are within ±2 is preferred, those which are within ±1 are particularly preferred, and those within ±0.5 are even more particularly preferred.

[0084] It is also understood in the art that the substitution of like amino acids can be made effectively on the basis of hydrophilicity. U.S. Pat. No. 4,554,101, incorporated herein by reference in its entirety, states that the greatest local average hydrophilicity of a protein, as govern by the hydrophilicity of its adjacent amino acids, correlates with a biological property of the protein.

[0085] As detailed in U.S. Pat. No. 4,554,101, the following hydrophilicity values have been assigned to amino acid residues: arginine (+3.0), lysine (+3.0), aspartate (+3.0±1), glutamate (+3.0±1), serine (+0.3), asparagine (+0.2), glutamine (+0.2), glycine (0), threonine (−0.4), proline (−0.5±1), alanine (−0.5), histidine (−0.5), cysteine (−1.0), methionine (−1.3), valine (−1.5), leucine (−1.8), isoleucine (−1.8), tyrosine (−2.3), phenylalanine (−2.5), and tryptophan (−3.4).

[0086] In making such changes, the substitution of amino acids whose hydrophilicity values are within ±2 is preferred, those which are within ±1 are particularly preferred, and those within ±0.5 are even more particularly preferred.

[0087] In a further aspect of the present invention, one or more of the nucleic acid molecules of the present invention differ in nucleic acid sequence from those encoding a wheat protein or fragment thereof set forth in SEQ ID NO: 1 through SEQ ID NO: 11840 or fragment thereof due to the fact that one or more codons encoding an amino acid has been substituted for a codon that encodes a nonessential substitution of the amino acid originally encoded.

[0088] One aspect of the present invention concerns markers that include nucleic acid molecules SEQ ID NO: 1 through SEQ ID NO: 11840 or complements thereof or fragments of either that can act as markers or other nucleic acid molecules of the present invention that can act as markers. Genetic markers of the present invention include “dominant” or “codominant” markers “Codominant markers” reveal the presence of two or more alleles (two per diploid individual) at a locus. “Dominant markers” reveal the presence of only a single allele per locus. The presence of the dominant marker phenotype (e.g., a band of DNA) is an indication that one allele is present in either the homozygous or heterozygous condition. The absence of the dominant marker phenotype (e.g. absence of a DNA band) is merely evidence that “some other” undefined allele is present. In the case of populations where individuals are predominantly homozygous and loci are predominately dimorphic, dominant and codominant markers can be equally valuable. As populations become more heterozygous and multi-allelic, codominant markers often become more informative of the genotype than dominant markers. Marker molecules can be, for example, capable of detecting polymorphisms such as single nucleotide polymorphisms (SNPs).

[0089] SNPs are single base changes in genomic DNA sequence. They occur at greater frequency and are spaced with a greater uniformity throughout a genome than other reported forms of polymorphism. The greater frequency and uniformity of SNPs means that there is greater probability that such a polymorphism will be found near or in a genetic locus of interest than would be the case for other polymorphisms. SNPs are located in protein-coding regions and noncoding regions of a genome. Some of these SNPs may result in defective or variant protein expression (e.g., as a results of mutations or defective splicing). Analysis (genotyping) of characterized SNPs can require only a plus/minus assay rather than a lengthy measurement, permitting easier automation.

[0090] SNPs can be characterized using any of a variety of methods. Such methods include the direct or indirect sequencing of the site, the use of restriction enzymes (Botstein et al., Am. J. Hum. Genet. 32:314-331 (1980), the entirety of which is herein incorporated reference; Konieczny and Ausubel, Plant J. 4:403-410 (1993), the entirety of which is herein incorporated by reference), enzymatic and chemical mismatch assays (Myers et al., Nature 313:495-498 (1985), the entirety of which is herein incorporated by reference), allele-specific PCR (Newton et al., Nucl. Acids Res. 17:2503-2516 (1989), the entirety of which is herein incorporated by reference; Wu et al., Proc. Natl. Acad. Sci. (U.S.A.) 86:2757-2760 (1989), the entirety of which is herein incorporated by reference), ligase chain reaction (Barany, Proc. Natl. Acad. Sci. (U.S.A.) 88:189-193 (1991), the entirety of which is herein incorporated by reference), single-strand conformation polymorphism analysis (Labrune et al., Am. J. Hum. Genet. 48: 1115-1120 (1991), the entirety of which is herein incorporated by reference), primer-directed nucleotide incorporation assays (Kuppuswami et al., Proc. Natl. Acad. Sci. USA 88:1143-1147 (1991), the entirety of which is herein incorporated by reference), dideoxy fingerprinting (Sarkar et al., Genomics 13:441-443 (1992), the entirety of which is herein incorporated by reference), solid-phase ELISA-based oligonucleotide ligation assays (Nikiforov et al., Nucl. Acids Res. 22:4167-4175 (1994), the entirety of which is herein incorporated by reference), oligonucleotide fluorescence-quenching assays (Livak et al., PCR Methods Appl. 4:357-362 (1995), the entirety of which is herein incorporated by reference), 5′-nuclease allele-specific hybridization TaqMan assay (Livak et al., Nature Genet. 9:341-342 (1995), the entirety of which is herein incorporated by reference), template-directed dye-terminator incorporation (TDI) assay (Chen and Kwok, Nucl. Acids Res. 25:347-353 (1997), the entirety of which is herein incorporated by reference), allele-specific molecular beacon assay (Tyagi et al., Nature Biotech. 16: 49-53 (1998), the entirety of which is herein incorporated by reference), PinPoint assay (Haff and Smirnov, Genome Res. 7: 378-388 (1997), the entirety of which is herein incorporated by reference) and dCAPS analysis (Neff et al., Plant J. 14:387-392 (1998), the entirety of which is herein incorporated by reference).

[0091] Additional markers, such as AFLP markers, RFLP markers and RAPD markers, can be utilized (Walton, Seed World 22-29 (July, 1993), the entirety of which is herein incorporated by reference; Burow and Blake, Molecular Dissection of Complex Traits, 13-29, Paterson (ed.), CRC Press, New York (1988), the entirety of which is herein incorporated by reference). DNA markers can be developed from nucleic acid molecules using restriction endonucleases, the PCR and/or DNA sequence information. RFLP markers result from single base changes or insertions/deletions. These codominant markers are highly abundant in plant genomes, have a medium level of polymorphism and are developed by a combination of restriction endonuclease digestion and Southern blotting hybridization. CAPS are similarly developed from restriction nuclease digestion but only of specific PCR products. These markers are also codominant, have a medium level of polymorphism and are highly abundant in the genome. The CAPS result from single base changes and insertions/deletions.

[0092] Another marker type, RAPDs, are developed from DNA amplification with random primers and result from single base changes and insertions/deletions in plant genomes. They are dominant markers with a medium level of polymorphisms and are highly abundant. AFLP markers require using the PCR on a subset of restriction fragments from extended adapter primers. These markers are both dominant and codominant are highly abundant in genomes and exhibit a medium level of polymorphism.

[0093] SSRs require DNA sequence information. These codominant markers result from repeat length changes, are highly polymorphic and do not exhibit as high a degree of abundance in the genome as CAPS, AFLPs and RAPDs, SNPs also require DNA sequence information. These codominant markers result from single base substitutions. They are highly abundant and exhibit a medium of polymorphism (Rafalski et al., In: Nonmammalian Genomic Analysis, Birren and Lai (ed.), Academic Press, San Diego, Calif., pp. 75-134 (1996), the entirety of which is herein incorporated by reference). It is understood that a nucleic acid molecule of the present invention may be used as a marker.

[0094] A PCR probe is a nucleic acid molecule capable of initiating a polymerase activity while in a double-stranded structure with another nucleic acid. Various methods for determining the structure of PCR probes and PCR techniques exist in the art. Computer generated searches using programs such as Primer3 (on the Worldwide web at genome.wi.mit.edu/cgi-bin/primer/primer3.cgi), STSPipeline (on the Worldwide web at genome.wi.mit.edu/cgi-bin/www-STS_Pipeline), or GeneUp (Pesole et al., BioTechniques 25:112-123 (1998) the entirety of which is herein incorporated by reference), for example, can be used to identify potential PCR primers.

[0095] It is understood that a fragment of one or more of the nucleic acid molecules of the present invention may be a probe and specifically a PCR probe.

[0096] (b) Protein and Peptide Molecules

[0097] A class of agents comprises one or more of the protein or peptide molecules encoded by SEQ ID NO: 1 through SEQ ID NO:11840 or one or more of the protein or fragment thereof or peptide molecules encoded by other nucleic acid agents of the present invention. As used herein, the term “protein molecule” or “peptide molecule” includes any molecule that comprises five or more amino acids. It is well know in the art that proteins may undergo modification, including post-translational modifications, such as, but not limited to, disulfide bond formation, glycosylation, phosphorylation, or oligomerization. Thus, as used herein, the term “protein molecule” or “peptide molecule” includes any protein molecule that is modified by any biological or non-biological process. The terms “amino acid” and “amino acids” refer to all naturally occurring L-amino acids. This definition is meant to include norleucine, ornithine, homocysteine, and homoserine.

[0098] One or more of the protein or fragment of peptide molecules may be produced via chemical synthesis, or more preferably, by expression in a suitable bacterial or eukaryotic host. Suitable methods for expression are described by Sambrook, et al., (In: Molecular Cloning, A Laboratory Manual, 2nd Edition, Cold Spring Harbor Press, Cold Spring Harbor, N.Y. (1989)), or similar texts.

[0099] A “protein fragment” is a peptide or polypeptide molecule whose amino acid sequence comprises a subset of the amino acid sequence of that protein. A protein or fragment thereof that comprises one or more additional peptide regions not derived from that protein is a “fusion” protein. Such molecules may be derivatized to contain carbohydrate or other moieties (such as keyhole limpet hemocyanin, etc.). Fusion protein or peptide molecule of the present invention are preferably produced via recombinant means.

[0100] Another class of agents comprise protein or peptide molecules encoded by SEQ ID NO: 1 through SEQ ID NO:11840 or complements thereof or, fragments or fusions thereof in which non-essential, or not relevant, amino acid residues have been added, replaced, or deleted. An example of such a homologue is the homologue protein of all non-wheat plant species, including but not limited to alfalfa, Arabidopsis, barley, Brassica, broccoli, cabbage, citrus, cotton, garlic, oat, oilseed rape, onion, canola, flax, maize, an ornamental plant, pea, peanut, pepper, potato, rice, rye, sorghum, soybean, strawberry, sugarcane, sugarbeet, tomato, poplar, pine, fir, eukalyptus, apple, lettuce, peas, lentils, grape, banana, tea, turf grasses, etc. Particularly preferred non-wheat plants to utilize for the isolation of homologues would include alfalfa, Arabidopsis, barley, cotton, corn, oat, oilseed rape, rice, canola, ornamentals, soybean, sugarcane, sugarbeet, tomato, potato, and turf grasses. Such a homologue can be obtained by any of a variety of methods. Most preferably, as indicated above, one or more of the disclosed sequences (SEQ ID NO: 1 through SEQ ID NO:11840 or complements thereof) will be used to define a pair of primers that may be used to isolate the homologue-encoding nucleic acid molecules from any desired species. Such molecules can be expressed to yield homologues by recombinant means.

[0101] (c) Antibodies

[0102] One aspect of the present invention concerns antibodies, single-chain antigen binding molecules, or other proteins that specifically bind to one or more of the protein or peptide molecules of the present invention and their homologues, fusions or fragments. Such antibodies may be used to quantitatively or qualitatively detect the protein or peptide molecules of the present invention. As used herein, an antibody or peptide is said to “specifically bind” to a protein or peptide molecule of the present invention if such binding is not competitively inhibited by the presence of non-related molecules.

[0103] Nucleic acid molecules that encode all or part of the protein of the present invention can be expressed, via recombinant means, to yield protein or peptides that can in turn be used to elicit antibodies that are capable of binding the expressed protein or peptide. Such antibodies may be used in immunoassays for that protein. Such protein-encoding molecules, or their fragments may be a “fusion” molecule (i.e., a part of a larger nucleic acid molecule) such that, upon expression, a fusion protein is produced. It is understood that any of the nucleic acid molecules of the present invention may be expressed, via recombinant means, to yield proteins or peptides encoded by these nucleic acid molecules.

[0104] The antibodies that specifically bind proteins and protein fragments of the present invention may be polyclonal or monoclonal, and may comprise intact immunoglobulins, or antigen binding portions of immunoglobulins (such as (F(ab′), F(ab′)₂) fragments, or single-chain immunoglobulins producible, for example, via recombinant means). It is understood that practitioners are familiar with the standard resource materials which describe specific conditions and procedures for the construction, manipulation and isolation of antibodies (see, for example, Harlow and Lane, In Antibodies: A Laboratory Manual, Cold Spring Harbor Press, Cold Spring Harbor, N.Y. (1988), the entirety of which is herein incorporated by reference).

[0105] Murine monoclonal antibodies are particularly preferred. BALB/c mice are preferred for this purpose, however, equivalent strains may also be used. The animals are preferably immunized with approximately 25 μg of purified protein (or fragment thereof) that has been emulsified a suitable adjuvant (such as TiterMax adjuvant (Vaxcel, Norcross, Ga.)). Immunization is preferably conducted at two intramuscular sites, one intraperitoneal site, and one subcutaneous site at the base of the tail. An additional i.v. injection of approximately 25 μg of antigen is preferably given in normal saline three weeks later. After approximately 11 days following the second injection, the mice may be bled and the blood screened for the presence of anti-protein or peptide antibodies. Preferably, a direct binding Enzyme-Linked Immunoassay (ELISA) is employed for this purpose.

[0106] More preferably, the mouse having the highest antibody titer is given a third i.v. injection of approximately 25 μg of the same protein or fragment. The splenic leukocytes from this animal may be recovered 3 days later, and are then permitted to fuse, most preferably, using polyethylene glycol, with cells of a suitable myeloma cell line (such as, for example, the P3X63Ag8.653 myeloma cell line). Hybridoma cells are selected by culturing the cells under “HAT” (hypoxanthine-aminopterin-thymine) selection for about one week. The resulting clones may then be screened for their capacity to produce monoclonal antibodies (“mAbs), preferably by direct ELISA.

[0107] In one embodiment, anti-protein or peptide monoclonal antibodies are isolated using a fusion of a protein, protein fragment, or peptide of the present invention, or conjugate of a protein, protein fragment, or peptide of the present invention, as immunogens. Thus, for example, a group of mice can be immunized using a fusion protein emulsified in Freund's complete adjuvant (e.g. approximately 50 μg of antigen per immunization). At three week intervals, an identical amount of antigen is emulsified in Freund's incomplete adjuvant and used to immunize the animals. Ten days following the third immunization, serum samples are taken and evaluated for the presence of antibody. If antibody titers are too low, a fourth booster can be employed. Polysera capable of binding the protein or peptide can also be obtained using this method.

[0108] In a preferred procedure for obtaining monoclonal antibodies, the spleens of the above-described immunized mice are removed, disrupted, and immune splenocytes are isolated over a ficoll gradient. The isolated splenocytes are fused, using polyethylene glycol with BALB/c-derived HGPRT (hypoxanthine guanine phosphoribosyl transferase) deficient P3x63xAg8.653 plasmacytoma cells. The fused cells are plated into 96-well microtiter plates and screened for hybridoma fusion cells by their capacity to grow in culture medium supplemented with hypothanthine, aminopterin and thymidine for approximately 2-3 weeks.

[0109] Hybridoma cells that arise from such incubation are preferably screened for their capacity to produce an immunoglobulin that binds to a protein of interest. An indirect ELISA may be used for this purpose. In brief, the supernatants of hybridomas are incubated in microtiter wells that contain immobilized protein. After washing, the titer of bound immunoglobulin can be determined using, for example, a goat anti-mouse antibody conjugated to horseradish peroxidase. After additional washing, the amount of immobilized enzyme is determined (for example through the use of a chromogenic substrate). Such screening is performed as quickly as possible after the identification of the hybridoma in order to ensure that a desired clone is not overgrown by non-secreting neighbors. Desirably, the fusion plates are screened several times since the rates of hybridoma growth vary. In a preferred sub-embodiment, a different antigenic form of immunogen may be used to screen the hybridoma. Thus, for example, the splenocytes may be immunized with one immunogen, but the resulting hybridomas can be screened using a different immunogen. It is understood that any of the protein or peptide molecules of the present invention may be used to raise antibodies.

[0110] As discussed below, such antibody molecules or their fragments may be used for diagnostic purposes. Where the antibodies are intended for diagnostic purposes, it may be desirable to derivatize them, for example with a ligand group (such as biotin) or a detectable marker group (such as a fluorescent group, a radioisotope or an enzyme).

[0111] The ability to produce antibodies that bind the protein or peptide molecules of the present invention permits the identification of mimetic compounds of those molecules. A “mimetic compound” is a compound that is not that compound, or a fragment of that compound, but which nonetheless exhibits an ability to specifically bind to antibodies directed against that compound.

[0112] It is understood that any of the agents of the present invention can be substantially purified and/or be biologically active and/or recombinant.

[0113] Uses of the Agents of the Invention

[0114] The nucleic acid molecules and fragments thereof of the present invention include those from Triticum aestivum spikelets, which are collected from plants at Feekes stage greater than 10 but before anthesis. The ESTs of the present invention can enable the acquisition of, including but not limited to, genes involved in floral development, reproduction, female production and development (ovary/ovule development, stigma development and style development), pollen production and development, seed production, glume development, lemma development, palea development, and pathogen resistance or susceptibility, therefore, the ESTs of the present invention will find great use in the isolation of a variety of agronomically significant genes, including but not limited to, non-regulatory genes and genes that regulate microsporogenesis, meiosis, cell cycle, signal transduction, cell-cell communication, carotenoids, floral biogenesis, embryogenesis, protein, amino acids, sterols, oils, minerals, isoflavones, saponins, vitamins, tocopherols, antinutrient components, carbohydrates, starch metabolism, and seed composition and function. Such genes are associated with plant growth, quality and yield, and could also serve as links in important developmental, metabolic, and catabolic pathways. Libraries from this tissue can enable the acquisition of a variety of agronomically significant genes involved in the synthesis and catabolism of commercially important traits. The ESTs of the present invention also can enable the acquisition of promoters and cis-regulatory elements which will be useful to express agronomically significant genes in these tissues and/or other tissues. The ESTs of the present invention also can enable the acquisition of molecular markers, which can be used in, including but not limited to, breeding schemes, genetic and molecular mapping, and cloning of agronomically significant genes.

[0115] The nucleic acid molecules and fragments thereof of the present invention include those from Triticum aestivum glumes, lemmas and paleas, which are collected from plants at Feekes stage greater than 10 but before anthesis. The ESTs of the present invention can enable the acquisition of genes, including but not limited to genes involved in floral development, glume development, lemma development, palea development, and pathogen resistance or suceptibility, therefore, the ESTs of the present invention will find great use in the isolation of a variety of agronomically significant genes, including but not limited to, non-regulatory genes and genes that regulate microsporogenesis, meiosis, cell cycle, signal transduction, cell-cell communication, carotenoids, floral biogenesis, embryogenesis, protein, amino acids, sterols, oils, minerals, isoflavones, saponins, vitamins, tocopherols, antinutrient components, carbohydrates, starch metabolism and seed composition and function. Such genes are associated with plant growth, quality and yield, and could also serve as links in important developmental, metabolic, and catabolic pathways. Libraries from this tissue can enable the acquisition of a variety of agronomically significant genes involved in the synthesis and catabolism of commercially important traits. The ESTs of the present invention also can enable the acquisition of promoters and cis-regulatory elements which will be useful to express agronomically significant genes in these tissues and/or other tissues. The ESTs of the present invention can enable the acquisition of molecular markers, which can be used in, including but not limited to, breeding schemes, genetic and molecular mapping, and cloning of agronomically significant genes.

[0116] The nucleic acid molecules and fragments, thereof, of the present invention, were isolated from floral reproductive tissues (stamens, gynoecium), which were harvested from Triticum aestivum plants at Feekes stage 8 and 9. Flower libraries can enable acquisition of, including but not limited to, genes that are involved in floral development, reproduction, female production and development (ovary/ovule development, stigma development and style development), pollen production and development, seed production, and pathogen resistance or suceptibility; therefore, the ESTs of the present invention will find great use in the isolation of a variety of agronomically significant genes, including but not limited to, non-regulatory genes and genes that regulate microsporogenesis, meiosis, cell cycle, signal transduction, cell-cell communication, carotenoids, floral biogenesis, embryogenesis, protein, amino acids, sterols, oils, minerals, isoflavones, saponins, vitamins, tocopherols, antinutrient components, carbohydrates, starch metabolism and seed composition and function. Such genes are associated with plant growth, quality, yield, and could also serve as links in important developmental, metabolic, and catabolic pathways. Libraries from this tissue can enable the acquisition of a variety of agronomically significant genes involved in the synthesis and catabolism of commercially important traits. The ESTs of the present invention also can enable the acquisition of promoters and cis-regulatory elements which will be useful to express agronomically significant genes in these tissues and/or other tissues. The ESTs of the present invention also can enable the acquisition of molecular markers, which can be used in, including but not limited to, breeding schemes, genetic and molecular mapping, and cloning of agronomically significant genes.

[0117] The nucleic acid molecules and fragments thereof of the present invention include those from Triticum aestivum 1-2 mm spikes, which are collected from plants at Feekes stage 4-5. The ESTs of the present invention can enable the acquisition of, including but not limited to genes involved in differentiation of floral parts and seeds, floral development, reproduction, female production and development (ovary/ovule development, stigma development and style development), pollen production and development, seed production, glume development, lemma development, palea development, and pathogen resistance or suceptibility, therefore, the ESTs of the present invention will find great use in the isolation of a variety of agronomically significant genes, including but not limited to, non-regulatory genes and genes that regulate microsporogenesis, meiosis, cell cycle, signal transduction, cell-cell communication, carotenoids, floral biogenesis, embryogenesis, protein, amino acids, sterols, oils, minerals, isoflavones, saponins, vitamins, tocopherols, antinutrient components, carbohydrates, starch metabolism and seed composition and function. Such genes are associated with plant growth, quality and yield, and could also serve as links in important developmental, metabolic, and catabolic pathways. Libraries from this tissue can enable the acquisition of a variety of agronomically significant genes involved in the synthesis and catabolism of commercially important traits. The ESTs of the present invention also can enable the acquisition of promoters and cis-regulatory elements which will be useful to express agronomically significant genes in these tissues and/or other tissues. The ESTs of the present invention also can enable the acquisition of molecular markers, which can be used in, including but not limited to, breeding schemes, genetic and molecular mapping, and cloning of agronomically significant genes.

[0118] The nucleic acid molecules and fragments thereof of the present invention include those from Triticum aestivum anthers, which are collected from plants at Feekes stage greater than 10 but before anthesis. The ESTs of the present invention can enable the acquisition of, including but not limited to genes involved in reproduction, pollen production and development, and pathogen resistance or susceptibility, therefore, the ESTs of the present invention will find great use in the isolation of a variety of agronomically significant genes, including but not limited to, non-regulatory genes and genes that regulate microsporogenesis, meiosis, cell cycle, signal transduction, cell-cell communication, carotenoids, floral biogenesis, embryogenesis, protein, amino acids, sterols, oils, minerals, isoflavones, saponins, vitamins, tocopherols, antinutrient components, carbohydrates, starch metabolism and seed composition and function. Such genes are associated with plant growth, quality and yield, and could also serve as links in important developmental, metabolic, and catabolic pathways. Libraries from this tissue can enable the acquisition of a variety of agronomically significant genes involved in the synthesis and catabolism of commercially important traits. The ESTs of the present invention also can enable the acquisition of promoters and cis-regulatory elements which will be useful to express agronomically significant genes in these tissues and/or other tissues. The ESTs of the present invention also can enable the acquisition of molecular markers, which can be used in, including but not limited to, breeding schemes, genetic and molecular mapping, and cloning of agronomically significant genes.

[0119] Nucleic acid molecules and fragments thereof of the present invention may be employed to obtain other nucleic acid molecules. Such molecules include the nucleic acid molecules of other plants or other organisms (e.g., alfalfa, rice, potato, cotton, oat, rye, barley, maize, wheat, Arabidopsis, Brassica, etc.) including the nucleic acid molecules that encode, in whole or in part, protein homologues of other plant species or other organisms, and sequences of genetic elements such as promoters and transcriptional regulatory elements. Such molecules can be readily obtained by using the above-described nucleic acid molecules or fragments thereof to screen cDNA or genomic libraries obtained from such plant species. Methods for forming such libraries are well known in the art. Such homologue molecules may differ in their nucleotide sequences from those found in one or more of SEQ ID NO:1 through SEQ ID NO:11840 or complements thereof because complete complementarity is not needed for stable hybridization. The nucleic acid molecules of the present invention therefore also include molecules that, although capable of specifically hybridizing with the nucleic acid molecules may lack “complete complementarity.”

[0120] Any of a variety of methods may be used to obtain one or more of the above-described nucleic acid molecules (Zamechik et al., Proc. Natl. Acad. Sci. (U.S.A.) 83:4143-4146 (1986), the entirety of which is herein incorporated by reference; Goodchild et al., Proc. Natl. Acad. Sci. (U.S.A.) 85:5507-5511 (1988), the entirety of which is herein incorporated by reference; Wickstrom et al., Proc. Natl. Acad. Sci. (U.S.A.) 85:1028-1032 (1988), the entirety of which is herein incorporated by reference; Holt, et al., Molec. Cell. Biol. 8:963-973 (1988), the entirety of which is herein incorporated by reference; Gerwirtz, et al., Science 242:1303-1306 (1988), the entirety of which is herein incorporated by reference; Anfossi, et al., Proc. Natl. Acad. Sci. (U.S.A.) 86:3379-3383 (1989), the entirety of which is herein incorporated by reference; Becker, et al., EMBO J. 8:3685-3691 (1989); the entirety of which is herein incorporated by reference). Automated nucleic acid synthesizers may be employed for this purpose. In lieu of such synthesis, the disclosed nucleic acid molecules may be used to define a pair of primers that can be used with the polymerase chain reaction (Mullis, et al., Cold Spring Harbor Symp. Quant. Biol. 51:263-273 (1986); Erlich et al., EP 50,424; EP 84,796, EP 258,017, EP 237,362; Mullis, EP 201,184; Mullis et al., U.S. Pat. No. 4,683,202; Erlich, U.S. Pat. No. 4,582,788; and Saiki, R. et al., U.S. Pat. No. 4,683,194, all of which are hereby incorporated by reference in their entirety) to amplify and obtain any desired nucleic acid molecule or fragment.

[0121] Promoter sequence(s) and other genetic elements including but not limited to transcriptional regulatory elements associated with one or more of the disclosed nucleic acid sequences can also be obtained using the disclosed nucleic acid sequences provided herein.

[0122] In one embodiment, such sequences are obtained by incubating EST nucleic acid molecules or preferably fragments thereof with members of genomic libraries (e.g. maize, soybean and wheat) and recovering clones that hybridize to the EST nucleic acid molecule or fragment thereof. In a second embodiment, methods of “chromosome walking,” or inverse PCR may be used to obtain such sequences (Frohman, et al., Proc. Natl. Acad. Sci. (U.S.A.) 85:8998-9002 (1988); Ohara, et al., Proc. Natl. Acad. Sci. (U.S.A.) 86: 5673-5677 (1989); Pang et al., Biotechniques, 22(6); 1046-1048 (1977); Huang et al., Methods Mol. Biol. 69: 89-96 (1977); Hartl et al., Methods Mol. Biol. 58: 293-301 (1996), all of which are hereby incorporated by reference in their entirety). In one embodiment, the disclosed nucleic acid molecules are used to identify cDNAs whose analogous genes contain promoters with desirable expression patterns. The nucleic acid molecules isolated from the library of the present invention are used to isolate promoters of tissue-enhanced, tissue-specific, developmentally- or environmentally-regulated expression profiles. Isolation and functional analysis of the 5′ flanking promoter sequences of these genes from genomic libraries, for example, using genomic screening methods and PCR techniques would result in the isolation of useful promoters and transcriptional regulatory elements. These methods are known to those of skill in the art and have been described (See for example Birren et al., Genome Analysis:Analyzing DNA, 1, (1997), Cold Spring Harbor Laboratory Press, Cold Spring Harbor, N.Y., the entirety of which is herein incorporated by reference).

[0123] Promoters obtained utilizing the nucleic acid molecules of the present invention could also be modified to affect their control characteristics. Examples of such modifications would include but are not limited to enhancer sequences as reported by Kay et al., Science 236:1299 (1987), herein incorporated by reference in its entirety. Such genetic elements could be used to enhance gene expression of new and existing traits for crop improvements.

[0124] The nucleic acid molecules of the present invention may be used to isolate promoters of tissue enhanced tissue specific, cell-specific, cell-type, developmentally or environmentally regulated expression profiles. Isolation and functional analysis of the 5′ flanking promoter sequences of these genes from genomic libraries, for example, using genomic screening methods and PCR techniques would result in the isolation of useful promoters and transcriptional regulatory elements. These methods are known to those of skill in the art and have been described (See, for example, Birren et. al., Genome Analysis: Analyzing DNA, 1, Cold Spring Harbor Laboratory Press, Cold Spring Harbor, N.Y. (1997), the entirety of which is herein incorporated by reference). Promoters obtained utilizing the nucleic acid molecules of the present invention could also be modified to affect their control characteristics. Examples of such modifications would include but are not limited to enhancer sequences as reported by Kay, et al Science 236:1299 (1987), herein incorporated reference in its entirety. Such genetic elements could be used to enhance gene expression of new and existing traits for crop improvements.

[0125] In an aspect of the present invention, one or more of the nucleic molecules of the present invention are used to determine whether a plant (preferably wheat) has a mutation affecting the level (i.e., the concentration of mRNA in a sample, etc.) or pattern (i.e., the kinetics of expression, rate of decomposition, stability profile, etc.) of the expression encoded in part or whole by one or more of the nucleic acid molecules of the present invention (collectively, the “Expression Response” of a cell or tissue). As used herein, the Expression Response manifested by a cell or tissue is said to be “altered” if it differs from the Expression Response of cells or tissues of plants not exhibiting the phenotype. To determine whether a Expression Response is altered, the Expression Response manifested by the cell or tissue of the plant exhibiting the phenotype is compared with that of a similar cell or tissue sample of a plant not exhibiting the phenotype. As will be appreciated, it is not necessary to re-determine the Expression Response of the cell or tissue sample of plants not exhibiting the phenotype each time such a comparison is made; rather, the Expression Response of a particular plant may be compared with previously obtained values of normal plants. As used herein, the phenotype of the organism is any of one or more characteristics of an organism (e.g. disease resistance, pest tolerance, environmental tolerance, male sterility, yield, quality improvements, etc.). A change in genotype or phenotype may be transient or permanent. Also as used herein, a tissue sample is any sample that comprises more than one cell. In a preferred aspect, a tissue sample comprises cells that share a common characteristic (e.g. derived from leaf, root, or pollen etc).

[0126] In one sub-aspect, such an analysis is conducted by determining the presence and/or identity of polymorphism(s) by one or more of the nucleic acid molecules of the present invention and more specifically, one or more of the EST nucleic acid molecules or fragments thereof which are associated with phenotype, or a predisposition to phenotype.

[0127] Any of a variety of molecules can be used to identify such polymorphism(s). In one embodiment, one or more of the EST nucleic acid molecules (or a sub-fragment thereof) may be employed as a marker nucleic acid molecule to identify such polymorphism(s). Alternatively, such polymorphisms can be detected through the use of a marker nucleic acid molecule or a marker protein that is genetically linked to (i.e., a polynucleotide that co-segregates with) such polymorphism(s).

[0128] In an alternative embodiment, such polymorphisms can be detected through the use of a marker nucleic acid molecule that is physically linked to such polymorphism(s). For this purpose, marker nucleic acid molecules comprising a nucleotide sequence of a polynucleotide located within 1 mb of the polymorphism(s), and more preferably within 100 kb of the polymorphism(s), and most preferably within 10 kb of the polymorphism(s) can be employed.

[0129] The genomes of animals and plants naturally undergo spontaneous mutation in the course of their continuing evolution (Gusella, Ann. Rev. Biochem. 55:831-854 (1986)). A “polymorphism” is a variation or difference in the sequence of the gene or its flanking regions that arises in some of the members of a species. The variant sequence and the “original” sequence co-exist in the species' population. In some instances, such co-existence is in stable or quasi-stable equilibrium.

[0130] A polymorphism is thus said to be “allelic,” in that, due to the existence of the polymorphism, some members of a species may have the original sequence (i.e., the original “allele”) whereas other members may have the variant sequence (i.e., the variant “allele”). In the simplest case, only one variant sequence may exist, and the polymorphism is thus said to be di-allelic. In other cases, the species' population may contain multiple alleles, and the polymorphism is termed tri-allelic, etc. A single gene may have multiple different unrelated polymorphisms. For example, it may have a di-allelic polymorphism at one site, and a multi-allelic polymorphism at another site.

[0131] The variation that defines the polymorphism may range from a single nucleotide variation to the insertion or deletion of extended regions within a gene. In some cases, the DNA sequence variations are in regions of the genome that are characterized by short tandem repeats (STRs) that include tandem di- or tri-nucleotide repeated motifs of nucleotides. Polymorphisms characterized by such tandem repeats are referred to as “variable number tandem repeat” (“VNTR”) polymorphisms. VNTRs have been used in identity analysis (Weber, U.S. Pat. No. 5,075,217; Armour, et al., FEBS Lett. 307:113-115 (1992); Jones, et al., Eur. J. Haematol. 39:144-147 (1987); Horn, et al., PCT Application WO91/14003; Jeffreys, European Patent Application 370,719; Jeffreys, U.S. Pat. No. 5,699,082; Jeffreys. et al., Amer. J. Hum. Genet. 39:11-24 (1986); Jeffreys. et al., Nature 316:76-79 (1985); Gray, et al., Proc. R. Acad. Soc. Lond. 243:241-253 (1991); Moore, et al., Genomics 10:654-660 (1991); Jeffreys, et al., Anim. Genet. 18:1-15 (1987); Hillel, et al., Anim. Genet. 20:145-155 (1989); Hillel, et al., Genet. 124:783-789 (1990), all of which are herein incorporated by reference in their entirety).

[0132] The detection of polymorphic sites in a sample of DNA may be facilitated through the use of nucleic acid amplification methods. Such methods specifically increase the concentration of polynucleotides that span the polymorphic site, or include that site and sequences located either distal or proximal to it. Such amplified molecules can be readily detected by gel electrophoresis or other means.

[0133] The most preferred method of achieving such amplification employs the polymerase chain reaction (“PCR”) (Mullis, et al., Cold Spring Harbor Symp. Quant. Biol. 51:263-273 (1986); Erlich, et al., European Patent Appln. 50,424; European Patent Appln. 84,796, European Patent Application 258,017, European Patent Appln. 237,362; Mullis, European Patent Appln. 201,184; Mullis, et al., U.S. Pat. No. 4,683,202; Erlich., U.S. Pat. No. 4,582,788; and Saiki, et al., U.S. Pat. No. 4,683,194, all of which are herein incorporated by reference), using primer pairs that are capable of hybridizing to the proximal sequences that define a polymorphism in its double-stranded form.

[0134] In lieu of PCR, alternative methods, such as the “Ligase Chain Reaction” (“LCR”) may be used (Barany, Proc. Natl. Acad. Sci. (U.S.A.) 88:189-193 (1991), the entirety of which is herein incorporated by reference). LCR uses two pairs of oligonucleotide probes to exponentially amplify a specific target. The sequences of each pair of oligonucleotides is selected to permit the pair to hybridize to abutting sequences of the same strand of the target. Such hybridization forms a substrate for a template-dependent ligase. As with PCR, the resulting products thus serve as a template in subsequent cycles and an exponential amplification of the desired sequence is obtained.

[0135] LCR can be performed with oligonucleotides having the proximal and distal sequences of the same strand of a polymorphic site. In one embodiment, either oligonucleotide will be designed to include the actual polymorphic site of the polymorphism. In such an embodiment, the reaction conditions are selected such that the oligonucleotides can be ligated together only if the target molecule either contains or lacks the specific nucleotide that is complementary to the polymorphic site present on the oligonucleotide. Alternatively, the oligonucleotides may be selected such that they do not include the polymorphic site (see, Segev, PCT Application WO 90/01069, the entirety of which is herein incorporated by reference).

[0136] The “Oligonucleotide Ligation Assay” (“OLA”) may alternatively be employed (Landegren, et al., Science 241:1077-1080 (1988), the entirety of which is herein incorporated by reference). The OLA protocol uses two oligonucleotides which are designed to be capable of hybridizing to abutting sequences of a single strand of a target. OLA, like LCR, is particularly suited for the detection of point mutations. Unlike LCR, however, OLA results in “linear” rather than exponential amplification of the target sequence.

[0137] Nickerson, et al. have described a nucleic acid detection assay that combines attributes of PCR and OLA (Nickerson, et al., Proc. Natl. Acad. Sci. (U.S.A.) 87:8923-8927 (1990), the entirety of which is herein incorporated by reference). In this method, PCR is used to achieve the exponential amplification of target DNA, which is then detected using OLA. In addition to requiring multiple, and separate, processing steps, one problem associated with such combinations is that they inherit all of the problems associated with PCR and OLA.

[0138] Schemes based on ligation of two (or more) oligonucleotides in the presence of nucleic acid having the sequence of the resulting “di-oligonucleotide”, thereby amplifying the di-oligonucleotide, are also known (Wu, et al., Genomics 4:560 (1989), the entirety of which is herein incorporated by reference), and may be readily adapted to the purposes of the present invention.

[0139] Other known nucleic acid amplification procedures, such as allele-specific oligomers, branched DNA technology, transcription-based amplification systems, or isothermal amplification methods may also be used to amplify and analyze such polymorphisms (Malek, et al., U.S. Pat. No. 5,130,238; Davey, et al., European Patent Application 329,822; Schuster et al., U.S. Pat. No. 5,169,766; Miller, et al., PCT Application WO 89/06700; Kwoh, et al., Proc. Natl. Acad. Sci. (U.S.A.) 86:1173-1177 (1989); Gingeras, et al., PCT Application WO 88/10315; Walker, et al., Proc. Natl. Acad. Sci. (U.S.A.) 89:392-396 (1992), all of which are herein incorporated by reference in their entirety).

[0140] The identification of a polymorphism can be determined in a variety of ways. By correlating the presence or absence of it in a plant with the presence or absence of a phenotype, it is possible to predict the phenotype of that plant. If a polymorphism creates or destroys a restriction endonuclease cleavage site, or if it results in the loss or insertion of DNA (e.g., a VNTR polymorphism), it will alter the size or profile of the DNA fragments that are generated by digestion with that restriction endonuclease. As such, individuals that possess a variant sequence can be distinguished from those having the original sequence by restriction fragment analysis. Polymorphisms that can be identified in this manner are termed “restriction fragment length polymorphisms” (“RFLPs”). RFLPs have been widely used in human and plant genetic analyses (Glassberg, UK Patent Application 2135774; Skolnick, et al., Cytogen. Cell Genet. 32:58-67 (1982); Botstein, et al., Ann. J. Hum. Genet. 32:314-331 (1980); Fischer, et al. (PCT Application WO90/13668); Uhlen, PCT Application WO90/11369).

[0141] Polymorphisms can also be identified by Single Strand Conformation Polymorphism (SSCP) analysis. The SSCP technique is a method capable of identifying most sequence variations in a single strand of DNA, typically between 150 and 250 nucleotides in length (Elles, Methods in Molecular Medicine: Molecular Diagnosis of Genetic Diseases, Humana Press (1996), the entirety of which is herein incorporated by reference); Orita et al., Genomics 5: 874-879 (1989), the entirety of which is herein incorporated by reference). Under denaturing conditions a single strand of DNA will adopt a conformation that is uniquely dependent on its sequence conformation. This conformation usually will be different, even if only a single base is changed. Most conformations have been reported to alter the physical configuration or size sufficiently to be detectable by electrophoresis. A number of protocols have been described for SSCP including, but not limited to Lee et al., Anal. Biochem. 205: 289-293 (1992), the entirety of which is herein incorporated by reference; Suzuki et al., Anal. Biochem. 192: 82-84 (1991), the entirety of which is herein incorporated by reference; Lo et al., Nucleic Acids Research 20: 1005-1009 (1992), the entirety of which is herein incorporated by reference; Sarkar et al., Genomics 13: 441-443 (1992), the entirety of which is herein incorporated by reference). It is understood that one or more of the nucleic acids of the present invention, may be utilized as markers or probes to detect polymorphisms by SSCP analysis.

[0142] Polymorphisms may also be found using a DNA fingerprinting technique called amplified fragment length polymorphism (AFLP), which is based on the selective PCR amplification of restriction fragments from a total digest of genomic DNA to profile that DNA. Vos, et al., Nucleic Acids Res. 23:4407-4414 (1995), the entirety of which is herein incorporated by reference. This method allows for the specific co-amplification of high numbers of restriction fragments, which can be visualized by PCR without knowledge of the nucleic acid sequence.

[0143] AFLP employs basically three steps. Initially, a sample of genomic DNA is cut with restriction enzymes and oligonucleotide adapters are ligated to the restriction fragments of the DNA. The restriction fragments are then amplified using PCR by using the adapter and restriction sequence as target sites for primer annealing. The selective amplification is achieved by the use of primers that extend into the restriction fragments, amplifying only those fragments in which the primer extensions match the nucleotide flanking the restriction sites. These amplified fragments are then visualized on a denaturing polyacrylamide gel.

[0144] AFLP analysis has been performed on Salix (Beismann, et al., Mol. Ecol. 6:989-993 (1997), the entirety of which is herein incorporated by reference); Acinetobacter (Janssen, et al., Int. J. Syst. Bacteriol 47:1179-1187 (1997), the entirety of which is herein incorporated by reference), Aeromonas popoffi (Huys, et al., Int. J. Syst. Bacteriol. 47:1165-1171 (1997), the entirety of which is herein incorporated by reference), rice (McCouch, et al., Plant Mol. Biol. 35:89-99 (1997), the entirety of which is herein incorporated by reference); Nandi, et al., Mol. Gen. Genet. 255:1-8 (1997); Cho, et al., Genome 39:373-378 (1996), herein incorporated by reference), barley (Hordeum vulgare)(Simons, et al., Genomics 44:61-70 (1997), the entirety of which is herein incorporated by reference; Waugh, et al., Mol. Gen. Genet. 255:311-321 (1997), the entirety of which is herein incorporated by reference; Qi, et al., Mol. Gen Genet. 254:330-336 (1997), the entirety of which is herein incorporated by reference; Becker, et al., Mol. Gen. Genet. 249:65-73 (1995), the entirety of which is herein incorporated by reference), potato (Van der Voort, et al., Mol. Gen. Genet. 255:438-447 (1997), the entirety of which is herein incorporated by reference; Meksem, et al., Mol. Gen. Genet. 249:74-81 (1995), the entirety of which is herein incorporated by reference), Phytophthora infestans (Van der Lee, et al., Fungal Genet. Biol. 21:278-291 (1997), the entirety of which is herein incorporated by reference), Bacillus anthracis (Keim, et al., J. Bacteriol. 179:818-824 (1997)), Astragalus cremnophylax (Travis, et al., Mol. Ecol. 5:735-745 (1996), the entirety of which is herein incorporated by reference), Arabidopsis (Cnops, et al., Mol. Gen. Genet. 253:32-41 (1996), the entirety of which is herein incorporated by reference), Escherichia coli (Lin, et al., Nucleic Acids Res. 24:3649-3650 (1996), the entirety of which is herein incorporated by reference), Aeromonas (Huys, et al., Int. J. Syst. Bacteriol. 46:572-580 (1996), the entirety of which is herein incorporated by reference), nematode (Folkertsma, et al., Mol. Plant Microbe Interact. 9:47-54 (1996), the entirety of which is herein incorporated by reference), tomato (Thomas, et al., Plant J. 8:785-794 (1995), the entirety of which is herein incorporated by reference), and human (Latorra, et al., PCR Methods Appl. 3:351-358 (1994)). AFLP analysis has also been used for fingerprinting mRNA (Money, et al., Nucleic Acids Res. 24:2616-2617 (1996), the entirety of which is herein incorporated by reference; Bachem, et al., Plant J. 9:745-753 (1996), the entirety of which is herein incorporated by reference). It is understood that one or more of the nucleic acids of the present invention, may be utilized as markers or probes to detect polymorphisms by AFLP analysis for fingerprinting mRNA.

[0145] Polymorphisms may also be found using random amplified polymorphic DNA (RAPD) (Williams et al., Nucl. Acids Res. 18: 6531-6535 (1990), the entirety of which is herein incorporated by reference) and cleaveable amplified polymorphic sequences (CAPS) (Lyamichev et al., Science 260: 778-783 (1993), the entirety of which is herein incorporated by reference). It is understood that one or more of the nucleic acids of the present invention, may be utilized as markers or probes to detect polymorphisms by RAPD or CAPS analysis.

[0146] Polymorphisms are useful, through linkage analysis, to define the genetic distances or physical distances between polymorphic traits. A physical map or ordered array of genomic DNA fragments in the desired region containing the gene may be used to characterize and isolate genes corresponding to desirable traits. For this purpose, yeast artificial chromosomes (YACs), bacterial artificial chromosomes (BACs), and cosmids are appropriate vectors for cloning large segments of DNA molecules. Although fewer clones are needed to make a contig for a specific genomic region by using YACs (Agyare et al., Genome Res. 7: 1-9 (1997), the entirety of which is herein incorporated by reference; James et al., Genomics 32: 425-430 (1996), the entirety of which is herein incorporated by reference), chimerism in the inserted DNA fragment can arise. Cosmids are convenient for handling smaller-size DNA molecules and may be used for transformation in developing transgenic plants. BACs also carry DNA fragments and are less prone to chimerism.

[0147] Through genetic mapping, a fine scale linkage map can be developed using DNA markers and, then, a genomic DNA library of large-sized fragments can be screened with molecular markers linked to the desired trait. Molecular markers are advantageous for agronomic traits that are otherwise difficult to tag, such as resistance to pathogens, insects and nematodes, tolerance to abiotic stress, quality parameters and quantitative traits such as high yield potential.

[0148] The essential requirements for marker-assisted selection in a plant breeding program are: (1) the marker(s) should co-segregate or be closely linked with the desired trait; (2) an efficient means of screening large populations for the molecular marker(s) should be available; and (3) the screening technique should have high reproducibility across laboratories and preferably be economical to use and be user-friendly.

[0149] The genetic linkage of marker molecules can be established by a gene mapping model such as, without limitation, the flanking marker model reported by Lander and Botstein, Genetics 121:185-199 (1989) and the interval mapping, based on maximum likelihood methods described by Lander and Botstein, Genetics 121:185-199 (1989) and implemented in the software package MAPMAKER/QTL (Lincoln and Lander, Mapping Genes Controlling Quantitative Traits Using MAPMAKER/QTL, Whitehead Institute for Biomedical Research, Massachusetts, (1990). Additional software includes Qgene, Version 2.23 (1996), Department of Plant Breeding and Biometry, 266 Emerson Hall, Cornell University, Ithaca, N.Y., the manual of which is herein incorporated by reference in its entirety). Use of Qgene software is a particularly preferred approach.

[0150] A maximum likelihood estimate (MLE) for the presence of a marker is calculated, together with an MLE assuming no QTL effect, to avoid false positives. A log₁₀ of an odds ratio (LOD) is then calculated as: LOD=log₁₀ (MLE for the presence of a QTL/MLE given no linked QTL).

[0151] The LOD score essentially indicates how much more likely the data are to have arisen assuming the presence of a QTL than in its absence. The LOD threshold value for avoiding a false positive with a given confidence, say 95%, depends on the number of markers and the length of the genome. Graphs indicating LOD thresholds are set forth in Lander and Botstein, Genetics 121:185-199 (1989) the entirety of which is herein incorporated by reference and further described by Arús and Moreno-González, Plant Breeding, Hayward et al., (eds.) Chapman & Hall, London, pp. 314-331 (1993), the entirety of which is herein incorporated by reference.

[0152] Additional models can be used. Many modifications and alternative approaches to interval mapping have been reported, including the use of non-parametric methods (Kruglyak and Lander, Genetics 139:1421-1428 (1995), the entirety of which is herein incorporated by reference). Multiple regression methods or models can be also be used, in which the trait is regressed on a large number of markers (Jansen, Biometrics in Plant Breeding, van Oijen and Jansen (eds.), Proceedings of the Ninth Meeting of the Eucarpia Section Biometrics in Plant Breeding, The Netherlands, pp. 116-124 (1994); Weber and Wricke, Advances in Plant Breeding, Blackwell, Berlin, 16 (1994), both of which is herein incorporated by reference in their entirety). Procedures combining interval mapping with regression analysis, whereby the phenotype is regressed onto a single putative QTL at a given marker interval and at the same time onto a number of markers that serve as ‘cofactors,’ have been reported by Jansen and Stam, Genetics 136:1447-1455 (1994), the entirety of which is herein incorporated by reference and Zeng, Genetics 136:1457-1468 (1994) the entirety of which is herein incorporated by reference. Generally, the use of cofactors reduces the bias and sampling error of the estimated QTL positions (Utz and Melchinger, Biometrics in Plant Breeding, van Oijen and Jansen (eds.) Proceedings of the Ninth Meeting of the Eucarpia Section Biometrics in Plant Breeding, The Netherlands, pp.195-204 (1994), the entirety of which is herein incorporated by reference, thereby improving the precision and efficiency of QTL mapping (Zeng, Genetics 136:1457-1468 (1994)). These models can be extended to multi-environment experiments to analyze genotype-environment interactions (Jansen et al., Theo. Appl. Genet. 91:33-37 (1995), the entirety of which is herein incorporated by reference).

[0153] Selection of an appropriate mapping population is important to map construction. The choice of an appropriate mapping population depends on the type of marker systems employed (Tanksley et al., Molecular mapping plant chromosomes. Chromosome structure and function: Impact of new concepts, Gustafson and Appels (eds.), Plenum Press, New York, pp 157-173 (1988), the entirety of which is herein incorporated by reference). Consideration must be given to the source of parents (adapted vs. exotic) used in the mapping population. Chromosome pairing and recombination rates can be severely disturbed (suppressed) in wide crosses (adapted x exotic) and generally yield greatly reduced linkage distances. Wide crosses will usually provide segregating populations with a relatively large array of polymorphisms when compared to progeny in a narrow cross (adapted x adapted).

[0154] An F₂ population is the first generation of selfing after the hybrid seed is produced. Usually a single F₁ plant is selfed to generate a population segregating for all the genes in Mendelian (1:2:1) fashion. Maximum genetic information is obtained from a completely classified F₂ population using a codominant marker system (Mather, Measurement of Linkage in Heredity, Methuen and Co., (1938), the entirety of which is herein incorporated by reference). In the case of dominant markers, progeny tests (e.g. F₃, BCF₂) are required to identify the heterozygotes, thus making it equivalent to a completely classified F₂ population. However, this procedure is often prohibitive because of the cost and time involved in progeny testing. Progeny testing of F₂ individuals is often used in map construction where phenotypes do not consistently reflect genotype (e.g. disease resistance) or where trait expression is controlled by a QTL. Segregation data from progeny test populations (e.g. F₃ or BCF₂) can be used in map construction. Marker-assisted selection can then be applied to cross progeny based on marker-trait map associations (F₂, F₃), where linkage groups have not been completely disassociated by recombination events (i.e., maximum disequillibrium).

[0155] Recombinant inbred lines (RIL) (genetically related lines; usually >F₅, developed from continuously selfing F₂ lines towards homozygosity) can be used as a mapping population. Information obtained from dominant markers can be maximized by using RIL because all loci are homozygous or nearly so. Under conditions of tight linkage (i.e., about <10% recombination), dominant and co-dominant markers evaluated in RIL populations provide more information per individual than either marker type in backcross populations (Reiter et al., Proc. Natl. Acad. Sci. (U.S.A.) 89:1477-1481 (1992), the entirety of which is herein incorporated by reference). However, as the distance between markers becomes larger (i.e., loci become more independent), the information in RIL populations decreases dramatically when compared to codominant markers.

[0156] Backcross populations (e.g., generated from a cross between a successful variety (recurrent parent) and another variety (donor parent) carrying a trait not present in the former) can be utilized as a mapping population. A series of backcrosses to the recurrent parent can be made to recover most of its desirable traits. Thus a population is created consisting of individuals nearly like the recurrent parent but each individual carries varying amounts or mosaic of genomic regions from the donor parent. Backcross populations can be useful for mapping dominant markers if all loci in the recurrent parent are homozygous and the donor and recurrent parent have contrasting polymorphic marker alleles (Reiter et al., Proc. Natl. Acad. Sci. (U.S.A.) 89:1477-1481 (1992)). Information obtained from backcross populations using either codominant or dominant markers is less than that obtained from F₂ populations because one, rather than two, recombinant gametes are sampled per plant. Backcross populations, however, are more informative (at low marker saturation) when compared to RILs as the distance between linked loci increases in RIL populations (i.e. about 15% recombination). Increased recombination can be beneficial for resolution of tight linkages, but may be undesirable in the construction of maps with low marker saturation.

[0157] Near-isogenic lines (NIL) created by many backcrosses to produce an array of individuals that are nearly identical in genetic composition except for the trait or genomic region under interrogation can be used as a mapping population. In mapping with NILs, only a portion of the polymorphic loci are expected to map to a selected region.

[0158] Bulk segregant analysis (BSA) is a method developed for the rapid identification of linkage between markers and traits of interest (Michelmore et al., Proc. Natl. Acad. Sci. (U.S.A.) 88:9828-9832 (1991), the entirety of which is herein incorporated by reference). In BSA, two bulked DNA samples are drawn from a segregating population originating from a single cross. These bulks contain individuals that are identical for a particular trait (resistant or susceptible to particular disease) or genomic region but arbitrary at unlinked regions (i.e. heterozygous). Regions unlinked to the target region will not differ between the bulked samples of many individuals in BSA.

[0159] It is understood that one or more of the nucleic acid molecules of the present invention may be used as molecular markers. It is also understood that one or more of the protein molecules of the present invention may be used as molecular markers.

[0160] In accordance with this aspect of the present invention, a sample nucleic acid is obtained from plants cells or tissues. Any source of nucleic acid may be used. Preferably, the nucleic acid is genomic DNA. The nucleic acid is subjected to restriction endonuclease digestion. For example, one or more EST nucleic acid molecule or fragment thereof can be used as a probe in accordance with the above-described polymorphic methods. The polymorphism obtained in this approach can then be cloned to identify the mutation at the coding region which alters the protein's structure or regulatory region of the gene which affects its expression level.

[0161] In one aspect of the present invention, an evaluation can be conducted to determine whether a particular mRNA molecule is present. One or more of the nucleic acid molecules of the present invention, preferably one or more of the EST nucleic acid molecules of the present invention are utilized to detect the presence or quantity of the mRNA species. Such molecules are then incubated with cell or tissue extracts of a plant under conditions sufficient to permit nucleic acid hybridization. The detection of double-stranded probe-mRNA hybrid molecules is indicative of the presence of the mRNA; the amount of such hybrid formed is proportional to the amount of mRNA. Thus, such probes may be used to ascertain the level and extent of the mRNA production in a plant's cells or tissues. Such nucleic acid hybridization may be conducted under quantitative conditions (thereby providing a numerical value of the amount of the mRNA present). Alternatively, the assay may be conducted as a qualitative assay that indicates either that the mRNA is present, or that its level exceeds a user set, predefined value.

[0162] A principle of in situ hybridization is that a labeled, single-stranded nucleic acid probe will hybridize to a complementary strand of cellular DNA or RNA and, under the appropriate conditions, these molecules will form a stable hybrid. When nucleic acid hybridization is combined with histological techniques, specific DNA or RNA sequences can be identified within a single cell. An advantage of in situ hybridization over more conventional techniques for the detection of nucleic acids is that it allows an investigator to determine the precise spatial population (Angerer et al., Dev. Biol. 101: 477-484 (1984), the entirety of which is herein incorporated by reference; Angerer et al., Dev. Biol. 112: 157-166 (1985), the entirety of which is herein incorporated by reference; Dixon et al., EMBO J. 10: 1317-1324 (1991), the entirety of which is herein incorporated by reference). In situ hybridization may be used to measure the steady-state level of RNA accumulation. It is a sensitive technique and RNA sequences present in as few as 5-10 copies per cell can be detected (Hardin et al., J. Mol. Biol. 202: 417-431.(1989), the entirety of which is herein incorporated by reference). A number of protocols have been devised for in situ hybridization, each with tissue preparation, hybridization, and washing conditions (Meyerowitz, Plant Mol. Biol. Rep. 5: 242-250 (1987), the entirety of which is herein incorporated by reference; Cox and Goldberg, In: Plant Molecular Biology: A Practical Approach (ed. C. H. Shaw), pp. 1-35. IRL Press, Oxford (1988), the entirety of which is herein incorporated by reference; Raikhel et al., In situ RNA hybridization in plant tissues. In Plant Molecular Biology Manual, vol. B9: 1-32. Kluwer Academic Publisher, Dordrecht, Belgium (1989), the entirety of which is herein incorporated by reference).

[0163] In situ hybridization also allows for the localization of proteins within a tissue or cell (Wilkinson, In Situ Hybridization, Oxford University Press, Oxford (1992), the entirety of which is herein incorporated by reference; Langdale, In Situ Hybridization 165-179 In: The Maize Handbook, eds. Freeling and Walbot, Springer-Verlag, New York (1994), the entirety of which is herein incorporated by reference). It is understood that one or more of the molecules of the present invention, preferably one or more of the EST nucleic acid molecules of the present invention or one or more of the antibodies of the present invention may be utilized to detect the level or pattern of a protein or fragment thereof by in situ hybridization.

[0164] Fluorescent in situ hybridization also enables the localization of a particular DNA sequence along a chromosome which is useful, among other uses, for gene mapping, following chromosomes in hybrid lines or detecting chromosomes with translocations, transversions or deletions. In situ hybridization has been used to identify chromosomes in several plant species (Griffor et al., Plant Mol. Biol. 17: 101-109 (1991), the entirety of which is herein incorporated by reference; Gustafson et al., Proc. Nat'l. Acad. Sci. (U.S.A.). 87: 1899-1902 (1990), herein incorporated by reference; Mukai and Gill, Genome 34: 448-452. (1991); Schwarzacher and Heslop-Harrison, Genome 34: 317-323 (1991); Wang et al., Jpn. J. Genet. 66: 313-316 (1991), the entirety of which is herein incorporated by reference; Parra and Windle, Nature Genetics, 5: 17-21 (1993), the entirety of which is herein incorporated by reference). It is understood that the nucleic acid molecules of the present invention may be used as probes or markers to localize sequences along a chromosome.

[0165] It is also understood that one or more of the molecules of the present invention, preferably one or more of the EST nucleic acid molecules of the present invention or one or more of the antibodies of the present invention may be utilized to detect the expression level or pattern of a protein or mRNA thereof by in situ hybridization.

[0166] Another method to localize the expression of a molecule is tissue printing. Tissue printing provides a way to screen, at the same time on the same membrane many tissue sections from different plants or different developmental stages. Tissue-printing procedures utilize films designed to immobilize proteins and nucleic acids. In essence, a freshly cut section of an organ is pressed gently onto nitrocellulose paper, nylon membrane or polyvinylidene difluoride membrane. Such membranes are commercially available (e.g. Millipore, Bedford, Mass.). The contents of the cut cell transfer onto the membrane, and the molecules are immobilized to the membrane. The immobilized molecules form a latent print that can be visualized with appropriate probes. When a plant tissue print is made on nitrocellulose paper, the cell walls leave a physical print that makes the anatomy visible without further treatment (Varner and Taylor, Plant Physiol. 91: 31-33 (1989), the entirety of which is herein incorporated by reference).

[0167] Tissue printing on substrate films is described by Daoust, Exp. Cell Res. 12: 203-211 (1957), the entirety of which is herein incorporated by reference, who detected amylase, protease, ribonuclease, and deoxyribonuclease in animal tissues using starch, gelatin, and agar films. These techniques can be applied to plant tissues (Yomo and Taylor, Planta 112:35-43 (1973); Harris and Chrispeels, Plant Physiol. 56: 292-299 (1975). Advances in membrane technology have increased the range of applications of Daoust's tissue-printing techniques allowing (Cassab and Varner, J. Cell. Biol. 105: 2581-2588 (1987), the entirety of which is herein incorporated by reference; the histochemical localization of various plant enzymes and deoxyribonuclease on nitrocellulose paper and nylon (Spruce et al., Phytochemistry, 26: 2901-2903 (1987), the entirety of which is herein incorporated by reference; Barres et al. Neuron 5: 527-544 (1990), the entirety of which is herein incorporated by reference; the entirety of which is herein incorporated by reference; Reid and Pont-Lezica, Tissue Printing: Tools for the Study of Anatomy, Histochemistry, and Gene Expression, Academic Press, New York, N.Y. (1992), the entirety of which is herein incorporated by reference; Reid et al. Plant Physiol. 93: 160-165 (1990), herein incorporate by reference; Ye et al. Plant J. 1: 175-183 (1991), the entirety of which is herein incorporated by reference).

[0168] It is understood that one or more of the molecules of the present invention, preferably one or more of the EST nucleic acid molecules of the present invention or one or more of the antibodies of the present invention may be utilized to detect the presence or quantity of a protein by tissue printing.

[0169] Further, it is also understood that any of the nucleic acid molecules of the present invention may be used as marker nucleic acids and or probes in connection with methods that require probes or marker nucleic acids. As used herein, a probe is an agent that is utilized to determine an attribute or feature (e.g. presence or absence, location, correlation, etc.) or a molecule, cell, tissue or plant. As used herein, a marker nucleic acid is a nucleic acid molecule that is utilized to determine an attribute or feature (e.g., presence or absence, location, correlation, etc.) or a molecule, cell, tissue or plant.

[0170] A microarray-based method for high-throughput monitoring of plant gene expression may be utilized to measure gene-specific hybridization targets. This ‘chip’-based approach involves using microarrays of nucleic acid molecules as gene-specific hybridization targets to quantitatively measure expression of the corresponding plant genes (Schena et al., Science 270: 467-470 (1995), the entirety of which is herein incorporated by reference; Shalon, Ph.D. Thesis. Stanford University (1996), the entirety of which is herein incorporated by reference). Every nucleotide in a large sequence can be queried at the same time. Hybridization can be used to efficiently analyze large amounts of nucleotide sequence.

[0171] Several microarray methods have been described. One method compares the sequences to be analyzed by hybridization to a set of oligonucleotides representing all possible subsequences (Bains and Smith, J. Theor. Biol. 135: 303 (1989), the entirety of which is herein incorporated by reference). A second method hybridizes the sample to an array of oligonucleotide probes. An array consisting of oligonucleotides complementary to subsequences of a target sequence can be used to determine the identity of a target sequence, measure its amount, and detect differences between the target and a reference sequence. Nucleic acid molecules microarrays may also be screened with protein molecules or fragments thereof to determine nucleic acid molecules that specifically bind protein molecules or fragments thereof.

[0172] The microarray approach may be used with polypeptide targets (U.S. Pat. No. 5,445,934; U.S. Pat. No: 5,143,854; U.S. Pat. No. 5,079,600; U.S. Pat. No. 4,923,901, all of which are herein incorporated by reference in their entirety). Essentially, polypeptides are synthesized on a substrate (microarray) and these polypeptides can be screened with either protein molecules or fragments thereof or nucleic acid molecules in order to screen for either protein molecules or fragments thereof or nucleic acid molecules that specifically bind the target polypeptides. Implementation of these techniques rely on recently developed combinatorial technologies to generate any ordered array of a large number of oligonucleotide probes (Fodor et al., Science 251:767-773 (1991), the entirety of which is herein incorporated by reference).

[0173] It is understood that one or more of the molecules of the present invention, preferably one or more of the nucleic acid molecules or protein molecules or fragments thereof of the present invention may be utilized in a microarray based method.

[0174] In a preferred embodiment of the present invention microarrays may be prepared that comprise nucleic acid molecules where preferably at least 10%, preferably at least 25%, more preferably at least 50% and even more preferably at least 75%, 80%, 85%, 90% or 95% of the nucleic acid molecules located on that array are selected from the group of nucleic acid molecules that specifically hybridize to one or more nucleic acid molecule having a nucleic acid sequence selected from the group of SEQ ID NO: 1 through SEQ ID NO: 11840 or complement thereof or fragments of either.

[0175] A particular preferred microarray embodiment of the present invention is a microarray comprising nucleic acid molecules encoding genes or fragments thereof that are homologues of known genes or nucleic acid molecules that comprise genes or fragment thereof that elicit only limited or no matches to known genes. A further preferred microarray embodiment of the present invention is a microarray comprising nucleic acid molecules having genes or fragments thereof that are homologues of known genes and nucleic acid molecules that comprise genes or fragment thereof that elicit only limited or no matches to known genes. Site-directed mutagenesis may be utilized to modify nucleic acid sequences, particularly as it is a technique that allows one or more of the amino acids encoded by a nucleic acid molecule to be altered (e.g. a threonine to be replaced by a methionine). Three basic methods for site-directed mutagenesis are often employed. These are cassette mutagenesis (Wells et al., Gene 34:315-23 (1985), the entirety of which is herein incorporated by reference), primer extension (Gilliam et al., Gene 12:129-137 (1980), the entirety of which is herein incorporated by reference); Zoller and Smith, Methods Enzymol. 100:468-500 (1983), the entirety of which is herein incorporated by reference; and Dalbadie-McFarland et al., Proc. Natl. Acad. Sci. (U.S.A.) 79:6409-6413 (1982), the entirety of which is herein incorporated by reference) and methods based upon PCR (Scharf et al., Science 233:1076-1078 (1986), the entirety of which is herein incorporated by reference; Higuchi et al., Nucleic Acids Res. 16:7351-7367 (1988), the entirety of which is herein incorporated by reference). Site-directed mutagenesis approaches are also described in European Patent 0 385 962, the entirety of which is herein incorporated by reference, European Patent 0 359 472, the entirety of which is herein incorporated by reference, and PCT Patent Application WO 93/07278, the entirety of which is herein incorporated by reference.

[0176] Site-directed mutagenesis strategies have been applied to plants for both in vitro as well as in vivo site-directed mutagenesis (Lanz et al., J. Biol. Chem. 266:9971-6 (1991), the entirety of which is herein incorporated by reference; Kovgan and Zhdanov, Biotekhnologiya 5:148-154; No. 207160n, Chemical Abstracts 110:225 (1989), the entirety of which is herein incorporated by reference; Ge et al., Proc. Natl. Acad. Sci. (U.S.A.) 86:4037-4041 (1989), the entirety of which is herein incorporated by reference, Zhu et al., J. Biol. Chem. 271:18494-18498 (1996), Chu et al., Biochemistry 33:6150-6157 (1994), the entirety of which is herein incorporated by reference, Small et al., EMBO J. 11:1291-1296 (1992), the entirety of which is herein incorporated by reference, Cho et al., Mol. Biotechnol. 8:13-16 (1997), Kita et al., J. Biol. Chem. 271:26529-26535 (1996), the entirety of which is herein incorporated by reference, Jin et al., Mol. Microbiol. 7:555-562 (1993), the entirety of which is herein incorporated by reference, Hatfield and Vierstra, J. Biol. Chem. 267:14799-14803 (1992), the entirety of which is herein incorporated by reference, Zhao et al., Biochemistry 31:5093-5099 (1992), the entirety of which is herein incorporated by reference).

[0177] Any of the nucleic acid molecules of the present invention may either be modified by site-directed mutagenesis or used as, for example, nucleic acid molecules that are used to target other nucleic acid molecules for modification. It is understood that mutants with more than one altered nucleotide can be constructed using techniques that practitioners skilled in the art are familiar with such as isolating restriction fragments and ligating such fragments into an expression vector (see, for example, Sambrook et al., Molecular Cloning: A Laboratory Manual, Cold Spring Harbor Press (1989)).

[0178] Sequence-specific DNA-binding proteins play a role in the regulation of transcription. The isolation of recombinant cDNAs encoding these proteins facilitates the biochemical analysis of their structural and functional properties. Genes encoding such DNA-binding proteins have been isolated using classical genetics (Vollbrecht et al., Nature 350: 241-243 (1991), the entirety of which is herein incorporated by reference) and molecular biochemical approaches, including the screening of recombinant cDNA libraries with antibodies (Landschulz et al., Genes Dev. 2: 786-800 (1988), the entirety of which is herein incorporated by reference) or DNA probes (Bodner et al., Cell 55: 505-518 (1988), the entirety of which is herein incorporated by reference). In addition, an in situ screening procedure has been used and has facilitated the isolation of sequence-specific DNA-binding proteins from various plant species (Gilmartin et al., Plant Cell 4: 839-849 (1992), the entirety of which is herein incorporated by reference; Schindler et al., EMBO J. 11: 1261-1273 (1992) the entirety of which is herein incorporated by reference). An in situ screening protocol does not require the purification of the protein of interest (Vinson et al., Genes Dev. 2: 801-806 (1988), the entirety of which is herein incorporated by reference; Singh et al., Cell 52: 415-423 (1988), the entirety of which is herein incorporated by reference).

[0179] Steps may be employed to characterize DNA-protein interactions. The first is to identify promoter fragments that interact with DNA-binding proteins, to titrate binding activity, to determine the specificity of binding, and to determine whether a given DNA-binding activity can interact with related DNA sequences (Sambrook et al., Molecular Cloning: A Laboratory Manual, 2^{nd} edition. Cold Spring Harbor Laboratory Press, Cold Spring Harbor, N.Y. (1989). Electrophoretic mobility-shift assay is a widely used assay. The assay provides a simple, rapid, and sensitive method for detecting DNA-binding proteins based on the observation that the mobility of a DNA fragment through a nondenaturing, low-ionic strength polyacrylamide gel is retarded upon association with a DNA-binding protein (Fried and Crother, Nucleic Acids Res. 9: 6505-6525 (1981), the entirety of which is herein incorporated by reference). When one or more specific binding activities have been identified, the exact sequence of the DNA bound by the protein may be determined. Several procedures for characterizing protein/DNA-binding sites are used, including methylation and ethylation interference assays (Maxam and Gilbert, Methods Enzymol. 65: 499-560 (1980), the entirety of which is herein incorporated by reference; Wissman and Hillen, Methods Enzymol. 208: 365-379 (1991), the entirety of which is herein incorporated by reference) and footprinting techniques employing DNase I (Galas and Schmitz, Nucleic Acids Res. 5: 3157-3170 (1978), the entirety of which is herein incorporated by reference), 1,10-phenanthroline-copper ion methods (Sigman et al., Methods Enzymol. 208: 365-379 (1991), the entirety of which is herein incorporated by reference) or hydroxyl radical methods (Dixon et al., Methods Enzymol. 208: 380-413 (1991), the entirety of which is herein incorporated by reference). It is understood that one or more of the nucleic acid molecules of the present invention, preferably one or more of the EST nucleic acid molecules of the present invention may be utilized to identify a protein or fragment thereof that specifically binds to a nucleic acid molecule of the present invention. It is also understood that one or more of the protein molecules or fragments thereof of the present invention may be utilized to identify a nucleic acid molecule that specifically binds to it.

[0180] The two-hybrid system is based on the fact that many cellular functions are carried out by proteins that interact (physically) with one another. Two-hybrid systems have been used to probe the function of new proteins (Chien et al., Proc. Natl. Acad. Sci. (U.S.A.) 88: 9578-9582 (1991) the entirety of which is herein incorporated by reference; Durfee et al., Genes Dev. 7: 555-569 (1993) the entirety of which is herein incorporated by reference; Choi et al., Cell 78: 499-512 (1994), the entirety of which is herein incorporated by reference; Kranz et al., Genes Dev. 8: 313-327 (1994), the entirety of which is herein incorporated by reference).

[0181] Interaction mating techniques have facilitated a number of two-hybrid studies of protein-protein interaction. Interaction mating has been used to examine interactions between small sets of tens of proteins (Finley and Brent, Proc. Natl. Acad. Sci. (U.S.A.) 91: 12098-12984 (1994), the entirety of which is herein incorporated by reference), larger sets of hundreds of proteins, (Bendixen et al., Nucl. Acids Res. 22: 1778-1779 (1994), the entirety of which is herein incorporated by reference) and to comprehensively map proteins encoded by a small genome (Bartel et al., Nature Genetics 12: 72-77 (1996), the entirety of which is herein incorporated by reference). This technique utilizes proteins fused to the DNA-binding domain and proteins fused to the activation domain. They are expressed in two different haploid yeast strains of opposite mating type, and the strains are mated to determine if the two proteins interact. Mating occurs when haploid yeast strains come into contact and result in the fusion of the two haploids into a diploid yeast strain. An interaction can be determined by the activation of a two-hybrid reporter gene in the diploid strain. The primary advantage of this technique is that it reduces the number of yeast transformations needed to test individual interactions. It is understood that the protein-protein interactions of protein or fragments thereof of the present invention may be investigated using the two-hybrid system and that any of the nucleic acid molecules of the present invention that encode such proteins or fragments thereof may be used to transform yeast in the two-hybrid system.

[0182] Synechocystis 6803 is a photosynthetic Cyanobacterium capable of oxygenic photosynthesis as well as heterotrophic growth in the absence of light. The entire genome has been sequenced, and it is reported to have a circular genome size of 3.57 Mbp containing 3168 potential open reading frames. Open reading frames (ORFs) were identified based upon their homology to other reported ORFs and by using ORF identification computer programs. Sixteen hundred potential ORFs were assigned based on their homology to previously identified ORFs. Of these 1600 ORFs, 145 were identical to reported ORFs (Kaneko et al., DNA Research 3:109-36 (1996), herein incorporated by reference in its entirety).

[0183] Several prokaryote promoters have been used in Synechocystis to express heterologous genes including the tac, lac, and lambda phage promoters (Bryant (ed.), The Molecular Biology of Cyanobacteria, Kluwer Academic Publishers, (1994); Ferino and Chauvat, Gene 84:257-266 (1989), both of which are herein incorporated by reference in their entirety). Several bacterial origins of replication such as RSF1010 and ACYC are reported to replicate in Synechocystis (Mermet-Bouvier and Chauvat, Current Microbiology 28:145-148 (1994); Kuhlemeier et al., Mol. Gen. Genet. 184:249-254 (1981), both of which are herein incorporated by reference in their entirety).

[0184] Synechocystis has been used to study gene regulation by gene replacement through homologous recombination or by gene disruption using antibiotic resistance markers (Pakrasi et al., EMBO 7:325-332 (1988), herein incorporated by reference in its entirety). In such gene regulation studies, double reciprocal homologous regions of the host genome flanking the gene of interest recombine to stably integrate the gene of interest into the genome. The gene of interest can be expressed once that gene has been stably integrated into the genome. Biochemical analysis can be performed to study the effect of the replaced or deleted gene.

[0185] It is understood that the agents of the present invention may be employed in a Synechocystis system.

[0186] Exogenous genetic material may be transferred into a plant cell and the plant cell regenerated into a whole, fertile or sterile plant. Exogenous genetic material is any genetic material, whether naturally occurring or otherwise, from any source that is capable of being inserted into any organism. Such genetic material may be transferred into either monocotyledons and dicotyledons including but not limited to the crops, maize and soybean (See specifically, Chistou, Particle Bombardment for Genetic Engineering of Plants, pp 63-69 (maize), pp50-60 (soybean), Biotechnology Intelligence Unit. Academic Press, San Diego, Calif. (1996), the entirety of which is herein incorporated by reference and generally Chistou, Particle Bombardment for Genetic Engineering of Plants, Biotechnology Intelligence Unit. Academic Press, San Diego, Calif. (1996), the entirety of which is herein incorporated by reference).

[0187] Transfer of a nucleic acid that encodes for a protein can result in overexpression of that protein in a transformed cell or transgenic plant. One or more of the proteins or fragments thereof encoded by nucleic acid molecules of the present invention may be overexpressed in a transformed cell or transformed plant. Such overexpression may be the result of transient or stable transfer of the exogenous material.

[0188] Exogenous genetic material may be transferred into a plant cell by the use of a DNA vector or construct designed for such a purpose. Design of such a vector is generally within the skill of the art (See, Plant Molecular Biology: A Laboratory Manual eds. Clark, Springer, New York (1997), the entirety of which is herein incorporated by reference).

[0189] A construct or vector may include a plant promoter to express the protein or protein fragment of choice. A number of promoters which are active in plant cells have been described in the literature. These include the nopaline synthase (NOS) promoter (Ebert et al., Proc. Natl. Acad. Sci. (U.S.A.) 84:5745-5749 (1987), the entirety of which is herein incorporated by reference), the octopine synthase (OCS) promoter (which are carried on tumor-inducing plasmids of Agrobacterium tumefaciens), the caulimovirus promoters such as the cauliflower mosaic virus (CaMV) 19S promoter (Lawton et al., Plant Mol. Biol. 9:315-324 (1987), the entirety of which is herein incorporated by reference) and the CAMV 35S promoter (Odell et al., Nature 313:810-812 (1985), the entirety of which is herein incorporated by reference), the figwort mosaic virus 35S-promoter, the light-inducible promoter from the small subunit of ribulose-1,5-bis-phosphate carboxylase (ssRUBISCO), the Adh promoter (Walker et al., Proc. Natl. Acad. Sci. (U.S.A.) 84:6624-6628 (1987), the entirety of which is herein incorporated by reference), the sucrose synthase promoter (Yang et al., Proc. Natl. Acad. Sci. (U.S.A.) 87:4144-4148 (1990), the entirety of which is herein incorporated by reference), the R gene complex promoter (Chandler et al., The Plant Cell 1:1175-1183 (1989), the entirety of which is herein incorporated by reference), and the chlorophyll a/b binding protein gene promoter, etc. These promoters have been used to create DNA constructs which have been expressed in plants; see, e.g., PCT publication WO 84/02913, herein incorporated by reference in its entirety.

[0190] Promoters which are known or are found to cause transcription of DNA in plant cells can be used in the present invention. Such promoters may be obtained from a variety of sources such as plants and plant viruses. It is preferred that the particular promoter selected should be capable of causing sufficient expression to result in the production of an effective amount of a protein to cause the desired phenotype. In addition to promoters which are known to cause transcription of DNA in plant cells, other promoters may be identified for use in the current invention by screening a plant cDNA library for genes which are selectively or preferably expressed in the target tissues or cells.

[0191] For the purpose of expression in source tissues of the plant, such as the leaf, seed, root or stem, it is preferred that the promoters utilized in the present invention have relatively high expression in these specific tissues. For this purpose, one may choose from a number of promoters for genes with tissue- or cell-specific or -enhanced expression. Examples of such promoters reported in the literature include the chloroplast glutamine synthetase GS2 promoter from pea (Edwards et al., Proc. Natl. Acad. Sci. (U.S.A.) 87:3459-3463 (1990), herein incorporated by reference in its entirety), the chloroplast fructose-1,6-biphosphatase (FBPase) promoter from wheat (Lloyd et al., Mol. Gen. Genet. 225:209-216 (1991), herein incorporated by reference in its entirety), the nuclear photosynthetic ST-LS1 promoter from potato (Stockhaus et al., EMBO J. 8:2445-2451 (1989), herein incorporated by reference in its entirety), the phenylalanine ammonia-lyase (PAL) promoter and the chalcone synthase (CHS) promoter from Arabidopsis thaliana. Also reported to be active in photosynthetically active tissues are the ribulose-1,5-bisphosphate carboxylase (RbcS) promoter from eastern larch (Larix laricina), the promoter for the cab gene, cab6, from pine (Yamamoto et al., Plant Cell Physiol. 35:773-778 (1994), herein incorporated by reference in its entirety), the promoter for the Cab-1 gene from wheat (Fejes et al., Plant Mol. Biol. 15:921-932 (1990), herein incorporated by reference in its entirety), the promoter for the CAB-1 gene from spinach (Lubberstedt et al., Plant Physiol. 104:997-1006 (1994), herein incorporated by reference in its entirety), the promoter for the cab1R gene from rice (Luan et al., Plant Cell. 4:971-981 (1992), the entirety of which is herein incorporated by reference), the pyruvate, orthophosphate dikinase (PPDK) promoter from maize (Matsuoka et al., Proc. Natl. Acad. Sci. (U.S.A.) 90: 9586-9590 (1993), herein incorporated by reference in its entirety), the promoter for the tobacco Lhcb1*2 gene (Cerdan et al., Plant Mol. Biol. 33: 245-255. (1997), herein incorporated by reference in its entirety), the Arabidopsis thaliana SUC2 sucrose-H+ symporter promoter (Truernit et al., Planta. 196: 564-570 (1995), herein incorporated by reference in its entirety), and the promoter for the thylacoid membrane proteins from spinach (psaD, psaF, psaE, PC, FNR, atpC, atpD, cab, rbcS). Other promoters for the chlorophyl a/b-binding proteins may also be utilized in the present invention, such as the promoters for LhcB gene and PsbP gene from white mustard (Sinapis alba; Kretsch et al., Plant Mol. Biol. 28: 219-229 (1995), the entirety of which is herein incorporated by reference).

[0192] For the purpose of expression in sink tissues of the plant, such as the tuber of the potato plant, the fruit of tomato, or the seed of maize, wheat, rice, and barley, it is preferred that the promoters utilized in the present invention have relatively high expression in these specific tissues. A number of promoters for genes with tuber-specific or -enhanced expression are known, including the class I patatin promoter (Bevan et al., EMBO J. 8: 1899-1906 (1986); Jefferson et al., Plant Mol. Biol. 14: 995-1006 (1990), both of which are herein incorporated by reference in its entirety), the promoter for the potato tuber ADPGPP genes, both the large and small subunits, the sucrose synthase promoter (Salanoubat and Belliard, Gene. 60: 47-56 (1987), Salanoubat and Belliard, Gene. 84: 181-185 (1989), both of which are incorporated by reference in their entirety), the promoter for the major tuber proteins including the 22 kd protein complexes and proteinase inhibitors (Hannapel, Plant Physiol. 101: 703-704 (1993), herein incorporated by reference in its entirety), the promoter for the granule bound starch synthase gene (GBSS) (Visser et al., Plant Mol. Biol. 17: 691-699 (1991), herein incorporated by reference in its entirety), and other class I and II patatins promoters (Koster-Topfer et al., Mol Gen Genet. 219: 390-396 (1989); Mignery et al., Gene. 62: 27-44 (1988), both of which are herein incorporated by reference in their entirety).

[0193] Other promoters can also be used to express a fructose 1,6 bisphosphate aldolase gene in specific tissues, such as seeds or fruits. The promoter for β-conglycinin (Chen et al., Dev. Genet. 10: 112-122 (1989), herein incorporated by reference in its entirety) or other seed-specific promoters such as the napin and phaseolin promoters, can be used. The zeins are a group of storage proteins found in maize endosperm. Genomic clones for zein genes have been isolated (Pedersen et al., Cell 29: 1015-1026 (1982), herein incorporated by reference in its entirety), and the promoters from these clones, including the 15 kD, 16 kD, 19 kD, 22 kD, 27 kD, and gamma genes, could also be used. Other promoters known to function, for example, in maize, include the promoters for the following genes: waxy, Brittle, Shrunken 2, Branching enzymes I and II, starch synthases, debranching enzymes, oleosins, glutelins, and sucrose synthases. A particularly preferred promoter for maize endosperm expression is the promoter for the glutelin gene from rice, more particularly the Osgt-1 promoter (Zheng et al., Mol. Cell Biol. 13: 5829-5842 (1993), herein incorporated by reference in its entirety). Examples of promoters suitable for expression in wheat include those promoters for the ADPglucose pyrophosphorylase (ADPGPP) subunits, the granule bound and other starch synthases, the branching and debranching enzymes, the embryogenesis-abundant proteins, the gliadins, and the glutenins. Examples of such promoters in rice include those promoters for the ADPGPP subunits, the granule bound and other starch synthases, the branching enzymes, the debranching enzymes, sucrose synthases, and the glutelins. A particularly preferred promoter is the promoter for rice glutelin, Osgt-1. Examples of such promoters for barley include those for the ADPGPP subunits, the granule bound and other starch synthases, the branching enzymes, the debranching enzymes, sucrose synthases, the hordeins, the embryo globulins, and the aleurone specific proteins.

[0194] Root specific promoters may also be used. An example of such a promoter is the promoter for the acid chitinase gene (Samac et al., Plant Mol. Biol. 25: 587-596 (1994), the entirety of which is herein incorporated by reference). Expression in root tissue could also be accomplished by utilizing the root specific subdomains of the CaMV35S promoter that have been identified (Lam et al., Proc. Natl. Acad. Sci. (U.S.A.) 86:7890-7894 (1989), herein incorporated by reference in its entirety). Other root cell specific promoters include those reported by Conkling et al. (Conkling et al., Plant Physiol. 93:1203-1211 (1990), the entirety of which is herein incorporated by reference).

[0195] Additional promoters that may be utilized are described, for example, in U.S. Pat. Nos. 5,378,619, 5,391,725, 5,428,147, 5,447,858, 5,608,144, 5,608,144, 5,614,399, 5,633,441, 5,633,435, and 4,633,436, all of which are herein incorporated in their entirety. In addition, a tissue specific enhancer may be used (Fromm et al., The Plant Cell 1:977-984 (1989), the entirety of which is herein incorporated by reference).

[0196] Constructs or vectors may also include, with the coding region of interest, a nucleic acid sequence that acts, in whole or in part, to terminate transcription of that region. For example, such sequences have been isolated including the Tr7 3′ sequence and the nos 3′ sequence (Ingelbrecht et al., The Plant Cell 1:671-680 (1989), the entirety of which is herein incorporated by reference; Bevan et al., Nucleic Acids Res. 11:369-385 (1983), the entirety of which is herein incorporated by reference), or the like.

[0197] A vector or construct may also include regulatory elements. Examples of such include the Adh intron 1 (Callis et al., Genes and Develop. 1:1183-1200 (1987), the entirety of which is herein incorporated by reference), the sucrose synthase intron (Vasil et al., Plant Physiol. 91:1575-1579 (1989), the entirety of which is herein incorporated by reference) and the TMV omega element (Gallie et al., The Plant Cell 1:301-311 (1989), the entirety of which is herein incorporated by reference). These and other regulatory elements may be included when appropriate.

[0198] A vector or construct may also include a selectable marker. Selectable markers may also be used to select for plants or plant cells that contain the exogenous genetic material. Examples of such include, but are not limited to, a neo gene (Potrykus et al., Mol. Gen. Genet. 199:183-188 (1985), the entirety of which is herein incorporated by reference) which codes for kanamycin resistance and can be selected for using kanamycin, G418, etc.; a bar gene which codes for bialaphos resistance; a mutant EPSP synthase gene (Hinchee et al., Bio/Technology 6:915-922 (1988), the entirety of which is herein incorporated by reference) which encodes glyphosate resistance; a nitrilase gene which confers resistance to bromoxynil (Stalker et al., J. Biol. Chem. 263:6310-6314 (1988), the entirety of which is herein incorporated by reference); a mutant acetolactate synthase gene (ALS) which confers imidazolinone or sulphonylurea resistance (European Patent Application 154,204 (Sep. 11, 1985), the entirety of which is herein incorporated by reference); and a methotrexate resistant DHFR gene (Thillet et al., J. Biol. Chem. 263:12500-12508 (1988), the entirety of which is herein incorporated by reference).

[0199] A vector or construct may also include a transit peptide. Incorporation of a suitable chloroplast transit peptide may also be employed (European Patent Application Publication Number 0218571, the entirety of which is herein incorporated by reference). Translational enhancers may also be incorporated as part of the vector DNA. DNA constructs could contain one or more 5′ non-translated leader sequences which may serve to enhance expression of the gene products from the resulting mRNA transcripts. Such sequences may be derived from the promoter selected to express the gene or can be specifically modified to increase translation of the mRNA. Such regions may also be obtained from viral RNAs, from suitable eukaryotic genes, or from a synthetic gene sequence. For a review of optimizing expression of transgenes, see Koziel et al., Plant Mol. Biol. 32:393-405 (1996), the entirety of which is herein incorporated by reference.

[0200] A vector or construct may also include a screenable marker. Screenable markers may be used to monitor expression. Exemplary screenable markers include a β-glucuronidase or uidA gene (GUS) which encodes an enzyme for which various chromogenic substrates are known (Jefferson, Plant Mol. Biol, Rep. 5: 387-405 (1987), the entirety of which is herein incorporated by reference; Jefferson et al., EMBO J. 6: 3901-3907 (1987), the entirety of which is herein incorporated by reference); an R-locus gene, which encodes a product that regulates the production of anthocyanin pigments (red color) in plant tissues ((Dellaporta et al., Stadler Symposium 11:263-282 (1988), the entirety of which is herein incorporated by reference); a β-lactamase gene (Sutcliffe et al., Proc. Natl. Acad. Sci. (U.S.A.) 75: 3737-3741 (1978), the entirety of which is herein incorporated by reference), a gene which encodes an enzyme for which various chromogenic substrates are known (e.g., PADAC, a chromogenic cephalosporin); a luciferase gene (Ow et al., Science 234: 856-859 (1986), the entirety of which is herein incorporated by reference) a xylE gene (Zukowsky et al., Proc. Natl. Acad. Sci. (U.S.A.) 80:1101-1105 (1983), the entirety of which is herein incorporated by reference) which encodes a catechol diozygenase that can convert chromogenic catechols; an α-amylase gene (Ikatu et al., Bio/Technol. 8:241-242 (1990), the entirety of which is herein incorporated by reference); a tyrosinase gene (Katz et al., J. Gen. Microbiol. 129:2703-2714 (1983), the entirety of which is herein incorporated by reference) which encodes an enzyme capable of oxidizing tyrosine to DOPA and dopaquinone which in turn condenses to melanin; an α-galactosidase, which will turn a chromogenic α-galactose substrate.

[0201] Included within the terms “selectable or screenable marker genes” are also genes which encode a scriptable marker whose secretion can be detected as a means of identifying or selecting for transformed cells. Examples include markers which encode a secretable antigen that can be identified by antibody interaction, or even secretable enzymes which can be detected catalytically. Secretable proteins fall into a number of classes, including small, diffusible proteins detectable, e.g., by ELISA, small active enzymes detectable in extracellular solution (e.g., α-amylase, β-lactamase, phosphinothricin transferase), or proteins which are inserted or trapped in the cell wall (such as proteins which include a leader sequence such as that found in the expression unit of extension or tobacco PR-S). Other possible selectable and/or screenable marker genes will be apparent to those of skill in the art.

[0202] Methods and compositions for transforming a bacteria and other microorganisms are known in the art (see for example Sambrook et al., Molecular Cloning: A Laboratory Manual, Second Edition, Cold Spring Harbor Laboratory Press, Cold Spring Harbor, N.Y., (1989), the entirety of which is herein incorporated by reference).

[0203] There are many methods for introducing transforming nucleic acid molecules into plant cells. Suitable methods are believed to include virtually any method by which nucleic acid molecules may be introduced into a cell, such as by Agrobacterium infection or direct delivery of nucleic acid molecules such as, for example, by PEG-mediated transformation, by electroporation or by acceleration of DNA coated particles, etc. (Pottykus, Ann. Rev. Plant Physiol. Plant Mol. Biol. 42:205-225 (1991), the entirety of which is herein incorporated by reference; Vasil, Plant Mol. Biol. 25: 925-937 (1994), the entirety of which is herein incorporated by reference. For example, electroporation has been used to transform maize protoplasts (Fromm et al., Nature 312:791-793 (1986), the entirety of which is herein incorporated by reference).

[0204] Other vector systems suitable for introducing transforming DNA into a host plant cell includes but is not limited to binary artificial chromosome (BIBAC) vectors (Hamilton et al., Gene 200:107-116, (1997), the entirety of which is herein incorporated by reference, and transfection with RNA viral vectors (Della-Cioppa et al., Ann. N.Y. Acad Sci. (1996), 792 (Engineering Plants for Commercial Products and Applications), 57-61, the entirety of which is herein incorporated by reference.

[0205] Technology for introduction of DNA into cells is well known to those of skill in the art. Four general methods for delivering a gene into cells have been described: (1) chemical methods (Graham and van der Eb, Virology, 54:536-539 (1973), the entirety of which is herein incorporated by reference); (2) physical methods such as microinjection (Capecchi, Cell 22:479-488 (1980), electroporation (Wong and Neumann, Biochem. Biophys. Res. Commun., 107:584-587 (1982); Fromm et al., Proc. Natl. Acad. Sci. USA, 82:5824-5828 (1985); U.S. Pat. No. 5,384,253; and the gene gun (Johnston and Tang, Methods Cell Biol. 43:353-365 (1994), all of which the entirety is herein incorporated by reference; (3) viral vectors (Clapp, Clin. Perinatol., 20:155-168 (1993); Lu et al., J. Exp. Med., 178:2089-2096 (1993); Eglitis and Anderson, Biotechniques, 6:608-614 (1988), all of which the entirety is herein incorporated by reference); and (4) receptor-mediated mechanisms (Curiel et al., Hum. Gen. Ther., 3:147-154 (1992); Wagner et al., Proc. Natl. Acad. Sci. USA, 89:6099-6103 (1992), all of which the entirety is herein incorporated by reference).

[0206] Acceleration methods that may be used include, for example, microprojectile bombardment and the like. One example of a method for delivering transforming nucleic acid molecules to plant cells is microprojectile bombardment. This method has been reviewed by Yang and Christou, eds., Particle Bombardment Technology for Gene Transfer, Oxford Press, Oxford, England (1994), the entirety of which is herein incorporated by reference). Non-biological particles (microprojectiles) that may be coated with nucleic acids and delivered into cells by a propelling force. Exemplary particles include those comprised of tungsten, gold, platinum, and the like.

[0207] A particular advantage of microprojectile bombardment, in addition to it being an effective means of reproducibly, and stably transforming monocotyledons, is that neither the isolation of protoplasts (Cristou et al., Plant Physiol. 87:671-674 (1988), the entirety of which is herein incorporated by reference) nor the susceptibility of Agrobacterium infection is required. An illustrative embodiment of a method for delivering DNA into maize cells by acceleration is a biolistics g-particle delivery system, which can be used to propel particles coated with DNA through a screen, such as a stainless steel or Nytex screen, onto a filter surface covered with corn cells cultured in suspension. Gordon-Kamm et al., describes the basic procedure for coating tungsten particles with DNA (Gordon-Kamm et al., Plant Cell 2: 603-618 (1990), the entirety of which is herein incorporated by reference). The screen disperses the tungsten nucleic acid particles so that they are not delivered to the recipient cells in large aggregates. A particle delivery system suitable for use with the present invention is the helium acceleration PDS-1000/He gun which is available from Bio-Rad Laboratories (Bio-Rad, Hercules, Calif.)(Sanford et al., Technique 3:3-16 (1991), the entirety of which is herein incorporated by reference).

[0208] For the bombardment, cells in suspension may be concentrated on filters. Filters containing the cells to be bombarded are positioned at an appropriate distance below the microprojectile stopping plate. If desired, one or more screens are also positioned between the gun and the cells to be bombarded.

[0209] Alternatively, immature embryos or other target cells may be arranged on solid culture medium. The cells to be bombarded are positioned at an appropriate distance below the macroprojectile stopping plate. If desired, one or more screens are also positioned between the acceleration device and the cells to be bombarded. Through the use of techniques set forth herein one may obtain up to 1000 or more foci of cells transiently expressing a marker gene. The number of cells in a focus which express the exogenous gene product 48 hours post-bombardment often range from one to ten and average one to three.

[0210] In bombardment transformation, one may optimize the prebombardment culturing conditions and the bombardment parameters to yield the maximum numbers of stable transformants. Both the physical and biological parameters for bombardment are important in this technology. Physical factors are those that involve manipulating the DNA/microprojectile precipitate or those that affect the flight and velocity of either the macro- or microprojectiles. Biological factors include all steps involved in manipulation of cells before and immediately after bombardment, the osmotic adjustment of target cells to help alleviate the trauma associated with bombardment, and also the nature of the transforming DNA, such as linearized DNA or intact supercoiled plasmids. It is believed that pre-bombardment manipulations are especially important for successful transformation of immature embryos. In another alternative embodiment, plastids can be stably transformed. Methods disclosed for plastid transformation in higher plants include the particle gun delivery of DNA containing a selectable marker and targeting of the DNA to the plastid genome through homologous recombination (Svab et al., Proc. Natl. Acad. Sci. (U.S.A.) 87:8526-8530 (1990); Svab and Maliga, Proc. Natl. Acad. Sci. (U.S.A.) 90:913-917 (1993); Staub and Maliga, EMBO J. 12:601-606 (1993); U.S. Pat. Nos. 5,451,513 and 5,545,818, all of which are herein incorporated by reference in their entirety).

[0211] Accordingly, it is contemplated that one may wish to adjust various aspects of the bombardment parameters in small scale studies to fully optimize the conditions. One may particularly wish to adjust physical parameters such as gap distance, flight distance, tissue distance, and helium pressure. One may also minimize the trauma reduction factors by modifying conditions which influence the physiological state of the recipient cells and which may therefore influence transformation and integration efficiencies. For example, the osmotic state, tissue hydration and the subculture stage or cell cycle of the recipient cells may be adjusted for optimum transformation. The execution of other routine adjustments will be known to those of skill in the art in light of the present disclosure.

[0212] Agrobacterium-mediated transfer is a widely applicable system for introducing genes into plant cells because the DNA can be introduced into whole plant tissues, thereby bypassing the need for regeneration of an intact plant from a protoplast. The use of Agrobacterium-mediated plant integrating vectors to introduce DNA into plant cells is well known in the art. See, for example the methods described (Fraley et al., Biotechnology 3:629-635 (1985); Rogers et al., Meth. In Enzymol, 153:253-277 (1987), both of which are herein incorporated by reference in their entirety. Further, the integration of the Ti-DNA is a relatively precise process resulting in few rearrangements. The region of DNA to be transferred is defined by the border sequences, and intervening DNA is usually inserted into the plant genome as described (Spielmann et al., Mol. Gen. Genet., 205:34 (1986), the entirety of which is herein incorporated by reference).

[0213] Modern Agrobacterium transformation vectors are capable of replication in E. coli as well as Agrobacterium, allowing for convenient manipulations as described (Klee et al., In: Plant DNA Infectious Agents, T. Hohn and J. Schell, eds., Springer-Verlag, New York, pp. 179-203 (1985), the entirety of which is herein incorporated by reference. Moreover, recent technological advances in vectors for Agrobacterium-mediated gene transfer have improved the arrangement of genes and restriction sites in the vectors to facilitate construction of vectors capable of expressing various polypeptide coding genes. The vectors described have convenient multi-linker regions flanked by a promoter and a polyadenylation site for direct expression of inserted polypeptide coding genes and are suitable for present purposes (Rogers et al., Meth. In Enzymol., 153:253-277 (1987), the entirety of which is herein incorporated by reference). In addition, Agrobacterium containing both armed and disarmed Ti genes can be used for the transformations. In those plant strains where Agrobacterium-mediated transformation is efficient, it is the method of choice because of the facile and defined nature of the gene transfer.

[0214] A transgenic plant formed using Agrobacterium transformation methods typically contains a single gene on one chromosome. Such transgenic plants can be referred to as being heterozygous for the added gene. More preferred is a transgenic plant that is homozygous for the added structural gene; i.e., a transgenic plant that contains two added genes, one gene at the same locus on each chromosome of a chromosome pair. A homozygous transgenic plant can be obtained by sexually mating (selfing) an independent segregant transgenic plant that contains a single added gene, germinating some of the seed produced and analyzing the resulting plants produced for the gene of interest.

[0215] It is also to be understood that two different transgenic plants can also be mated to produce offspring that contain two independently segregating added, exogenous genes. Selfing of appropriate progeny can produce plants that are homozygous for both added, exogenous genes that encode a polypeptide of interest. Back-crossing to a parental plant and out-crossing with a non-transgenic plant are also contemplated, as is vegetative propagation.

[0216] Transformation of plant protoplasts can be achieved using methods based on calcium phosphate precipitation, polyethylene glycol treatment, electroporation, and combinations of these treatments. See for example (Potrykus et al., Mol. Gen. Genet., 205:193-200 (1986); Lorz et al., Mol. Gen. Genet., 199:178, (1985); Fromm et al., Nature, 319:791,(1986); Uchimiya et al., Mol. Gen. Genet.:204:204, (1986); Callis et al., Genes and Development, 1183,(1987); Marcotte et al., Nature, 335:454, (1988), all of which the entirety is herein incorporated by reference).

[0217] Application of these systems to different plant strains depends upon the ability to regenerate that particular plant strain from protoplasts. Illustrative methods for the regeneration of cereals from protoplasts are described (Fujimura et al., Plant Tissue Culture Letters, 2:74,(1985); Toriyama et al., Theor Appl. Genet. 205:34. (1986); Yamada et al., Plant Cell Rep., 4:85, (1986); Abdullah et al., Biotechnology, 4:1087, (1986), all of which the entirety is herein incorporated by reference).

[0218] To transform plant strains that cannot be successfully regenerated from protoplasts, other ways to introduce DNA into intact cells or tissues can be utilized. For example, regeneration of cereals from immature embryos or explants can be effected as described (Vasil, Biotechnology, 6:397,(1988), the entirety of which is herein incorporated by reference). In addition, “particle gun” or high-velocity microprojectile technology can be utilized (Vasil et al., Bio/Technology 10:667, (1992), the entirety of which is herein incorporated by reference).

[0219] Using the latter technology, DNA is carried through the cell wall and into the cytoplasm on the surface of small metal particles as described (Klein et al., Nature, 328:70, (1987); Klein et al., Proc. Natl. Acad. Sci. USA, 85:8502-8505, (1988); McCabe et al., Biotechnology, 6:923, (1988), all of which the entirety is herein incorporated by reference). The metal particles penetrate through several layers of cells and thus allow the transformation of cells within tissue explants.

[0220] Other methods of cell transformation can also be used and include but are not limited to introduction of DNA into plants by direct DNA transfer into pollen (Hess et al., Intern Rev. Cytol., 107:367, (1987); Luo et al., Plant Mol Biol. Reporter, 6:165, (1988), all of which the entirety is herein incorporated by reference), by direct injection of DNA into reproductive organs of a plant (Pena et al., Nature, 325:274, (1987), the entirety of which is herein incorporated by reference), or by direct injection of DNA into the cells of immature embryos followed by the rehydration of dessicated embryos (Neuhaus et al., Theor. Appl. Genet., 75:30, (1987), the entirety of which is herein incorporated by reference).

[0221] The regeneration, development, and cultivation of plants from single plant protoplast transformants or from various transformed explants is well known in the art (Weissbach and Weissbach, In: Methods for Plant Molecular Biology, (Eds.), Academic Press, Inc. San Diego, Calif., (1988), the entirety of which is herein incorporated by reference). This regeneration and growth process typically includes the steps of selection of transformed cells, culturing those individualized cells through the usual stages of embryonic development through the rooted plantlet stage. Transgenic embryos and seeds are similarly regenerated. The resulting transgenic rooted shoots are thereafter planted in an appropriate plant growth medium such as soil.

[0222] The development or regeneration of plants containing the foreign, exogenous gene that encodes a protein of interest is well known in the art. Preferably, the regenerated plants are self-pollinated to provide homozygous transgenic plants, as discussed before. Otherwise, pollen obtained from the regenerated plants is crossed to seed-grown plants of agronomically important lines. Conversely, pollen from plants of these important lines is used to pollinate regenerated plants. A transgenic plant of the present invention containing a desired polypeptide is cultivated using methods well known to one skilled in the art.

[0223] There are a variety of methods for the regeneration of plants from plant tissue. The particular method of regeneration will depend on the starting plant tissue and the particular plant species to be regenerated.

[0224] Methods for transforming dicots, primarily by use of Agrobacterium tumefaciens, and obtaining transgenic plants have been published for cotton (U.S. Pat. No. 5,004,863, U.S. Pat. No. 5,159,135, U.S. Pat. No. 5,518,908, all of which the entirety is herein incorporated by reference); soybean (U.S. Pat. No. 5,569,834, U.S. Pat. No. 5,416,011, McCabe et al., Biotechnology 6:923, (1988), Christou et al., Plant Physiol., 87:671-674 (1988), all of which the entirety is herein incorporated by reference); Brassica (U.S. Pat. No. 5,463,174, the entirety of which is herein incorporated by reference); peanut (Cheng et al., Plant Cell Rep. 15: 653-657 (1996), McKently et al., Plant Cell Rep. 14:699-703 (1995), all of which the entirety is herein incorporated by reference); papaya (Yang et al., (1996), the entirety of which is herein incorporated by reference); pea (Grant et al., Plant Cell Rep. 15:254-258, (1995), the entirety of which is herein incorporated by reference).

[0225] Transformation of monocotyledons using electroporation, particle bombardment, and Agrobacterium have also been reported. Transformation and plant regeneration have been achieved in asparagus (Bytebier et al., Proc. Natl. Acad. Sci. USA 84:5345, (1987), the entirety of which is herein incorporated by reference); barley (Wan and Lemaux, Plant Physiol 104:37, (1994), the entirety of which is herein incorporated by reference); maize (Rhodes et al., Science 240: 204, (1988), Gordon-Kamm et al., Plant Cell, 2:603, (1990), Fromm et al., Bio/Technology 8:833, (1990), Koziel et al., Bio/Technology 11:194, (1993), Armstrong et al., Crop Science 35:550-557, (1995), all of which the entirety is herein incorporated by reference); oat (Somers et al., Bio/Technology, 10:1589, (1992), the entirety of which is herein incorporated by reference); orchardgrass (Horn et al., Plant Cell Rep. 7:469, (1988), the entirety of which is herein incorporated by reference); rice (Toriyama et al., Theor Appl. Genet. 205:34, (1986); Park et al., Plant Mol. Biol., 32: 1135-1148, (1996); Abedinia et al., Aust. J. Plant Physiol. 24:133-141, (1997); Zhang and Wu, Theor. Appl. Genet. 76:835, (1988); Zhang et al. Plant Cell Rep. 7:379, (1988); Battraw and Hall, Plant Sci. 86:191-202, (1992); Christou et al., Bio/Technology 9:957, (1991), all of which the entirety is herein incorporated by reference); sugarcane (Bower and Birch, Plant J. 2:409, (1992), the entirety of which is herein incorporated by reference); tall fescue (Wang et al., Bio/Technology 10:691, (1992), the entirety of which is herein incorporated by reference), and wheat (Vasil et al., Bio/Technology 10:667, (1992), the entirety of which is herein incorporated by reference; U.S. Pat. No. 5,631,152, the entirety of which is herein incorporated by reference.

[0226] Assays for gene expression based on the transient expression of cloned nucleic acid constructs have been developed by introducing the nucleic acid molecules into plant cells by polyethylene glycol treatment, electroporation, or particle bombardment (Marcotte, et al., Nature, 335: 454-457 (1988), the entirety of which is herein incorporated by reference; Marcotte, et al., Plant Cell, 1: 523-532 (1989), the entirety of which is herein incorporated by reference; McCarty, et al., Cell 66: 895-905 (1991), the entirety of which is herein incorporated by reference; Hattori, et al., Genes Dev. 6: 609-618 (1992), the entirety of which is herein incorporated by reference; Goff, et al., EMBO J. 9: 2517-2522 (1990), the entirety of which is herein incorporated by reference). Transient expression systems may be used to functionally dissect gene constructs (See generally, Mailga et al., Methods in Plant Molecular Biology, Cold Spring Harbor Press (1995)).

[0227] Any of the nucleic acid molecules of the present invention may be introduced into a plant cell in a permanent or transient manner in combination with other genetic elements such as vectors, promoters enhancers etc. Further any of the nucleic acid molecules of the present invention may be introduced into a plant cell in a manner that allows for over expression of the protein or fragment thereof encoded by the nucleic acid molecule.

[0228] Cosuppression is the reduction in expression levels, usually at the level of RNA, of a particular endogenous gene or gene family by the expression of a homologous sense construct that is capable of transcribing mRNA of the same strandedness as the transcript of the endogenous gene (Napoli et al., Plant Cell 2: 279-289 (1990), the entirety of which is herein incorporated by reference; van der Krol et al., Plant Cell 2: 291-299 (1990), the entirety of which is herein incorporated by reference). Cosuppression may result from stable transformation with a single copy nucleic acid molecule that is homologous to a nucleic acid sequence found with the cell (Prolls and Meyer, Plant J. 2:465-475 (1992), the entirety of which is herein incorporated by reference) or with multiple copies of a nucleic acid molecule that is homologous to a nucleic acid sequence found with the cell (Mittlesten et al., Mol. Gen. Genet. 244: 325-330 (1994), the entirety of which is herein incorporated by reference). Genes, even though different, linked to homologous promoters may result in the cosuppression of the linked genes (Vaucheret, C.R. Acad. Sci. III 316: 1471-1483 (1993), the entirety of which is herein incorporated by reference).

[0229] This technique has, for example been applied to generate white flowers from red petunia and tomatoes that do not ripen on the vine. Up to 50% of petunia transformants that contained a sense copy of the chalcone synthase (CHS) gene produced white flowers or floral sectors; this was as a result of the post-transcriptional loss of mRNA encoding CHS (Flavell, Proc. Natl. Acad. Sci. (U.S.A.) 91:3490-3496 (1994)), the entirety of which is herein incorporated by reference). Cosuppression may require the coordinate transcription of the transgene and the endogenous gene, and can be reset by a developmental control mechanism (Jorgensen, Trends Biotechnol, 8:340-344 (1990), the entirety of which is herein incorporated by reference; Meins and Kunz, In: Gene Inactivation and Homologous Recombination in Plants (Paszkowski, J., ed.), pp. 335-348. Kluwer Academic, Netherlands (1994), the entirety of which is herein incorporated by reference).

[0230] It is understood that one or more of the nucleic acids of the present invention including those comprising SEQ ID NO:1 through SEQ ID NO:11840 or complement thereof or fragments of either or other nucleic acid molecules of the present invention may be introduced into a plant cell and transcribed using an appropriate promoter with such transcription resulting in the co-suppression of an endogenous protein.

[0231] Antisense approaches are a way of preventing or reducing gene function by targeting the genetic material (Mol et al., FEBS Lett. 268: 427-430 (1990), the entirety of which is herein incorporated by reference). The objective of the antisense approach is to use a sequence complementary to the target gene to block its expression and create a mutant cell line or organism in which the level of a single chosen protein is selectively reduced or abolished. Antisense techniques have several advantages over other ‘reverse genetic’ approaches. The site of inactivation and its developmental effect can be manipulated by the choice of promoter for antisense genes or by the timing of external application or microinjection. Antisense can manipulate its specificity by selecting either unique regions of the target gene or regions where it shares homology to other related genes (Hiatt et al., In Genetic Engineering, Setlow (ed.), Vol. 11, New York: Plenum 49-63 (1989), the entirety of which is herein incorporated by reference).

[0232] The principle of regulation by antisense RNA is that RNA that is complementary to the target mRNA is introduced into cells, resulting in specific RNA:RNA duplexes being formed by base pairing between the antisense substrate and the target mRNA (Green et al., Annu. Rev. Biochem. 55: 569-597 (1986), the entirety of which is herein incorporated by reference). Under one embodiment, the process involves the introduction and expression of an antisense gene sequence. Such a sequence is one in which part or all of the normal gene sequences are placed under a promoter in inverted orientation so that the ‘wrong’ or complementary strand is transcribed into a noncoding antisense RNA that hybridizes with the target mRNA and interferes with its expression (Takayama and Inouye, Crit. Rev. Biochem. Mol. Biol. 25: 155-184 (1990), the entirety of which is herein incorporated by reference). An antisense vector is constructed by standard procedures and introduced into cells by transformation, transfection, electroporation, microinjection, or by infection, etc. The type of transformation and choice of vector will determine whether expression is transient or stable. The promoter used for the antisense gene may influence the level, timing, tissue, specificity, or inducibility of the antisense inhibition.

[0233] It is understood that protein synthesis activity in a plant cell may be reduced or depressed by growing a transformed plant cell containing a nucleic acid molecule whose non-transcribed strand encodes a protein or fragment thereof.

[0234] Antibodies have been expressed in plants (Hiatt et al., Nature 342:76-78 (1989), the entirety of which is herein incorporated by reference; Conrad and Fielder, Plant Mol. Biol. 26: 1023-1030 (1994), the entirety of which is herein incorporated by reference). Cytoplamic expression of a scFv (single-chain Fv antibodies) has been reported to delay infection by artichoke mottled crinkle virus. Transgenic plants that express antibodies directed against endogenous proteins may exhibit a physiological effect (Philips et al., EMBO J. 16: 4489-4496 (1997), the entirety of which is herein incorporated by reference; Marion-Poll, Trends in Plant Science 2: 447-448 (1997), the entirety of which is herein incorporated by reference). For example, expressed anti-abscisic antibodies reportedly result in a general perturbation of seed development (Philips et al., EMBO J. 16: 4489-4496 (1997)).

[0235] Antibodies that are catalytic may also be expressed in plants (abzymes). The principle behind abzymes is that since antibodies may be raised against many molecules, this recognition ability can be directed toward generating antibodies that bind transition states to force a chemical reaction forward (Persidas, Nature Biotechnology 15:1313-1315 (1997), the entirety of which is herein incorporated by reference; Baca et al., Ann. Rev. Biophys. Biomol. Struct. 26:461-493 (1997), the entirety of which is herein incorporated by reference). The catalytic abilities of abzymes may be enhanced by site directed mutagensis. Examples of abzymes are, for example, set forth in U.S. Pat. No. 5,658,753; U.S. Pat. No. 5,632,990; U.S. Pat. No. 5,631,137; U.S. Pat. No. 5,602,015; U.S. Pat. No. 5,559,538; U.S. Pat. No. 5,576,174; U.S. Pat. No. 5,500,358; U.S. Pat. No. 5,318,897; U.S. Pat. No. 5,298,409; U.S. Pat. No. 5,258,289 and U.S. Pat. No. 5,194,585, all of which are herein incorporated in their entirety.

[0236] It is understood that any of the antibodies of the present invention may be expressed in plants and that such expression can result in a physiological effect. It is also understood that any of the expressed antibodies may be catalytic.

[0237] In addition to the above discussed procedures, practitioners are familiar with the standard resource materials which describe specific conditions and procedures for the construction, manipulation and isolation of macromolecules (e.g., DNA molecules, plasmids, etc.), generation of recombinant organisms and the screening and isolating of clones, (see for example, Sambrook et al., Molecular Cloning: A Laboratory Manual, Cold Spring Harbor Press (1989); Mailga et al., Methods in Plant Molecular Biology, Cold Spring Harbor Press (1995), the entirety of which is herein incorporated by reference; Birren et al., Genome Analysis: Analyzing DNA, 1, Cold Spring Harbor, N.Y., the entirety of which is herein incorporated by reference).

[0238] The nucleotide sequence provided in SEQ ID NO:1, through SEQ ID NO:11840 or fragment thereof, or complement thereof, or a nucleotide sequence at least 90% identical, preferably 95%, identical even more preferably 99% or 100% identical to the sequence provided in SEQ ID NO:1 through SEQ ID NO:11840 or fragment thereof, or complement thereof, can be “provided” in a variety of mediums to facilitate use fragment thereof. Such a medium can also provide a subset thereof in a form that allows a skilled artisan to examine the sequences.

[0239] In one application of this embodiment, a nucleotide sequence of the present invention can be recorded on computer readable media. As used herein, “computer readable media” refers to any medium that can be read and accessed directly by a computer. Such media include, but are not limited to: magnetic storage media, such as floppy discs, hard disc, storage medium, and magnetic tape: optical storage media such as CD-ROM; electrical storage media such as RAM and ROM; and hybrids of these categories such as magnetic/optical storage media. A skilled artisan can readily appreciate how any of the presently known computer readable mediums can be used to create a manufacture comprising computer readable medium having recorded thereon a nucleotide sequence of the present invention.

[0240] As used herein, “recorded” refers to a process for storing information on computer readable medium. A skilled artisan can readily adopt any of the presently known methods for recording information on computer readable medium to generate media comprising the nucleotide sequence information of the present invention. A variety of data storage structures are available to a skilled artisan for creating a computer readable medium having recorded thereon a nucleotide sequence of the present invention. The choice of the data storage structure will generally be based on the means chosen to access the stored information. In addition, a variety of data processor programs and formats can be used to store the nucleotide sequence information of the present invention on computer readable medium. The sequence information can be represented in a word processing text file, formatted in commercially-available software such as WordPerfect and Microsoft Word, or represented in the form of an ASCII file, stored in a database application, such as DB2, Sybase, Oracle, or the like. A skilled artisan can readily adapt any number of data processor structuring formats (e.g. text file or database) in order to obtain computer readable medium having recorded thereon the nucleotide sequence information of the present invention.

[0241] By providing one or more of nucleotide sequences of the present invention, a skilled artisan can routinely access the sequence information for a variety of purposes. Computer software is publicly available which allows a skilled artisan to access sequence information provided in a computer readable medium. The examples which follow demonstrate how software which implements the BLAST (Altschul et al., J. Mol. Biol. 215:403-410 (1990)) and BLAZE (Brutlag et al., Comp. Chem. 17:203-207 (1993), the entirety of which is herein incorporated by reference) search algorithms on a Sybase system can be used to identify open reading frames (ORFs) within the genome that contain homology to ORFs or proteins from other organisms. Such ORFs are protein-encoding fragments within the sequences of the present invention and are useful in producing commercially important proteins such as enzymes used in amino acid biosynthesis, metabolism, transcription, translation, RNA processing, nucleic acid and a protein degradation, protein modification, and DNA replication, restriction, modification, recombination, and repair.

[0242] The present invention further provides systems, particularly computer-based systems, which contain the sequence information described herein. Such systems are designed to identify commercially important fragments of the nucleic acid molecule of the present invention. As used herein, “a computer-based system” refers to the hardware means, software means, and data storage means used to analyze the nucleotide sequence information of the present invention. The minimum hardware means of the computer-based systems of the present invention comprises a central processing unit (CPU), input means, output means, and data storage means. A skilled artisan can readily appreciate that any one of the currently available computer-based system are suitable for use in the present invention.

[0243] As indicated above, the computer-based systems of the present invention comprise a data storage means having stored therein a nucleotide sequence of the present invention and the necessary hardware means and software means for supporting and implementing a search means. As used herein, “data storage means” refers to memory that can store nucleotide sequence information of the present invention, or a memory access means which can access manufactures having recorded thereon the nucleotide sequence information of the present invention. As used herein, “search means” refers to one or more programs which are implemented on the computer-based system to compare a target sequence or target structural motif with the sequence information stored within the data storage means. Search means are used to identify fragments or regions of the sequence of the present invention that match a particular target sequence or target motif. A variety of known algorithms are disclosed publicly and a variety of commercially available software for conducting search means are available and can be used in the computer-based systems of the present invention. Examples of such software include, but are not limited to, MacPattern (EMBL), BLASTIN and BLASTIX (NCBIA). One of the available algorithms or implementing software packages for conducting homology searches can be adapted for use in the present computer-based systems.

[0244] The most preferred sequence length of a target sequence is from about 10 to 100 amino acids or from about 30 to 300 nucleotide residues. However, it is well recognized that during searches for commercially important fragments of the nucleic acid molecules of the present invention, such as sequence fragments involved in gene expression and protein processing, may be of shorter length.

[0245] As used herein, “a target structural motif,” or “target motif,” refers to any rationally selected sequence or combination of sequences in which the sequences or sequence(s) are chosen based on a three-dimensional configuration which is formed upon the folding of the target motif. There are a variety of target motifs known in the art. Protein target motifs include, but are not limited to, enzymatic active sites and signal sequences. Nucleic acid target motifs include, but are not limited to, promoter sequences, cis elements, hairpin structures and inducible expression elements (protein binding sequences).

[0246] Thus, the present invention further provides an input means for receiving a target sequence, a data storage means for storing the target sequences of the present invention sequence identified using a search means as described above, and an output means for outputting the identified homologous sequences. A variety of structural formats for the input and output means can be used to input and output information in the computer-based systems of the present invention. A preferred format for an output means ranks fragments of the sequence of the present invention by varying degrees of homology to the target sequence or target motif. Such presentation provides a skilled artisan with a ranking of sequences which contain various amounts of the target sequence or target motif and identifies the degree of homology contained in the identified fragment.

[0247] A variety of comparing means can be used to compare a target sequence or target motif with the data storage means to identify sequence fragments sequence of the present invention. For example, implementing software which implement the BLAST and BLAZE algorithms (Altschul et al., J. Mol. Biol. 215:403-410 (1990)) can be used to identify open frames within the nucleic acid molecules of the present invention. A skilled artisan can readily recognize that any one of the publicly available homology search programs can be used as the search means for the computer-based systems of the present invention. Having now generally described the invention, the same will be more readily understood through reference to the following examples which are provided by way of illustration, and are not intended to be limiting of the present invention, unless specified.

### EXAMPLE 1

[0248] The cDNA library of the present invention designated LIB29, is prepared from Triticum aestivum spikelets. The wheat cultivar OSLO is used for collection. Seeds are planted at a depth of 0.5 inches in 1-inch diameter by 6-inch long conetainers (one seed per conetainer). The conetainers are filled with Metromix 200 potting soil, supplemented with slow release fertilizer. Conetainers are loaded in racks of 200 that occupy a 1.0 ft by 2.0 ft area. After seeding, the racks are placed in growth chambers with a 14/10 hour day/night cycle at 18° C. These chambers are equipped with metal halide lamps which deliver ˜350 uE/m2/sec. Humidity is maintained at 50%, and plants are watered twice daily. At Feekes stage greater than 10 but before anthesis, spikelets are harvested from plants and frozen in liquid nitrogen. Spikelet tissue consists of glume, lemma, palea, anthers, filaments, and gynoecium. The collected tissue is stored at −80° C. until total RNA preparation.

[0249] For the construction of the cDNA library of the present invention, the SMART™ PCR cDNA Library Construction Kit (Clontech Laboratories, Inc, Palo Alto Calif.) or a similar system, following the protocol and conditions suggested by the manufacturer, is used. Total RNA is isolated from the anther tissue using Trizol reagent (Gibco BRL, Life Technologies, Gaithersburg, Md.). The cDNA is synthesized by first generating first strand cDNA from total RNA using the Superscript II enzyme (Gibco BRL, Life Technologies, Gaithersburg, Md.) and the SMART kit. The cDNA is then PCR amplified using the appropriate primers supplied in the SMART™ PCR cDNA Library Construction Kit, resulting in amplified double stranded cDNA. Adaptors from the SMART kit are ligated to the cDNA, followed by digestion with Not1 and Sal1. After size fractionation using SMART kits, the cDNA is ligated into the pSPORT 1 cloning vector. The ligated cDNA is introduced by transformation into Max Efficiency DHF-alpha Competent cells (Gibco BRL, Life Technologies, Gaithersburg, Md.).

[0250] The quality of the cDNA libraries is determined by examining the cDNA insert size, and also by sequence analysis of a random selection an appropriate number of clones from the library.

### EXAMPLE 2

[0251] The cDNA library of the present invention designated LIB30, is prepared from Triticum aestivum glumes/lemmas and paleas. The wheat cultivar OSLO is used for collection. Seeds are planted at a depth of 0.5 inches in 1-inch diameter by 6-inch long conetainers (one seed per conetainer). The conetainers are filled with Metromix 200 potting soil, supplemented with slow release fertilizer. Conetainers are loaded in racks of 200 that occupy a 1.0 ft by 2.0 ft area. After seeding, the racks are placed in growth chambers with a 14/10 hour day/night cycle at 18° C. These chambers are equipped with metal halide lamps which deliver ˜350 uE/m2/sec. Humidity is maintained at 50%, and plants are watered twice daily. At Feekes stage greater than 10 but before anthesis, spikelets are removed from plants. The spikelets are dissected carefully to separate glume/lemma and palea from other floral tissues. The glume/lemma and palea tissue is frozen in liquid nitrogen and stored at −80° C. until total RNA preparation.

[0252] For the construction of the cDNA library of the present invention, the SMART™ PCR cDNA Library Construction Kit (Clontech Laboratories, Inc, Palo Alto Calif.) or a similar system, following the protocol and conditions suggested by the manufacturer, is used. Total RNA is isolated from the anther tissue using Trizol reagent (Gibco BRL, Life Technologies, Gaithersburg, Md.). The cDNA is synthesized by first generating first strand cDNA from total RNA using the Superscript II enzyme (Gibco BRL, Life Technologies, Gaithersburg, Md.) and the SMART kit. The cDNA is then PCR amplified using the appropriate primers supplied in the SMART™ PCR cDNA Library Construction Kit, resulting in amplified double stranded cDNA. Adaptors from the SMART kit are ligated to the cDNA, followed by digestion with Not1 and Sal1. After size fractionation using SMART kits, the cDNA is ligated into the pSPORT 1 cloning vector. The ligated cDNA is introduced by transformation into Max Efficiency DHF-alpha Competent cells (Gibco BRL, Life Technologies, Gaithersburg, Md.).

[0253] The quality of the cDNA libraries is determined by examining the cDNA insert size, and also by sequence analysis of a random selection an appropriate number of clones from the library.

### EXAMPLE 3

[0254] The cDNA library of the present invention designated LIB31, is prepared from Triticum aestivum floral reproductive tissue (stamens, gynoecium). The wheat cultivar OSLO is used for collection. Seeds are planted at a depth of 0.5 inches in 1-inch diameter by 6-inch long conetainers (one seed per conetainer). The conetainers are filled with Metromix 200 potting soil, supplemented with slow release fertilizer. Conetainers are loaded in racks of 200 that occupy a 1.0 ft by 2.0 ft area. After seeding, the racks are placed in growth chambers with a 14/10 hour day/night cycle at 18° C. These chambers are equipped with metal halide lamps which deliver ˜350 uE/m2/sec. Humidity is maintained at 50%, and plants are watered twice daily. At Feekes stage 8 and 9, spikelets are removed from plants. The spikelets are dissected carefully to separate floral reproductive tissue (stamens, gynoecium) from other floral tissues. The floral reproductive tissue (stamens, gynoecium) is frozen in liquid nitrogen and stored at −80° C. until total RNA preparation. Glumes, lemma, and palea are not included in the RNA preparation and library construction.

[0255] For the construction of the cDNA library of the present invention, the SMART™ PCR cDNA Library Construction Kit (Clontech Laboratories, Inc, Palo Alto Calif.) or a similar system, following the protocol and conditions suggested by the manufacturer, is used. Total RNA is isolated from the anther tissue using Trizol reagent (Gibco BRL, Life Technologies, Gaithersburg, Md.). The cDNA is synthesized by first generating first strand cDNA from total RNA using the Superscript II enzyme (Gibco BRL, Life Technologies, Gaithersburg, Md.) and the SMART kit. The cDNA is then PCR amplified using the appropriate primers supplied in the SMART™ PCR cDNA Library Construction Kit, resulting in amplified double stranded cDNA. Adaptors from the SMART kit are ligated to the cDNA, followed by digestion with Not1 and Sal 1. After size fractionation using SMART kits, the cDNA is ligated into the pSPORT 1 cloning vector. The ligated cDNA is introduced by transformation into Max Efficiency DHF-alpha Competent cells (Gibco BRL, Life Technologies, Gaithersburg, Md.).

[0256] The quality of the cDNA libraries is determined by examining the cDNA insert size, and also by sequence analysis of a random selection an appropriate number of clones from the library.

### EXAMPLE 4

[0257] The cDNA library of the present invention designated LIB103, is prepared from Triticum aestivum 1-2 mm spikes. The wheat cultivar OSLO is used for the collection. Seeds are planted at a depth of 0.5 inches in 1-inch diameter by 6-inch long conetainers (one seed per conetainer). The conetainers are filled with Metromix 200 potting soil, supplemented with slow release fertilizer. Conetainers are loaded in racks of 200 that occupy a 1.0 ft by 2.0 ft area. After seeding, the racks are placed in growth chambers with a 14/10 hour day/night cycle at 18° C. These chambers are equipped with metal halide lamps which deliver ˜350 uE/m2/sec. Humidity is maintained at 50%, and plants are watered twice daily. At Feekes stage 4-5, 1-2 mm spikes are harvested from plants and frozen in liquid nitrogen and stored at −80° C. until total RNA preparation.

[0258] For the construction of the cDNA library of the present invention, the SMART™ PCR cDNA Library Construction Kit (Clontech Laboratories, Inc, Palo Alto Calif.) or a similar system, following the protocol and conditions suggested by the manufacturer, is used. Total RNA is isolated from the anther tissue using Trizol reagent (Gibco BRL, Life Technologies, Gaithersburg, Md.). The cDNA is synthesized by first generating first strand cDNA from total RNA using the Superscript II enzyme (Gibco BRL, Life Technologies, Gaithersburg, Md.) and the SMART kit. The cDNA is then PCR amplified using the appropriate primers supplied in the SMART™ PCR cDNA Library Construction Kit, resulting in amplified double stranded cDNA. Adaptors from the SMART kit are ligated to the cDNA, followed by digestion with Not1 and Sal1. After size fractionation using SMART kits, the cDNA is ligated into the pSPORT 1 cloning vector. The ligated cDNA is introduced by transformation into Max Efficiency DHF-alpha Competent cells (Gibco BRL, Life Technologies, Gaithersburg, Md.).

[0259] The quality of the cDNA libraries is determined by examining the cDNA insert size, and also by sequence analysis of a random selection an appropriate number of clones from the library.

### EXAMPLE 5

[0260] The cDNA library of the present invention designated LIB104, is prepared from Triticum aestivum anthers. The wheat cultivar OSLO is used for the collection. Seeds are planted at a depth of 0.5 inches in 1-inch diameter by 6-inch long conetainers (one seed per conetainer). The conetainers are filled with Metromix 200 potting soil, supplemented with slow release fertilizer. The conetainers are loaded in racks of 200 that occupy a 1.0 ft by 2.0 ft area. After seeding, the racks are placed in growth chambers with a 14/10 hour day/night cycle at 18° C. These chambers are equipped with metal halide lamps which deliver ˜350 uE/m2/sec. Humidity is maintained at 50%, and plants are watered twice daily. At Feekes stage greater than 10 but before anthesis, spikelets are removed from plants. The spikelets are dissected carefully to separate anthers from other floral tissues. The anther tissue is frozen in liquid nitrogen and stored at −80° C. until total RNA preparation.

[0261] For the construction of the cDNA library of the present invention, the SMART™ PCR cDNA Library Construction Kit (Clontech Laboratories, Inc, Palo Alto Calif.) or a similar system, following the protocol and conditions suggested by the manufacturer, is used. Total RNA is isolated from the anther tissue using Trizol reagent (Gibco BRL, Life Technologies, Gaithersburg, Md.). The cDNA is synthesized by first generating first strand cDNA from total RNA using the Superscript II enzyme (Gibco BRL, Life Technologies, Gaithersburg, Md.) and the SMART kit. The cDNA is then PCR amplified using the appropriate primers supplied in the SMART™ PCR cDNA Library Construction Kit, resulting in amplified double stranded cDNA. Adaptors from the SMART kit are ligated to the cDNA, followed by digestion with Not1 and Sal1. After size fractionation using SMART kits, the cDNA is ligated into the pSPORT 1 cloning vector. The ligated cDNA is introduced by transformation into Max Efficiency DHF-alpha Competent cells (Gibco BRL, Life Technologies, Gaithersburg, Md.).

[0262] The quality of the cDNA libraries is determined by examining the cDNA insert size, and also by sequence analysis of a random selection an appropriate number of clones from the library.

### EXAMPLE 6

[0263] The cDNA libraries are plated on LB agar containing the appropriate antibiotics for selection and incubated at 37° for a sufficient time to allow the growth of individual colonies. Single colonies are individually placed in each well of a 96-well microtiter plates containing LB liquid including the selective antibiotics. The plates are incubated overnight at approximately 37° C. with gentle shaking to promote growth of the cultures. The plasmid DNA is isolated from each clone using Qiaprep plasmid isolation kits, using the conditions recommended by the manufacturer (Qiagen Inc., Santa Clara, Calif. U.S.A.).

[0264] The template plasmid DNA clones are used for subsequent sequencing. For sequencing the cDNA libraries LIB29, LIB30, LIB31, LIB103 and LIB104, a commercially available sequencing kit, such as the ABI PRISM dRhodamine Terminator Cycle Sequencing Ready Reaction Kit with AmpliTaq® DNA Polymerase, FS, is used under the conditions recommended by the manufacturer (PE Applied Biosystems, Foster City, Calif.). The ESTs of the present invention are generated by sequencing initiated from the 5′ end of each cDNA clone.

[0265] A number of sequencing techniques are known in the art, including fluorescence-based sequencing methodologies. These methods have the detection, automation and instrumentation capability necessary for the analysis of large volumes of sequence data. Currently, the 377 DNA Sequencer (Perkin-Elmer Corp., Applied Biosystems Div., Foster City, Calif.) allows the most rapid electrophoresis and data collection. With these types of automated systems, fluorescent dye-labeled sequence reaction products are detected and data entered directly into the computer, producing a chromatogram that is subsequently viewed, stored, and analyzed using the corresponding software programs. These methods are known to those of skill in the art and have been described and reviewed (Birren et al., Genome Analysis: Analyzing DNA, 1, Cold Spring Harbor, N.Y., the entirety of which is herein incorporated by reference).

1. A substantially purified nucleic acid molecule that encodes a plant protein or fragment thereof comprising the nucleic acid sequence of SEQ ID NO: 2.

2. The substantially purified nucleic acid molecule according to claim 1, wherein said plant protein or fragment thereof is a wheat protein or fragment thereof.

3-10. (canceled)

11. A substantially purified nucleic acid molecule comprising the nucleic acid sequence of SEQ ID NO: 2 or complement thereof.

The application's sequence listing, which the Patent Office published only in electronic form, follows.

SEQUENCE LISTING (11840 sequences)

SEQ ID NO: 1 - DNA, 444 bp, Triticum aestivum
  Clone ID: LIB103-001-Q1-E1-A1
gggtccacgggcccttatgtatgcaggagcgcctagtgggtcatctgaaggaaaggacaaagacacctccaagccggacacggctactgtagctggcacggcataatggaaaacagtccctgcccttttgagggtcgtctcaaacatgcccctcgagacgtcggtgaagccgtagtttgtacaagactaacaacgccaatggcgtcgatgttatcggagccattcgtgtgctgtttactgtgtagcgcttgatgacttccttgctgtactccgcttggagccatttgagtgctgtttaccgtgcagcactcgaagacttccttgctgtactcgctggcagcatagtctgtttgctgcctggtctggggacacctgtgtactacagtacttcgtttccctttgtagtggtactacttcttagccatgtactcgtgtctgttcgag

SEQ ID NO: 2 - DNA, 455 bp, Triticum aestivum
  Clone ID: LIB103-001-Q1-E1-A2
gggtccacaagactagagtatatgcgcatccattcatccatccatccccactgccgtttcccccactatataaaccccctcccatccccaccactgctcacccctctcctctcctctcctctcctctcctccggcgtcttcctccccccaccccctctcctgatcaaagcgcacgccgagcaagctagctagcaggtggtggtgggcgcatacacatacgcttactgtacgcgacgcggctttgcttgtggccaccaccatgatgtcgtcgcccgcggagtccgagaccagcttcttcccggaccacctcgcggagcagcagcagcagcagccccccttcgccgagcaggagcagctgtgctacgtccactgcaacttctgcgacaccatcctcgcggtgggcgtgccgtgcagcagcctcttcaagacggtcgccgtgcgatgcggccactgcg

SEQ ID NO: 3 - DNA, 464 bp, Triticum aestivum
  Clone ID: LIB103-001-Q1-E1-A5
gtaccggtcctaaattcccgggtccacgggatgagagggactcaaaatgagaaggtgtcctacccaagctcagtttaatgaggaaattcaggatgatcaagcagaagctgctctagtaaaaaaattgctcgaagagagtggcaatgacacgaagaggaataaacaacctgtggatacgacgaatcagggtgccaataaaacaaagcagtttaaggcattgacgccaaaggagagcacgccaagaggagcgaaagaggttgacagttcttttactgaaggtggcttatcctccaaactgaaaaccaagctgacggttgatgcaaatgatatcattctggttaaaaagaaaaatgttcaaggaaaggatggtttaaaggagaagaggcagggagcaaggggggacagtcttgtgtgtggagcttgtggtcagcttggacatatgcggaccaacaaactgtgcccca

SEQ ID NO: 4 - DNA, 431 bp, Triticum aestivum
  Clone ID: LIB103-001-Q1-E1-A8
taccggtcctaaattcccgggtccacgggctgaacttaatgctggtgacgagaaaattagagagttgatatcagttttagaccaaaggaaggatgaatcaattgaacgcacatttaaaggagttgcaaggcacttccgcgaagtgttctctgaattagtgcaaggtggtcacggatacctggttatgatgaagaaaaaggatggtgatgctgccgatgatgacatggatgaggacacgcctcgtgaagcagatcctgaagggaggatagagaagtatattggtgtgaaagtcaaggtttccttcactggcaagggagaaactcagtccatgaagcaattgtctggagggcagaagacagtggtggcattaacactgatcttcgctatccaacgatgtgacccagctccgttctacctgtttgatgagattg

SEQ ID NO: 5 - DNA, 348 bp, Triticum aestivum
  Clone ID: LIB103-001-Q1-E1-B1
gggtccacgagtgaccaatgataatacgcggacttaaataaaaacggagggagtacacatttgttttcttagtttgtagtgaactaatcatttgttgaaattgtgaaataaatatattaggctattgacttcgaatgtaatggtctatacaattcaatagttacaatcattgtcgaatcccaagatgtatacaaggtctatagtacttcataacatgctcaaactcacacacacacacacacacgcacacacataaagtaaactagaagaccattctctcatgtatacacaacgtatcggcatctgtgtatgtctcactcatgcatgatcatttgcacattcacacct

SEQ ID NO: 6 - DNA, 427 bp, Triticum aestivum
  Clone ID: LIB103-001-Q1-E1-B10
ctgcccgtaccgttcctaaactcccgggtcgacagggaggaggaaaaggagggcgtgacatcagacggagattcgggcgatggagaagacgacgaggggggcggcggcgccgaagacatggacgacgacgacgattgatcgtagcggcctcatagcaccccttaccagttacctcaaacaagggtgggcgtccttttgaccccacagcattagctttcttgtacataggcactctccagtccaggatagttgagtggtggtgatagtggtgttggtgtaaatgtttgctgggggtaaaatgcattcatctgatactatggtttatatccctgtttttggccaaagaaagaaagaagacgacgatgagatcgagcggtttcgcgcgcttttcgaaacgcgcccgcccggtctcgttcgattcgcatga

SEQ ID NO: 7 - DNA, 450 bp, Triticum aestivum
  Clone ID: LIB103-001-Q1-E1-B2
taccggttcgagattcccgggtccacggactcaccggcatcggactgtcgccttcagagatcgcgcgactcgtcccgctcaccgccaacaacaaccactcccgcaacaaatccgtcgtctccaaggtggactactacctgcgcctcttcggctccttggaggaattcctccgggcattcaagcataaccacaatctcctctcacacaacctcgagacggtggtcaagcggaatgtcgggttgctgcaggagtgcacgctaggtgcttgcgacattgccaagcttgccatctctatgccaaggatgctcaccgccaacgtggaacaaatccgggggatggtggccggtgctgagcgtctaagtgtgcctcgcggctctgggatgttccggcaagccatgcggagtgttgcgttcgacagcgaggacaagatcgccgccaaaatggaataca

SEQ ID NO: 8 - DNA, 334 bp, Triticum aestivum
  Clone ID: LIB103-001-Q1-E1-B3
cgcctgccggtaccggatcgaccatgcccgggtcgacttattctcccccagctgcggtggctgccgagctctccaccccaagattgcgcagttcgctgagcggaatccggacgtgctgttcctgcaagtcaactacgagaagcacaagtccatgtgctacagcctccatgtccatgtcctccctttcttcaggttctacaggggagctcagggcagggtcagcagcttcagctgcaccaatgcaaccatcaagaagttcaaggacgccctcgcaaagcactcgccggacaggtgcagcctcgggccggcacgggggctccaggaggcggagctc

SEQ ID NO: 9 - DNA, 457 bp, Triticum aestivum
  Clone ID: LIB103-001-Q1-E1-B5
taccggtccgaaattcccgggtccacgggtgattgacatgtacattagggactgactcctgtctgcaaatgttcagtggtggtacatatggtaaatgtgaagttatgaaagacaccactgttggcataaaatcctatgcaggtattgctgcggagggtatcggaaacggagcgctcttgatggcaatgaattaccatgtcaatacatccaatagcgctttgtgggattacatgccaatggttttccacatctgaccttctccgaaatttttgcaccgtacttccgccatgttaggccgcgtttcatcttttgcttgttatgatagtatttcaaccctttttgtgggaaaagctgatattggttagatgttgggtatagaagagccatagagggaacctaacaacgacattttcggcagcacggtccattctttgcatattgccctgccgtttggtgc

SEQ ID NO: 10 - DNA, 375 bp, Triticum aestivum
  Clone ID: LIB103-001-Q1-E1-B6
gtaccggtcctagattcccgggtccacgggagatccgtaaactctgcagcctatctttccatacatatagccatgccgatcgcagtcttgcgaaacgtgctggtgggtcagttacatcctgttcgtgcttgtccattgtcgcctgtgtcaaatcatcagtatgacatcgtggaatacgtaactcacctaacttgttctgtcctacagtcaatcttgaatcaatgcccatcccggtcgaccgtccaaggggatccaagcctatctaagcctgcatccaatatcaaattgtcaccaatgagttctcgaaaatcaaaactgtggccattctcttacaaagaccatactgggaaaaacctggcgttaaccaacttaaac

SEQ ID NO: 11 - DNA, 460 bp, Triticum aestivum
  Clone ID: LIB103-001-Q1-E1-B7
gtaccggtcctaaattcccgggtcgacgggcaggattgtacgagtgggcgctggaactgtcaagctttggcctcaagtttgagagaacttcaactatccaaagcagagcattggcagaattcatagcagagtggacgccaacaccagatgaagaaattccagagacgagcatccccgtcaaagaggcaagcaaagagtggctgatgtactttgatggtgccttctcgctgcaaggcgccggtgcgggcgtgctgcttgtcgcgcccaccggagagcacctcaagtacgtagtccagatgcactttcccaaggagcaagcaaccaacaatactgcagagtatgaaggattgcttgccggtctcagaatcgcagcagaccttgggatcaagaagctcattgtcaggggtgactcacagcttgtcgtctgccaagtgaacaagaactaccagagtccattgat

SEQ ID NO: 12 - DNA, 413 bp, Triticum aestivum
  Clone ID: LIB103-001-Q1-E1-B8
ctgcccgtaccggtccgaaattcccggatccacgggaacacaggaaaagcaaagagatcactggcccgctttcatgaaattcaaggaatcggaattagctcaggaacggtcgagaataaacaagatcaatgccgcgaaaaaggggcattaccataagctggggctaagtgtctaagttgtggcccgggctaagttggataaaggtgaacaacagatggtgtatgcaagggtcattccaattacattgagctgggcccccgggtccaagacttgggtccaaatgcattggaagatattgggcccaaagacaaggcaagttttggagaaagggaagtcctaaaggaacccacctcaaaatacttgttgcaatataagaagctcgaacggggggtgttcacgcccaacagagagaa

SEQ ID NO: 13 - DNA, 459 bp, Triticum aestivum
  Clone ID: LIB103-001-Q1-E1-C10
cgcctgccggtaccgttcctagactcccgggtcgacagggaggctgcagatgaagtccaggctcgccggatgcggttttggctcgagccgcctccgcttgttggctgcctcaccgtccatctcaaccggccgtgacgctggtgtacacgtgtgctggtctgtgttgtgtgctggcctgctgggtgtgcgcgagtgcgtccttctgtgcatgccgccgcgtagtggtgaattgtgcgcgagtgcgtccttcacgcggaagaagtgtgtcctcaatgcaccctcagtttactagcgtgcggggtgctaccccgagtggtttcaactttgtttacttcaccgcatgtcaaatgggcctctagtttacttatttttcacccactcccacatgggccagcacacgaagatagagaacacgagctgacaaggcagcatgtggactgtgagcgtataaacaatata

SEQ ID NO: 14 - DNA, 248 bp, Triticum aestivum
  Clone ID: LIB103-001-Q1-E1-C5
gtaccggtcctacattcccgggtccacggggaccacaaagtgaagaaggacaagaagaacgaggagcaacaaaaacgcccacgcgcattgaccaccagaccggcatcatcacatcgaatgcgaactcatacgattttccgctgaaaaaaatagcggaaagcatcaccgccatggccagcatcattgccaaaatgaaggagaagctccggataggtggcagcagcgaagaattcaagaaggaacacgag

SEQ ID NO: 15 - DNA, 382 bp, Triticum aestivum
  Clone ID: LIB103-001-Q1-E1-C6
taccggtcctaaattccgggtcacggggaatggggacgagagtgagaaggtggggcttggcgacgtgtgtggcgtccctagccagctccaggcggtcggcgacaagcaggaggtggcgtgcggttgctgcccacgcgtcagtcacgcccccaaaaacccttcttccaaaaggaagggaatgactgcaattgggcaaccaaatttttgggcctgccattggcctgcaaggtaattcaggtgggtttcccccccggcccaattccggttttccgtttaattttccaatttggtttccaaggtcccaatttagtttaggcactaacccatttttataaatgttgaaaattattgtggatgctaccggatttattccgggaacccc

SEQ ID NO: 16 - DNA, 419 bp, Triticum aestivum
  Clone ID: LIB103-001-Q1-E1-C8
taccggtcctacattcccgggatcacggggatgttctagctggcatgaagcaaggggatctaatcatttggtatgttgagcagcagaatgcccaaggtgcatatagttctacagaagaggtgaaggaggaagtaaagtgcatcaaagccattatagagaggctgatacagagggaaggccatcttgtagtcatagacgaaggaacagcggcagcagaaggtgctgcagcaagggcatcggagcacagaatcctggctgttaacccgaactacgtcattgattgattaaccagctgaagacacagctaactaaattcaacaaatgttggtgaccaatagaacaagaaattcaaccggaaaaaacctggtgtcaaaagccccaaaaattgtaagttggtacttccaacccccttccaaagg

SEQ ID NO: 17 - DNA, 437 bp, Triticum aestivum
  Clone ID: LIB103-001-Q1-E1-C9
cgcctgcccgtaccgttcctaggactcccgggtcgacaggaagctgcaaaccctgtgtaaacggttgaacttgcggatgggcggtgaggcccgtagggagttgctgtataacatcgaatacagtgccgagtactgaagcatttgattttgatgatgccggtgttctttcaatcaagtaggcacgtgtagtgtttgccggtactcgaagagcacagaggctgtagtctgtaaattatactttgtaacagttttcctaatcattcttcagtatcccaggcttccttttttcgctggagagacaggatgagattttatttgttaggatttcagaataaggtcctaatacatttgtttctttgctcaacgcgctatcttccacagtcagaggatggatgtaacgttagttcatcataatgttatccttctgcaaaataaaa

SEQ ID NO: 18 - DNA, 382 bp, Triticum aestivum
  Clone ID: LIB103-001-Q1-E1-D4
acgcctgcagtaccggtcgtacagtccgggtccacagacccttgaaactctgcacttaaatggagccactagtgcccctcggttagctgaagacgatgaaaattccgttgctagcgacttgcattgctttgagttgaacatgcatggagatgctgtgcagactcatgaccttgcaggaactcgacgaacagtcgccgactgcatgtattcaccaatgagaagactggagttttccgatggtgtgtctgttgaaggctcgaggatgtcaaccgcaacgcctcgttcagaaaaaggcaaggtgaagccaggcagcagcaaagcacagctgcatacttcggcaccaggaatcagctcccgcaacggtgacaggatcgatcctata

SEQ ID NO: 19 - DNA, 379 bp, Triticum aestivum
  Clone ID: LIB103-001-Q1-E1-D5
taccggtcctaaattcccgggtcgacagtcactggagaaacagcacttcaatggagccactagtgcccctcggttagctgcagacgatgaaaattccgttgctagcgacttgcagtgcggttagttgaacatgcatggaagatgctgtgcagacggacgaccttgacggtacaccactaatagtcgtcgactgcatgtcatcacccttcagaagagtggacttttcccaaggcagtggtccgtcaatgtacgaggatctcaatgggaaagccccgttctataacaagttaagtgaattgaagcagaaccccctttcagctgcagacttcggcaccaaaaagcccctcccgctactgttacccgatagatgcgcaacatg

SEQ ID NO: 20 - DNA, 408 bp, Triticum aestivum
  Clone ID: LIB103-001-Q1-E1-D6
taccggtcctaaattcccgggtccacgggagggatctaagatttggtgcggaagagtgagagagagagagtgaaatgtgttctagggtttgttcaaagtgaatggtcaaccctctcccgtgggggaggagggctatatatagtgtgagcccaaatgtggccgttgtaatgcaagtacgggcaggccggacatccgggcaaggggccggacatccggcttggcaaggcactaaaataccagacctaaaccagaggaaaaaacagaggggccggacatccggggccaagcccagacatccggcatatcaggaaagcccagacatccggcacatggccggacatccggcaagttcaccaaatcgaatagccctctagatagcacaagccggacgtccgacaagggagccca

SEQ ID NO: 21 - DNA, 463 bp, Triticum aestivum
  Clone ID: LIB103-001-Q1-E1-D7
taccggtcctaaattcccgggtccacatgggtgtagaccacgacctgactaaccacacaaatccctagtccaggtttatcgcctattcaggttccatccgtagggagtccgaccgaggtttccacatacggccccgaacgatgtgtatagggtttcgagacaccaaacgggcgcccgacatacctggccacgtacctaccgcatcacagcccaccccaagggtcagcgctgtgcacggcctccattatactacaaacaccttgcaactcctggacagaggacaagggtggttaataagtcgagcggggtcatatttcaaggcccaatgcatggtagtagctgattcttaatcacacatacagatctcagttcttaggatcggttccaatgaaacaacccaccatgtactcctacatggcctctcatcgatacctttaccaaatcatgttcaacacttaactcc

SEQ ID NO: 22 - DNA, 154 bp, Triticum aestivum
  Clone ID: LIB103-001-Q1-E1-D8
gtaccggtcctacattcccgggtccacggggtacccgtagatccactatgcaatagaccactcgggcagtgttgccataggcgacacgcagagcccgcactgtcagatgggagagcgccaacggcctttggacgatgtcaggaacgggggacct

SEQ ID NO: 23 - DNA, 479 bp, Triticum aestivum
  Clone ID: LIB103-001-Q1-E1-E1
cctgcccgtaccggtccgaaagtcccgggtcgacggagagcagctcacatgtctttaatgggccagttcttactcaagaggtcaacaatcccaactatacatatagtccaactcaaaaggttgtagaacctaattttgtagttggggccccgtcgtccactaggttatctgaagctggtggtcagttaaattgtgttgttttaccagattctcaggctaagaatgggcgttttgtaaagatgctggattcaatctcggctccccctgcttttgcagcagagttcccaggcaaatccttgtctggtgtgcaccctaacaccatcagcgtgtctaccgaagtaatcagcataggaagcttaactgttgcttctcgacaaggcaagtggtcgttccagaaggatgaagacatggagcttctcttctccacaggtttccagcctgataaccgcatacactgtggtggctgcaacacagtgact

SEQ ID NO: 24 - DNA, 398 bp, Triticum aestivum
  unsure at all n locations
  Clone ID: LIB103-001-Q1-E1-E10
acgcctgccggtaccgttcctagactcncgggtcgacagggacgcaagcaccgccattctcacccgtccccctgtcctcacctccacaggagattaagcctacgcacgcgttgagagcttccaatctgctaccatggataacgttccacataccaatacgacctactgcaacaacatagatgtgcaagaagcacaccctccacagcgttacacaatacagggcccgcaacgatagtctttctgctcacggcaatcgtcgttatgaccgcaatcagtcaggatatcgtggccagaccaagcctgttttccacaagaatgccacgacaacatataatattgtactgaatctgcagtgccagagcttcatgcattactcgcaacgcgccatcatgaggtgc

SEQ ID NO: 25 - DNA, 456 bp, Triticum aestivum
  unsure at all n locations
  Clone ID: LIB103-001-Q1-E1-E11
acgcctgcccgtacctgtccgaaactcncgggtcgacaggatgacgttgcgggattctcgggagatgaactacgatagcaagctccaaaacatgagctggttctgctacaaacatgtgaacacgatgtccaagacaagcatgaccacaaagtagtcttataataaaacactaccgagttcaggagggggaaccatcaacgagggtatcgaagtccttacataagtccggattagctcttatgaagaaactccttctccttgaacaaatcaatcagtggcttggtgtgctagggatacatatagattgaaggttgcaagtcttcaaaccacagcattcttcgcacgtgtgcatgactgatttggaatgattccaaagaaagcaacattgactttctcgaatccatggcggcaacttgcatcagatgcacatgaattaaaggaagtcactaacttcat

SEQ ID NO: 26 - DNA, 440 bp, Triticum aestivum
  Clone ID: LIB103-001-Q1-E1-E5
gtaccggtcctagattcccgggtccacgggtcatgcataaaggcatcaccactaggagaaaaagacacatccgtgacattttgggccgaacgaattttttttctgtcatacatatgacacttctatgacgataattgtgacaaaacccggtagcatcatagatgtggtaggctcctacttctatgacaaaaaatcatgacagaaaatgggcttttcatcctgggcgggctggagacgcagctgcatgacattctttgggccgtccatgatggaaaaaccgtggtagaagcgagggggaggaaaatttcgggaagtttccggttacggtgggaggtccgaggccgagcgatgcgcgtttctctcgtacacgtacgcgcgtgtgtccgaggcgttggctcgaactgaacccgagcgaggcgttgggctctaactgaacccga

SEQ ID NO: 27 - DNA, 460 bp, Triticum aestivum
  Clone ID: LIB103-001-Q1-E1-E6
taccggtcctaaattcccgggtcgacgggattgaggcgagaggatttatatttggccccgcgattgcactagccatcggtgccaagttcattccgttgcgcaagcctaagaaactcccaggtgaggtgatttctgagacctatgttctcgaatacggaactgattgtctggagatgcatgttggtgctatcgaaccccgtgagcgtgttttgatagttgatgatctggttgcaactggtgggacactttgtgctgctataaatcttctggaacgtgctggagctgatgtcgttgagtgtgcttgtctcattgggctccctaaatttaaagatttttacaagctcaacgggaagcctgtctatgtactggtggagtctctggaatatgaaaaataagaaaccggtgaccagggacgcaccatggcttcatcctgctgccgtagtattagggagtgggggag

SEQ ID NO: 28 - DNA, 449 bp, Triticum aestivum
  Clone ID: LIB103-001-Q1-E1-E7
taccggtcctaaattcccgggtccacggggtcggcgaatggggaaggctcgccggctgggcgacagcgagctccgatgagtgcaacgaatggaagccaggcgtcggcttacaacaatgattcgggtgcctgtggcatgatggagagccgccgctgaaagctcagtgatggggcgagttggttgaggcgtcaatggcacctttgctcgtgaccgaggatggcacttgcacagctgaagtaagatgcaggccaacttcagcctccaaggcttccctggcaccctcctctgccactacgtgctcaacaacaaggtcttcgaagggttagggcttagggcaactcgatggtagccagtcggagtttgctaggttacatatgcaagtccttttgaaatctcaaacttctttgtggtgatgagcttctgctcatcttgattgattcctctacagt

SEQ ID NO: 29 - DNA, 441 bp, Triticum aestivum
  Clone ID: LIB103-001-Q1-E1-E8
taccggtccagaattcccgggtccacgggtgcctcgccaaaacctcagtgaagatcattggtgcagacaagtggtctttacagcataaatcaattcctgacaagttgcaaagcctgtacaatgatggctacaagttggtcatattcaccaatgagtcaaacattgagcgctggaagaataagcggcagcaagctgttgactcaaaagttggacgccttgacaactttattgagtgtgttaaagtccctattcaggttttcattgcgtgtggtactgggaaaggaaaaggcacaccggatgatctgtttcgcaaaccaaattcaggaatgtggtggttgatggcagagcatttcaattctggaattgccatcgacatgggaccaatctttctatgttggcgatgctgctgggaaacagaatgatcatagtgacgcagatata

SEQ ID NO: 30 - DNA, 416 bp, Triticum aestivum
  unsure at all n locations
  Clone ID: LIB103-001-Q1-E1-F12
cgcctgcccgtaccgtgtccgaaactcncgggtcgacaggcgacggcggaggcgcccacatcaacctcaaggtcaaggggcaggatggcaatgaggttttcttccgcatcaagagatcgacacagctgaagaagctgatgaacgcctactgcgaccgtcagtctgtggatctcaactccattgctttccttttcgatggtcgtaggctccgtggtgagcagacccctgatgagctggagatggaggaaggcgacgagatcgacgccatgcttcaccagaccggagggtgctttcctcgcccttagaaggagcttgcttgcagcctggctgttctatgtcgtatgctacctttagaactagagtaaaatgtaagaagtgaaagaacttgtgaggctatgggtctgtgccataacctg

SEQ ID NO: 31 - DNA, 444 bp, Triticum aestivum
  Clone ID: LIB103-001-Q1-E1-F5
gtaccggtcctaaattcccgggtccactgaataattaagtcggcctcgccagtattggcaaacactgagcatcggctataggagatccaccatggtgaacaccgttagacagatgccgggttttgccaacacaatgaattatgagggcgatatgcaaatatcgaccatgcgttcttatctcaaaagtgctcgggagtccgttcaccaaagtgtgaatagccgaaataagtcagatgtttcggctgaggataaattccatagcgttgattttgatggtacgatcgaagaatatggatgagacgcctcttggagtctcctatatgaaaattgtcgtccttgcctacgggctttacacttgtactcccttaattccactagcttcgcaataggagatgtgatgccgctcaatgactcgaggatttcccttaagaacccaagccatgt

SEQ ID NO: 32 - DNA, 440 bp, Triticum aestivum
  Clone ID: LIB103-001-Q1-E1-F6
attcccgggtcgaccgggcagaagaaaaagatcaccatcaccaacgacaagggcaggctgagcaaggaggagattgagaagatggtccacgaggctgagaagtacaagtctgaggatgaggaggagatgaagaaggtggagtcgaagaacgccctggagaactaatcgtacaacatgcgcaacaccatcaaggatgagaagatcacctccaagctgccggcggacgacaacaagaagatcgaggacgccattgacactgccatccaatgactggacacaaaccagctcgctgatgcggatgacttcgaagacaagatgaacgagcttgacgctctgtgcaaccccatcatcgccaggatctaccagggtgctggtgccgaaatggaaggccgcatggacgatgaaagcccgggctgcatccggcggtgctgggtccaaga

SEQ ID NO: 33 - DNA, 461 bp, Triticum aestivum
  Clone ID: LIB103-001-Q1-E1-F7
cctgccggtaccggtcctgaattcccgggtcgacgggtgctcctgtttagtaataaataattcatctagcctctggttaaatgtggttttgtgttttaattagtgtttgtgctaagtagaacctttgggaagacttgggtgaagtctttataatcttgctgtaaaaaacagaaacttttgcgctcacgagattagcggccattttttactggagagtgattttaggttgattagtttttcagaagattaatagacaaattcctcaggtccaccaatttatttcagaatttttggagttacataagtatgcgtttgatacagattgctacagactgttctgtttttgacagattctgttttccttgtgttgtttgcttattttgatgaatctatgagtagtatcgcagggtatgaaccatagataagttggaatacagtagatattacactaatatgaattt

SEQ ID NO: 34 - DNA, 374 bp, Triticum aestivum
  Clone ID: LIB103-001-Q1-E1-F8
taccggtcctgaattcccgggtccacgggataataatagtgcggatggcgatgttcccaagagtggtcctgtcgaagacgaggagcatattgcttctctgaggcctaaaagatcaaagagactagtgaggagcacgggtgaggataaggaatccgttgctgcttgtgatgttgagaaacctgcagatgcagctgaaaacaatgacaacaatgatgcacaagagttgcaatatccttcagcctagtggacctactgggttgacctgatgagaacataagatgcaaatggcaagacccaaatttttggggtcaattaggagcatcaaggatggaacccaaaggaggacctcgggtttgccttaaggggttaccaat

SEQ ID NO: 35 - DNA, 374 bp, Triticum aestivum
  Clone ID: LIB103-001-Q1-E1-G11
tggtacgcctgcccgtaccgttcctaagctcccgggtcgacagctgcaacaaacacggggtctccctcatgttcaccggcgtccgccacttcaggcactgagcctaacctgagtccgtatggtcatatcaccggtctactgtcagtcagtccgccgtgggaacttgcggatgtttgtcgcaataagacagacgcaggtgattctgagtccaactaggattagttgtatgacggtggcgaaagcattttgccacgtacgcaagtgaggacgcctaggtgttcgtcacattgctgagccagcagcggctgcgtaataacaaggtcggaaaaccaggggccatgtactagctaaagtaagcaaaaagtgtgtttgta

SEQ ID NO: 36 - DNA, 483 bp, Triticum aestivum
  Clone ID: LIB103-001-Q1-E1-G4
cctgcccgtaccggtccgagaattcccgggtcgacggaccagtgccaagggcaagaccgacgtgcagtacatcatcctcgacagggtgatgcagcagccatcagcagcatcgtcaggaggggcatgctggatgagctcaagaagaccctggtcaggaggagcattcaggtaagaacagagcaacacaaattgtcatgtttctaagggaaatagagcatgctttgtgatatgaacaatggctgatttatcgttttgtaaacctaaactttccaacaaacttgcgagaaatttatattcagatggcacatggaaatttatattcagatgatatggctacttcatattagggagatattttcgagtggagagcatattaagttaccatcagttttcttgacataccaaattgatgttggaaccgtatgcattggtaatgttaattaattgccatggcaaaaatactttttaataaagtcgccatca

SEQ ID NO: 37 - DNA, 368 bp, Triticum aestivum
  Clone ID: LIB103-001-Q1-E1-G6
attcccgggtccacgggcctccttaaatcttcctcaaaacagtcaccatacctacctatttatggcatttccatagctattccgagatatatttccatgcaactttccaccgttccgttcatcatcatcatgacatgcgttacttttgtcatattgccattgcatgatcatgtagttgacatcgtatttgtggtaaagccactacgcataatttttatacatgtcactcttgattcattgcaccatcccggtacaccgccggaggcattcatatagagtcacatcttgttctagtttcgagttgtaattcatgtgttgtaatcaataaaagtgtgatgatcatcattattagagcattgcccagaaag

SEQ ID NO: 38 - DNA, 191 bp, Triticum aestivum
  Clone ID: LIB103-001-Q1-E1-G7
taccggtccgacattcccgggtccacgggaggttctcacaggtcgtgtccaacgccgtggacatgaagctcagggatgaccttgagaggctcaagaagatcaggaaccatcgtggtctgcgtcactactggggtgtgcgtgtcggcggggagcacaccaggactaccggcaggacaggaaagactgttggt

SEQ ID NO: 39 - DNA, 405 bp, Triticum aestivum
  Clone ID: LIB103-001-Q1-E1-G8
attcccgggtccacgggaggttctcacaggtcgtgtccaacgccgtggacatgaagctcagggatgaccttgagaggctcaagaagatcaggaaccatcgtggtctgcgtcactactggggtgtgcgtgtccgcggtcagcacaccaagactaccggcaggagaggaaagactgttggtgtctccaagaagcgataagctgcttcacaaagattcctcatagctttgctactactgtgttggtccatttccagaatcttaagggagtgttcttatttagatgattaccttggatgatgttttgccctagataatgttttggttctggaacctttaatatattgtatcttgaattccttgttgaactcgtacaagagtttgttttgccatgtgcttccagtgaaaa

SEQ ID NO: 40 - DNA, 428 bp, Triticum aestivum
  Clone ID: LIB103-001-Q1-E1-H5
taccggtccgaaattcccgggtcgacgaggaggaagaacccgaggaggagctaggaactgaatatctggtgcagccgcttggccgtgctgaagacgaagagcattccagtgacttcgagccagaagaaaatggtgatggtgctgaggacgaggagattgaggatgacgatgctgaggatggtgaggatcctgtcaaggcgcaatccccatcaaagaggaagaggtctggtggggaggatgaagatgatgacgacggtgatgatgatggtgatgatgatgagaagcctccatcaaagcgatagtcaatttgttcgtgctgatctgtgatcttctctgcttgggccaagaaggaaaataatcctcatggagaggattgttggtaaatgctgtagctttaggacatctgtggtaggtgtagcagctcaaac

SEQ ID NO: 41 - DNA, 460 bp, Triticum aestivum
  Clone ID: LIB103-001-Q1-E1-H6
ctgccggtaccggtcctaaattcccgggtcgacgggtgccccggatggcatcccctctttcgtcttcgttcatcggtaactttacttggagctatatttttattcgccacatgatggcatcccctgttttgcttggagcattattttattttgctagtttttgcttgctgtcagttagcataatgttttgcatctttagtttcaataaaaaaagtcaaggatagcctttgccatgcttaatttgctagtttgcatgttgctgtttgaaaacagaaagttcaccgttgttgcaaaaattccctagaaaagtcatagaatggtataacgttgaatctttttgcatattaagctctgataaatttattacagtaggaattttagttcataatttgtggattcagggaagtatttttactcctgcattctttacatactgtactgttttcgcagattgctgtta

SEQ ID NO: 42 - DNA, 337 bp, Triticum aestivum
  Clone ID: LIB103-001-Q1-E1-H7
ggtcctgaattcccgggtcgacgacagcgtgaatgatgcacctacacccctgccctggtcgaggtggtccggccggatttgtgaccagccatgagcagagagagagagtgtgtggccgcctatgtcttgcgtagatctagagagcatgagagagtgaaacagaggaaccctagtagagcaagcgctaaggctcctgcttatatatatggtggagtgattttgttgtaccagcttcaaaaaaatgcgctcctacgtgtacccgcgagtgggtgtgagagaactagtgcgtgcgtgcaccgcttctcgtcgtgagagtacaagatacgatgcccaaaga

SEQ ID NO: 43 - DNA, 421 bp, Triticum aestivum
  Clone ID: LIB103-001-Q1-E2-A1
taccggtcctaaattcccgggtcgacgggcccttaggtttgcaggagcgcctagtgggtcatctgaaggaaaggacaaagacacctccaagccggacacggctactgtagctggcacggcataatggaaaacagtccctgcccttttgagggtcgtctcaaacatgcccctcgagacgtcggtgaagccgtagtttgtacaagactaacaacgccaatggcgtcgatgttatcggagccattcgtgtgctgtttactgtgtagcgcttgatgacttccttgctgtactccgcttggagccatttgagtgctgtttaccgtgcagcactcgaagacttccttgctgtactcgctggcagcatagtctgtttgctgcctggtctggggacacctgtgtactacagtacttcgtttccctttgt

SEQ ID NO: 44 - DNA, 430 bp, Triticum aestivum
  Clone ID: LIB103-001-Q1-E2-A10
taccggacctaaattccgggtcgacggggcgtcacactatatcaatcaacaataattcttgccgaatgaaaagttccagtagttcactctataatcctagtattggttacatgcacacacatctcagtgtaatccaacaatatctacacagggtcttgtttttgtgctagtgacaagttgagttagttgcaatggtctagctgctaaacaagcagacctgagttcgacgatgtaccgatcaatcctttgatcccgagaatagtttttttagtggttgatcccgatcacgagaaaagtgaatcgagaaaactgatcgcaattgatgatgagaaaatcgaaaaccggtagggcctaaaaaccaaggattgacatacaagaaaggaaaatgcttgtggctggcagggcagccgaactttaagctggtcatgca

SEQ ID NO: 45 - DNA, 388 bp, Triticum aestivum
  Clone ID: LIB103-001-Q1-E2-A11
attcgcgggtcgacttcttctcccccggctgcggtggctgccgcgctctccaccccaagattgcgcagttcgctgagcggaatccggacgtgctgttcctgcaagtcaactacgagaagcacaagtccatgtgctacagcctccatgtccatgtcctccctttcttcaggttctacaggggagcccagggcagggtcagcagcttcagctgcacaaatgcaaccatcaagaagttcaaggacgccctcgcaaagcactcgccggacaggtgcagcctcggcccggcgcgggggctcgaggaggcggagctcttggctctggcggcaaacagggacctggaattcacctacaacgagaagccgacgctggtgccgatcgccgaggctat

SEQ ID NO: 46 - DNA, 146 bp, Triticum aestivum
  Clone ID: LIB103-001-Q1-E2-A4
tagtgagtcgtattaaactgtctggtgcgggtcaggatcggtgggggcgttgcagcggcgcgacgcgtgcggcgggggcggcggcgccgctgtgtgggagcatgaggacggcgttcggtacgggatggagtaggatggtatgcgag

SEQ ID NO: 47 - DNA, 461 bp, Triticum aestivum
  Clone ID: LIB103-001-Q1-E2-A5
gtaccggtccagaattcccgggacgacgggatgagagggctcaaaatgagaaggtgtcctacccaagctcagtttaatgaggaaattcaagatgatcaagcagaagctgctctagtaaaaaaattgctcgaagagagtggcaatgacacgaagaggaagaaacaacctgtggatacgacgaatcagggtgccaataaaacaaagcagtttaaggcattgacgccaaaggagagcacgccaagaggagcgaaagaggttgacagttcttttactgaaggtggcttatcctccaaactgaaaaccaagctgacggttgatgcaaatgatatcattctggttaaaaagaaaaatgttcaaggaaaggatggtttacaggagaagaggcagggagcaaggggggacagtcctgtgtgtggagcttgtggtcagcttggacatatgcggaccaacaaacggtgccc

SEQ ID NO: 48 - DNA, 459 bp, Triticum aestivum
  Clone ID: LIB103-001-Q1-E2-A6
gtaccggtccagaattcccgggtcgacgggatggaggcacttatttgagatggttttaaatctgtgagggctttttagcaaaattacaaatgaactgagtctgcgacatgttttttgggacggagggagtatttcggtagggatggagtagatggtatgctagctcaaaaaagaaaaagagtagatggtatgcaaacagccaaactaagtgcaaccaggctcgctgggaaaggctaccaaacacggccctaggggccacgtgcagccactcaatccacttgcttgttttcactcttgtgttttggtgggcactcgtgcggacgaagcatggaagctcgcgacatgacctgggctcgcacccaacatcagacctctcgcgcccgcacgcacgccccaagacatggctggaggtggtgcccgcaccgcacgccccgacagcttcatccgacacgcgggaac

SEQ ID NO: 49 - DNA, 463 bp, Triticum aestivum
  Clone ID: LIB103-001-Q1-E2-A7
gtaccggtccagaattcccgggtcgacgggctgaacttgatgctggtgacgagaaaattagagagttgatatcagttttagaccaaaggaaggatgaatcaattgaacgcacatttaaaggagttgcaaggcacttccgcgaagtgttctctgaattagtgcaaggtggtcacggatacctggttatgatgaagaaaaaggatggtgatgctgccgatgatgacatggatgaggacgcgcctcgtgaagcagatcctgaagggaggatagagaagtatattggtgtgaaagtcaaggtttccttcactggcaagggagaaactcagtccatgaagcagttgtctggagggcagaagacagtggtggcattaacactgatcttcgctatccaacgatgtgacccagctccgttctacctgtttgatgagattgatgctgctctggattctcagtacagaacggc

SEQ ID NO: 50 - DNA, 457 bp, Triticum aestivum
  Clone ID: LIB103-001-Q1-E2-A8
gtaccggtccagaattcccgggtcgacgggctgaacttgatgctggtgacgagaaaattagagagttgatatcagttttagaccaaaggaaggatgaatcaattgaacgcacatttaaaggagttgcaaggcacttccgcgaagtgttctctgaattagtgcaaggtggtcacggatacctggttatgatgaagaaaaaggatggtgatgctgccgatgatgacatggatgaggacgcgcctcgtgaagcagatcctgaagggaggatagagaagtatattggtgtgaaagtcaaggtttccttcactggcaagggagaaactcagtccatgaagcagttgtctggagggcagaagacagtggtggcattaacactgatcttcgctatccaacgatgtgacccagctccgttctacctgtttgatgagattgatgctgctctggattctcagtacag

SEQ ID NO: 51 - DNA, 422 bp, Triticum aestivum
  Clone ID: LIB103-001-Q1-E2-B10
gtaccggtccagaattcccgggtcgacggggaggaggatgaggagggcgtgacatcagacggagattcgggcgatggagaagacgacgaggggggcggcggcgccgaagacatggacgacgacgacgattgatcgtagcggcctcatagcaccccttaccagttacctcaaacaagggtgggcgtccttttgaccccacagcattagctttcttgtacataggcactctccagtccaggatagttgagtggtggtgatagtggtgttggtgtaaatgtttgctgggggtaaaatgcattcatctgatactatggtttatatccctgtttttggccaaagaaagaaagaagacgacgatgagatcgagcggtttcgcgcgcttttcgaaacgcgcccgcccggtctcgttcgattcgcatgac

SEQ ID NO: 52 - DNA, 441 bp, Triticum aestivum
  Clone ID: LIB103-001-Q1-E2-B11
taccggaccagaattcgcgggtcgacggggagtatgaggcccaggacaaggagctggtgcaacttaagcgtgaggcccggatgaagggtgggttctatgtcagtcctgaggcaaagctgctgtttgtcgtccgtatccgtggtatcaatgcaatgcacccaaagaccaagaagatcttgcagcttttgcgtttgaggcagatttttaatggtgtgttccttaaggtcaacaaggccaccattaacatgctgcgtcgggttgagccatatgttgcctacgggtaccctaacctcaagagtgtcagggagctgatctacaagagaggttacggaaagctcaacaagcaaaggatccctctggccaacaacaaagtcatcgaggagggtttggggaagcacaacatcatctgcattgaggaccttgtgcacgagatcttgaccg

SEQ ID NO: 53 - DNA, 457 bp, Triticum aestivum
  Clone ID: LIB103-001-Q1-E2-B2
ctgccggtaccgttccgaggctcccgggtcgacaggctcaccggcctcggactgtcgccttccgagatcgcgcgactcgtcccgctcaccgccaacaacaaccactcccgcaacaaatccgtcgtctccaaggtggactactacctgcgcctcttcggctccttggaggaattcctccgggcattcaagcataaccacaatctcctctcacacaacctcgagacggtggtcaagcggaatgtcgggttgctgcaggagtgcacgctaggtgcttgcgacattgccaagcttgccatctctatgccaaggatgctcaccgccaacgtggaacaaatccgggggatggtggccggtgctgagcgtctaggtgtgcctcgcggctctgggatgttccggcaagccatgcggagtgttgcgttcgacagcgaggacaagatcgccgccaaaatggaataca

SEQ ID NO: 54 - DNA, 404 bp, Triticum aestivum
  Clone ID: LIB103-001-Q1-E2-B3
cgccggcaggtacctgtcctaggctcccgggtcgaattcttctcccccggctgcggtggctgccgcgctctccaccccaagattgcgcagttcgctgagcggaatccggacgtgctgttcctgcaagtcaactacgagaagcacaagtccatgtgctacagcctccatgtccatgtcctccctttcttcaggttctacaggggagctcagggcagggtcagcagcttcagctgcaccaatgcaaccatcaagaagttcaaggacgccctcgcaaagcactcgccggacaggtgcagcctcggcccggcacgggggctcgaggaggcggagctcttggctctggctgcaaacagggacctgaaattcacctacaacgaaaagccgacgctggtgccgatcgccga

SEQ ID NO: 55 - DNA, 453 bp, Triticum aestivum
  Clone ID: LIB103-001-Q1-E2-B5
gtaccggtccagaattcccgggtcgacgggtgattgacatgtacattagggactgactcctgtctgcaaatgttcagtggtggtacatatggtaaatgtgaagttatgaaagacaccactgttggcataaaatcctatgcaggtattgctgcggagggtatcggaaacggagcgctcttgatggcaatgaattaccatgtcaatacatccaatagcgctttgtgggattacatgccaatggttttccacatctgaccttctccgaaatttttgcaccgtacttccgccatgttaggccgcgtttcatcttttgcttgttatgatagtatttcaaccctttttgtgggaaaagctgatattggttagatgttgggtatagaagagccatagagggaacctaacaacgacattttcggcagcacggtccattctttgcatattgccctgccgttt

SEQ ID NO: 56 - DNA, 348 bp, Triticum aestivum
  Clone ID: LIB103-001-Q1-E2-B6
gtaccggtccagaattcccgggtcgacgggagatccgtatcctctggagcctacctttacatacatgtagccgtggcgatcgcagttttgcgaaacgtgctgttggagtagtgaaatctgtccgtcgcttgccattgttgcctgtgcgaagcatcatgctattatgaacattcgtaggatgtacgtatctcactaagcatgttctgtactactgtcactcttgaattcattgcccatcacggtcggccgtccaaggcgatcaaagctaatctaaccttgtacgagatatcagatcgcaccattgagtcgtcaatattcagatctgtgacgatcatcttacatagtcca

SEQ ID NO: 57 - DNA, 446 bp, Triticum aestivum
  Clone ID: LIB103-001-Q1-E2-B7
gtaccggtccagaattcccgggtcgacgggcaggattgacgagtgggcgctggaactgtcaagctttggcctcaagtttgagagaacttcaactatccaaagcagagcattggcagaattcatagcagagtggacgccaacaccagatgaagaaattccagagacgagcatccccgtcaaagaggcaagcaaagagtggctgatgtactttgatggtgccttctcgctgcaaggcgccggtgcgggcgtgctgcttgtcgcgcccaccggagagcacctcaagtacgtagtccagatgcactttcccaaggagcaagcaaccaacaatactgcagagtatgaaggattgcttgccggtctcagaatcgcagcagaccttgggatcaagaagctcattgtcaggggtgactcacagcttgtcgtctgccaagtgaacaagaactacc

SEQ ID NO: 58 - DNA, 458 bp, Triticum aestivum
  unsure at all n locations
  Clone ID: LIB103-001-Q1-E2-B8
gtaccggtccagaattcccgggtcgacgggaacacaggagaagcaaagagatcactggcccgctttcatgaaattcaaggaatcggaattagctcaggaacggtcgagaataaacaagatcaatgccgcgaaaaaggagcattaccataagctggggctaggtgtctacgtggtggcccggcctaagtgggataaggctgagcaacagatggtgtatgcaggggtcattccagttacattgagctggccccccgggtccaagacttggttctatatgcatgggaggatattggacccaaagacaggccaggttttggagaaaggcaagtcctaaaggagcccacctcaaaatacttgttgcaatagaagaggctcgaacggnggtgttcacgcccaacagagagaacgacgagcttatgggcgccctgngaaatcatgaacacccggggaagaacacg

SEQ ID NO: 59 - DNA, 410 bp, Triticum aestivum
  Clone ID: LIB103-001-Q1-E2-B9
cctgccggtaccggaccagaattcccgggtcgacgggaggaggcctccctactcaccccagtcaaacggggttgccgagcgaaaaaaccgtactctaactgatttggttaactccatgttagatacgtcgggtttatccaaggcatggtgggggaaggctataatgacatccggtcatgtcctgaataaagttccaacaaaggataacgagatcactccttatgagaagtggacgaagagaaggacaacactctcgtacttacgtacctggggatgcttggcgaaagttaatgtgctgatccccaaaaagcgtaagcttggaccaaagactgtggactgtgttaatttgggctatgctatgaatagtgctggctatagatttctagtagtgaaatctgaagtacctgaca

SEQ ID NO: 60 - DNA, 450 bp, Triticum aestivum
  Clone ID: LIB103-001-Q1-E2-C10
tgcagtaccggtccagaattcccgggtcgacggggaggctgctgatgaagtccaggctcgccggatgcggttttggctcgagccgcctccgcttgttggctgcctcaccgtccatctcaaccggccgtgacgctggtgtacacgtgtgctggtctgtgttgtgtgctggcctgctgggtgtgcgcgagtgcgtccttctgtgcatgccgccgcgtagtggtgaattgtgcgcgagtgcgtccttcacgcggaagaagtgtgtcctcaatgcaccctcagtttactagcgtgcggggtgctaccccgagtggtttcaactttgtttacttcaccgcatgtcaaatgggcctctagtttacttatttttcacccactcccacatgggccagcacacgaagatagagaacacgagctgacaaggcagcatgtggactgtgagcgtataaacaa

SEQ ID NO: 61 - DNA, 412 bp, Triticum aestivum
  Clone ID: LIB103-001-Q1-E2-C11
cgcctgccggtaccggaccgaaattcccgggtcgacgggtgttctctttgatgagattgaaaaggcacatccagatgtcttcaacatgatgcttcagatcttagaagatgggaggctgacagatagcaagggacggacagttgacttcaagaacactctgctgatcatgacatcgaatgtcggaagcagtgtcatcgagaagggaggccggaagattgggtttgaccttgactctgacgagaaagataccagctataacaggatcaagagcttggtgaccgaggagttgaagcagtatttccggccagagttcttgaacagattggatgagatgattgtgttccggcagctgacaaagctggaagtgaaagaaatcgctgatattatgctcaaagaggtgtttgacaggctc

SEQ ID NO: 62 - DNA, 437 bp, Triticum aestivum
  unsure at all n locations
  Clone ID: LIB103-001-Q1-E2-C2
taccgtgtccgaaactcccgggtcgacgggaagtcgtcgcagtgacgccggatcacagcgtcggcgtgctacatcacaacagcaagagcaccaagtcgtcgaagttgcatcgtagcaccaggtggctccctgcagcgatgtcggctcgtagcatccggcgtgatgcatcacaacagcaggagcaccaagtcatcgaagttgcatcgtaacaccaggtggctccctgcagcatcgcgcctcgacctccctattctgccgtgttgcagcaccgacgatgagcggcggcggccaccggcaaccacgccttcgtgctgtgttgcagcactgatgggttgtggctccacctatggcctcnctcttcttgctccgttgcagtgttgacgttgagcggcggtcttctcgggcctcctcttcttgctgcgttgccgtgctgacgt

SEQ ID NO: 63 - DNA, 451 bp, Triticum aestivum
  Clone ID: LIB103-001-Q1-E2-C4
gtaccgtgtcctaaactcccgggtcgacggggaccgaagcgcaaaaagaaactcgaagcacaggaacaggaagcaagctgcccccccccctcctcatctccgactcactcacgatccgagatcaggatggccggatcgatggaactccctaccaagggcggcttcagcttcgacctgtgccgcaggaacgccatgctggagaagaatggcctcaagatgcccgggttcaggaagaccgggactaccatcgtcggcctcgtgtttgcggatggagttgttcttggcgcagacacaagggcaaccgagggtcctatagttgctgataagaactgcgagaaaattcattttatggcaccaaacatatattgctgtggtgctggaactgctgctgacacagaggctgtgacagatatggtcagctcccagctacaacttcaccgttatgctacta

SEQ ID NO: 64 - DNA, 299 bp, Triticum aestivum
  Clone ID: LIB103-001-Q1-E2-C5
tacgcatgacggtaccggtcctacattcccgggtcgacggggaccacaaagtgaaaaaagacaagaagaaggaggagcacaaaaagcggcgacgcgaattgaccgacagaccgggagcatcgcatcgaatgagcactcaacgatgtccctcggaaagaaataaccggaagcatcaccgccatggccggcgtcatgcgcagaatgaaggagacgctccagataggtggcagcagcgacgagtccaagacggacaaggagcacaggacaggcggaggaacacaggacgaaggacggggagc

SEQ ID NO: 65 - DNA, 466 bp, Triticum aestivum
  Clone ID: LIB103-001-Q1-E2-C8
gtaccggtccagaattcccgggtcgacggggatgttctggctggcatgaagcaaggggatctaatcatttggtatgttgagcagcagaatgcccaaggtgcatatagttctacagaagaggtgaaggaggaagtaaagtgcatcaaagccattatagagaggctgatacagagggaaggccatcttgtagtcatagacgaaggaacagcggcagcagaaggtgctgcagcaagggcatcggagcacagaatcctggctgttaacccgaactacgtcattgattgattaaccagctgaggacacagctaactagatccatcatatgtggttgaccaatagagcagacattcaaacggaagacatcctgttgtcatatgctctagaaatgatatgttgtacctgccatccccttcccaaggaagcataagatctctggaattgtatcttccatccaaggttgaaatgt

SEQ ID NO: 66 - DNA, 458 bp, Triticum aestivum
  unsure at all n locations
  Clone ID: LIB103-001-Q1-E2-C9
tacggacctgaattcccgggtcgacgggaagctgcagtccctgtgtaaacggttgaacttgcggatgggcggtgaggcccgtagggagttgctgtataacatcgaatacagtgccgagtactgaagcatttgattttgatgatgccggtgttctttcaatcaagtaggcacgtgtagtgtttgccggtactcgaagagcacagaggctgtagtctgtaaattatactttgtaacagttttcctaatcattcttcagtatcccaggcttccttttttcgctggagagacaggatgagattttatttgttaggatttcagaataaggtcctaatacatttgtttctttgctcaacgcgctatcttccacagtcagaggatggatgtaacgttagttcatcataatgttatccttctgcaaaataaaaaaaannnaanaaaaaaaaaaaaaaaagcgggcg

SEQ ID NO: 67 - DNA, 420 bp, Triticum aestivum
  unsure at all n locations
  Clone ID: LIB103-001-Q1-E2-D11
gtaccggaccagaattcccgggtcgacgggtgcaaccggtggtgggagacgcgcaagcagttcattaaatctgttatcgatctttgtttcgaacgtcatctcaaggccagtgatcttctccatggcctcttcaaaattgttcagcacatcttgtacctgttcagtcatcatttgctgaaacttatcatgaagctccttgttcgataagttctcccagtcaatctcgtcggcttgtgatcctggcatggttagcagcattagaatcacacaggaatatgatcctacagactactaagaagtggtggtggtgtatcacacatctgtcatgcaaatctcaaattcgtaccagttcttacccaacagcacgcggtgatcggcaaccgttgtantcaacatctcgcaatgcttggatagagcgat

SEQ ID NO: 68 - DNA, 422 bp, Triticum aestivum
  Clone ID: LIB103-001-Q1-E2-D12
gtaccggaccagaattcccgggtcgacgggaactcaaatttcagaaaagcaaaggatagtcgattgtttacaccttcgttgtgtcaatgcaacccttctttgtattgtttagtaaacattttgatgtgcccagtgttgctcgcaaacataggatagttgattgaacaagctcattctaggtttctagtgcattgtttcttgataatagttgcttttgcttcaatgtatttgacagcatttcagtacacacccctttggttattgtcgcaactttctgttaataagaagaaagaaccaagagaatacaaagtgctttgttctaacaaaaaaaagaaaaaattcaaaaaaaaaaaaaaaaacaaacaagaaacaaataagataactaagtagtaaacaaaacaaaatagaaaggggaaacaaaa

SEQ ID NO: 69 - DNA, 441 bp, Triticum aestivum
  Clone ID: LIB103-001-Q1-E2-D2
tacgcctgccggtaccgtgtcctaggctcccgggtcgacggggaagaagaagaagaagaagaggaagaagaagaggaagaagacggaagagaaagaagctgagacgactgggcagaagcagacatttgacactactgttgaaaattcaggggcagagcctacagagagagacacggttgacggaaaacagtctagcaagtcaaagaagagcaaacgtaagcataatgatggtgcacctgccgtagaggtttctgctggcgatcaaatcgtgacaagggaagataagaagagaaggaaggaaccagttgtgctggaagccagcaaccaaacccaaaacacaaatgaaggtgagaatagagagattaagaagagaggaaaggaaagcagtaaagccagtccagactttagtgagaatgcatctgctgggggagaggaagctgg

SEQ ID NO: 70 - DNA, 459 bp, Triticum aestivum
  Clone ID: LIB103-001-Q1-E2-D3
cgcctgcaggtacctgtccgaaactcccgggtcgaagggaattcgagcggccgcttttttttttttttttttttttttttttgcccaaagaaacaccattaatatttcatgaggtaatgaaacagggtgttcccacagaaccaacacaagttacaggaagacatggtctgaacagctgactattacagaaaaccatcctagcctaggaggaggtgaacttggtgacagccttggtgccctcggagacggcatgcttggcgagctcgccggggaggacgaggcggacggaggtctggatctcccgggacgtgatggtgggcttcttgttgtacctcgcaagcttggccgactcgccggcgagcttctcgaaaatgtcgttgatgaaggagttcatgatggacatggccttggaggagatgccgatgtccgggtgcacctgcttcagcaccttgaagatgt

SEQ ID NO: 71 - DNA, 480 bp, Triticum aestivum
  Clone ID: LIB103-001-Q1-E2-D4
acgcctgcagtaccgtgtccgaggctcccgggtcgacagtcccttgaatctctgcacttaaatggagccactagtgcccctcggttagctgaagacgatgaaaattccgttgctagcgacttgcattgctttgagttgaacatgcatggagatgctgtgcagactcatgaccttgcaggaactcgacgaacagtcgccgactgcatgtattcaccaatgagaagactggagttttccgatggtgtgtctgttgaaggctcgaggatctcaaccgcaaggcctcgttcagaaaaaggcaaggtgaagccaggcagcagcaaagcacagctgcatacttcggcaccagaaatcagctcccgcaactgtgacaggatcgatcctatagatgtgcagaatgaaacagtcatgacccaagtatctcgacggttgcatgatgacctgctgaagatcaaatcagaggctcctcagcatgcatttcta

SEQ ID NO: 72 - DNA, 465 bp, Triticum aestivum
  Clone ID: LIB103-001-Q1-E2-D7
gtaccggtccagaattcccgggtcgacatgggtgtagaccacgacctgactaaccacacaaatccctagtccaggtttatcgcctattcaggttccatccgtagggagtccgaccgaggtttccacatacggccccgaacgatgtgtatagggtttcgagacaccaaacgggcgcccgacatacctggccacgtacctaccgcatcacagcccaccccaagggtcagcgctgtgcacggcctccattatactacaaacaccttgcaactcctggacagaggacaagggtggttaataagtcgagcggggtcatatttcagggcccaatgcatggtagtagctgattcttaatcacacatacagatctcagttcttaggatcggttccaatgaaacaacccaccatgtactcctacatggcctctcatcgatacctttaccaaatcatgttcaacacttaactctc

SEQ ID NO: 73 - DNA, 449 bp, Triticum aestivum
  Clone ID: LIB103-001-Q1-E2-D8
taccggtccagaattcccgggtcgacggggtacccgtggatccactatgcaatagaccactcgggcagtgttgccataggcgacacgcagagcccgcactgtcagatgggagagcgccaacggcctttggacgatgtcaggaacgggggaccttgaaggatcaggaagagaaacatctgagccaccgtcagactcatcaccgtcggagccagcgttgtcaggcgcctgaatagcatgggatcagtccatcatcgcccgcagcttcacttcacttcagttcagctcagcatactagggagaccacggggaatgtgagagtactgacatatgacccaatcgcgacaaagccttgtgctgcaacaactgtggctagggataagagttcctcggctgcaacttccaataactaagctcgcgtaaaagtattagttagcgggtcttggttgaat

SEQ ID NO: 74 - DNA, 423 bp, Triticum aestivum
  unsure at all n locations
  Clone ID: LIB103-001-Q1-E2-D9
cggaccgaaattcgcgggtcgacgggcagccattctagttgcacaacagtatataatttagtctcatctccaaaaaatttgagggttgcccaagagtatctttagcaccctcagactttatacttgcacagtagtatccaattaattggcatcctcgacaattctagttgcacaatacttttctaactagttgacatactcaagactttttctagttgcacaagagtatgtatttagttggcatccttagcatttctagttgcacagtaaacaaaatactgtgttggcatcctcaacttttttaatccagatttctaaagaacaacanaaaaattatgcagtgttaactaatcaccttttttcaccttcatgatattgtgcaggggggtgagggtaatgaagaagataatgcagaacgacagt

SEQ ID NO: 75 - DNA, 480 bp, Triticum aestivum
  Clone ID: LIB103-001-Q1-E2-E1
ctgcaggtacctgtccgagactcccgggtcgaaggggagcagctcccatgtctttaatgggccagttcttactcaagaggtcaacaatcccaactatacatatagtccaactcaaaaggttgtagaacctaattttgtagttggggccccgtcgtccactaggttatctgaagctggtggtcagttaaattgtgttgttttaccagattctcaggctaagaatgggcgttttgtaaagatgctggattcaatctcggctccccctgcttttgcagcagagttcccaggcaaatccttgtctggtgtgcaccctaacaccatcagcgtgtctaccgaagtaatcagcataggaagcttaactgttgcttctcgacaaggcaagtggtcgttccagaaggatgaagacatggagcttctcttctccacaggtttccagcctgataaccgcatacactgtgggggctgcaacacagtgactgc

SEQ ID NO: 76 - DNA, 413 bp, Triticum aestivum
  Clone ID: LIB103-001-Q1-E2-E10
gtaccggaccagaattcccgggtcgacggggacgcaagcgccgccgttcgcacccgtctccctgtcctcaccgtgcgcatggagatttgagcactgcgctacgcgattgaggaagcttgccaaatgcttgttgacacagtggatgtaacgtgtccagcatgaccaataccaccttactgacaagcaacattagatgtgcatttaagcataccctccacagcgttacacattacagggaacgcaacgatagtctttctgctcacggcaagcgtcattatgaccgctatcagtcaggatatcgtggccagacaaagcctgttttccacaagattgccacgacatcattgaatattgtgctgaagctgcagtgccatagctgcatgcattacgcgcaacgcgccatcatgaggtgc

SEQ ID NO: 77 - DNA, 132 bp, Triticum aestivum
  Clone ID: LIB103-001-Q1-E2-E12
gcgggtccacgggataccctaaagtgagtcgtattagcatcactatgatagcacagcgccaggacatgagctggttctgctacaagcatgtgaacacaatgtccaaaacaagcatgttcatactggtaatct

SEQ ID NO: 78 - DNA, 453 bp, Triticum aestivum
  Clone ID: LIB103-001-Q1-E2-E2
tcccgggtcgacgggggattcccatccagcgtacagactaggcgacccccgcttcccgtcccctctctcctccacacgcctcgctccctctcccctcgtccgccgccgccgccgccaccatgggcaggggcaagttcaagggcaagccaaccggccgccgcaacttctccaccccggaggagatcgcttctggaacttcagggcgtccacgctcatttaagaagaatgtagctgaagcagaagaggaagaggaagaggtagaagaatctgaagaggaagaatccgaagacgacggtgaagagaagaaacataaaggaaccgaaggtgttattcaaattgaaaatccaaacctggtgaaagcaaagaatataaaagccaaagaagctgatcttggaaagacaactgaactctcgaggcgtgagagagacgagattgagaaacaaagatctcaag

SEQ ID NO: 79 - DNA, 460 bp, Triticum aestivum
  Clone ID: LIB103-001-Q1-E2-E5
gtaccggtccagaattcccgggtcgacgggtcatgcatataggcatcaccactagaaaaaaagacacatccgtgacattttgggccgaacgaattttttttctgtcatacatatgacacttctatgacgataattgtgacaaaacccggtatcatcatagatgtggtaggctcctacttctatgacaaaaaatcatgacagaaaatgggcttttcatcctgggcgggctggagacgcagctgcatgacattctttgggccgtccatgatggaaaaaccgtggtagaagcgagggggaggaaaatttcgggaagtttccggttacggtgggaggtcggaggccgagcgatgcgcgtttctctcgtacacgtacgcgcgtgtgtgcgaagcgttggctctaactgaacccgagcgaagcgttgggctctaactgaacccgagcgattgcactgcaggctatg

SEQ ID NO: 80 - DNA, 463 bp, Triticum aestivum
  unsure at all n locations
  Clone ID: LIB103-001-Q1-E2-E7
gtaccggtccagaattcccgggtcgacggggtcggcgattggggaaggctcgccggctgggcgacagcgagctccgatgagtgcaacgaatggaagccaggcgtcggcttacaacaatgattcgggtgcctgtggcatgatggagagccgccgctgaaagctcagtgatggggcgagttggttgaggcgtcaatggcacctttgctcgtgaccgaggatggcacttgcacagctgaagtaagatgcaggccaacttcagcctccaaggcttccctggcaccctcctctgccactacgtgctcaacaacaaggtcttcgaagggttagggcttagggcaactcgatggtagccagtcggagtttgctaggttacatatgcaagtccttttgaaatctcaaacttctttgtggtgatgagcttctgctcatcttgattgattcctctacagntgaagggtgtgtc

SEQ ID NO: 81 - DNA, 465 bp, Triticum aestivum
  unsure at all n locations
  Clone ID: LIB103-001-Q1-E2-E8
gtaccggtccagaattcccgggtcgacgggtgcctcgccaaaacctcagtgaagatcattggtgcagacaagtggtctttacagcataaatcaattcctgacaagttgcaaagcctgtacaatgatggctacaagttggtcatattcaccaatgagtcaaacattgagcgctggaagaataagcggcagcaagctgttgactcaaaagttggacgccttgacaactttattgagtgtgttaaagtccctattcaggttttcattgcgtgtggtactgggaaaggaaaaggcacaccggatgatctgtttcgcaaaccaaattcaggaatgtggtggttgatggcagagcatttcaattctggaattgccatcgacatggaccaatctttctatgttggcgatgctgctgggagagagaatgatcatagtgacgcagatatagaattcgctaanggccacggtctg

SEQ ID NO: 82 - DNA, 410 bp, Triticum aestivum
  Clone ID: LIB103-001-Q1-E2-F11
gtaccggaccagaattcccgggtcgacgggcacatagttgcataattattcaactactcattgatcttcacttatatcttttggagtagtttgtcatttgctctagtgcttcacttatatctttttagagcacgacggtggttttattttgaagaaatagatgaactctcatgcttcattatattattttgagagtcttaaacaacatggtaatttgcttgggttataaaatttagtcctaatatgataggcatccaagatgggtataataaaaactttcatataaagtgcattgaatactatgagaagtttgattccttatgattgttttgagatatgaagatggtgatattagagtcatgctagttgagtagttgtgaatttgagagatacttgtgttaaagtttgtg

SEQ ID NO: 83 - DNA, 428 bp, Triticum aestivum
  Clone ID: LIB103-001-Q1-E2-F2
cgcctgcagtacctgtccgaggctcccgggtcgacgggctggaggggaaggtgatgcgtgcgacagcgaccatgccggcaggcagggcagggttgaccgtggccatcatgatgtttccaagggagagcgaggcatccgccatcgcgtagctaaagaagtcgatgccccgggagaggttggccaccgttgccggtgtgaaagggccagatgagttcacttgtgtgttttacagtcttcagaattggagggtgagatgctacagcagtacagctgcaagttcccttgcttatccgtgaggctatatttcagaggtttgactgtgaccgaatttattcacaaagaagctaggcggtacttgtcagtatgcttgactaacaaatagcattatgatctggttttgttctctataccttattagttcatggatg

SEQ ID NO: 84 - DNA, 480 bp, Triticum aestivum
  Clone ID: LIB103-001-Q1-E2-F3
cgcctgccggtacctgtccgaaactcccgggtcgaaggggagcagctcccatgtctttaatgggccagttcttactcaagaggtcaacaatcccaactatacatatagtccaactcaaaaggttgtagaacctaattttgtagttggggccccgtcgtccactaggttatctgaagctggtggtcagttaaattgtgttgttttaccagattctcaggctaagaatgggcgttttgtaaagatgctggattcaatctcggctccccctgcttttgcagcagagttcccaggcaaatccttgtctggtgtgcaccctaacaccatcagcgtgtctaccgaagtaatcagcataggaagcttaactgttgcttctcgacaaggcaagtggtcgttccagaaggatgaagacatggagcttctcttctccacaggtttccagcctgataaccgcatacactgtggtggctgcaacacagtgac

SEQ ID NO: 85 - DNA, 466 bp, Triticum aestivum
  Clone ID: LIB103-001-Q1-E2-F4
gtacctgtccgagactcccgggtcgaagggcgtcaaggccaagatctaccgcctcttcggccgcgagaagcccgtccacgccgtcctcggcggcggcaagcctgctgatcttgttctatggaggaacaagaagatctcaggaggggtgcttgctggcgctacggccatctggctgctgttcgagatcatggagtaccatctgcacaccttggtgggccactgcctcatcctctccctggcaaccctcttcctctattccaatgtctgcattttcatccacaagtctcccccgaacatccctgaggtgaaaattccagaggacatgactgtaaacattgcactatcactgcggcatgagatcaaccggggcttcttcaccttgagagagattggtcatggtcgtgatctgaagaaattcctcattgtgatcggagggctctgggttctttctgttcctgggagctgc

SEQ ID NO: 86 - DNA, 463 bp, Triticum aestivum
  Clone ID: LIB103-001-Q1-E2-F5
gtaccggtccagaattcccgggtcgactgaataattaagtcggcctcgccagtattggcaaacactgagcatcggctataggagatccaccatggtgaacaccgttagacagatgccgggttttgccaacacaatgaattatgagggcgatatgcaaatatcgaccatgcgttcttatctcaaaagtgctcgggagtccgttcaccaaagtgtgaatagccgaaataagtcagatgtttcggctgaggataaattccatagcgttgattttgatggtacgatcgaagaatatggatgagacgcctcttggagtctcctatatgaaaattgtcgtccttgcctacgggctttacacttgtactcccttatttctactagcttcgcaataggagatgtgatgccgctcatgactcgaggatttcccttaggaacccaggccatgttcctcttctccagctctttg

SEQ ID NO: 87 - DNA, 466 bp, Triticum aestivum
  Clone ID: LIB103-001-Q1-E2-F6
gtaccggtccagaattcccgggtcgaccgggcagaagaacaagatcaccatcaccaacgacaagggcaggctgagcaaggaggagattgagaagatggtccaggaggctgagaagtacaagtctgaggatgaggagcacaagaagaaggtggagtcgaagaacgccctggagaactactcgtacaacatgcgcaacaccatcaaggatgagaagatcgcctccaagctgccggcggacgacaagaagaagatcgaggacgccattgacgctgccatccagtggctggacacaaaccagctcgctgaggcggatgagttcgaggacaagatgaaggagctggaggctctgtgcaaccccatcatcgccaagatgtaccaaggtgctggtgccgacatggaaggcggcatggacgatgacaccccggctgcttccggcggtgctggccccaagatcgaggaagttgac

SEQ ID NO: 88 - DNA, 460 bp, Triticum aestivum
  Clone ID: LIB103-001-Q1-E2-F7
gtaccggtccagaattcccgggtcgacgggtgctcctgtttagtaataaataattcatctagcctctggttaaatgtggttttgtgttttaattagtgtttgtgctaagtagaacctttgggaagacttgggtgaagtctttataatcttgctgtaaaaaacagaaacttttgcgctcacgagattagcggccattttttactggagagtgattttaggttgattagtttttcagaagattaatagacaaattcctcaggtccaccaatttatttcagaatttttggagttacataagtatgcgtttgatacagattgctacagactgttctgtttttgacagattctgttttccttgtgttgtttgcttattttgatgaatctatgagtagtatcgcagggtatgaaccatagataagttggaatacagtagatattacacgaatatgaatttataatg

SEQ ID NO: 89 - DNA, 424 bp, Triticum aestivum
  Clone ID: LIB103-001-Q1-E2-G10
gtaccggaccagaattcccgggtcgacggggacctcctgaaggtgatggaccggagcgacctcaccggcgcgcgtgcagcggcagatgctgccccgcacttccccctgaaaggacctggctgggaggtcgtggtggctgccgggggcggtatgctctcagcgctcaccagctgagccccgggcccgctccagtgaccggcctgtcaacggcgaccgacgccttggtattctggtgcttcggctttgttcgtcgcctgtgttaaggccgatgtttttgtgaacatgatgtggacatgacaacggcatcctaccccccctaagtaattatggacgaccgaggcgttgcagtgtgtactgtactgcaccccctagattaggagctgatcgatcctttggcgagctgtgttgtgatgtaactcgagct

SEQ ID NO: 90 - DNA, 369 bp, Triticum aestivum
  Clone ID: LIB103-001-Q1-E2-G11
ctgccggtaccggaccgaaattcccgggtcgactgctgcaacaagtacggggtctccctcctgttcaccggcgtccgccacttcaggcactgagcctaacctgagtccgtatggtcatatcaccggtctactgtcagtcagtccgccgtgggaacttgcggatgtttgtcgcaataagacagacgcaggtgattctgagtccaactaggattagttgtatgacggtggcgaaagcattttgccacgtacgcaagtgaggacgcctaggtgttcgtcacattgctgagccagcagcggctgcgtaataacaaggtcggaaaaccaggggccatgtactagctaaagtaagcaaaaagtgtgtttgtattc

SEQ ID NO: 91 - DNA, 379 bp, Triticum aestivum
  Clone ID: LIB103-001-Q1-E2-G2
cgggtcgacaggtcatcttcatcttcgacttctacttcatcataatcatccctgccgtacacatcttctgggacaacctcactctgattacaacttgctagaatactccatgtgcttcatctacatcttctgcgcctgatacattttgctctactgcttaacctacatcttttagagcatggtcgtggcccacttctgtagaaactgctactcactcatgcttcacttatactactttgacagtcctttagaacaacatggcatttgctacggttataaaattggtcccagaatggtacgcatccaagttgggtataataaaaactatcataggaagtgaattggatgccatgatcaacttgatacttgataattgtgt

SEQ ID NO: 92 - DNA, 480 bp, Triticum aestivum
  Clone ID: LIB103-001-Q1-E2-G4
cctgcagtacctgtccgaggctcccgggtcgacgggccagtgccaagggcaagaccgacgtgcagtacatcatcctcgacagggtgatgcagcagccatcagcagcatcgtcaggaggggcatgctggatgagctcaagaagaccctggtcaggaggagcattcaggtaagaacagagcaacacaaattgtcatgtttctaagggaaatagagcatgctttgtgatatgaacaatggctgatttatcgttttgtaaacctaaactttccaacaaacttgcgagaaatttatattcagatggcacatggaaatttatattcagatgatatggctacttcatattagggagatattttcgagtggagagcatattaagttaccatcagttttcttgacataccaaattgatgttggaaccgtatgcattggtaatgttaattaattgccatggcaaaaatactttttaataaagtcgccatc

SEQ ID NO: 93 - DNA, 460 bp, Triticum aestivum
  Clone ID: LIB103-001-Q1-E2-G5
gtaccggtccagaattcccgggtcgacggggactgccggccggtgccgtcggcgtggtacgtaagctccatgcatggcaacggcatgcggccggtacgtaacgtacttagtctgacgacgactactcaatattatgttccttcggtaaatactccatatatatctgccgttcacgttgaacaagtctgccaagtgccaagtaggaatatatatattctttccaccaaaaaaaaaaaaaaaaaagaaaaaaaaaaaaaaaaaaaaaaaaaaaaaaaaaaagaaaaaaaaaaaaaaaaaaaaaaaaaaaaaaaaaaaaaaaaaaaaaaaaaaaaaaaaaaaaaaaaaaaaaaaaaaaaaaaaaaaaaataaaaaaaaagcgggccccccaaaggtttcaaacttaatttcccgttcaaggaaatttaaagcccttcaaaaggggcccccaattttaatttcc

SEQ ID NO: 94 - DNA, 463 bp, Triticum aestivum
  Clone ID: LIB103-001-Q1-E2-G6
gtaccggtccagaattcccgggtcgacgggcctccttatatcttcctcaaaacagtcaccatacctacctatttatggcatttccatagctattccgagatatatttccatgcaactttccaccgttccgttcatcatcatcatgacatgcattacttttgtcatattgccattgcatgatcatgtagttgacatcgtatttgtggtaaagccactacgcataatttttatacatgtcactcttgattcattgcaccatcccggtacaccgccggaggcattcatatagagtcacatcttgttctagtttcgagttgtaattcatgtgttgtaatcaataaaagtgtgatgatcatcattattagagcattgcccaaaaagaaaaacaaggaaggctaaaaagaaaaaaaggaaggccaaagaaaacaagcggcgcgctataaaaaaaacaagcggccgctct

SEQ ID NO: 95 - DNA, 456 bp, Triticum aestivum
  unsure at all n locations
  Clone ID: LIB103-001-Q1-E2-G8
gtaccggtccagaattcccgggtcgacgggaggttctcccaggtcgtgtccaacgccgtggacatgaagctcagggatgaccttgagaggctcaagaagatcaggaaccatcgtggtctgcgtcactactggggtgtgcgtgtccgcggtcagcacaccaagactaccggcaggagaggaaagactgttggtgtctccaagaagcgataagctgcttcacaaagattcctcatagctttgctactactgtgttggtccatttccagaatcttaagggagtgttcttatttagatgattaccttggatgatgttttgccctagataatgttttggttctggaacctttaatatattgtatcttgaattctttgttgaactcgtacaagagtttgttttgccatgtgcttccagtgaaaaaaaaanaaaaaaaaaaaaaaaaaaaagcggccgctcta

SEQ ID NO: 96 - DNA, 453 bp, Triticum aestivum
  unsure at all n locations
  Clone ID: LIB103-001-Q1-E2-G9
taccggatcgaaattcccgggtcgacgggtgcaacatccaggtgcccatggaggtcgtcaatttgattgatgacgggaagaaccccgatgagttcaccagggacgtgttcaacagctgcatcgccaagaaccagatcacgaagggcaagacggatgctttcaagagcctgaggaagcatcttcttgaggagctggaagaagcttttccagatgacgttgaagcgtacagacagatacgtgctacctctgctgctgagtcaaagaggttggctcagtcccaaagtgctttgcctaatggagatgccaaagtgaaacctgagcattgagagaataacccaagtgcaaagagcaagatcttgctttatatttcctatagnttttcttaagaaggcttntgtgaacaacaactgatataaccttgtatgtgctgctccctcatatgagtgatcaata

SEQ ID NO: 97 - DNA, 389 bp, Triticum aestivum
  Clone ID: LIB103-001-Q1-E2-H10
attcgcgggtcgacgggttatattaatctttgatttttagtttaccacaatcatccctgctgtacacaccttttgggagaagcccacttgattataatttgctagaatactctatgtgcttcacttatatcttttgagcttgatagattttgctctagtgcttaacttatatcttttagagcatggcggtggctcatttttgtagaaattgctagtcactcatgcttcacttatattattttgagagtcttttagaacaacatggtatttgctatggttataaaattggtcctagaatggtaggcatccaagttgggtataataaaaactatcataggaagtgaattggatgctatgatcaatttgatacttgataattgtgttgagat

SEQ ID NO: 98 - DNA, 424 bp, Triticum aestivum
  Clone ID: LIB103-001-Q1-E2-H11
taccggatcgaaattcccgggtcgacgggtgccctttctcaccttgagagttggtgcaaacttcgccggtgcatccaaaccccgtgatatgatacgctctatcacacataaacctccttatatcttcctcaaaacagacaccatacctaccaattatggcatttccacagccattccgagatatattgccatgcaactttccaccgttccgctcatcatcatcatgacatactttacttttgtcatattgccattgcatgatcatgtagttgacatcgtatttgtggcaaagccaccatgcattatttttcatacatgtcactcttgattcattgcaccatcccggtacaacgccggaggcattcatatagagtcataccttgttctagtttcgacttgtaatccttgtgctgtaatcaataga

SEQ ID NO: 99 - DNA, 213 bp, Triticum aestivum
  Clone ID: LIB103-001-Q1-E2-H12
acgcctgcagtaccggaccaatattccgggtcgacgggtcaagcatgagtcgtatagaagatacgatcaacatgaagatgttcatcgatgttgactagtccgtctcacgtgatgatcagacacggcctagttgactcggatcatgtttcacttagatgactggagggatgcctatctaagtgggagttcattatataatttgattagatgaac

SEQ ID NO: 100 - DNA, 389 bp, Triticum aestivum
  Clone ID: LIB103-001-Q1-E2-H2
cgcctgcaggtaccgtgtccgaaactcccgggtcgacggggaacaaacttggtctctgtgtgcttaggatggagtcccgcatttgctttgagaactgtaagcgtgtttaacctgacagcgcctgtaattgtaggccctttccgcatacttcacagcttgttgtcttatgaggtgctgcagggcagcaggctggtttatgccgcctcggtcattattatcatttgtaacttgttagagtgcacattaatctcaggaggacatagacataatacttatgctgctgttgttgtaacgacctttatgcctctgccttgtgttgctattcataaaaaaaaaattaagaaaaaaaaaaaaaaaaaaaaaaaccaacacacacgagaaaaacaaac

SEQ ID NO: 101 - DNA, 485 bp, Triticum aestivum
  Clone ID: LIB103-001-Q1-E2-H4
cgcctgcaggtaccgtgtccgagactcccgggtcgaagggtagcataattcaattcatggggtttaagttgtcgtgaggcatatgaaacaactctcccctcctgcataagcactcctccaagtcctcgatgtgaagcatcacaatacacttgataatccttatgttgatctggaagaattaacacgggggctgtaaccaaaggtttcttcaactcctgaaaactggcttcacattcctcagtccatttgaacttggtgtccttctttagcaactccgtcacaggtttcacaatcttagacaaattctcaatgaatcttctgtcgtatcttgcgattccaagagaactccagatctccccaaatgacgtgggtgcttcccaatttgttacactgacaaccttggtggggtctactgctattccttcttcggatatagatgtccgaggaatccaacttccttcaacaaaaactcacatttgctgaac

SEQ ID NO: 102 - DNA, 444 bp, Triticum aestivum
  unsure at all n locations
  Clone ID: LIB103-002-Q1-E1-A1
cctgccggtaccggtcctaaattcncgggtcgacggggaggccccaacggctggtgcagatgcaccacgatcgaaattactgcaccggagcctctggtggtcgaaattactgcaccggagcctctggtggtcgaaattactgcaccggagcctcctcgctaccccgtggacgatataaaggagatgaaagaatgtcatctgtattatcctatcgggaacatgtccatgaaggtagccatcggcagtgctttaccatgtttacctggagcactccaccacaacaaccccattcaagatggctatgctcgtgtcacggtggaggacatagtccaagggtttgaggacctggagattgacattgctacacctgaaggggagaaaagacttggagatgtcaagcgccatttcattctatggcaaaagaagtttatcaagtttccaggc

SEQ ID NO: 103 - DNA, 393 bp, Triticum aestivum
  Clone ID: LIB103-002-Q1-E1-A10
taccggtcctaaattcccgggtcgacttccaccaaagagaaatccaccatctcatcgaaagacgggacacctccgcctctaccaagtggtatcagatttccaggttgctcggtgagattttacagtttttcgtagtttagatcgagtcggttcttcatacctatagtccacgaaaaagccaaccaaaaacattagggttagttcatcccatccgaaccaatctgagccttgcataatcttttctgtatttgctttgttgaatttgcggttgcatcgtcgtgttcagttgctggtcttagcgtctagtcttttggagtttcgagttctgttcacaagttgtcacgccgtcgccgcaccatcatcatctgccctggccatctacgaccagcgctc

SEQ ID NO: 104 - DNA, 444 bp, Triticum aestivum
  Clone ID: LIB103-002-Q1-E1-A11
gtaccggtccagaattcccgggacgacggggggggtgcctttggcatccccaagcttagtctcttgccactctttattccatagtccataaaagctttacccaaaacttgaaaacttcacaacacaaaactcaacaggaaatcttataagctccgttagtgaaagaaaacaaaaccaccacataaggtacagtaatgaactcattatttatttattttggtgttaaacctactgtattacaacttccttatggtttataaactaatttattagccatagatgcactgaaataagcaaacaacacacgaaaaacagaatctgtcaaaaacagaacagtctgtagcaatatgtaactaacgcaaacttctggaactcaaaaaatcctaccaaaataggacgtactggacaatttgtttattgatcatcatcaaaaagaatcaatgc

SEQ ID NO: 105 - DNA, 389 bp, Triticum aestivum
  Clone ID: LIB103-002-Q1-E1-A12
gtaccggtccagaattcccgggtcgacgggttccgttcatatgacatgcattacttttgtcatattgctctttgtatgatcatgtagttgacattgtatttgtggcaaggccaccttcataatttttcatacatgtcactcttgattcattgcgtatcccggtacaccgccggaggcattcatatagagtcataccttgttctagctttgagttgtaaatccataaaagtgtgatgattttcattattagagcattgtcctcgtgaggaaaggatgatgaaggctatgattcccccacaagtcgggatgagacttcagactttacaaaaagaaacataagggaaaaatgttagtggctcaaacatcaaaaagccggccccccaaaaggt

SEQ ID NO: 106 - DNA, 459 bp, Triticum aestivum
  Clone ID: LIB103-002-Q1-E1-A2
acgcctgccggtactggtccggacattcccgggtcgacgggacccttttcggcatcaggcctacattacaagaacattggtgtaaggaatgcttgaactatataccttgtgagtcgtcaagacgcctgttgatcaatgcagtatcatcctctgcaatatccagctttcgctgcagttcggccacttcgtatttcgggtagccgcaggaggagaggcagcctgtgttccaagttaagtcaaggttagtaactgagcatatctttttgatcctccgattgcttccttcggaaggcaatccgagtctcaggggctactgcatatacaacaggtgcattctatcaatatcattcaattggcaaaactacatcacaaacctcaaaacctcttagaatgctcgagaaaggctcgttcaatccgcttttcacggatagaacctttttgaccaccgtagccatcaag

SEQ ID NO: 107 - DNA, 430 bp, Triticum aestivum
  Clone ID: LIB103-002-Q1-E1-A4
cgcctgccggtactggtcctacattcccgggtcgacgggtagccactgactctgggcacgtacgttcaaagggtaatgctcctcactccgcacccatatctcggcctcatagccgtgtcaacgacattggtgtctgccctaatccacattaaagctatttcacagcagacgttacgggactctcccagtgacacaatcaatgggaagactctgtcgtccaccgctcacactatcatgcaacgcgaatcatctactcaattcattaagctgaatgcgtatcacgtccagaacttgataagcatcttcaaaggtcatcaatgagtggccaatacttgagtcaagggaagcacaatgtcatatgtagaccaccattatgggaacttacatgcatatccgtaggagaattgtgcctctcacgaatagtccagaa

SEQ ID NO: 108 - DNA, 407 bp, Triticum aestivum
  Clone ID: LIB103-002-Q1-E1-A5
gtaccggtccagaattcacgggtcgacgggggcgaagaagaacatcttcaagcagaaggcgccggaggctgatgctgcggcgagcggctgctgttgatttcattcacgcacgctaatcccggacatctatctatgatctatctttatctttgtggaggatggatgaaaacgtttgttgtttgacgaagtgacatctaagcagctcgtttgtgtcgttttcttttgcttgtgttgctgtatatgatatgaatcagtgggtcagttgatgctcctcatgttgaatcatcacaaaacaaaacagagtaccttggcagctatataatgtacgtattattaagctctataaatttactcacgaggaatcaatctatttgtgctgaaaaaaaagaagaagagaaagaaaaagg

SEQ ID NO: 109 - DNA, 399 bp, Triticum aestivum
  Clone ID: LIB103-002-Q1-E1-A8
gtaccggtccagaattcccgggtcaacgggtttaacacaccaagaaacctgtcaatcatcctttcttcagtggccacgtcatattgagagtatgtgacagatgattgaatttttgcaaatattctcccacagactgacttccttggaggagcgcgagaaattcatgctacttagtcgtcataattcccgcagggatgtgatatttctggaatcgttccttgaatcttgaccaggtaatttcttcatcagcaaaccacatggctttttcatattcccaccatatggcagcagcaccttcaagataatgtgttacatatggaaccttatccccttcatcagtttgagcaacctcaagcttctttcccatagttctcaaccaatcatctgcatccaagggat

SEQ ID NO: 110 - DNA, 427 bp, Triticum aestivum
  Clone ID: LIB103-002-Q1-E1-A9
tcccgggacgacggggggtataataaaaactatcatacaaagtgaattggatgctatgatcaatttgatgcttgataattgttttgagatatggaggtagtgatattaaagtcatgctagttgggtgattatggatttaaagaatgcttgtgttaaagtttgtgattcccgtagcatgcacgtatggtgaaccgctttgcgatgaagttggagcacaattttatttattgattgtcttcattatgagtggcggtcggggacgagcgatggtcttttcctaccaatctatccccctaggagcatgcgcgtagtactttgttttttgatgacttctaaatttttgcaacaagtgcatgatttcttttgactaatgttgagtccatggattatacgcagcctttcacccttccagcatggctagcctctc

SEQ ID NO: 111 - DNA, 401 bp, Triticum aestivum
  Clone ID: LIB103-002-Q1-E1-B10
taccggtccagaattcccgggacgacgggagagacgaagaattccagtccttcgatttcaacacggacgtcattgcaaatcatggaggtccgacattggcccgcgggagtgtttactaatagcgaagtgttcatgtactcgcttttaaggccttgcatgaatgcaaaatcctctgacatgaatgaatgtgatgcacctgtatcaaataaaacagatgcaggtactgaatttacgaggagtgtacccatcacagtagcaggctggtcctgagcttcattgagatcaacgtggttggcatgaaaatgaccataagacatgtcattgttgtagcgaggctgggtgcttccacgacgagctgcgggaaggggcaattgattcgggttcggattctgatagcagtt

SEQ ID NO: 112 - DNA, 439 bp, Triticum aestivum
  Clone ID: LIB103-002-Q1-E1-B12
gtaccggtccagaattcccgggacgacgggacctacaaaatctacatcttcaaggtgctcaagcaggtgcacccggacatcggcatctcctccaaggccatgtccatcatgaactccttcatcaacgacatcttcgagaagctcgccggcgaggcggccaagctggccaggtacaacaagaagcccaccatcacgtccagggaaatccagacctccgtccgcctcgtcctccccggcgagctcgccaagcacgccgtctccgagggcaccaaggccgtcaccaagttcaccagcaactagggttccgtcgcggtgtctctagggttccgtccccgtgttctcttctagtagcttttgtgtcgccgtcggtcgtgcccatgtgtatcgttatacgtaggtagcgcgcctgccttgttaatcgtgtcaggtttgtatggac

SEQ ID NO: 113 - DNA, 456 bp, Triticum aestivum
  Clone ID: LIB103-002-Q1-E1-B2
acgcctgccggtactggtcctacattcccgggtccacgggatgtgggcaactggtgatagattgctcatgagacaaccaaccttgagacttggtgtcttgatatactggatagcattgcatgcattgcttgtgagttttatttgaaggttatatttaaagctgtagtgatggatctccttggtgagccacctactgtacagtgccatgtctatgacaagctatgcaacacaagcaatctagtcaaaatgctgtcgattctttttgaagtttgttactgaatgaatacctgaaccaaacggtcatctgcgtatcatttttgttgtgaatcttccccttctgctggaattggtcctgcttcagctgggtccaaccgaagggaactgcaccaacagtaccgacgaaagagaactgaagaaagcagcagcagcagcaaagatcccctgtacatactctca

SEQ ID NO: 114 - DNA, 462 bp, Triticum aestivum
  Clone ID: LIB103-002-Q1-E1-B3
cgcctgccggtactggtccgagcttcccgggtcgtaggggaagatgaaatgaatgttgatactacctctgatgaggatgcggacatagatgatgaaatgactagataccaaagttctgattcacatgttgtggagaagaaatatacattgacaaaatgcagcgctgaacctgagaccaataaaacaaagcattctagtttgagttatgaggagcaacctgtttcttcggcaccaataagagcaagcaaaactgttgctgttccagttaaccccatttccgtggaacctccaaattttggaacaccaaaagatgttcatgttgtggagaagccggacatcacacccatgaatgctaatgttgcctctccagctattaatgtcaaagaattaggtcatggagaagtccaaaaggattcacagcggtctgcaacatctgtttctagttcatatagcactgcccat

SEQ ID NO: 115 - DNA, 370 bp, Triticum aestivum
  Clone ID: LIB103-002-Q1-E1-B4
acgcctgccggtactggtcctgacattcccgggtcgacagcgaggccacaaaggactcggggatccctcgcgtcggtagtgctgctgattggtctaaccacttctagctcgatgacccttgttgtaaactgccaatcttgacactgaatcgctgagacaccgcactgcatctgcattttatttttgagcagtttacaacgctctagacaatgctgtttcaataaatgtactgtctgatgggtaatgatactgctgtaagtttaccgatactcgaagaaactctgatgccaccacctggtggtagaggtttatcagcccccctatatatgtctcaataaataaagttcagtgaaggcttagtttgtttgtc

SEQ ID NO: 116 - DNA, 432 bp, Triticum aestivum
  Clone ID: LIB103-002-Q1-E1-B7
taccggtcctaaattcccgggtcgacgggtcgttgataacctccgtgggcagatcggcacttattttgcggaaaagcttctcacaattgtgagcgatatacttctccatttcaaaggaaaaggcaagtctgaatcagttggaccttcaaatagtgaacttgatcctcacttacataaaggcgatgctgcattggagttcattaaacatatatgtgctgttcttgctctcgatcagaatgttcagcatgatattctgagaatgcgaaagaacttgttaaagttggtccgtgtaaaggaatttgctccagaagcacagttccaagacccctgtgcctcattcattctcccgaacgtgatttgcagctattgcaacgattgccgggaccttgacctctgccgcgactcgacgctgcaaggccacgagtggaggtg

SEQ ID NO: 117 - DNA, 453 bp, Triticum aestivum
  Clone ID: LIB103-002-Q1-E1-C1
cgcctgccggtactggtccgagcttcccgggtcgacgggttccctttacattcttgcaagttgcatgccttactttccgctgctcatatagtctttgcatgcttgcttgaattgtgttaagattgcttgacttgtccaaagttgcaaaagtctgccaagaactgaaattgggaaaaggataagtttttatttggtcaagtagtctaatcacccccccccctctagacatactttcgatcctacaagtggtatcagagctttggtctacatttgccttgattttcataccttttagaagtcatagccttggtttcacaacctaggagagtatggcgtctagcaagggaaattaccaccgtagaggtccttactttgatggtactaattttgctagttggaagcataatatgaaaatgcatattcttggacataaccccatcgtatgggctattg

SEQ ID NO: 118 - DNA, 464 bp, Triticum aestivum
  Clone ID: LIB103-002-Q1-E1-C3
cgcctgccggtactggtcctacattcccgggtcgacggggcacgcgcgaggggtctggactccgaacggacaacggagagaaccgggagaacccgaacggatgcaagttttgaaaaacatgcggatgaaaagcagatgatgacatggcaaaatgcaacacgcaagaaaatgacatggcaacaacgacgaataaccggcagacacccggcgcatcggatccggggcgttacaacactcctccactaacaagagatctcgtcccgagatcttaggaccgagacggaaggggaaaaggaagaggtgaaacaagaaatcaagagaagaagcaaagaatcgagagcactcaagaagaagagaggaacgacgagaatcttaaagtcacggaaacagatagactatgaaacaactccggtttgaacgagataagaaacgaataagactgaaaggatttaggcagcactccg

SEQ ID NO: 119 - DNA, 442 bp, Triticum aestivum
  Clone ID: LIB103-002-Q1-E1-C9
gtaccggtccagaattcccgggtcgacgggtctcgggtaagtcaaatatctcgagacaaagggaatggaatacgggatggtttcaatccacgagattgtggtttaaaccgatgaagatctttgtcgaatatgggagagtcattatggtcatccaggtccggctagtgattattgattggaaaggtgtctcgatcttggccgcatgttctcgaacccgtagggtcacacacttaatgttcggtaacgttagggtcgtaatggggtattcataatggtgaggccgaatatagttcagagtctcgtatggggtccgaaatatcacgaggatctttagaatggtccggagatgaagattcatataaggaaagtggttttcagggttccagaaaatgtttgggatttttcagtactgtacagggaaggcttcagaaggttccgaaat

SEQ ID NO: 120 - DNA, 418 bp, Triticum aestivum
  Clone ID: LIB103-002-Q1-E1-D10
taccggtccagaattcccgggtcgacgggggtggcgtaaagcgattgacccaagaagtccgggcaatcagggaatgttccagcaaagaaggcaatgacttttccatatcacccatatcatgaattttttgacttcaaaatgtatgatatcatggactctgcataagttgataagacatgataattaaccgcaaaaagcatgggtatggataacacattgaaagtaataccagagagcaaatttaacgcttacaataaagcatgggcacagataacttattggttcatctgccactgcttattatctaccaagaaactacaaatgaaatgtataactaaattaggaataagaactccataaaacattggctttggtctgcaaaccattaatctgattggagatggaaactaaaccaaga

SEQ ID NO: 121 - DNA, 419 bp, Triticum aestivum
  Clone ID: LIB103-002-Q1-E1-D11
taccggcccagaattcccgggtcgacgggaatcctgaacacggaggacgtgtacgaggcatggggcacattccgtggaaaatagggttcccccagaacgatgacccgtacggttacagaagccgaaagagaaagatggatcgggaagcagatgttgtggcgcggttggcatcggaaatggatgtgatgaagaaaaccgtgagtgtactagtagccgaacgagatgcagctcgggcgcagcatgaagatcatccagcggatctcagaagccagcagcggagaagcagtgtggcttccacggaggccccaccggctggtgcagatgcaccgacgatcgaaattactgcaccggagcctctagtggtcgaaattactgcaccggagcctctggtggtcgaaattactgcaccggagcctcct

SEQ ID NO: 122 - DNA, 462 bp, Triticum aestivum
  Clone ID: LIB103-002-Q1-E1-D2
acgcctgccggtactggtccggacattcccgggtcgacgggctatataaaccgaagggttgtagtccataggacaacgatcacaacatacaatcataccataggctagcttctagggtttagcctctctgatctcgtggtagatctactcttgtactacccatatcatcaatattaatcaagcaggacgtagggttttacctccatcaagagggcccgaacctgggtaaaacatcgtgtcccctgcctcctgttaccatccggcctagacgcacagttcgggaccccctacccgagatccgccggttttgacaccgacacccaccatataccttcctcaaaacagccaccatacctacctattatggcatttccatagccattccgagatatattgccatgcaactttccaccattccgtttgctatgacacgcttcatcattgtcatattgctttgcatga

SEQ ID NO: 123 - DNA, 449 bp, Triticum aestivum
  Clone ID: LIB103-002-Q1-E1-D3
gtatggtcctgacatcccgggtcgacgggataaaaatatgatagattggataaatagatctcgaataaaagcaaattaaaataaagtgcagcaaggtatttttgtatttttggattaatatatccgaaaataaaagaaaataaaaatagatcgcaaagacaaatataataaagaagagaccccaggcccgtagatttcactagtggcttctctcgagaaaaatatcaaacggtgggtaaatgaattactgttgggcaattgatagaacttcaaataatcatgacgatatccaggcaatcatcattatataggcatcacgtccaagattagtagaccgactcctgcctacatctacttctattactccacacatcgccagctatccagcatgcatttagtgtattaagttcatggagaaacagagtgatgcaaaaagaacaatgacatga

SEQ ID NO: 124 - DNA, 440 bp, Triticum aestivum
  Clone ID: LIB103-002-Q1-E1-D7
gtaccggtccagaattcccgggtcgacgggtgcataccattcaggtatagagctgatgaaacttctggtgatgaacagaaaaaagttgttgaagttctcatgataaactcccaaagcggaccaggtttattattccccaaggtacttattctttgaattgtcataccaagttgttttggaacattgcgctgctggcaacacagattggtatcccagttagctccaacgtgttccttttcccggcatttatatatttatgaatcctctgagacaaattgagatgcacgcaggaatagtgtgtatggttgatgcataaatcacccctacctaaattttggagagcccaagtttggccaaggattaaagggaatggccaaatgaccatggtcatgcaacaaagttgtcaatcatccaaagaaagcccaatagtttggtgttac

SEQ ID NO: 125 - DNA, 438 bp, Triticum aestivum
  Clone ID: LIB103-002-Q1-E1-E10
taccggtccagaattcccgggtcgacccacctcatttcacacactataggcttcttttccagcagcactgtctcatagaaatcttgctgttcctttgtgtggaacctgtaatcaacaacagttcttcttcttgtagcatatgggtctatctctctccatttccttagtccagagtccctcctgatctgcatgttctcagccacaggatgagcatcattgtggtctggaatcttgggtttgagcttcctcaggacttgtccttcatcatcttcatcagtagcaacttcaggcactggggcattgttcttctcagcagctggtatactcctggtattcctcttaggtgcactcttgggcttggaggctgctttgggtgcttctttgggctttgatgaagcagcccctgtcctgatagcatcaaccataagcctctatgcc

SEQ ID NO: 126 - DNA, 428 bp, Triticum aestivum
  Clone ID: LIB103-002-Q1-E1-E12
taccggtccagaattcccgggtcgacgggggcaagagaagaaggaaattatagacaatgatctgggtcgctaccgtctctactcgtcgatggatcgccgggcggcgaaatcctccagctccttcttcaattcctcacaactttgcttgaaaccagccacggattcctccacctcctgctcgcgctcgatccggagcttcctcaagccacccatcagttcctcgacgaccgctttcagtgtcatctccgaggtactgctctgctcatgcagcatcttccagctggtggcctcctcctccttctcggtgactaactttaggatcttcgcattgtcacccatgagttgctcgacgaggctagtcgccttgtcaaccgaggcatcgctgatcctgagcagcttcatcaagccgtcaaccagctcctgctgcg

SEQ ID NO: 127 - DNA, 400 bp, Triticum aestivum
  Clone ID: LIB103-002-Q1-E1-E2
cgcctgccggtactggtccgtacattcccgggtccacggggacgcaatgaaatacaagtgcacacgatgtggcacgatgaagacgccagttcactgctacaaactgacggcgaaggtcgaacacgccacatgcacatcggacctcatcatcgtctcctatgtggctgttgagttggtcagtgtctctgcacaagaccttgtcgataacattgatcaagacgacgagtggtacgccctgccagacgaaatcaaggatcttcttggctcgacgcacaccttccaggttttcgacaagtacatgaattggagcttcacggtgaggtcgatcatggacgatgctagcgtcccagccccagctgcatccgctaaccaatgctcggataacgctgaccctgatggg

SEQ ID NO: 128 - DNA, 425 bp, Triticum aestivum
  Clone ID: LIB103-002-Q1-E1-E4
gggtccacgggtgactttcccaaaataaagaaatattgaggatttaataaaaaaatcaaataagattttatttcggagttttcggtgttttatttgaatttaggaaaaacgtgcgtttatcaaaattgcatgttagggcccgagtaaatgttcaccttgtgcggcttgattttagaagcccgtgaaaatttattttggaatttttggagtccgtttagtatttctttttatttttcttccgagcggaataataaaaaaaacgaaccgacttcgggccgtacccgagcgggacaccgcccggggtaacctttaaatagcgccgccccgagccgccccatcccatcagccccgcctcgatccgtgcgcgtcaacagagccatcaccgtcgccaccgatgatcccgccgcccgacgttcgtcgcgcct

SEQ ID NO: 129 - DNA, 414 bp, Triticum aestivum
  Clone ID: LIB103-002-Q1-E1-E9
taccggtccagaattcccgggtcgacggggtctggggagccatgattgccacccagagcttcgctagctaggcctagctcgcagtgatcgcaccatggcgaagcgaacgtacaggagttagtatgtgcgtggtgaggtaatgcggcgagggcagggccggcgctgctagctgctgccggcgcggcagcacgcaggacatgatgcagttaatggaagaacgaaggggagctacaaccagctaggaaggggagctgcagccagctaggacatgatgcagtgaaggaagacatgcatgcagcggcagtgaactaaagagctctggaggcaggcacagaacgggcagcccggccgggagaagtaaagggcggagggggaacagacaggcacgccggccgtcgcgtcggtacttgcagc

SEQ ID NO: 130 - DNA, 460 bp, Triticum aestivum
  Clone ID: LIB103-002-Q1-E1-F1
cgcctgccggtactggtccggacattcccgggtcgacggggccttaaaaccagtgacttataagtcatgcctgtttggttgtcacctgacttataagtcatctgagcataccttctcaccttgtttttttatgtaaatgttgtgggactcatgtaaaagggggtgacttataagttttaagttggggtggagcaacttatgacttataagttggggtgacttataagttactccctccgttcggaattacttgtctcggatatggatgtatctagaactaaaatacatgtagatacattcatttctgcgataagtaattccgaacggagggagtaggtccgtttgacaaaataagtcacttttacacttttcaacttataagttggtgacttatttggaaccaaacagggcctaacatacactagtaacatacacgtatttgtagactatgttactaccg

SEQ ID NO: 131 - DNA, 300 bp, Triticum aestivum
  Clone ID: LIB103-002-Q1-E1-F10
gtaccggtcctaaattcccgggtccacgtgatgcacgaaaaggccgtcatgatatctgagccgaacaggtgagcttaggccacgaccgatgatcgctaaccttcagtgccttcttaaacaacggactcaagcatcattcttaaagacgatgacactatggtcatcacacttatgggaccaatctcagtgtcagaacaggcggatttcgagtacggtatgttgctcaggacttccagatcaacgattgctagatacaagacatatgagtttcacacgcacaatcgggcgatcaccaggtac

SEQ ID NO: 132 - DNA, 362 bp, Triticum aestivum
  Clone ID: LIB103-002-Q1-E1-F12
taccggtccagaattcccgggtcgacggggaggcaaggactatatgtggaagtggccatcgacaagggtctcgggagcctatttgtgtgatgagagcaagcagcgatccgattgtggcatgtgtgcgtgacgtgctgttgtattcagccggccggcgacgagtttgctagcgaggtaacctacgtcgctgagtacatgcggtacaggccagccgaaaacatgaagtaagaccgtcagctccgcttcatcgtcttggtcgtccatcgtcgcatgtcaccgaagagtactagcaacgtggcctgagccaacagatgatatgaaggaaatgttggccatggcacggaaggaaccttggtgcgtga

SEQ ID NO: 133 - DNA, 447 bp, Triticum aestivum
  Clone ID: LIB103-002-Q1-E1-F3
gtactggtcctacattcccgggtccacgggtgggaaccaaggtagtgagataatgtgatgcaacactagaggtgccacgtggagcgtttaactggtcaactagtcatgtcatgagcaaatacagagttgtacggtgagcccgtgactgtataataaccactaaacgtaaatggtgaccgtaatgagtggatcctgaagtccaatgtgcgtatcgtgctttcgcttcaaatacaatgatcgtcattgcatatatcgtgagagaaagatgaaacatgcgtgaattttctgggggcttacttttagaggacctggagatagttttgtgtgcatacgtgaaaggggcgtacagggggtatgcgatggagagagagatgctcttcgtttctcgttattatgactaactttgtatatagtatatacatatacaaattcacagtgcggaataaa

SEQ ID NO: 134 - DNA, 434 bp, Triticum aestivum
  Clone ID: LIB103-002-Q1-E1-F4
ttcccgggtccacgaattccatggatatgtccggatcttcttcaagtccggggtcgagagctcggccgggatcctctggctgcggagaggggctgttgaactctttcacagcctttcttagttcctgttttttaaacagcaaggtaaataattgtggtcaagaaggtaaggacgagtagagtcgaataacaaataacaatttacccagcttcgggggttgtacatggcaaatccatcctgcggtttaatgtggaggaactcctcttcttctcccttgtacaattcagatagtatcctcgccaaagatgtggcggagtctggacctttgcgaccgcagcgggaggcatcgtcttatccattgaagtgccacatgggtttcccttagattgaagtggttgcactccccttataatacatattgacatgacttcaat

SEQ ID NO: 135 - DNA, 445 bp, Triticum aestivum
  Clone ID: LIB103-002-Q1-E1-F5
cgcctacaggtaccggtcctaaattcccgggtcgacatgatctactcacatgtcttcgaggcgttccaccagatcaatttccactagcgcaaggtcaacacatgcagcagaaaatgaggtgtcaccggtggccatgacgcagtggtgggcttggtgatgacatccgccttgccgaactcgtggtcttggtctcgttgcatcggaatggaaacctttgagaggatccctccgcgctggtccttgcctccttagcacaaaggaggaaattgttccctctatgcccattggtgcccgcctggccttggttatcatgactcacgtcatcgtgagcctcgtgaggcggggtacccgcatagaagtcttcactcctcggtaggcagtctcggggaaccactcctcgtgaggtcttggcgtagtccgcctcgcgaggccggggggccctcgc

SEQ ID NO: 136 - DNA, 428 bp, Triticum aestivum
  Clone ID: LIB103-002-Q1-E1-F6
taccggtcctaaattcccgggtcaacgggctcaccctaccatcattgctatcctcttcggtaccgtgcattgccctttctcaccttgagagttggtgcaaacttcgccggtgcatccaaaccctgtgatatgatacgctctatcacacataagcctccttatatcttcctcaaaacagccaccatacctacctattatggcacttccatagctattccgagatgtattgccatgcaactttccaccgttccatttattatgacacgcatcatcattgtcatattcctttgcatgatcatgtagttgacatcgtatttgtggcaaagccaccattcataattttttcatacatggcactcttgattcatcgcaatccatgtacaccgccggaggcattcacatagagtcatattttgttctaagtatcg

SEQ ID NO: 137 - DNA, 439 bp, Triticum aestivum
  Clone ID: LIB103-002-Q1-E1-F8
taccggtcctaaattcccgggtcgacgggccgcttgcaaccaaaatcccagccgagaagaggaagatggatgccaggaagaagagcctgaagaggctgtaacagcgcaccccgccgggatagcgtcgaagtgtggctgttgtagtagttaggagattcaatcccctacccttgataagcgacgccagattcagcaggtgcacagtgggaccgaatgaataaataaacccaagggacatctgatgaatctggtggttgattggtagaagtatgcctgtagtcagaactgtagtgatgtgagatgagatgcatgtgagttgcacccctgttggaataaactctagtgatgtgcaatgacgaactatttggaagaacaaactgtcgccttttcagaaaaaaaaaaaaaaaaaaaaaaaaaaaaaagcggccgctctagagga

SEQ ID NO: 138 - DNA, 389 bp, Triticum aestivum
  Clone ID: LIB103-002-Q1-E1-F9
tacggtcctaaatcccgggtcgacgggcgcctgtaaacaaaatcccagccgagaagaggaagatggatgccaggaagaagagcctgaagaggctgtaacagcgcaccccgccgggatagcgtcgaagtgtggctgttgtagtagttaggagattcaatcccctacccttgataagcgacgccagattcagcaggtgcacagtgggaccgaatgaataaataaacccaagggacatctgatgaatctggtggttgattggtagaagtatgcctgtagtcagaactgtagtgatgtgagatgagatgcatgtgagttgcacccctgttgggataaactctagtgatgtgcaatgacgaactatttggaagaacaaactgtcgccttttcag

SEQ ID NO: 139 - DNA, 408 bp, Triticum aestivum
  Clone ID: LIB103-002-Q1-E1-G11
taccggtccagaattcccgggtcgacttccaccagagcgaaatccaccatctcatcgaaagacgggacacctttgcctctatcaagtggtatcagatttccaggttgctcggtgagattttacagtttttcgtagtttagatcgagtctgtcttcatacctatagtccacgaaaaagccacaagaaaaaattagggttagttcatcatatccgaaccaatctgagccttgcataatctttttagggttttgctttgttgaatttgcggttgcatcgtcgtgtctagttgctggtcttagagtcgagtcttttagagtttcgagttccggtcataagttgtcacgccgccgccgcaccatcatcatcgcccctgccatctagcaccaccgcaccgaatccgtatccagt

SEQ ID NO: 140 - DNA, 383 bp, Triticum aestivum
  Clone ID: LIB103-002-Q1-E1-G4
gcctgccggtactggtcctgacattcccgggtcgacgggatcataacaatcatccttcgttaagcacgaagggaatttagacaatgtatgagttgatgagttactctcattagaacgtgggcactggtagctaatccgctcttcctcctttttttcatcgctctcctcatcatctttttcatccaatgagctcacagtttcatcagtttcctcttccatagactcctgcaaaatattagtctcttcttggacagcggagactctctcaaaagacttacatacacgtacatacaaagaaagcggtcgctcaagaggatccaaacttacgtactcgtgcatgctacgtcatagctcttcgatagtgtcacctaagttcaattcaa

SEQ ID NO: 141 - DNA, 446 bp, Triticum aestivum
  Clone ID: LIB103-002-Q1-E1-G6
gtaccggtccagaattcccgggtcgacgggacatgatcacgacggtgatgctgtacacagtcatcatgtagaagatgccggacatgatgatgaggaagatgcgggagcagacgaagggcatgatcatgaagatgaagatgccggcggagcagacgacgatggaccatcgatgggctgggtgcaggaccctcatattcaagagctgcttctcaagcagacggataacgcaagagctgccgcccgagagaaagccaagctagatcaactggagatagacgcggttactccattgtatgaaggatgcaggccggaggatacccgcctcaaagtaacgctcatggctctggagatgaaggtaaaacacaaaatgaccgacgcatgcttcgacgagaacatgtcattctggcacgaacgtcttcccaaggggaacaagtgcccgaccagtt

SEQ ID NO: 142 - DNA, 441 bp, Triticum aestivum
  Clone ID: LIB103-002-Q1-E1-G7
gtaccggtccagaattcccgggtcgacggggacagaagcccaaggcggagaagcgggcgccggcgtccaaggaggccggcggcgaggggaagcagcggggcaggaagaagggcagcaaggccaagaagggcgtggagacgtacaagatctacatcttcaaggtgctcaagcaggtgcaccccgacgtgggcatctcctccaaggccatgtccatcatgaactccttcatcaacgacatcttcgagaagctcgccggcgagtccgccaagctggcgaggtacaacaagaagcccaccatcacgtcccgggagatccagacctccgtccgcctcgtcctccccggcgagctcgccaagcacgccgtctccgagggcaccaaggccgtcaccaagttcacctcagcctaggcttcatcgtcgtcgttttaacgaatcgatgatg

SEQ ID NO: 143 - DNA, 458 bp, Triticum aestivum
  Clone ID: LIB103-002-Q1-E1-H1
acgcctgccggtactggtccgagcatcccgggtcgacgggatggtaaaagttgtgtgacaaatttgttgcatgaggtgctcttttaattgccttccttatgtgtgaaggtcgggatcgcacgatggttaactcctaccaacccttcccctaggagcatgtgtagtagtactttgcttcgagggcaagtagacttttgcaataagtatatgagttatttatgactaatgtgagtccatggatatacgcacactcatccttccactttgctagcctctattataccgcgcaactttcgccggtatcatgcacccattatttaccttcctcaaaacagtcaccatacctacctattatgacatttccatagccattccgagatatattgccatgcaactttccaccgttccatttagtatggcacacttcaacattggcaaattgctccttgcatgatcat

SEQ ID NO: 144 - DNA, 442 bp, Triticum aestivum
  Clone ID: LIB103-002-Q1-E1-H10
taccggtccagaattcccgggacgacgggaccgttacacatgatgattttgatgaatataatatgcatgtgcttgatgctcctacttgcaattattatgagagaggaactatatctccacctctctatgcttcccacatgataaaattgcaagaaactgtttatactatgcattggcctttactttgtgtgcatgaattgttcttttatgacatgctgatgcataggaagagagttagactttgttgttgcatgatatatgttactttgtgctcactactaaattacaaatcattgttaattaaaattggctttgatataccttgggatccgggtgggttcactacttgagcactatatgcctagcttaatggctttaaggaaagcgctgccaagggagaaaacccgggagttttagagagtcatttatttctgttgagtgc

SEQ ID NO: 145 - DNA, 259 bp, Triticum aestivum
  Clone ID: LIB103-002-Q1-E1-H11
taccggcccagaattcccgggaccacggggaagagttccgtcagcacgacggcatggtgacaatcttgatgttctatcgtcgcaaggcttcgcctaagcactgctacgacattatctaggactatggtggaggggggcaccgcacacggctaagagatcaagagatcaattgttgtgtcttacaggtgccccctaccctcgtacataaaggagccaagggaagggatcggccgaccaaggatggcactccaagggggga

SEQ ID NO: 146 - DNA, 459 bp, Triticum aestivum
  Clone ID: LIB103-002-Q1-E1-H3
cgcctgccggtactggtccgacattcccgggtccacgggcaagctcacaccaatgaggttagcaagggcaaaccactagattgggtttcaggacaaccagtcacagatgagcatggacgccttcagattataaagaatgatgacctcgaagagctccaagaactcggttctggaacttttggaactgtatatcatgggaaatggaggggctctgatgttgcaataaaaagaatcaatgacagatgttttgctgggaagccatctgagcaagaaaaaatgcggaatgacttctggaatgaagcatctaaccttgctgatctgcaccaccccaatgttgtggccttttatggcgttgttctagatgggcctgggggatccattgcaacggttacagaatacatggttaatggctcacttaggacggctttgctgaagaattccaagagcctggatcgacgc

SEQ ID NO: 147 - DNA, 435 bp, Triticum aestivum
  Clone ID: LIB103-002-Q1-E1-H5
taccggtccagaattcccgggtcaacgggtcaacctcgatcccgatgatgtggtggccaggctcgagcgcatccttggcagatttgacatccccgacgaagtcgaacatcaccaacgtgatattttgaggatgcaggtgatcgatggaatttgcttccaggccagagacatggaaatggagtggttccgcggagttggcatgcgcgcgattgcacgctgtcaagctcttctggaagaagcccaacagccccaagagcctcccagcgccagcagctccgtacgcggaggcgggtcgggacacttggagtgaatggccgcaagggtgctatgctgatcatggagtgcgagaagaccatcgtcggaaggccgccagctcagccttttagcttatattttagtataattgtatgcatatgtaggtcgtgagtgttctgg

SEQ ID NO: 148 - DNA, 445 bp, Triticum aestivum
  Clone ID: LIB103-002-Q1-E1-H6
taccggtgcgagaattcccgggtcaacgggaggaaacagcagtacattacagagtgctagccaaaatgcgaaagccacaataccgttcccgttccgccgcgcagagagacgaccataaataaagcttacacaacatagccaacaaggagaccgttcggacctggggctgccgccgaggcgcgtgtgccatgcatcacgattgcccaacaactaagattgcagaagccaacatgatgaaaggataatgcagcaaagacgcacgatgacgaggtagcgcagatttgatttgggaccttatgttctgccgactgtaggggggacccttcctagatcttgtcaagcttctccgccttcaccaccgggttggccttggcgatggcgtccatggccgcggcgcggtagtcaaacttgcactcgtgcttgtccgagtaacggtgcgttgcgc

SEQ ID NO: 149 - DNA, 338 bp, Triticum aestivum
  Clone ID: LIB103-002-Q1-E1-H7
taccggtcctaaattcccgggtcaacgcctcgcccctccttgctcaccaattctcatctgcggagccgcctaaagagaacgagcggccgctccggccaccggctagatctgcagcaccatcactccaccagcccacccgcgtgatctacctgctgtcgccggccctctctccctctgcagcaccaccaactgaggtggggttcaacagctcacattcctacatctttggaaatgcatccccatctaacgctacacaggcatcctatgtgtgctgagattattgaagaattccagaaatgccatgtggatcaccccatcagacgattctttggtgaatg

SEQ ID NO: 150 - DNA, 396 bp, Triticum aestivum
  unsure at all n locations
  Clone ID: LIB103-002-Q1-E2-A1
taccggtccagaattcncgggtcgacggggaggccccaccggctggtgcagatgcaccacgatcganattactgcaccggagcctctggtggtcgaaattactgcaccggagcctctggtggtcgaaattactgcaccggagcctcctcgctaccccgtggacgatataaaggagatgaaagaatgtcatctgtattatcctatcgggaacatgtccatgaaggtagccatcggcagtgctttaccatgtttacctggagcactccaccacaacaaccccattcaagatggctatgctcgtgtcacggtggaggacatagtccaagggtttgaggacctggagattgacattgctacacctgaangggagaaaagacttggagatgtcaaacgcca

SEQ ID NO: 151 - DNA, 441 bp, Triticum aestivum
  Clone ID: LIB103-002-Q1-E2-A2
cggtccagaaaacccgggtcgacgggacccttttcggcatcaggcctacattacaagaacattggtgtaaggaatgcttgaactatataccttgtgagtcgtcaagacgcctgttgatcaatgcagtatcatcctctgcaatatccagctttcgctgcagttcggccacttcgtatttcgggtagccgcaggaggagaggcagcctgtgttccaagttaaatcaaggttagtaactgagcatatctttttgatcctccgattgcttccttcggaaggcaatccgagtctcaggggctactgcatatacaacaggtgcattctatcaatatcattcaattggcaaaactacatcacaaacctcaaaacctcttagaaggctcgagaaggcctcgttcaatccgcttttcacggatagaacctttttggacaccgtaaccatc

SEQ ID NO: 152 - DNA, 438 bp, Triticum aestivum
  Clone ID: LIB103-002-Q1-E2-A4
ctgcagtcacggtccagaattcccgggtcgacgggtagccagtgtcgctgcgcacgtaccttcgaggggtagtaatagtgatcacgcacccatacatcggcctcctatccgtgtcagcgtcagtggcgtcgcccctaacgcacactaaagagatttggcagcggcctgcacgggcctcgccgatggccacaatcaaggggaagacgctgtcgtcctcctccgagactagcaggcagcgctgatcctccagcgactccagcatggtgaacgggtagcacgtcttgtacttgatactcttccccaagggccattagtgattgccgcatgcctgcgtcaggtgatgcacaatgtccgccgacgagccccaaaatggcaccgggcactcatagtagtagacgaagtgctccttggaggcatcgaccaggccgtccatgaaac

SEQ ID NO: 153 - DNA, 366 bp, Triticum aestivum
  unsure at all n locations
  Clone ID: LIB103-002-Q1-E2-A5
attcncgggtcgacgggggcgaagaagaacatcttcaagcagaaggcgccggaggctgatgctgcggcgagcggctgctgttgatttcattcacgcacgctaatcccggacatctatctatgatctatctttatctttgtggaggatggatgaaaacgtttgttgtttgacgaagtgacatctaagcagctcgtttgtgtcgttttcttttgcttgtgttgctgtatatgatatgaatcagtgggtcagttgatgctcctcatgttgaatcatcacaaaacaaaacagagtaccttggcagctatataatgtacgtattattaagctctataaatttactcacgaggaatcaatctatttgtgctg

SEQ ID NO: 154 - DNA, 447 bp, Triticum aestivum
  Clone ID: LIB103-002-Q1-E2-B10
taccggtccagaattcccgggtcgacgggagagacgaggaattccagtccttcgatttcaacacggacgtcattgcaaatcatggaggtccgacattggcccgcgggagtgtttactaatagcgaagtgttcatgtactcgcttttaatgccttgcatgaatgcaaaatcctctgacatgaatgaatgtgatgcacctgtatcaaataaaacagatgcaggtactgaatttacgaggagtgtacccatcacagtagcaggctggtcctgagcttcattgagatcaacgtggttggcatgaaaatgaccataagacatgtcattgttgtagcgaggctggttgcttccacgaccagctgcgggaagggccagttgattctggttcggattctgatagcagttcctggcaaggtgacctggttggccacacttgtagcacagaccatta

SEQ ID NO: 155 - DNA, 447 bp, Triticum aestivum
  Clone ID: LIB103-002-Q1-E2-B12
ggtccagaattcccgggtcgacgggacctacaagatctacatcttcaaggtgctcaagcaggtgcacccggacatcggcatctcctccaaggccatgtccatcatgaactccttcatcaacgacatcttcgagaagctcgccggcgaggcggccaagctggccaggtacaacaagaagcccaccatcacgtccagggaaatccagacctccgtccgcctcgtcctccccggcgagctcgccaagcacgccgtctccgagggcaccaaggccgtcaccaagttcaccagcaactagggttccgtcgcggtgtctctagggttccgtccccgtgttctcttctagtagcttttgtgtcgccgtcggtcgtgcccatgtgtatcgttataggtaggtagcgcgcctgctttgtaaatcgtgtcaggttgtgatggacggccttgatttca

SEQ ID NO: 156 - DNA, 460 bp, Triticum aestivum
  Clone ID: LIB103-002-Q1-E2-B2
acgcctgcagtcacggtccagaattcccgggtcgacgggatgtgggcatctggtgatagattgctcatgagacaaccaaccttgagacttggtgtcttgatatactggatagcattgcatgcattgcttgtgagttttatttgaaggttatatttaaagctgtagtgatggatctccttggtgagccacctactgtacagtgccatgtctatgacaagctatgcaacacaagcaatctagtcaaaatgctgtcgattctttttgaagtttgttactgaatgaatacctgaaccaaacggtcatctgcgtatcatttttgttgtgaatcttccccttctgctggaattggtcctgcttcagctgggtccaaccgaagggaactgcaccaacagtaccgacgaaagagaactgaagaaagcagcagcagcagcaaagatcccctggtcatactctcaatttt

SEQ ID NO: 157 - DNA, 447 bp, Triticum aestivum
  unsure at all n locations
  Clone ID: LIB103-002-Q1-E2-B3
gggtcgacggggaagatgaaatgaatgttgatactacctctgatgaggatgcggacatagatgatgaaatgactagataccaaagttctgattcacatgttgtggagaagaaatatacattgacaaaatgcagcgctgaacctgagaccaataaaacaaagcattctagtttgagttatgaggagcaacctgtttcttcggcaccaataagagcaagcaaaactgttgctgttccagttaaccccatttccgtggaacctccaaattttggaacaccaaaagatgttcatgttgtggagaagccggacatcacacccatgaatgctaatgttgcctctccagctattaatgtcaaagaattaggtcatggagaagtccaaaaggattcacagcggtctgcaacatctgtttctagttcatatagcactgcncatcccacagaagatg

SEQ ID NO: 158 - DNA, 451 bp, Triticum aestivum
  Clone ID: LIB103-002-Q1-E2-B5
taccgagtccagaattcccgggtcgacggggatagctagtcgtattgaagactatgcttctagcaacctacatcttgcagcatgtagaagagagtagatggtaagttcaccaagtatcatcgcatagcataatcctacccgatgatcctcccctcatcaccctgtgagagagtgatcaccggttgtatctggcacttggaagggtgtgttttattaagtatccagttctaattgtcaaaaggtgaaggtacaactccgggtcatcctgttacagagggacacggctattcgaatagataaacttccctgcaggggtgcaccacatttcccaacacgctcgatcccctttggccggacacaccttcctaggtcatgtccggccttggaagatcaacacgtcgcagccctacctaggcacaatagataggtcagcatgctggtctaaatccta

SEQ ID NO: 159 - DNA, 425 bp, Triticum aestivum
  Clone ID: LIB103-002-Q1-E2-B7
gtaccgagtccagaattcccgggtcgacgggtcgttgattacctccgtgggcagatcggcacttattttgcggaaaagcttctcacaattgtgagcgatatacttctccatttcaaaggaaaaggcaagtctgaatcagttggaccttcaaatagtgaacttgatcctcacttacataaaggcgatgctgcattggagttcattaaacatatatgtgctgttcttgctctcgatcagaatgttcagcatgatattctgagaatgcgaaagaacttgttaaagttggtccgtgtaaaggaatttgctccagaagcacagttccaagacccctgtgcctcattcattctcccgaacgtgatttgcagctattgcaacgattgccgggaccttgacctctgccgcgactcgacgctgcaaggccacga

SEQ ID NO: 160 - DNA, 87 bp, Triticum aestivum
  Clone ID: LIB103-002-Q1-E2-B8
tcactactccctatagtgagtcgtattaatctgatcgcgtctagtagatgcgactggatacggacttgcgtacgaccaggcaggaag

SEQ ID NO: 161 - DNA, 97 bp, Triticum aestivum
  Clone ID: LIB103-002-Q1-E2-B9
cacgactccctatagtgagtcgtagaactctcgcgtcggtactgatgctgattggtctaaccacatctagctcgatgacgcttgttgtgatctgcca

SEQ ID NO: 162 - DNA, 444 bp, Triticum aestivum
  Clone ID: LIB103-002-Q1-E2-C1
ggtccagaatacccgggtcgacgggttccctttacattcttgcaagttgcatgccttactttccgctgctcatatagtctttgcatgcttgcttgaattgtgttaagattgcttgacttgtccaaagttgcaaaagtctgccaagaactgaaattgggaaaaggataagtttttatttggtcaagtagtctaatcacccccccccctctagacatactttcgatcctacaagtggtatcagagctttggtctacatttgccttgattttcataccttttagaagtcatagccttggtttcacaacctaggagagtatggcgtctagcaagggaaattaccaccgtagaggtccttactttgatggtactaattttgctagttggaagcataatatgaaaatgcatattcttggacataaccccatcgtatgggctattgtgtgt

SEQ ID NO: 163 - DNA, 418 bp, Triticum aestivum
  Clone ID: LIB103-002-Q1-E2-C3
cgggtcgacggggcacgcgcgaggggtctggactccgaacggacaacggagagaaccgggagaacccgaacggatgcaagttttgaaaaacatgcggatgaaaagcagatgatgacatggcaaaatgcaacacgcaagaaaatgacatggcaacaacgacgaataaccggcagacacccggcgcatcggatccggggcgttacaacactcctccactaacaagagatctcgtcccgagatcttaggaccgagacggaaggggaaaaggaagaggtgaaacaagaaatcaagagaagaagcaaagaatcgagagcactcaagaagaagagaggaacgacgagaatcttaaagtcacggaaacagatagactatgaaacaactccggtttgaacgagataagaaacgaataagactgaaa

SEQ ID NO: 164 - DNA, 461 bp, Triticum aestivum
  Clone ID: LIB103-002-Q1-E2-C5
gtaccggtccagaattcccgggtcgacggggttgaagggctatctaacctctcattggttgacattgctgctggaggttggcattcagccgcgttaactaaagaaggagaggtatatgcttggggaagaggagaacatgggaggctcggctttggggatgataagagcagtcacatggtgccgctaaaggttcagcttctagcaggagaggatattgttcaggtatcatgtggagggacccattcagttgtgctaaccagtgatggccgaatattctcttatgggaggggcgatcatggccgtctaggcgacggtagggaggtgactacgggtcacccaatggaagtgcccataaacttgccgccaccgaagaccagcaccagctccgaagggctatggcaagcgaactacgttgcctgtggcggacgacacacactcgccatcgtgacatggactgatat

SEQ ID NO: 165 - DNA, 452 bp, Triticum aestivum
  Clone ID: LIB103-002-Q1-E2-C6
ggtaccgatccagaattcccgggtcgacggggtagctaacgtaggacaaatttgctgagacgaaacaaaccgctatccattggcaatcaacgtcgggtggtcaatcagtgggagccaaactgttcatttgtgctgatgcatgtatagcgtggtctgctattgctgatgagcccggcctgtgtttctttctttcgctgtctgtgcgtcgttggctttgctctggagtggttaccagaggatgtcagatgatgatggatgcaccataaagttctgcccaatcaaatactaggcaccttgtcactgcttcatcttgcacaaaaacttatcccgttaccttgtgtcaatattttttcaccctaccaaaactactttttgcaacttgtagtgttttttctaaagaagatagtacaatcgtggataaataatgagccaacatgctgagctggcatttt

SEQ ID NO: 166 - DNA, 449 bp, Triticum aestivum
  Clone ID: LIB103-002-Q1-E2-D11
taccggtccagaattcccgggtcgacgggaatcctgaacacggaggacgtgtacgaggcatggggcacattccgtggaaaatagggttcccccagaacgatgacccgtacggttacagaagccgaaagagaaagatggatcgggaagcagatgttgtggcgcggttggcatcggaaatggatgtgatgaagaaaaccgtgagtgtactagtagccgaacgagatgcagctcgggcgcagcatgaagatcatccagcggatctcagaagccagcagcggagaagcagtgtggcttccacggaggccccaccggctggtgcagatgcaccgacgatcgaaattactgcaccggagcctctagtggtcgaaattactgcaccggagcctctggtggtcgaaattactgcaccggagcctcctcgctaccccgtggacgatataaaggagatg

SEQ ID NO: 167 - DNA, 436 bp, Triticum aestivum
  Clone ID: LIB103-002-Q1-E2-D2
ggtccagaatacccgggtcgacgggctatataaaccgaagggttgtagtccataggacaacgatcacaacatacaatcataccataggctagcttctagggtttagcctctctgatctcgtggtagatctactcttgtactacccatatcatcaatattaatcaagcaggacgtagggttttacctccatcaagagggcccgaacctgggtaaaacatcgtgtcccctgcctcctgttaccatccggcctagacgcacagttcgggaccccctacccgagatccgccggttttgacaccgacacccaccatataccttcctcaaaacagccaccatacctacctattatggcatttccatagccattccgagatatattgccatgcaactttccaccattccgtttgctatgacacgcttcatcattgtcatattg

SEQ ID NO: 168 - DNA, 449 bp, Triticum aestivum
  unsure at all n locations
  Clone ID: LIB103-002-Q1-E2-D7
taccgatctagaattcccgggtcgacgggtgcataccattcaggtatagagctgatgaaacttctggtgatgaacagaaaaaagttgttgaagttctcatgataaactcccaaagcggaccaggtttattattccccaaggtacttattctttgaattgtcataccaagttgttttggaacattgcgctgctggcaacacagattggtatcccagttagctccaacgtgttccttttcccggcatttatatatttatgaatcctctgagacaaattgagatgcacgcaggaatagtgtgtatggttgatgcataaatcacccctacctaaattttggagagcccaagtttggccaaggattaaagggaatggccaaatgaccatggtcatgcaacaaagttgtcaatcatccanagaaagcccaatagtttggtgttacctaattagtc

SEQ ID NO: 169 - DNA, 439 bp, Triticum aestivum
  Clone ID: LIB103-002-Q1-E2-D8
gtaccgatccagaattcccgggtcgacgggggcacgccgcggattcacctcggctgttcgtctccacattattctctccggcggcggcgactcgactctcggcgaggggcggagatgtcctacctactcccgcacctgcactccggctgggcggtggaccaggccatcctcgccgaggaggagcggctggtcatgatccgcttcggccacgactgggacgagacgtgcatgcagatggacgaggtgctgtcaggggtggctgagaccataaagaactttgcggtgatctacctcgtcgacatcacggaggttcctgacttcaacaccatgtacgagctgtatgatccgtcaacggtgatgtttcttcttccgcaacaagcacatcatgattgatctcgggacgggaaacaacaacaagatcaactgggcaatgaaagac

SEQ ID NO: 170 - DNA, 387 bp, Triticum aestivum
  Clone ID: LIB103-002-Q1-E2-E11
taccggtccagaattcccgggtcgacgggcgcgctacaacttttggaaccgagccttcacacactgcgcacccgagattaagcagctgtttgagtcagtcgcaaagtcatgcggtggaggcgctggaaaagcagtggatgatggctctgatgtcagccactaatgtagttagtttcttgtaaatggtatatggctgcttgtcatggtctgatgggttgacgtgcggttgacttgctcacagatatttcttttctagtatcatatagtattgcgtctcttctgtaactggatattgcgtggtgaaaccctttaacattatacgcttcacagtgaatgcaaatattagccctttggggtactgcccgtaaaaaaaaagaagcgatgggg

SEQ ID NO: 171 - DNA, 376 bp, Triticum aestivum
  Clone ID: LIB103-002-Q1-E2-E2
ggtccagaatacccgggtcgacggggaccgaatgaactacaagtccacacgatgtggcacgatgaagacgccagttcactgctacaaactgacggcgaaggtcgaacacgccacaggcacaacggaccttatcatcttctccgatgtggctgatgaattggtcagtgtctctactcaagaccttgtcgataacattgatcatgacgacgagtggtacgccctgccagacgaaatcgaggatcttcttggctcgacgcacaccttccaggttttcgacaagtacgtgaattggagcttcacggtgacgtcgatcatggacgatgctagcgtcccatccccagctgcatccgctaaccaatgctcggataacgctgac

SEQ ID NO: 172 - DNA, 419 bp, Triticum aestivum
  unsure at all n locations
  Clone ID: LIB103-002-Q1-E2-E4
ggtccagaatatccgggtcgaccggtgactttcccaaaataaagaaatattgaggatttaataaaaaaatcaaataagattttatttcggagttttcggtgttttatttgaatttaggaaaaacgtgcgtttatcaaaattgcatttagggcccgagtaaatgttcaccttgtgcggcttgattttagaagcccgtgaaaatttattttggaatttttggagtccgtttagtatttctttttatttttcttccgagcggaataataaaaaaaacgaaccgacttcgggccgtacccgagcgggacaccgcccggggtagcctttaaatagcgccgccccgagccgccccatcncatcagccccgcctcgatccgtgcgcgtcnacagagccatcaccgtcggcaccgatgatcccgccg

SEQ ID NO: 173 - DNA, 425 bp, Triticum aestivum
  Clone ID: LIB103-002-Q1-E2-E5
tacctgtccagaattcccgggtcgacggggcaggcaatgatgacacggggcaagatgaagagatgatcgataatggcggcggggaagaggccagacatggcggcggagaaggggccggacatggtggaggagaaggggacggacacggcggaggagagaacgacatggactccacgcagcagagttcgtcggtactaagttcaatcgtgcgggaccctcatgttcaagcattgcttcgcaaggagacgagtactgagagagctgcttctagagaggaggctaagctggagcaactagtggtagattcgaacactccattgtatgatggttgcaaacctgatgtgacccgcttgagtttcacgctccaactcgtgaagacgaaggctaaaaataaatggaccgacactagcctcgatgagcatctc

SEQ ID NO: 174 - DNA, 454 bp, Triticum aestivum
  Clone ID: LIB103-002-Q1-E2-E6
ggtaccggtccagaattcccgggtcgacgggaatttctagcccatctggccccgtcggtccgacttcggccatatggttcgggtccagcttagtgtagcgcgtcttcaccatagcccaggcttctcttgcaccttgctggcaggctaacatcttccataattggaagcgccgccgtgctccttgaagcatatccacaagctcccccatgccattcggcaggaagcttgatggccacaaggcctgagcaatgccctgcatcacctgccgagctcgctcgtgtagttgtgagaggtcttgcagtaaatcgcctgcagacaagggcatctccttctcagggcggcccgttaacattcctgcaagtaaaattctttcaatatgcttcctcgccgagttgtactacagttcgtctaggcacttaacataaaaggcggtgttgaaacccttttgttcccc

SEQ ID NO: 175 - DNA, 448 bp, Triticum aestivum
  Clone ID: LIB103-002-Q1-E2-E9
taccggtccagaattcccgggtcgacggggtctggggcgccatgattgccacccagagcttcgctagctaggcctagctcgcagtgatcgcaccatggcgaagcgaacgtacaggagttagtatgtgcgtggtgaagtaatgcggcgacggcagggccggcgctgctagctgctgccggcgcggcagcacgcaggacatgatgcagttaatggaagaacgaaggggagctacaaccagctaggaaggggagctgcagccagctaggacatgatgcagtgaaggaagacatgcatgcagcggcagtgaactaaagagctctggaggcaggcacagaaggggcagcccggccggaagaagtaaagggcggagggggaacaaacaagcacgccggccgtcgcgtccgtacttgcagccactcaccatggctgcatcgggagtctggacttg

SEQ ID NO: 176 - DNA, 433 bp, Triticum aestivum
  unsure at all n locations
  Clone ID: LIB103-002-Q1-E2-F1
ggtccagaatacncgggtcgacggggccttaaaaccagtgacttataagtcatgcctgtttggttgtcacctgacttataagtcatctgagcataccttctcaccttgtttttttatgtaaatgttgtgggactcatgtaaaagggggtgacttataagttttaagttggggtggagcaacttatgacttataagttggggtgacttataagttactccctccgttcggaattacttgtctcggatatggatgtatctagaactaaaatacatgtagatacattcatttctgcgataagtaattccgaacggagggagtaggtccgtttgacaaaataagtcacttttacacttttcaacttataagttggtgacttatttggaaccaaacagggcctaacatacactagtaacatacacgtatttgtagact

SEQ ID NO: 177 - DNA, 430 bp, Triticum aestivum
  Clone ID: LIB103-002-Q1-E2-F10
taccggtccagaattcccgggtcgacgtgatggacgacaaggcggtcatgatatctgagccggacaggtaagcctgggccacgactgatgctcgctaaccttcggtgccttctttatcaacggaatcaggcatccttgcgaatggcgatgacactatggtcaccacacttatgggatcaatctcagtgtcagaacccgcggatttccagtacggtatgtcgctgaggacttccaggttgacggttgctagttccaagacatttgagtttcacatccacgattgggcgatcaccaggtacgcgataagtgcgacatgctaccgtaagggtaatcatgtggctaataccagcatggctctaccctcagatgattaacgctacacccacgagtctttccgagtatcttattgtagcacgaccaactgggcgac

SEQ ID NO: 178 - DNA, 436 bp, Triticum aestivum
  Clone ID: LIB103-002-Q1-E2-F4
ggtccagaatacccgggtcgacgaattccatggatatgtccggatcttcttcaagtccggggtcgagagctcggccgggatcctctggctgcggagaggggctgttgaactctttcacagcctttcttagttcctgttttttaaacagcaaggtaaataattgtggtcaagaaggtaaggacgagtagagtcgaataacaaataacaatttacccagcttcgggggttgtacatggcaaatccatcctgcggtttaatgtggaggaactcctcttcttctcccttgtacaattcagatagtatcctcgccaaagatgtggcggagtctggacctttgcgaccgcagcgggaggcatcgtcttatccattgaagtgccacatgggtttcccttagattgaagtggttgcactccccttataatacatattgacatga

SEQ ID NO: 179 - DNA, 403 bp, Triticum aestivum
  Clone ID: LIB103-002-Q1-E2-F5
taccgatccagaattcccgggtcgacatgatctactcacatgtcttcgaggcgttccaccagatcaatttccactagcgcaaggtcaacacatgcagcagaaaatgaggtgtcaccggtggccatgacgcagtggtgggcttggtgatgacatccgccttgccgaactcgtggtcttggtctcgttgcatcggaatggaaacctttgagaggatccctccgcgctggtccttgcctccttagcacaaaggaggaaattgttccctctatgcccattggtgcccgcctggccttggttatcatgactcacgtcatcgtgagcctcgtgaggcggggtacccgcatagaagtcttcactcctcggtaggcagtctcggggaaccactcctcgtgaggtcttggcg

SEQ ID NO: 180 - DNA, 452 bp, Triticum aestivum
  Clone ID: LIB103-002-Q1-E2-F7
ggtaccgatccagaattcgcgggtcgacgggataaaaatatgatagattggataaatagatctcgaataaaagcaaattaaaataaagtgcagcaaggtatttttgtatttttggattaatatatccgaaaataaaagaaaataaaaatagatcgcaaagacaaatataataaagaagagaccccaggcccgtagatttcactagtggcttctctcgagaaaaatatcaaacggtgggtaaatgaattactgttgggcaattgatagaacttcaaataatcatgacgatatccaggcaatcatcattatataggcatcacgtccaagattagtagaccgactcctgcctacatctacttctattactccacacatcgccagctatccagcatgcatttagtgtattaagttcatggagaaacagagtgatgcaaaaagaacaatgacatgat

SEQ ID NO: 181 - DNA, 432 bp, Triticum aestivum
  unsure at all n locations
  Clone ID: LIB103-002-Q1-E2-F8
gtaccagtccagaattcccgggtcgacgggccgcttgccaccaaaatcccagccgagaagaggaagatggatgccaggaagaagagcctgaagaggctgtaacagcgcaccccgccgggatagcgtcgaagtgtggctgttgtagtagttaggagattcaatcccctacccttgataagcgacgccagattcagcaggtgcacagtgggaccgaatgaataaataaacccaagggacatctgatgaatctggtggttgattggtagaagtatgcctgtagtcagaactgtagtgatgtgagatgagatgcatgtgagttgcacccctgttggaataaactctagtgatgtgcaatgacgaactatttggaagaacaaactgtcgccttttcagaaaaaanaaagannngcaaaaaaaaaaaaagcggccgct

SEQ ID NO: 182 - DNA, 429 bp, Triticum aestivum
  Clone ID: LIB103-002-Q1-E2-G6
aattcccgggtcgacgggacatgatcacgacggtgatgctgtacacagtcatcatgtagaagatgccggacatgatgatgaggaagatgcgggagcagacgaagggcatgatcatgaagatgaagatgccggcggagcagacgacgatggaccatcgatgggctgggtgcaggaccctcatattcaagagctgcttctcaagcagacggataacgcaagagctgccgcccgagagaaagccaagctagatcaactggagatagacgcggttactccattgtatgaaggatgcaggccggaggatacccgcctcaaagtaacgctcatggctctggagatgaaggtaaaacacaaaatgaccgacgcatgcttcgacgagaacatgtcattctggcacgaacgtcttcccaaggggaacaagtgcccgac

SEQ ID NO: 183 - DNA, 446 bp, Triticum aestivum
  Clone ID: LIB103-002-Q1-E2-G7
taccgatccagaattcgcgggtcgacggggaagaagcacaaggcggagaagcgggcgccggcgtccaaggaggccggcggcgaggggaagcagcggggcaggaagaagggcagcaaggccaagaagggcgtggagacgtacaagatctacatcttcaaggtgctcaagcaggtgcaccccgacgtgggcatctcctccaaggccatgtccatcatgaactccttcatcaacgacatcttcgagaagctcgccggcgagtccgccaagctggcgaggtacaacaagaagcccaccatcacgtcccgggagatccagacctccgtccgcctcgtcctccccggcgagctcgccaagcacgccgtctccgagggcaccaaggccgtcaccaagttcacctcatcctaggcttcatcgtcgtcgttttaacgaatcgatgatgatgttct

SEQ ID NO: 184 - DNA, 345 bp, Triticum aestivum
  Clone ID: LIB103-002-Q1-E2-G8
aattcccgggtcgacgggggcgaggacggtgatgagggtgatgagtactagagcagatgagtttgcgacctgatgtacgtcaagcgtcccttcgtctactactatcctgtgatctgcccaagcggctttatctgttgtctgtctgtttgaatgtttgctgtgtggtgtttggtttacaacctgttgtgtcgtatgaacctgtggtatgtttgaacctgcttcgcaccttggtcaatatgcatgttatctggtttgcctacaataaacaaaaaacccaaaaaacacatcaaggaaaatctagaactcagtccggcatcatcaaaaaaaaaagcggccgctctagag

SEQ ID NO: 185 - DNA, 425 bp, Triticum aestivum
  Clone ID: LIB103-002-Q1-E2-H1
gggtcgacgggatggtaaaagttgtgtgacaaatttgttgcatgaggtgctcttttaattgccttccttatgtgtgaaggtcgggatcgcacgatggttaactcctaccaacccttcccctaggagcatgtgtagtagtactttgcttcgagggcaagtagacttttgcaataagtatatgagttatttatgactaatgtgagtccatggatatacgcacactcatccttccactttgctagcctctattataccgcgcaactttcgccggtatcatgcacccattatttaccttcctcaaaacagtcaccatacctacctattatgacatttccatagccattccgagatatattgccatgcaactttccaccgttccatttattatggcacacttcatcattgtcatattgctctttgcatga

SEQ ID NO: 186 - DNA, 458 bp, Triticum aestivum
  unsure at all n locations
  Clone ID: LIB103-002-Q1-E2-H10
tgccggtccagaattcccgggtcgacgggaccgttacacatgatgattttgatgaatataatatgcatgtgcttgatgctcctacttgcaattattatgagagaggaactatatctccacctctctatgcttcccacatgataaaattgcaagaaactgtttatactatgcattggcctttactttgtgtgcatgaattgttcttttatgacatgctgatgcatangaagagagttagactttgttgttgcatgatatatgttactttgtgctcactactaaattacaaatcattgttaattaaaattggctttgatataccttgggatccgggtggattcactacttgagcactatatgcctagcttaatggctttaaggaaagcgctgccagggagacaacccggaagttttagagagtcatttatttctgttgagtgctttcatataatttaaaa

SEQ ID NO: 187 - DNA, 448 bp, Triticum aestivum
  unsure at all n locations
  Clone ID: LIB103-002-Q1-E2-H12
taccggtccagaattcccgggtcgacgggcgacggtgagaggcgcccacatcaacctcaaggtcaaggggcangatggcaatgaggttttcttccgcatcaagagatccacacagctgaagaagctgatgaacgcttactgcgaccgtcagtctgtggatctcaactccattgctttcctttttgatggtcgtaggctccgtggtgagcagacccctgatgagcttgagatggaggaaggcgacgagatcgacgccatgcttcaccagaccggagggtgctttcctggcccttagaaggagcttgctgcagcctggctgttctatgtcgtatgctacctttagaactagagtaaaatgtaagaagtgaaagaacttgtgaggctatggttctgtgccatagcctgagggggggtctggaggtgaaacaacatcggagtactgttgatg

SEQ ID NO: 188 - DNA, 408 bp, Triticum aestivum
  Clone ID: LIB103-002-Q1-E2-H2
cgggtcgaccggatggtaaaagttgtgtgacaaatttgttgcatgaggtgctcttttaattgccttccttatgtgtgaaggtcgggatcgcacgatggttaactcctaccaacccttcccctaggagcatgtgtagtagtactttgcttcgagggcaagtagacttttgcaataagtatatgagttatttatgactaatgtgagtccatggatatacgcacactcatccttccactttgctagcctctattataccgcgcaactttcgccggtatcatgcacccattatttaccttcctcaaaacagtcaccatacctacctattatgacatttccatagccattccgagatatattgccatgcaactttccaccgttccatttattatggcacacttcatcattgtc

SEQ ID NO: 189 - DNA, 409 bp, Triticum aestivum
  unsure at all n locations
  Clone ID: LIB103-002-Q1-E2-H3
cgggtcgacgggcaagctcacaccaatgaggttagcaagggcaaaccactagattgggtttcaggacaaccagtcacagatgagcatggacgccttcagattataaagaatgatgacctcgaagagctccaagaactcggttctggaacttttggaactgtatatcatgggaaatggaggggctctgatgttgcaataaaaagaatcaatgacagatgttttgctgggaagccatctgagcaagaaaaaatgcggaatgacttctggaatgaagcatctaaccttgctgatctgcaccaccccaatgttgtggccttttatggcgttgttctagatgggcctgggggatccattgcaacggttacagaatacatggttaatggctcacttangacggctttgctgaaga

SEQ ID NO: 190 - DNA, 447 bp, Triticum aestivum
  Clone ID: LIB103-002-Q1-E2-H5
ggtaccgatccagaattcccgggtcgacgggtcaacctcaatcccgatgatgtggtggccaggctcgagcgcatccttggcagatttgacatccccgacgaagtcgaacatcaccaacgtgatattttgaggatgcaggtgatcgatggaatttgcttccaggccagagacatggaaatggagtggttccgcggagttggcatgcgcgcgattgcacgctgtcaagctcttctggaagaagcccaacagccccaagagcctcccagcgccagcagctccgtaggcggaggcgggtcgggacacttggagtgaatggccgcaagggtgctatgctgatcatggagtgcgagaagaccatcgtcggaaggccgccagctcagccttttagcttatattttagtataattgtatgcatatgtaggtcgtgagtgttctgggccttgccgc

SEQ ID NO: 191 - DNA, 416 bp, Triticum aestivum
  Clone ID: LIB103-002-Q1-E2-H7
gtaccgatccagaattcccgggtcgacgcctcgcccctccttgctcaccaattctcatctgcggagccgcctaaagagaacgagcggccgctccggccaccggctagatctgcagcaccatcactccaccagcccacccccgtgatctacctgctgtcgccggccctctctccctctgcagcaccaccaactgaggtggagttcaacagctcacattcctacatctttggaaatgcatccccatctaaccctacacaggcatcctatgtgtgctgagattattgaagaattccagaagtgccatgtggatcaccccatcaaaaaattctttggtgaatgcacggatcttaagattaagcttgatcgatgcttccggcaggagaaagctgtgaagagaaaggcaaactttggagaga

SEQ ID NO: 192 - DNA, 427 bp, Triticum aestivum
  Clone ID: LIB103-002-Q1-E2-H8
aattgccgggtcgacgggatggaggacatcgtggagcccaagccgacatcacaaccagagcctttagcaggtgaggaccaactttagtcaggataagtgtactagatattccccttcaaaatggccaattgttggcgcccttcccgctcaatatttgggaggaggcccagggcctttgcctacaaatagggctagccaccacaagatagaaacaagggaatcctcaccaggaacccagtagagagagcgactgaactccccctagtagttcatcgcactagtcaaaaatagaccctcgccaggctgttcttccttgtattgttcatcatcagcccaagaggcaatccatcactacacacactagagtagggtattacaccacaatggtggcgcgaactagtataaactctgtgtctcttgtgctgtt

SEQ ID NO: 193 - DNA, 335 bp, Triticum aestivum
  unsure at all n locations
  Clone ID: LIB103-003-Q1-E1-B9
cggtccagacttcgcgggtcgacgactaggatgcagccaaggaacggtgatctgtgttgaatattcccccaaagggaacccttattcacataaccgttactaaggtgaactttaccggaaccaaccttatccaattccaaaaaggaattttccaaggtttcatccaccccaatgacaaatgcacgtttttcagggaggtatcanaccagccaatatattaataggggataacctttgtcctaaaatctatgacttcggtctctcccagatgttttaagaagaagaaacggaacgtattgttgaaaatgtcgccggaacattcggatatatggcac

SEQ ID NO: 194 - DNA, 427 bp, Triticum aestivum
  Clone ID: LIB103-004-Q1-E1-A2
attcctaggtcgacgggacagtcttttcgaaaattgttttagaagtgggggaggggaaaatgagaggcgaatggcaaataatgtaatgcgagagatgagagtttatgatgggtacttggtatgtctcggcttggcgtaaatctccccggcaacggcgccagaaattcttcctgctacctcttgaacttgcgttggtttttcctttgaagaggaaaaggtgatacagcaaagtagagtaagtatttccctcatcttttgataaccaaggtatcaatccagtaggagacaacgcgcaagtcaccgaatacctgcacaaacaaacaccaacttgcacccaacacgataaaggggttgtcaatccgttcatggttatttgcaaagtgagatctgatagagatggataaacggtaaagtaatatttttggat

SEQ ID NO: 195 - DNA, 419 bp, Triticum aestivum
  Clone ID: LIB103-004-Q1-E1-A3
ctcccgggtcgacgggaaggcatgatgtgatctaatacgagctatcgcctcacgggcagccatctgcatagcatgcctctctgtaggcatggctctccccaagaacaagaagcggcgtatcttagcacgccctcgcttgaattgcaccgcggcctggtgcatggtcaggctatcgttgatcttgtgtgggtaaagtgtgaagactgggcgcactgacggccccatcgcgacctgaacgatgaacgagaagagcttgacgaacccctcaagcacgttggcgaacatctgtgattcacagtcgttgccagccatctacaaaagtaggcaaaaattctaaacgatcagatcataaattttatgctgactgtcagaaaaatgactacatttggaaaaacatgaataaactctatcatgctaat

SEQ ID NO: 196 - DNA, 430 bp, Triticum aestivum
  Clone ID: LIB103-004-Q1-E1-A5
tcccgggtcgacgggaaggcatgttgtgatatgatatggtcaagacgtgataagatataaattgttgtatgagatgatcatgttttgtaaaagttatacgcaactagcaggagccttatggttgtcgctttattgtatgaaatgcaatcgccatgtaattgctttactttatcactaagtggtagcgatagtcgtataagcaatagttggcgagacgacaacgacgttacgatggagatcaaggtgtcaagccggtgacgatggagatcatgacggtgctttggagatggacgtcaatggcacaacattatgatggctatatcatgtcacatagtttgattgcatctgagatttatctattatgcatcttattttgcttagtatctgtcacagcactataataatacatgtaattagtggcatttcatcc

SEQ ID NO: 197 - DNA, 448 bp, Triticum aestivum
  Clone ID: LIB103-004-Q1-E1-A6
taccggtccagaattcccgggtcgacgggagtccatgatcggaaaggacaatgacgccgagctgcttcaagttctgaaggtcgcctgttcctgcgtgctttctgctccaaaggaaagacctacaatgtttgaagtgtaccagcttctgagggctgttggggagaaataccattttagcgccgctgatgatgaactggcgctccgaccacaggatgcagactctaagaagctggatgagcttattgtggcgaaatagacgggtctgtctggtacgttgatgctgggtgtttgttgtatcttgtgaatggtcaggttgagatggtagtaatgtactactactatctggactccttcgctagctagcgaaaccatcggaagctcaatcaatgttcatggtcctggaaatagcatgttgttgtaagatgtgtatgacttgtgagttccacgt

SEQ ID NO: 198 - DNA, 438 bp, Triticum aestivum
  Clone ID: LIB103-004-Q1-E1-A8
ggtccagaattcccgggtcgacggggatgggggaggccgttggagaggctcggagcgcgccacgtcgccgggcagggaaggtcagtgttttttgagtttcaccggaccggcaaaacctctcgggacgagtgcttcgccccggcgtgcgattggacacgaggccgcccgtctcctgttttcgtccaaaggagaagaaacaacaaattacgccctgcctctgattgtgaccggggatgcatgaaactatcaacatctctttctttcttttttttgtcttttgaaatgatcaacatctcacttttgacatgttcaaaaaaaaaacatctcacttttgacacgttgtgagctatatcaccagtcctgagttgaaaaacaaggagaacttgcaggtaggaatatggatgataatttttgactcaagtgatatttgcaccgggt

SEQ ID NO: 199 - DNA, 423 bp, Triticum aestivum
  Clone ID: LIB103-004-Q1-E1-B10
ggtcctacattcccgggtcgacgggtagtgaaaaggtggtgcatgcaacagagttaacgagtaggcatgtttagatgctctatgcactcactacagatcatgtcatgacaaacgagtcatacacgcatcaagagtacataccataaaagttacatatggcactaatcataacatagcatgcacggctgaataggagcatcctcggcaaaatcgctaaacatgtcaacattctgccaggaacattttatagcgacacgtacagctcgattgacacaagttatggtgctctatagctgcaaacagatacatgtacggatagatgaacacaatattgacagtgcattattactgatcaacatcagcagatgcacgggtcacgatgatacaacatgaacatatggcatcgggtcggatagttaggtt

SEQ ID NO: 200 - DNA, 448 bp, Triticum aestivum
  unsure at all n locations
  Clone ID: LIB103-004-Q1-E1-B11
ttcccgggtcgacgggggccacgaggggcacgcgaagggagcgcagccgccggcctccgccgtggttgctcgcggcatcggcgaggacgacctcctcgaggggtttcgcagcccaggtaagtcagaaagaaatattccatcctcggacaaacttctcttgttgcaatggaatccaagttctttcggttcctgaagcttgtcggagttggtttcaaagcaaggacagagcaaggaggccgcgagttgtttctgaaactaggctacagccatgaggtgcagttcaccgctccacccgccgtccgcgtcttctgcttcaaacccaacataatatgctgcactggcattgacaagcatagagtgcaccattttgccggagccgtccgaagcagtaaacctccggaagtgtacaaggggaanggcatactgtacattgatgaggtcataaagc

SEQ ID NO: 201 - DNA, 399 bp, Triticum aestivum
  Clone ID: LIB103-004-Q1-E1-B2
attccagggtcgacgggttggtcatgcttcatattcgtcacacaagaatgctctcatcatgcacaaccccgaagacaagccaagccattgtttcatactttagtaatctctatctttttttcaattttcacgcaatacatgagcgtgagccatggatatagcactatgggtggaatagaatataatgatggggggtttgtggagaagacaaagaaggagaaagtctcacatcgatgcgggtaatcaatgggctagggagatgaccatcaattgatgtccatgcaaggagtagggattgccatgcaacggatgcactagagctataaatgtatgaaagctcaacaaaagcaactaagtgggtgtgcatccaacttccttgctcccgaagacctagggaat

SEQ ID NO: 202 - DNA, 451 bp, Triticum aestivum
  Clone ID: LIB103-004-Q1-E1-B5
ggtccaggactcccgggtcgacgggacggtatattttcacctgcatgagcttgatcttcgttatcatctaagccgtcaaactggagctctaaatcgcataattgaccgaggcagtcgtgccataaattacattcttacagtgatggtgttcaatgttgttcccacaatactagagattggtatggtgtcaagtatacttgcgtaccagtttggttccacttttgcttggattacttcagtttcagttgctacctacattgttttcactttggctatcacacagtggcggactcagttcaggacagccatgaacaaagctgataatgcttctagtacagtggcagttgactccctgctcaattatgagactgttaaatacttcaacaatgagcaatttgaagttcagaagtatgataaatacttaaagagttacgacgatgctgcactgaaa

SEQ ID NO: 203 - DNA, 437 bp, Triticum aestivum
  Clone ID: LIB103-004-Q1-E1-B7
ggtccagaactcccgggtcgacggacaagctaaaggtatatcactctttctaacttctgtgaggtctctaaataaggtttggtggttggcccacccagtagtggctgaaagagacgttaatcgatcatctatgggcgataatactacacgcatggacaaaagccgaaatcactaaaaaaatttaagcatcagtacatacgcaggcgctcatatacacgcgcatacactcacccctatgaacgcacacacgcacaccctacccttatgagcacctccgagagactgagccggcatatcatcttgagatttacgaagccaccgtagacgcctcatcatcgacgagaacgtctcctcccactgaaagcgcatcgccggaaatcctgaaataaatccaggaataatgcgagcaccaggatttgaaaccctggtgggttggg

SEQ ID NO: 204 - DNA, 416 bp, Triticum aestivum
  Clone ID: LIB103-004-Q1-E1-B8
ggtccaggattcccgggtcgacgggggcgatgacaaaagcgacggccggagctcggtggttgcggctgagagggctagagctcgcgggcgaggaagctgagcagcgcagcggcatctacatagcacgtggaagaagtctgcgaggtcggcttggtcattcgggcttgctagcgatggcagtgacaagagcgacggcgagaagccctcggtcatggcggggctacggcgtagagggcgggcgcgaccatgggagaagggggagatgatgcgggtgctcacaacgcgtccgatggcgtcgtcggcgatgtcgggggcggtcgggttgctgcgaatcgacaacgacggctgtcggtggagaggacgaagacaacagcgatggaagcactactgggcgctccggcatcgtttgtctcggc

SEQ ID NO: 205 - DNA, 433 bp, Triticum aestivum
  Clone ID: LIB103-004-Q1-E1-C6
ggtccagaactcccgggtcgacattcgcccgcaggaaagcaacgagcgcgctttcctatttggggtcaagagtggcgctgatggtgaaggtaccaccagcgccatcctccttggcagacactttcttagtcgcaggtggagctgccatcgccttcttgcacttgccggtggagctcgatggtgcgtcctcgacggtagcgcagcactccgaagaggtgcacttgccggagtgggcatcagagctcttgccggacttggtcttcttccttcccccgggagcttcagcggcaagtgtcttgcgctctgctgcggctgctgcttcccggtagatcttgtcggcacagataagagcatccttcttgtctccagggacagagatgacacttattgggcctggcattttcagtatgttgtatgcatactgagaggctgc

SEQ ID NO: 206 - DNA, 448 bp, Triticum aestivum
  Clone ID: LIB103-004-Q1-E1-C8
cggtccagaattcccgggtcgacgggcacttcaatgttttttaaacttatttgaactccggacttcttttgtgttcagtatgcagcattcaaagcgacgtcatcaatttccaacatgttctgacatcatttgttgttttttcagtcatttacctaattgtttagagagctaaatgaccgtgaaattgaaaatcactacaaaatgaactgtgaaaatgttgaaacctggcatggtatcatcatttcacccgcatagcatgtgcgaaagagtagagagggtcacggcaaaaactggacgcacttcgtgtacaaactggacaatctctttcggagtatcagggttttggatcagaacttatctgttacacgggcacttcaatgttttttaaacttatttgaactccggacttcttttgtgttcagtatgcagcattcaaagcgacgtcatc

SEQ ID NO: 207 - DNA, 447 bp, Triticum aestivum
  Clone ID: LIB103-004-Q1-E1-D10
ggtcctgcattcccgggtcgaccggttgttccggttgggtggcctcagtgttagtaccacttggagtgggcggtagtaccactcgttctggagcagcgaggttctcttcctccttctcttccatgcttggccttggtccttggattctccatggtcgtctcggttgtgccttgtgtccaatggtgtatattcgaggtctcgtcatatgtcctcttggggcttggagagtagtacgagtgtacatggggatgaacgtgggatgctccacatcaatcccatcctccgaggactttgagttaaaatcatcaagtgaggaaaacccaaatcccaaacccattcacctacgaacccaaagtgattgagcatcacttaagagattgttcctgtgtggaaccgacgcttgttaactttgagaactgtgtatcctccagaccgttaggcatcatg

SEQ ID NO: 208 - DNA, 413 bp, Triticum aestivum
  Clone ID: LIB103-004-Q1-E1-D3
tcgacgggaccaggagactcagggaaatcgatccttggcatctttgctaagggaaaacttccgctacacttcatctctaaccttccacttgggtaaccaacgaggggcgagaagccatcagcattcgacgctgccgcattctaccgagctcaagagggcagctcggtagagagtgtgttctggtctcaatattctaaggccggacaccctatgcccttaagcgatcagctgaagcagctggtcgagctccacaaggcggccgaacaggccgtaaatggtcttctagttcggctgtggcctgtggaggccgtgcctgggagctacttcgggcttgtgcggccgctggtggaggcctgtccacggcttgaggtcatcaagcgctctacctgcatcgagggtgcccggaggggcct

SEQ ID NO: 209 - DNA, 433 bp, Triticum aestivum
  Clone ID: LIB103-004-Q1-E1-D5
cggtcaaggactccgggtcgacgggtctgtcaaatgcagagccgtacgtatttcgcaaatattctatgtccacaatgctttgcacggagctagtctagctaattgctccaactttcactatgtaaccagattgagacttagagtcatctggattggtgtaaaagcttgcatcattgtaactgtttacgacgggctcttttatcacctccataatcgagaaacatctccttagtcctcactaaggatattcttgacccatgtccagtgatccacttattatatcaaaattgtattcctttgccaaatacagagcacggtctacaatacgtcaggttcacagcatagcatactttagagaacctatgactgagggatatgacagaagagatgttgtaccaggttatgagcgggcgctccaaaggatccaaactta

SEQ ID NO: 210 - DNA, 396 bp, Triticum aestivum
  Clone ID: LIB103-004-Q1-E1-D8
gggtcgacggggaagtcgaccgccaaggagggcggcgacaagaagggcaagaagaacgccaagaagagcgtggagacgtacaagatctacatcttcaaggtgctgaagcaggtgcaccccgacatcggaatctcctccaaggccatgtccatcatgaaactccttcatcaaggacatcttcaaaaagctccccggcaaggccgccaagctggcgcggtacaccaggaagccagccatcacgtcccgggagatccagacctccgtcggcctcgtcttccccggcaacctcgcaaagcacgccgtctccgacggcaccaaggctgtcaccaagttcacctcctcttacgctgttcgtcttcctgtgtctcgtagttagctgttcgggtgtgtatgtgg

SEQ ID NO: 211 - DNA, 469 bp, Triticum aestivum
  Clone ID: LIB103-004-Q1-E1-E10
ccggtccaggattcccgggtcgacgggaggtgtgagagagtagaggaatggcctggccaacaatgaagtagggtggggcggtgcggcctgtgcggcagcacagccggccatgggaggcgggagcaggcagtcccaccggagctggtttgggcggctggagtaagaagatcagatattgaagaagcagcacatccgttagattaacatccaacggtcactgctgctagaatcgtttatggactaagttgacaaagccaaagtacacgtcaacctagtagacccacaagtcagcctccaaatctgtcccaaacagcatacaacccgaaatttctaaccagattcaaattaattttaaatctaaatataccttaatttaaattcaatgaaacttacccgcacaaaaacaatgaaatttaaaatatcaaaatccgaaagaaaacagtattttggaactaattgcctaattgtt

SEQ ID NO: 212 - DNA, 461 bp, Triticum aestivum
  Clone ID: LIB103-004-Q1-E1-E11
ctcccgggtcgacagaacgtgatataatcttggcctttcatcgatgacttaatatcaataggaaggcccgtactcatctttgaccaaataagtgcctgtttaatacacgttaaactaactggaatttgtgcagtgcaattcaattagacagaacaggcaacaaagagtattaactcctaactgcaaacatgttcataactacagagtaacagaataagataatcatctatcagaatatccattacaggtccaatgttcaaagtctgcttaccgcagctagttactcttactcaactgaggcaaaatgtcacacacattctgtatgcatgggacagcttaaccatcagaacacaaagtttacaagcgtacaacataattgtacatgtctcactattgaagattaaacacaaatttagtgagaaaataggacaaccgttataactaaaatgttgattttcttt

SEQ ID NO: 213 - DNA, 321 bp, Triticum aestivum
  unsure at all n locations
  Clone ID: LIB103-004-Q1-E1-E12
ttcccgggtcgacgggttcacttatattattttgagagtctttgagaacaacatggtatttgctatggttatgaatatggtcctagaatgatgagcatccaagttgtgtataataaaaactatcatagaaagtgcatcaaacattaggatcaatttgatgtttgataattgttttgagatataaatgtagtaatgttagagtcatactagtgggtaactatgaaattgagaaatacttgtgttgaagttggcaagtcccatagcatgcacgtatggtaaagttgtgtgacanatttgtcgcatgaggtgatcttttgagtg

SEQ ID NO: 214 - DNA, 411 bp, Triticum aestivum
  Clone ID: LIB103-004-Q1-E1-E5
cggtccagagattcccgggtcgacgggcaatgggagtgagcagatgtgatctgttggtggtggctagggttaggagacaccgcacacttatataggcgcagccgcgtggagagacgtgggcggcccacgtccgagtccgtgacagcccacgatccgacgtctcagattgtggcccagctgtcaaaaactctccgttagtgactggcaaaaaaataagcacgtatgtgtgagctcggctcgctcattcccgcaacccgcagcgtgacgcgcggcggaggaggagtgcgcgagggccttttctattctcaagccccaatagcatgtgaaagacaatccttctccactagcggggtgagactaaacttcccgctacacctagtgccaataaacccacatgggctagatttttca

SEQ ID NO: 215 - DNA, 445 bp, Triticum aestivum
  Clone ID: LIB103-004-Q1-E1-E8
cggtccagaattcccgggtcgacgggaagcactacgatccggtaagactttcctgaaatctggcatgacacgtcaggtcagtacattgaatggacttccaaactcacaacaagtaaaagcataatggcaaacaataacatgacaattaagcaagttaaatgcaaggctataatatactactcatgaagtgatcatgcttgtgcaatgagtccctcggactcccttaccatacgggttacctcgtaaccaacatcatcaatatggtgatcacctccggatcacgaacgaaaccaacccttgggttccaacatcaaccatcttcacggtttcaacattatcatcgcataatcagtgtcatctgtatgaccttattgtgcaaaattaacttattgttgttgatccatggtgtgacctactacgaactgtgtccgtaaccgtggacgcg

SEQ ID NO: 216 - DNA, 429 bp, Triticum aestivum
  Clone ID: LIB103-004-Q1-E1-E9
ggtccagaattcccgggtcgacgggagaagttttcactccgactccgaagatactcaagatgaaggtgttgccagtctagcacttgtgtcaaccaactcctacgacatatttgactcaccaaatgaaggaattggaagatgcttcatggccaaaggtcctaaggtaacacaccccgagtatgttgatttcaatagtgatgaagatgacttgttaggtgatgatttgcttggtgacaactctagtgatgaatactatgatgaaagaccaattaatcatgctaaaacgagtgacaatgataatgagaagattgaggctctaactaaagaacttaaaactcttaagttagctcatgacactatcttcgaagatcatcgagaacttttaagagctcatgagaaactacgctttgaaaagctcaatcttgagca

SEQ ID NO: 217 - DNA, 463 bp, Triticum aestivum
  Clone ID: LIB103-004-Q1-E1-F10
ggtccagaattcccgggtcgacgggggataccaacaagtcaggggctgctccatcaaagcccaagactgcccccaaggttgctgctgctcaagcctctaagctaacagcaccaaagagatcaactagaaacataccagcagctgagaagaacaaggcccagtgccttaaatggaagaagaagaagagccccaagtgctcagaaaactcaaactaaagattcctgatgatgatgacaatcatccagttgttgataatatgaagaaaagaaaacatgtaggactcatattgtggagacactcagacccctatgctctgagaagaaggactattgtggactacatgtttcacactaaggaacaacaggacttctatgagattgtgctcttggacaagaagcccattgtgtgtgacatgaaatgggtggactggaaatacattgaaaacaatgaagatcactttcct

SEQ ID NO: 218 - DNA, 447 bp, Triticum aestivum
  unsure at all n locations
  Clone ID: LIB103-004-Q1-E1-F12
ggtccagaattcccgggtcgacgggaggaagagaccgaggaggagctaggaactgaatatctagtgcagccgcttggccgtgctgaagatgaagagcattccagtgactttgagccggaagaaaatggtgatggtgctgaggatgaggagattgaggatgatgatgctgaggatggtgaggattctgtcaagccgcaatcctcatcgaagaggaagaggtctggtggggaggatgaagatgatgatgacggtgatgatgatggtgatgatgatgagaagcctccatcaaagcgatagtcaatttgttcttgctgattcgggtacctttctgcttgggccangaaaggaaataatcctctgggagaagattgttggtaaatgctgtagctttaggacatctgtggtaggtgtagcagctcgaacttgagtctacccatgttagttgtt

SEQ ID NO: 219 - DNA, 445 bp, Triticum aestivum
  unsure at all n locations
  Clone ID: LIB103-004-Q1-E1-F5
ggtccagaattcccgggtcgacgggtaagccgacgcgtgttgatgagccgctagctgagccgccagcttggcctcccgacgtgctctgccctgatccaccaaagactgggcattggcaccattgcgcgttgggtcatgtccacggggttggttacgatgttgttcagtacttgaaaccgctggcgagtcgatgtgcctgctgtaactccggcttggacgaggggttgagtgaatccactcacgactataagaataagccgcttgctgctccaatgctgtttgaagaagctctctggccctccgcgtttcaaccgccgatggagactcgccttcaagtggtagagccgccaatcgtatcgccgcaacaatcatattgtccaaagggttggaataatgactcgacggcgtcaaaaactgctgaggcggngtattattcacacgcgga

SEQ ID NO: 220 - DNA, 440 bp, Triticum aestivum
  Clone ID: LIB103-004-Q1-E1-F6
ggtcaagaattcccgggtcgacattgctcctaaacatgcatatgcgctaccggagagaacagttctattcttcattatggacatacggctgctccaaatgaccggacgctgaatgatggagacatggctctaatggacatgggagctgaatataatttctatggctctgacatcacatgttcataccccataaatgggaagttcaacagcaaccaggcaatagtatacaatgctgtccttaaggctcataatgctgtcatatcacacatgcagcctggattaaaatgggttgatatgcacaagctggccgagcagacaatacttgaatctctcaagaatgaaaagattatccatggtgatattgctgatatgatggctcgaaggttgggtgctgtttccatgcctcatggtcttgggcacttgcttggaatcgacaccca

SEQ ID NO: 221 - DNA, 405 bp, Triticum aestivum
  Clone ID: LIB103-004-Q1-E1-F7
cggtccagagactcccgggtcgacgggtatcatcatcatcacttgtaacgaatcaaggcgggtgaggatctccatctgaactatataactcaaaaagtctacatgttagagcaacgctagcacagttactgtgtgccctcctccattataagcgtcgatatgggggttgggtagcgaaaatgcagcctaaccaaatcgtcaaaacaatcgccgtcgccatacattttggagcaccctccatatttgcctctcaagcctttgtatttgcagttttcggggcctcttttggagcaccctcagtccacgaaaaaagtgcgcgatgaaaatttcaggatgctccaacccccatggccacccgcgctggacgtggaacatcacagtaagagcttcgcctcaacccatgcc

SEQ ID NO: 222 - DNA, 429 bp, Triticum aestivum
  Clone ID: LIB103-004-Q1-E1-F8
ggtccaggactcccgggtcgacagcatcctccatgtcgtatgaaagctccctgagctcgtcagcccagatgatgacctggttgtccagctggtcccttggcacctccgccaccttgacgagggcagcgttcatgctcttcatctccctctggagggactcaacgtcctccttgacgcccttctgcagcttgtactcacccacgagcagctcgccgagcttggggagcaagcttcccatggcaccggtcaccacctccatggtggaaccggtggatcttcgttctcagtgtatggatcctttagctaggaagcagtgctgtaacacacaaggattggaagttagaaaagcaaaggaaattgttctctatcgcatgaaatacacaggataagaaatgcatccactccaacaccaaggaaaaatagctgctt

SEQ ID NO: 223 - DNA, 414 bp, Triticum aestivum
  Clone ID: LIB103-004-Q1-E1-F9
ttcccgggtcgacgggtagtagtactttgcttagagggctaataaacttttgcaataagtatatcagttctttatgactaatgtgagtccatggattatacgcactcttacctttctgcaattttctagcctcttcggtatcgtgcatttcccttcctcaccttgagagccagtgcgaacttcactggtgcatccaaaccccgtgataggatatgctctatcacccataggccttattataacttcctcaaagcaaccacgatatctacctattatggcctttccatagccattccgagatatactgccatgcaacttccaacgcttccttatgatggacttagaattcattggcaatatgacttgcatgatcatatagctgacaaagtacttgtggctcagtcactgttcatc

SEQ ID NO: 224 - DNA, 432 bp, Triticum aestivum
  unsure at all n locations
  Clone ID: LIB103-004-Q1-E1-G10
ttcccgggtcgacggggttcaataactgatgatatattgggtggttcaatttacgatccttcttactactcttctctcttcgaagatgttcgaaataatgcatgcaatcatcagggtgataaacatagtggtggtaatgatggcgggtcaacatctgcaggccaatctccacggcttaaatcttttggtagtagatcttttctttctaatgatgtggatgctggactaagaaggccgctgaattcatgctcagtggagacaagttgaaaatggaacttatttttgccaacctgactacctgagcactctttgtttggtcctccttgagtcagtaactcttgttgacttaacatagagatttgtacagtgcaaatgttcatggctcggaacagtggctcaccggtaaaacaagagcagcangatagtacaatg

SEQ ID NO: 225 - DNA, 383 bp, Triticum aestivum
  Clone ID: LIB103-004-Q1-E1-G11
ggtcaagaattcccgggtcgacgggaaggataaatcatacagcagcccctctggccctctgctaccatcaccgatgtgggattactacagccctgaggcaggctggaagatggatgagataaagatggccccacaagttagctacagtaaaggaattggccccagttattgaagccatatatattgtatcagattactaagttacttgcaacctagcagaagtgaaatgcttttgttgaaagaaccattagcatggatctaaaaagtatttatatctatctagcattccaagtgggctcatgttttatgtatctactatgtagcatctagtgtgcaagacatgtaatgcaaaaaaaaaaaaaaaaaaaaaaaaaaaaataaaa

SEQ ID NO: 226 - DNA, 428 bp, Triticum aestivum
  Clone ID: LIB103-004-Q1-E1-G6
ggtcaaggactcccgggtcgacggagcagcagaacacgaggattccaaaacggctggtatcgaggatgtagttgtaatggaagatgacaacaccaagtcagctgaatacaaggactccaaaatggttattgtagaggatgcaaatgcaaacgaagatgacaaagccaaggcagtagaacacgaggattccaaagcggctggtattgaatatacagttgcaaaggaagatgccaacaccaagtcagcagaacacaaggactctaaaatggttattgtagaggatgcagatgcaaaggaagacgacaaagccaaggcagcagaacacgatgatcacagagcaggtggtgtggcagcagaacgcaaggatcacagaacaggtggtgtggaggatgcagatgcaaatgaagacattagcgccaaggctgaag

SEQ ID NO: 227 - DNA, 430 bp, Triticum aestivum
  Clone ID: LIB103-004-Q1-E1-G7
ggtccagaattcccgggtcgacgggacctactcaccacatgttcgcgcgcaagttcgcgcccgagacccttgcgccgctcatggagatcgccgactccgtcatcctccgtgactaggcgccaagtgttcgtggacatgaacagaacaagggttggtgatgtgatgaagaagcataagctgatccatccatccatcccctttgtggtttcttcagagaggagcaagcaaccagcagcaaacctacttcgccttgttgttccgtcggtggcgccgtgggcgaaggggatgctgctgcttgcttagaatcagagagtgatgtggtgttggtggcgaagtgccccgactgcctctatcctatgtgagtattgttgtgtttcttggtgtttttcctttccactttgatccgagcgagaggaagtcgttggcacgc

SEQ ID NO: 228 - DNA, 466 bp, Triticum aestivum
  Clone ID: LIB103-004-Q1-E1-G9
ggtccagaactcccgggtcgacgggtgtttattaataattgacatcttattttctttctccaagaaatactcagagggctgtatacaagatgtattacaattatggctccgagctaacttatgaggagaaaggatctcttgtcacgctaataaatgatgttgagatttttaagaccaattatcaaattagccaaaattatagtggatacatgccactagtatacgagttgcatgatggcaacttcattgcagaaaacatggtatgattttgttaactatggttgcatacattcttcttaagtaaactatattgctaactatatatgttactattatgttcttcaacagaagctcgcgatggagtttttacctgacatgatgtttaccgaaggtcatatgcatatggttaccttaagaccgactccgccgacggcttaccatagtgcatactcgatttctctaaaag

SEQ ID NO: 229 - DNA, 440 bp, Triticum aestivum
  unsure at all n locations
  Clone ID: LIB103-004-Q1-E1-H11
gggtcgacgggtcggggcaattggactccatctgatattgattttcttcgatgtaaaaaacatggaaaaatcaacaaccgtcacttggcactatgtcaataggttagtaccaaaaaatgatataaaatggctataaatgattgtaaaacattcaaggttgataatataacaacatggaacaataaaagattatagatacgttggagacgtatcagcatctccaagcttaactcctactcgtcctcgagtaggtaagtgataaaaacagaattttttatgtggaatgctgcgtaacatgtcatattatatttgttttctttatagcatggacatttggacttttacttgttcaaagcaatagtctagttttgagatgataatttagatactcaagtatatcaacaagcaaccatgtctttcanaatatcaatgctaaaata

SEQ ID NO: 230 - DNA, 455 bp, Triticum aestivum
  Clone ID: LIB103-004-Q1-E1-H6
tcccgggtcgactgtccagacgacgaagccatagcagcttttaggcataacgtccgagacgaatggctcgccagacacctcggccaagaaaagccaagaacaatggccgcactaacaagcctcatgacccgcttttgtgcaggagaggacagctggttgggaaggtgcagccccagcgacccaagtacatccaaaactagggatggaaacggaaaaccgcgacgcaacaaggaccgtcgccggactaaggaaaaattccgaagagcacggcagtcaatgccagattcaaaggctcacgacaaaatcagacaaaaccgcccctccaggataacagggacgatccatccaacttaaataaaatcctggacaggatatgtcagatacacagtactcccgggaagcccgctaaccatacccacagagattgttggattttcaaacaatccggcagactc

SEQ ID NO: 231 - DNA, 418 bp, Triticum aestivum
  Clone ID: LIB103-004-Q1-E1-H7
accggtccaggattcccgggtcgacgggggacaccaacccacagacaagaccgccagtcgtgccagcgccaagccatggcaagaacgccgcaacgctactggacatgccggacatccctatggcacaggatccggacatgcatatggcacaggatccggacgatgacgacaacgacgacggtacatttaccaatgtcgataagtactttgccgaacatggatacggtgacgagttctgcgggcctccttctcaagaacccaaccctgaaaaagacgaccgcgatctagctggtaaggcggagaaacccaattgcaacaggcgtcgtctggcgttcagttctcaggagacgcctccagctgccgccttcaccgagcctcagatagctgaggtgcgaaatattatcagccccaacacgct

SEQ ID NO: 232 - DNA, 457 bp, Triticum aestivum
  Clone ID: LIB103-004-Q1-E1-H9
ggtccagaattcccgggtcgacggggtttacgcaggttgttatcgtgctgaggatgctatgggaaaacagggacatgtttgatcttgttatcagtgatgtgcacatgccagacatggatggctttaagcttcttgagcttgatatggacctccctgtcatcagagtaatggaatgttaattggctggtggcggcatgttcaactatgggaaatgatgagctcctacttttatgccagctctatgtcgtaggttgaccatactattgtgagaatctcggccaggatcattctttatatcatgttggttcatcttggaattcgtacagccgtttatcgtcgaaggatttactcacagaacacaatcagtgtgattatgcttttctacacttctgtccagagcaatggatatgtattttgtattgtacgactaccctctaatgcactactcagccttcag

SEQ ID NO: 233 - DNA, 420 bp, Triticum aestivum
  Clone ID: LIB103-005-Q1-E1-A5
tcccgggtcgatgggcgtcttacagtagtatggctgaggcagtgccagcttggtagttagtactagctgagaaaattcatgatgctggctgggagcataacatttataggcttagttgctgtattggttctgttgatgtatgggagtttgtgaaggatgttctatagacctctgcagctgctattctttgtctattaatctatgtcctcttatagttgataaagttgagtacttacagtatgtgtgcgactacgtcccttgtagttttagaaacacctgaatttttctgtcctgttctgttaatcctgaagataaaactcatatgtatatgttgcttaactataccgtagcttcagaaacatattgcatcatcaaactgcatgtatctgtgttcttcttctggtcctgaggataaagatc

SEQ ID NO: 234 - DNA, 417 bp, Triticum aestivum
  Clone ID: LIB103-005-Q1-E1-A6
attccgggtcgacggggtcaggtgactacctcgtagcccggcctaagtggtccaagactgagaatgatctggttgataaagggatcgaaccagagacaattaactggccagaccgttgtcggacttggttcttcggggctggcggaaccttggaccctgtaacagggaagtgcatttggacgaacgatcaaatggacataccagtcaggaagcttaagcagtatatcaaagtagcacaggaagggacgttctttccagacagagagaacgacgagctcacaatggccctcgggaatcctgatcaccctggacggacacgaggcacgccaggccccattccgtggaaggttgggtttccggaagcaggcggttacaaatcccatgagaagacgaaaaaagtgcagcaggcccaaatgc

SEQ ID NO: 235 - DNA, 443 bp, Triticum aestivum
  Clone ID: LIB103-005-Q1-E1-A8
attcccgggtcgacgggatctgagtctttgatgtgttgtgatgtctgattataaatgacagactgtttatgtgcatcttattttgctacagtatataataagagctgtaatgtaatgaagtctcatgcgatttactgataatatggttatcgctaaatatgtttgatgtgcatcttaacgtctggtaatatatttgatatgaacctagcctgtttcgagaaactacagagcaaagaatgagagatggcaatgttaaatactaaaaggactttggatggtttcactcggctcagtgatattcactcatgttgtttcgccaaatgaatcaggggcttatcagtctctcaaaccaacttcacagttcaattttcacaaattcggttctttaacttgatctgccaaagcataggcctctggtgaatcagcaacagtaacttgaagat

SEQ ID NO: 236 - DNA, 415 bp, Triticum aestivum
  unsure at all n locations
  Clone ID: LIB103-005-Q1-E1-B12
gggtcaagggtaacttcggaaggaagaagggccttcccttcaacaaaccgaagggtcatgtcccctaaaagcttccttgcaaggtaaaggaaaggcttctcaaatttgtatttgcccttggaaaaaatctcgtattactggaggttcttcttcctgtgaagggtcaccatcttggctttcacctgccggttcttcacgtccaccttgttgccgcacaagacgatcgggatgttctcgcacaccctgcagatgtctctgtgccaggtggggacgttcttgtangtgagtcgggaggtgacatcgaacatgatgattgcacactggccatggatgtagtatccgtcacggaggccaccgaacttctcctgtccggccgtgtcncagcagtagaacctgatcttgccgtggctcgtct

SEQ ID NO: 237 - DNA, 361 bp, Triticum aestivum
  unsure at all n locations
  Clone ID: LIB103-005-Q1-E1-B4
gggtcgacctcaaggccgaaaagaagaaaataaaggctgctgtcaagaaaatgtatgacattcaggccaagaaggttaacaccctcatcangcctgatggcaagaagaaggcgtacgtgaagctgacaccagactacgatgctcttgacgtggccaacaagatcggcatcatataagccagagggagggtcctgcagtangcgcttgtgtcgtggtttcttatgttattggaattttgtagttgttacttagcaaaaggccttagtggctccattgcctaccatatcgctgcacactttcatgaatttgatgcaatcgaagtgacttgtgttgatgctaatttgagctttgcgtttggtct

SEQ ID NO: 238 - DNA, 413 bp, Triticum aestivum
  Clone ID: LIB103-005-Q1-E1-B5
atgcccgggtcgacgggacacatgaatcggaagttagtagtatactatatgtgcttcacgtacatcttttgagttatatactttttgctctagtgcttcagttatatcttttagagcacgtcggtggatttgttttatagaaacctttgttctcgcacgcgtcacttatattaatttgagagtccaacagaacatcatggaaattttctctaattatttgaagcattctagataaattcaatcaaattttcttaagatcgtgttgaatactatgaaaactttgatacgtgataattgttttgatatatggagatggtgatattacagtcgtactagttgagtacttgtgaatttgagaaatgcttgtgttgaactttgtgagtcccgtaacatgcacgtaatgtgaaccgtta

SEQ ID NO: 239 - DNA, 398 bp, Triticum aestivum
  Clone ID: LIB103-005-Q1-E1-B6
gggtcgacggggtcatctaaccatgggagaccttccagagcctgcgagcaatcgggcttgggtcgccttcagccttcggaacatctatactcctccacctcgtcctcacttatcctactcaaccgggatggatgccttcccctctgctgtcgatccatataaagaacatccacaggggcaagcacgggagcgattctgagacgtatgacacagaagggaggtttgaaccagcgaaattcgatgctatattcagcaagtttggcaaaactcggccaaatgctttgtcagaagatgagattaacgccatgcttaaatacaaccgcaatatgtatgatttcctgggctgggccgcggccaacctcgaatggaagttgctgcacaaggtggcaaaggataac

SEQ ID NO: 240 - DNA, 419 bp, Triticum aestivum
  Clone ID: LIB103-005-Q1-E1-B7
attcccgggtcgacggggagaagaagaagtccagcgagaacgtcaaggtcatctacgcccgcgccaagcagtacgccgaggagtacgatgcccaggacaaggagttggttcagcttaagcgtgaggcccggatgaagggtgggttctatgtcagtcctgaggctaagctgctgtttgttgtcagaatcagaggtatcaatgccatgcacccaaagaccaagaagatcttgcagctgttgcgtttgagacagatattcaatggagtgttcctgaaggttaacaaggccaccatcaacatgctccgcagggtcgagccatatgttgcatatgggtacccgaacctgaagagtgtgagggagttgatctacaaaagaggttatggaaagctcaacaagcaaaggattcctctgaccaacaac

SEQ ID NO: 241 - DNA, 390 bp, Triticum aestivum
  unsure at all n locations
  Clone ID: LIB103-005-Q1-E1-B8
attcncgggtcgacgggatgacctgtgcggcttccatgaatgggacccactccttgctgagctgaaggaactgatatagaagaagtgctcgagcaagaagcatcaagttccgtgaagcgtgtggcgatggatcttccttccggagagaatgagcggtgatggcctcctgcgctcatctgctggagcgctgctgcctagtagtagtaacctagatatagatatagtacctagtataatgtaatgcgggaataaccagacgaactgaagtgatgctgcataatgcagtgcactgcagccgcagtactagtagcagccagtaagcacggccataatagtccggcgctacagtgtgtgtcagctcgtgcaccgtggtntgcctttcgtgtaagc

SEQ ID NO: 242 - DNA, 421 bp, Triticum aestivum
  Clone ID: LIB103-005-Q1-E1-C11
ggtccagaatcacgggtcgacgggatttaaaatcggtttcattgagtttcgtctgaagcgagcttttggcacaaattctgagagctacttatctgacatacgtgaaacagtccgcgaactcttcaatgaatactgcaaccctacagatctgccaagtgcagcttcaaatagtgcagctttggatgcggataatgatttattggaagattgggatcagcatctcaatgaacaagcaagttgtcagatatctacagaacttgatgactaccttgaagagggtctagttccaagaaaggatgagtttgacattctaaactggtggatgaatcataccacaaagtacccaacgctagcagctatggcacaggacatattagctatgccagcttctgctgtccaatctgaagcagcattcaacagc

SEQ ID NO: 243 - DNA, 422 bp, Triticum aestivum
  Clone ID: LIB103-005-Q1-E1-C12
gggtcgacgggggcggtgaagcctgcgccgcagcacagtcggccgcggggatgagggagcaggcagtcccgccggcgcctgtttgaacggctggagcacgacgagcacagattgaagaagcacgacggccgtaagatggccatctaacagtcactgcttgtgcgtcaaccttttttttaggaaagcctcaaatctgtggtatacagcatacaacccatctgccactagttctaatactttacagcccatttgctaactattaaagtttttttggaggccatatgctttttgtgaacattacagcccatattgtggccacggttaaaataatatacgaaattttgcatatttcagtgcagtccgaactttttttaatcctgaaatttcgactcacattcaaactggatttaaagatcaatgtt

SEQ ID NO: 244 - DNA, 404 bp, Triticum aestivum
  unsure at all n locations
  Clone ID: LIB103-005-Q1-E1-C5
attcncgggtcgacgggtgaataaacgttattatcttgcaaacctatccaacaacacctgtgaagtacttctaatttcatacttgttctaggtaaagcgaacgtcaagcgtgcgtacagttgtatcggtggtcgatataatttgagggaatatttgttctacctttagctcctcgttgagatcgacactcttacttctcgatgactattgcgatcccctatacctgtgggttatcactctccacatctattggcgtaagctgatggacaaaacgacttgtgcggccaacgccacgggagaatacgacagaagtcgacggggatggtctggctggcatgaagcaaggggatctaatcatttggtatgttgagcagcagaatgcccaaggcgcatatacttctaca

SEQ ID NO: 245 - DNA, 436 bp, Triticum aestivum
  unsure at all n locations
  Clone ID: LIB103-005-Q1-E1-C8
gggtcgacgggacaggaaaagacattattcagaaggtggtcatcacggatcttagggaggaagtggtagtttacatcaagggaacaccgtttgttttgagagagttagatcaacctgttgatacactgaagcatgtgggaataagtggcccaatggtagagaacatagaggcaaggctgaaggaggatatactttctgaagttaaacagctagaaggtcggctgcttctgcatcaagaagaatttaacacagccacaaatcaatgcagtgtactaggttattgngagcacatagatctggaggacgtaatgacaccggctgaagtgtacagcacatttaagggatcanggggtattgtattgactacaaaaggatacctctgaccagggaaagagaagcattagctgctgatgttgattcaatacagtcatcaatc

SEQ ID NO: 246 - DNA, 233 bp, Triticum aestivum
  Clone ID: LIB103-005-Q1-E1-D2
gggtcgacggggtgtgttgattgcttattttgatgaatctatggctagtaaaatagtttataatccatagaggttggaatacattaggtttaacacccatataaataaataatgagttcattatagtaccttgaagtggtcttttgttttctttcgctaacggagctcacgagttttctactttaagttttgtgttgtgaagttttcaagttttggataaagatttgatggat

SEQ ID NO: 247 - DNA, 412 bp, Triticum aestivum
  Clone ID: LIB103-005-Q1-E1-D4
gggtcgacgggggtctcaaaaaaaaaaaaagcgaaagaggtctactaccatcccagacgaggaggagcagagccaccgcaatcgaatccccttccttccttccttccgtccccgacgacgatggagcgcgtgagaagggcgtcgcatgccggctcctggtacaccaacaacgccagcaagctggaagaagaacttgatggttggctttcggcagctgctctcaccaagtcacctggagttaggggcataattgcaccccatgctgggtattcgtactcagggcgctgtgcagcttatgcttttggcaacattgatccaactaacatttctcgggtgtttctgcccggcccatctcatcactactatactccaaaatgtgccctgtcaagagctactggttatagcaccccga

SEQ ID NO: 248 - DNA, 416 bp, Triticum aestivum
  Clone ID: LIB103-005-Q1-E1-D6
gggtcgacgggagaagctaacactccgactccaaatatactcaagatgaaggtgttgccggtctagctcttgtgtcaaccaactcctacgacatatttgactcaccaaatgaaggaattggaagatgcttcatggccaaaggtccaaaggtaacacatcccgagtatgttgatttcaatagtgatgaagatgacttgctaggtgatgatgatttacgtgttggcaactctagtgatgaatactatgatgaaacgtcaattaatcatgcaaatcaagataaaacgacagaacattataaggaaaaaaatgagattctaactaaagaaacaaacactcctaagttagctcaataaactatcttcgaagattaacgagaacttttaagggctcatgagaagttatgcttcgaaaagctc

SEQ ID NO: 249 - DNA, 443 bp, Triticum aestivum
  unsure at all n locations
  Clone ID: LIB103-005-Q1-E1-D7
attcccgggtcgacgggagaagggtactagggtacctagggtttatggcgtctcgttgtttttgcaagctagcatgtgactccgggatgcctgttttaagattaagatttcgcttgtgttgagagatattattatttactgcttgtagcctacctgggataccatcatattttgttgattatggaacagcttttatcctgcttaagctctgtattttgcccgagttgaaatggcctgaccagttgaaatccttcggtaccctagtatggttacctacctgcattttgaatgaatttctcgtgtagcggtttggctttaagctgttcatttgtttgtagaattgttaactggttgcttggtangggatagttgtattgtggttagtgtagaatacctgttgtaggcatgtgtaattcctgngtgacttgcctagtatcctgcac

SEQ ID NO: 250 - DNA, 455 bp, Triticum aestivum
  unsure at all n locations
  Clone ID: LIB103-005-Q1-E1-D8
gtcaaaaattcccgggtcgacgggtctatgtacttcactaatatcttttgagcttgataagtttttgctctagtgcttcacttatatcttttagagcacggtggtgtctgaattttgaagaaattgataatctctcatgcttcacttatattattttaagagtcttttaaaacatcatggtatttgctatggtcataaagttggtcctagaatgatgagcatccaagttgggtataataaaaactatcataggaagtgaattggatgctatgatcaatttgatacttgataattgttttgagatatggaggtagtgatattaaagtcgtggtagttgggtgattatgaattcaaagaatgcttgtgttgaagttagcaagttncgtaacatgcacgtttggttaaaagttgtgtaacanattttgaaacatgaagtgtacctggcttgtgcatcc

SEQ ID NO: 251 - DNA, 453 bp, Triticum aestivum
  Clone ID: LIB103-005-Q1-E1-E10
tgccggtcgtaaattcacgggtcgacggggatgcactaaagctataagtgtatgaaagctcaaaaagaaactaagtgggtgtgcatccaactcgcttgctcacgaagacctagggcattttgaggaagcccatcattggaatatacaagccaagttctataatgaaagattcccacaagtatatgtaagtgacaacataggagactctctaacatgaagatcatggtgctactttgaagcacaagtgtggtaaaaggaaagtagcattgccccttctctctttttctctcattttttttgttttttggggccttctctcttttttcatggcatattttcctcttttttttatttctcgtccggagtctcatcccgacttatgggggaatcatagcctccatcatcctttcctcacttgggacaatgctctaataatgatgatcatcacacttt

SEQ ID NO: 252 - DNA, 408 bp, Triticum aestivum
  unsure at all n locations
  Clone ID: LIB103-005-Q1-E1-E12
ggtcgacgtccaccaaggaaaantccaccatctcatcgaaagacgggacacctttgcctctatcaagtggtatcagatttccaggttgctcggtgagattttacagttttttgtagtttagatcgagtatgttcttcatacctacagtccacgaaaaagccacaagaaaaaattagggttagttcatcatatccgaaccaatctgagcctttgcataatctttttagggttttgctttgttgaatttgcggttgcatcgtcgtgtctagttgctggtcttagagtctagtcttttagagtttcgagttctggtcataagttgtcacgccgccgccgcaccatcatcatcacccctgccatctaccaccaccgcttatccgccaccgcttcgaatccgtatctatatac

SEQ ID NO: 253 - DNA, 168 bp, Triticum aestivum
  Clone ID: LIB103-005-Q1-E1-E2
cgggtccacggcaagaaccaaaggacgagaagcggctgccggcggggaagtcggccgccaaggagggcggcgacaagaagggcaagaagaaggccaagaagagcgtggagacgtacaagatctacatcttcaaggtgctgaagcaggtgcaccccgacatcggaatct

SEQ ID NO: 254 - DNA, 441 bp, Triticum aestivum
  unsure at all n locations
  Clone ID: LIB103-005-Q1-E1-E5
aattcncgggtcgacgggatatcattatgaagttggattgcctgtttctcttcacatagaaaaccgccatttgtagaatgttgtttcgcttcacttatatttgttagagcgtgggaatatcttttgtagaaagaattaaactctcttgcttcacttatatctatttagagagatgacaggaattggtcattcacatggttagtcataaaatcctacataaacttgtagatcgctgaatatgatatgtttgattccttgcaatagttttgcgatataaagatggtgatattagagttatgctagtgggtgacagtggattgtagagacacttgtgttgaggtttgcaagtcccatagcatgcacgtatggtaaccgttgtgtgacaaatttgaagcatggggtgtttctttgattgtcttccttatgagtggcggtcgggga

SEQ ID NO: 255 - DNA, 363 bp, Triticum aestivum
  unsure at all n locations
  Clone ID: LIB103-005-Q1-E1-E6
attcncgggtcgacggggaattgaaacacaccacagatggaacgcaatggagaaagatcgacagagagttcaaagattttgcagctgacgcaaggaacataagatttggtctaagtacagatggcatgaatccttttggcgagcagagctccagccatagcacctggcccgtgactctatgcatctacaaccttcctccttggttgtgcatgaaccggaagttcattatgatgcaattgctcatccaaggtccgaagcaacccggcaccaacatcaatgtgtacctaaggccataatttgataaacttttacaccggtggggcaaacttgtggtcgttttttggaatgaccacaataagaagg

SEQ ID NO: 256 - DNA, 438 bp, Triticum aestivum
  Clone ID: LIB103-005-Q1-E1-E7
ggtaccagtcgagaattccgggtcgacgggggcagtaaacagcgaggtcgtcccaaggccagtccttctcgatcctcgggactcctgatgaagctcgcgccgtccccggtgtcacccggcttggccgccgatggaaagcctttccctaggtcggggaaggagctgaagcgaaagcaagaacatgatagcacaacagcaagtagtgagagtagcaagctaaaacatttcataacaggaagtccagggcacgatgatttgaatgatagttttgatgagcaatttggcttgaagacttctgggtctggaaaggagctgaagcgaaagcaagaacatgatagcacaacagcaagtagtgagagtagcaagctaaaacatttcataataggaagtccaaggcatgatgatttgaatgatagttttgatgagcaatttggctac

SEQ ID NO: 257 - DNA, 432 bp, Triticum aestivum
  Clone ID: LIB103-005-Q1-E1-E8
attcccgggtcgacgggcgacggtagaggcgcccacatcaacctcaaggtcaagggggaggatggcaatgaggttttcttccgcatcaagagatccacacagctgaagaagctgatgaacgcttactgcgaccgtcagtctgtggatctcaactccattgctttcctttttgatggtcgtaggctccgtggtgagcagacccctgatgagcttgagatggaggaaggcgacgagatcgacgccatgcttcaccagaccggagggtgctttcctggcccttagaaggagcttgctgcagcctggctgttctatgtcgtatgctacctttagaactagagtaaaatgtaagaagtgaaagaacttgtgaggctatggttctgtgccatagcctgagggggggtctggaggtgaaacaacatcggagtactgttg

SEQ ID NO: 258 - DNA, 417 bp, Triticum aestivum
  Clone ID: LIB103-005-Q1-E1-F12
ggtcgacgggtatgtgagatctttatgactaatgttgagtccatggattatatggactcttaccttaccatcattgctagcctcttcggtaccgtgcattgctctttctcaccttgagagttggggcaaacttcactggtgcatccaaaccccatgatacgatacgctctatcacacataaacctccttataccttcctcaaaacagccaccatacctatctattatggcatttccatagccattccgagatatattgccatgcagctttccaccatttcatttattatgacaggcttcgtcattgtcatattgccttgcatgatcttgtagttgacatcgtatatgtggcaaagccaccatgcataatttatcatacatgtctcttttgtttcattgcccatcccgatacaccgcc

SEQ ID NO: 259 - DNA, 435 bp, Triticum aestivum
  Clone ID: LIB103-005-Q1-E1-F5
aattcgcgggtcgacggggacaaccaatcccaccacttcgagcgcctcctcctgtctcgtcctcgtcccccgtcccctcgtcggcgcccgatctaagtcaagatgagtcgtggcgggagtgctggtggtggtcaaagttctctgggttacctgtttggagatggcgagcctgcaaagcctgctgcagcaccagctgcgaagcccgcacctgctgagaaaccagcaccggcagctgctgatgtacccaagcagattcgagctggcattccatgtagccgggcgaacaactattaccgtgcagatggccagaacacgggcaacttccttactgaccgtcgttcaaccacagttcatgctgctcctggcggtggctcctccctgggctaacttgttgggcggaaagcaatgttaatgatggtgcctgcttaatgaacg

SEQ ID NO: 260 - DNA, 435 bp, Triticum aestivum
  Clone ID: LIB103-005-Q1-E1-F7
attcccgggtcgacgggggcctcgagaagagttatcttttctgcttaacggcctgctacacttcctctcccggcccggctagatctcgccggcaggagatggcggacgcgaagcagcagcaggccgtagcgcccaccggcgtctggaagacgatcaagccattcgtcaatggcggtgcctccgggatgctcgccacctgcgtcatccagcccatcgacatgatcaaggtgaagatccagttgggtgagggatctgcagctcaggtcgcaaagaccatgtatgctaatgagggccttggttccttttacaagggtttgtcagctggtttactaaggcaagcgacctatacgacagctcgtcttggattcttcagggttttgacaaacaaagcaattgaggcaaatgatgggaagcccattgcacttgttcagaaag

SEQ ID NO: 261 - DNA, 417 bp, Triticum aestivum
  Clone ID: LIB103-005-Q1-E1-G5
gggtcgacggggaagaccaaattaaccatggcgaccctgccgcccaggtcgggagctttctccaagggctataagttggcctacgcctgggacaaggaggcgccgctcacggggcagcagaacgccgccatctccgcgctctcgcacgccctcgccgcccggctgttcccggctaatctgcacgatgcagacaacgactctgctttcaaggatgccggtgcagtggatgcggccttggtgaacacacatcagttctacaaatggtttgttcaactagaatctgccatgaaatccgagattgacgataagtatcgcctctatgagagtacattacaggaacatgttatcacatgtgatggtatccttcgacaagtggatgacacactcaacttgtttgaacaagtacaatccttgcac

SEQ ID NO: 262 - DNA, 436 bp, Triticum aestivum
  Clone ID: LIB103-005-Q1-E1-G7
attcccgggtcgacgggtcagagcagtctaatgccgagccaagcgatcgggttgtgtttcttgagaagaagattgcagaacttgagaggcgggctaaagctagaggcgaatctcaagagtaataagctaacaggtaagttttgatcgagcacgtgaatcctatcctaaagaagcactgtttgtaacctctgtctggtggcgaaggggtatctggcaccgacttacccatatagcaccaagatttgacttggactatccaattttgtgagcatgtgtgtgtggcaactgttgtttcgagcgaataaagagggatcctggcagataaaatcgccagtgtttgttgggttaaccgcagtgatgctggtcgagcagaaaccagagggtacttattattcttgtatcacttgcttgacatttgagaatcgaacgatgtaat

SEQ ID NO: 263 - DNA, 440 bp, Triticum aestivum
  Clone ID: LIB103-005-Q1-E1-H5
ggtcgacgggaggatgaaaaggtgtggtcccgaagaactcctcctcctccgaacacctcgatcaccgaagaccaggagggaacgtccctcttggacagcgagggaaaggagtccgggccatctggaccccctccgacgaccactcccgagcgtccaaggcccccaacagcacaggttccttccaactgggaggggggcgggagccaatgccagtaccgaacacctccgcatgggcggcggttgactggccggatacgctagaggagttggtgagcaactccgtcatagttgaatggcaccgcacccttatgggtgcagttatgcagagtgttcggtctgtccaatccgtactgaacgacgatgtccaaggccttctaacatgctttgaggtaagtcaagtaatgatatttcctcataatgtggttatagttgtttaattt

SEQ ID NO: 264 - DNA, 439 bp, Triticum aestivum
  Clone ID: LIB103-005-Q1-E1-H6
attcccgggtcgacggggtatagcaataaataatttatctatcctctgttatgattgagtttttatgttttaattagtgttcgtgccaagtagaaccattgggaagacttggggaaagtcttgttgatcttgctgtaaaaaacagaaactttagcgctcacgagaattgctgccatttttattggagagtgctatttagttagttatttttgcatatgattaatatataaattcctcacgtccagaaatttattttagaacttttggggttccagatcttgcgttagctacagattactacagactgttctgtttttgacagattctgtttttcgtgtgttgtttgcttatgttaatgaatctatggctagtaaaatagtttataaaccatagaaaagttggaatacagtatgtttaacaccaatattaataaattata

SEQ ID NO: 265 - DNA, 424 bp, Triticum aestivum
  Clone ID: LIB103-006-Q1-E1-A10
gggtcgacgggctaacggaagcaagccggtgacacaacggttacccaggttcgggccaccttgcagtgtaaaaccctactcctgcttggttttggattgcaatagcgaaagagaatgagagtacaagggttggggatcaagtggtcgaactcctctacggcggctccctgccatccttttatatctaccttggtcctcttccaccgaaaacattggcgagaagggttggcacacaatggcaattttcacgggggacagggatgtagtctatcgctagaaaaggtggtcttcaccttcaaagacaccgtccatgacgcattggtgggctctggaatgatctctaccctacacgcccatcgtcatggtcatcttgcaccgatcgggcaatatttggggttgctattggaacctgcatgctgccctt

SEQ ID NO: 266 - DNA, 285 bp, Triticum aestivum
  Clone ID: LIB103-006-Q1-E1-A11
cccgggtcgacgggggacaggaaggtgattcgggtgatgagtactagagcagatgagtttgcgacctgatgtacgtcaagcgtcccttcgtctactactatcctgtgatctgcccaagcggctttatctgttgtctgtctgtttgaatgtttgctgtgtggtgtttggtttacaacctgttgtgttgtatgaacctgtggtatgtttgaacctgcttcgcaccttggtcaatatgcatgttatcgggtttgccgaagacgcaactggcctatcgttaaacgggga

SEQ ID NO: 267 - DNA, 429 bp, Triticum aestivum
  Clone ID: LIB103-006-Q1-E1-A6
attcccgggtcgacgggttgctctgcttcgagtatctcagtggcggaagcatcgataagcttatctataagggaagtgggtacgtgctagattggagcggacgctacaagattgtgcaaggaatatgttcaggcctgcactacctacaccacgaactagaccatgagcagaacatcgttcacctggatttgaaagcgagcaacgtactggtcagccgcggcgatgggggagacatcacctgtgtgaagatcgccgactttggcctctcaaagttcttcaaagcggatctaacacactcgtacacggagcaggtcgttggtctattggcgtacatggcaccggaatacgtctgcaagggcagaatttcacccaaggccgatatatacagctttggcattcttattctggagatagtcactgggcgatgcg

SEQ ID NO: 268 - DNA, 429 bp, Triticum aestivum
  Clone ID: LIB103-006-Q1-E1-B10
attcccgggtcgacggggatgctggatccggcacctcacgtggtgccggagaagaaggccacgggaactcgaaggagttcccggcgccaggtgttgtcggactcatcgtccgatgactccgaggcggactcctcccgcgaagacgaggaggaggaaaaagaggcctctcccccggcagggatagagaagaaaaggaaggccgccccaactggggaggccggagggtccaagaagggaaggaccccccccctccgaactactccaccaacgccgacgacggcgaggaggagtggccaccaagggctaagcccttggcgaaatcgtaagcgtccgggtaccagaataactcatggcgtttcatttgttgcacagaatctcctaacgccgaatataaccctgcagcccgcccaaggaccagcttgatgcctc

SEQ ID NO: 269 - DNA, 268 bp, Triticum aestivum
  Clone ID: LIB103-006-Q1-E1-B12
cccgggtcgacgggatacactcacatgaagtcttattaacattacaaccaagggacatgcactggaccatgtccctgtagggcacattataatcatgcacatagaataagttgactactcagttaatgcataacactgtcaagatcatcaccgaataaagggacatcatcttggatttcaacatgcggccgttctaaaggatacattcttacgtaagcgtgcaatcgacatcatacctcatctatagtgtcatctaaattcacttcat

SEQ ID NO: 270 - DNA, 447 bp, Triticum aestivum
  Clone ID: LIB103-006-Q1-E1-B5
aattcccgggtcgacggggatcccaaattgtcttttttgctgagagctactcagatgttcaatgatttgaaatttgagcgcacctcacgtaccaaattatctagtacttggaaaaaacttggaattttttgattttatttctagtatttgttttgaattgtttttcaacgcgggtgcagatgagtctgggcaccaaatcgctgcactcgttctcacaggatcttccgcctatgactcgcttatagccagatgtatggctgcctcgcccaatccagcatgagactatgccgacccagcgtgtggtaggctataggcctcgaaacactctttttcccctctttttttttgaccttttgtggtcttagttttttagtttttttacttttatttagacttccaaatttttttgtataagaaatgttaatcatgcattcgataaatattaaa

SEQ ID NO: 271 - DNA, 428 bp, Triticum aestivum
  Clone ID: LIB103-006-Q1-E1-B6
aattcccgggtcgacgggagtttgtcattcgctctagtgcttcacttatatatttttagagcacggcggtggttttattttgaagaaatagatgtactctcatgcttcatttatattattttgagagtctttagaacagcatggtaattttcttgggttataaaattagtcctaatatgatgggcatccaagagggatataataaaaactttcatatagagtgcattaaatactatgagaagtttgatacttgatgattgttttgagatatgaagatggtgatattagagtcatgctagttgagtagttgtgaatttgagagatacttgtgttaaagttcgtgattcccgtagcatgcacgtatggtgaaccgttatgtgatgaagtcggagcatgatttatttattgattgtaatccttgtgagtgg

SEQ ID NO: 272 - DNA, 443 bp, Triticum aestivum
  Clone ID: LIB103-006-Q1-E1-B8
attcccgggtcgacgggccataaacatgtacccacagtcattcttgaagccgttgcttcaccagacctttggatttggcattctttctttggtttaccaggatctcataatgatataaatgttctccaccgttcacccatgtttgcaaatctagttgaagggcatgctccagaggcgaattataccatcaatggtcacaactacaaacacagtgtattaccttgccgatggcatatatccgcagtgggcaacatttgtgaagacaattccaaatccaaacggtgagaagaacaaaaatttctcccggtttcaagaagcatgtcggaaggatgtcgaacgagcctttggtgttctgcaagctcgttttattattgtacgtggaccggcaaggtattgggatctggagacactcggagaagtgatgacagcttgcatcatcctgc

SEQ ID NO: 273 - DNA, 371 bp, Triticum aestivum
  Clone ID: LIB103-006-Q1-E1-C11
tataatgagtcgtaatatgagaacctcctcctggatcttgcacaaattgctaatctgttgatcagacacttcatcacggaaaaccagttccctcctggctgtgtacaagagctgtatgcctcgttgacagaacctctgctgcctgctgttccagtgccttcccctcaggctatacagaaattccttaagttcatgaggaactaccctggactaaagcacccaaggagaacaagcacatttatcagcaaagtatttcaggctgccagagccatgggggcagctcagtatgccagtgtcatgacagcggtatcaagggtacaagtgccgcaagactggatgaatgtgactgaataattgggatatctactgct

SEQ ID NO: 274 - DNA, 445 bp, Triticum aestivum
  Clone ID: LIB103-006-Q1-E1-C12
tcccgggtcgacgggtcaaatgatgcgtccgtcgtcaaggctgcggataagggaggtgctacccatgttgatatagcatgtgaccaggacttggtaaagcttgcgctggagcttactaaccttccgatatgtgtatcgtctgtggatccttcagcattccaatctgcggtagaggctggcgcgcaaatgattgagattggaaactacgactccttttacgacgcaggcatcgaattctcttctgagcaaatactgaacctgacaagggagacaaggaagatgcttccagacatcacgttgtcagtaacagttcctcacactctgagcctcccagatcagatgagacttgcagagctacttgaagaggaaggtgccgatatcatccagactgaaggagggaagtgttctagtccgacaaagcctgcggtgcttggcctaattgaaa

SEQ ID NO: 275 - DNA, 443 bp, Triticum aestivum
  Clone ID: LIB103-006-Q1-E1-C2
ggtcctaaattcacgggtcgacgggatgcacaaatcctatgcttcaggtgagacagccacgatgggaacacgactcatattctaaagttctctatttcgactgagctgtgattagagatgtcagttatatacagaaaaacttgaatggatgtgcgtttggggattatacaatttaaaggcaactttatttttttgcttttagcgtatggacctgcaggttatatctaatagtagtagcttattgacttctgaaagcaatataagcccaatagtctttgcaaaaaaaaaaacccaccaactactggttttatagccagttagaccgtatcatcacacttattttttctcttattggttgaactccaattattctataattgctacattaacaaactgttcttcacattcggttgtgatttggtttcagaagttcatttttacat

SEQ ID NO: 276 - DNA, 200 bp, Triticum aestivum
  Clone ID: LIB103-006-Q1-E1-C6
gggtcaccctaaactgagtcttatgaagtctccgtgtaatgtcgctactacgccgtcacttttcaagtccgggcggtatctgctgcagtgctctagctggatcatgctgctcaatgaatgcggccgctctgtaggatctaagctgatggaagcgtgcattcgacgtcagcactcttcggctctgtcagctaatttctgtt

SEQ ID NO: 277 - DNA, 441 bp, Triticum aestivum
  Clone ID: LIB103-006-Q1-E1-C8
aatgcccgggtcgacggattacatggacaaaggtatacatatagcctttattatcaaaaacattgtttttaaaatcaaaatacatgtcattggaacatgatattctttgagcactgagcctctatgaaacgggcaccttctaagacttcttcaaaatagtgctcgggcgagtcctggcccctgggtggaacactagttgcaatatcggtggcctccatcttcgcccagtatgttttaacatgggcaaggtccatccgcgcaccctctatgcacgctgatcgcttgacagcgtcgatatgcggcacatcacaaataaatcgttgcaccaaaccaaaataactatccagacttggttccttcatccacaggtgatccaagacggccttcatggcaagcccggataacctatggagctcggcccattcagccatttgctcgttc

SEQ ID NO: 278 - DNA, 407 bp, Triticum aestivum
  Clone ID: LIB103-006-Q1-E1-D10
cgggtcgacgggtaaaaggcatctggatgcgaagacagtgatcgcatcccgtcgagaatcgtgcacagatcgtccaactgggttaactcgcttctgcattccggtcaggctggaccagcgcctgaccagcacatgccattgtctgaagggtttcttaacaacagcagatgatgccacttatatgtgctcatctgaccaacactgatggtacgaagaagctgcgtggtgttggtacccggagaatcgctgcatatggcagatcaaagctgggaaaacattgattaatttgtaatctatggttatgttttgttagtggtgatgttacagcaatgctcatttgatgttagctcatgcaaactgctaatgtgttgctaacagtagcactctggtgtgtttcgacagattgc

SEQ ID NO: 279 - DNA, 339 bp, Triticum aestivum
  Clone ID: LIB103-006-Q1-E1-D11
ggtcgaccggaaatctgatggtctgtaatgtgaaagcgaagttctgttctgtcttcacaaaaaaaaataataaaaatgggtaaaaactaaaaaaaaaatcaagtcaagaaaaaaaaaaaaactaaaaaacaaagaacaattatcaaaaaggtatctaaaaaaataaataaatgatgcaacattaaaaatgctcaactaaccaaaaacagatcatacgaagacccctgcctagtgtttgcacttcattaagtgctgcatacggtatagcaaccctgagaatactcccaataatttattatctatgattttttttatgttactggtgatgtgaaaaccctg

SEQ ID NO: 280 - DNA, 412 bp, Triticum aestivum
  Clone ID: LIB103-006-Q1-E1-D12
ggtcgacgggcatatggaataactttggggtttagggagttggatgcacaagcagtattcccgcttagtataggtgaaggctagcaaaggactgggaagcgaccagctagagtgcgacaacattaatgaacatgcattaaaattaatcaacatggaatgcaagcatgagtaggatataatccaccatgaacataaatatcatgaaggctatgttgattttgtttcaactacatgcgtgaacatgcgccaagtcaagtcacttaaatcattcagaggaggaaaccaccctatcataccacatcagaaccaatttaatagcatgttggcacgcaaggtaaaccattataagctcctagctaatcaagcatggaacaagaaactatgatctctagttgtcattgcgaacatgttt

SEQ ID NO: 281 - DNA, 445 bp, Triticum aestivum
  Clone ID: LIB103-006-Q1-E1-D5
ccgggtcgacgggaaaaggtaacgtgccacccatgctgcatccctcatcatatattggctcacctgttatctggattggcgttggtgtagcagtatctgcagcattttccatgggttcatcgatggtgaataactatgcaatggaacaagcattcaatgtcgatagatgacgcatgcaccacagtacacatttggtgcgaactcgccattcccattctctatgccaccacaggcaggtcccacggcaccaagtagttacccatactcaggaccaatgaataatacccccaaaggtgcaactgttgatgtttcagctactgaagtggcattcaactggatcttcggacgcagctgatgtggcagaaacatcgaagccttcatagaaatttgccatcgttgatgtttcgcccgaagagttgcaaaagcagtatgagcgtcaatcttc

SEQ ID NO: 282 - DNA, 385 bp, Triticum aestivum
  Clone ID: LIB103-006-Q1-E1-D6
ccgggtcgacgggatacagttcccagtgggacatgaatacacgcatctcaagcagagggtcgcggctaatggccgtgtgggtgtcagtgctgctgtgtactctgcagcaatccgtgagtaccttacgtgccgaggtccttgagctggccggcaacgctagcaaggatctcaaggtcaagcgtatcaaccctcgccacctgcagcatgcgatctgtggacacgacgagctggacaccctcatcaagggcaccatcgctcgtggtggtgtcatctctcagagacacacctcacgcatcaccaataaatccactgactgaataatatgcattaaccggttgttgttgcatgtagtatcttcgagataccatgttatgttgtgctatct

SEQ ID NO: 283 - DNA, 413 bp, Triticum aestivum
  Clone ID: LIB103-006-Q1-E1-D9
aattcccgggtcgactaaatcattaaactgtgatcccctcctaacggtggcactaatcaacaacttgccgacaacgccaagcaatgggaatggatcaccgataacaacgtgcggcgaaagggatcggcatactggttaggctcatattgatacggataagcaaaacttattaactgatcgcacattcagtcaattagggaaccaggactgttctgtctcagtccatgaccacacaaagcaattcagcaggtggaggatacggaaacggaagctacaaaccgatcctaatcaagcatgatctgtcagatttctaacggaaacaaagataggattatttttagagagaattattggactactatatggggcagaagcctatcctaagctagcctgcgagactactgtttctgatg

SEQ ID NO: 284 - DNA, 408 bp, Triticum aestivum
  Clone ID: LIB103-006-Q1-E1-E11
attcccgggtcgacgggtcatacataaaaaatactacaatcactggagatttttatgaattaagagaatactgcctcattatgatctgttgtgtataattagaacttcttgtgggtaaaaaaaacaaaggttgggataaggaaaagctgaacttaaaaactgtacgtgagttcatagatagttgtacataccttgatggatagattagatggcaattctttactgttgatcacgccaaggatcaggttcagggccaccgatgctatgtattccactgtagccatgaagagcagacctccaaaggcgctcaatgctctctgcagcgtgctgcatgtgcatcgctaagttcagttaccgccaacaacggcgccgacagatggtggcgaaaggagatcagcaactcaataa

SEQ ID NO: 285 - DNA, 409 bp, Triticum aestivum
  Clone ID: LIB103-006-Q1-E1-E12
ggtcgacggggaacactaaagcgaggcggaggactctggcatgggagacgtatacttcacaaaggctggcgctggcatggactgagcgggtctcctcccacgtgggatgagattgcttgtacagcgccagcaatgaaggggaagaatgtttggctcctcctgtttgtttgaggatgcacgttggatggatggacgaatgtttactctgttattagatattgatgatcagttgtatgctacccgtagtcttacagattgatttgcttttcgctgaccactgattctgaatactgtagcgaacaatggtctcaggaaacataaaacacgggccgccctaaaggttcaaaccttacttaaccgtgcatgcaaattcaaacgacttcaaatgggcaccccaatttcactttac

SEQ ID NO: 286 - DNA, 449 bp, Triticum aestivum
  Clone ID: LIB103-006-Q1-E1-E5
aattcccgggtcgacgggaaatatgataccaggtatggtgccagtttgcgtaagcagatcaagaagatggaggtgtctcagcactccaagtacttctgtgaattctgtgggaagtttgctgtgaagaggaaagctgttggaatttggggatgcaaggactgtggcaaggtcaaggctggcggcgcctataccatgaacactgctagtgcagtcaccgtcaggagcacgatccgtcgcttgagggagcagaccgaagcatgattgccctactgttgtcttgaggaatccaggggttctgtagtggagtgaagacttaacaatctctgtattttggctatcgagcgatggatatctgttagtaattttggttctgattttaggatctttgaaacttgaaagtatgtcgctacagctgcctgttatgcgttatgctaacctatttgtatttt

SEQ ID NO: 287 - DNA, 435 bp, Triticum aestivum
  Clone ID: LIB103-006-Q1-E1-E6
ccgggtcgacgggtaaagctgaaagaagacgacagaagtgacgggcatgggaaagccataaaacgagtggggtgggcatatctctggtgcattgcaaggctggttactgttgggagcgtctatacccttgctcattgcaaggcatgtgagatgctcgccttaccttaaatgggttgagaccaagtcttcgctcgattagctctcaccttacccattatacagctcaacgtacacacgttttctcttcttttttcccttctttccacctttagtttttatttatttaatattttctattcgtaaacaataatgtttttggcaaaatatgctatttttatgtaatttcgaaaaattcctcctgaagttcaaaaaagtgtttcacgtactttaaaaaatgttcttatttcatgcatctaggaaacagtttatgaaaat

SEQ ID NO: 288 - DNA, 444 bp, Triticum aestivum
  Clone ID: LIB103-006-Q1-E1-E7
aattcccgggtcgacggggctaagcaaagtggggaaaggcgtcttcgtactcgcctctctccgcgcaaccgagccttcgccctcctccttccccatttcgccagcggcgcagcccaccaaccacccccacccgccgccatgagggagtgcatctcgatccacatcggccaggccggcatccaggtcgggaacgcgtgctgggagctctattgcctcgagcatggcattccgcctgatggccagatgcccggtgacaagaccgttgggggaggtgatgatgctttcaacaccttcttcagcgagactggtgctgggaagcacgtcccccgtgctgtcttcgtagatctcgagcccactgtgattgatgaggtgaggactggcgcttaccgccagctcttccaccctgagcagcttatcagtggcaaggaggatgcagccaacaac

SEQ ID NO: 289 - DNA, 429 bp, Triticum aestivum
  Clone ID: LIB103-006-Q1-E1-E8
cccgggtcgactgggcagagaaacattactcaccgccggctcccgactccactcattggcgcatgcatttcgatgggtccaagatgcgcaccggcttgggagccggtgtcatcctcacctctcccaaaggggacaagctcagatacacgctgcaaattcacattaccgcctccaacaacgtggccgagtacgaggcgctcatacacgggctccggcttgccaaagaactcggcattcgccggatcctatgttatggcgactcggacttggtggtccaacaatcatccggtgactgggatgccaatgacgcaaatatggcaagctatcgcttcctcgttcagcagatcagtgggtattttgaaggatgcgagttcctccacgtaccacgaacccacaacgagccagctgatgccctggctccaataagct

SEQ ID NO: 290 - DNA, 448 bp, Triticum aestivum
  Clone ID: LIB103-006-Q1-E1-F6
aatgcccgggtcgacgggcaaaatcaaatatgggccataattgagcccaaagcctcttaaagggccggacctgatctgggttgtgatttggcccagaaagtgggaggcttttaacgggccggatcttatatgggccattactaggaccggaacatggcaggccattaatggaccgtatcaattatgggccggcatttggcccaaaacatggtagccagttaatgggtcggcctactagggtcctcaaaatcttttgggcctatagctgggccggcccattaatgtcggcgaaatctcatgggcctttagctgggccggcccgttatgatccgcaagaattttgtgggcatttacctgggccggcccattatggcacacaaaaatcttgtgggcctttacctgggccggcctattatggcccacgaaatcttgtgggcctttagctggg

SEQ ID NO: 291 - DNA, 419 bp, Triticum aestivum
  Clone ID: LIB103-006-Q1-E1-F7
attcccgggtcgacgggcctggcgcactctctggaggaccggcgccatggcggcggcggcgctggcgcagggaactcctcgggcgattcgccgctgctcctgctgccgatgctggacgatgacatctcccgtgaggtccagcgcctagatgctgatatggaccgattcatcagggcccagagtgagcgcatgaggcagtctatattggagaaagttcaggcaaagcagtttgaagcgctggcctctgttgaagacaagatcctccgaaaaatacgcgataaagagtcagaagtgcagaacatcaacaaaaggaacctggaactcgaggaccagattaaacaaatggcaggggaagttggtgcgtggcagcaacgagctaagtacaacgagagcatgatcagcgcactcaagtacaacct

SEQ ID NO: 292 - DNA, 414 bp, Triticum aestivum
  Clone ID: LIB103-006-Q1-E1-F9
ccgggtcgacgggcaagtcaacacgatctgcgccgagaggttcaggtgcccggaggtgctgttccagccgtcgctgatcggcatggaggctcctgggatccacgagaccacctacaactccatcatgaagtgcgacgtggatatcaggaaggacctctacggcaacattgtgctcagtggagggacgaccatgttccccggcatcgccgacaggatgagcaaggagatcaccgccctcgcgccgagcagcatgaagatcaaggtcgtggcgcctcccgagaggaagtatagtgtctggatcggtggctccatcctcgcctccctcagcacattccagcagatgtggatatccaagggagagtacgacgaatctggcccctccatcgtccaccgcaagtgcttctaagccttggg

SEQ ID NO: 293 - DNA, 428 bp, Triticum aestivum
  Clone ID: LIB103-006-Q1-E1-G11
cctagagtgagtcgtattagggtgtcctcgtgtacgagcgaaggggtatgagcctgggttgattgcgaaatcattggtatacactttttaccggaaagtgctcttctgctctcaagctcaaatgctccctgatgaacagtaaaataaaaatagtaaaaaatacaaaaaaatgtaaatgttttttgtggtaaattttgacgaatgttttatgcgcttgataaatttcagcatgaaaggacattcgtggacaccatggaaaaaaagaatcaacgctccaaaatgctttcaaaactagcatttttggagcatcgtttgttttcacgacttccatgaatgttatttcttgataaatatttgcaagcccacaagacacttgagaatgtttaccacaaaaatattcagatttttttcaatttaagtatcaattt

SEQ ID NO: 294 - DNA, 398 bp, Triticum aestivum
  Clone ID: LIB103-006-Q1-E1-G12
gggtcgacgggcatacatgatcttagtgcataaactgtatcaagatatctgttggtacttggtactggtagcaatagagactctcccctcccctcctcatagctatttcttcagttatgtttcgaatgcgtaatgtcgtcgtagccactatctgttcaaaaaactagcgcttcttgatgcacaaattaataccttattggtatgcatcgaccgatggtcgtgtgtttgatatggggatcgtgtgttgttggtcggcgatcgaactacatgattttggatcaacaagtaaaccaacactagtcttgtatgtatgtccatgttgctagaaaaaaaacaatataaaaaaaaaatataacaataacaaataaaaaatataaaaccaaaagaatcaatactac

SEQ ID NO: 295 - DNA, 436 bp, Triticum aestivum
  Clone ID: LIB103-006-Q1-E1-G6
tccagaagtcccgggtcgacgggaaaaagcaaaatgccgagaatcggctgccggcgggcaagaagaccgcctccaaggagggcggcggcgagaagaggggccggaagaagggcaagaagagcgtggagacctacaagatctacatcttcaaggtgctgaagcaggtgcaccccgacatcggcatctcctccaaggccatgtccatcatgaactccttcatcaacgacatcttcgagaagctcgccggcgaggccgccaagctcgcccgctacaacaagaagcccaccatcacctcccgggagatccagacctccgtccgcctcgtcctccctggggagctcgccaagcacgccgtctccgagggcaccaaggcagtcaccaagttcacctcctcttagattccattgcctgtatctaaatagctgttcgccctggt

SEQ ID NO: 296 - DNA, 436 bp, Triticum aestivum
  Clone ID: LIB103-006-Q1-E1-G7
attcccgggtcgacgggattcagttaccggtgggacgtatacacaggcagctcaagcagagggtctcggctaatggccgtgtgggtgccactgctgctgtgtactctgcagcaatccttgagtaccttactgccgaggtccttgagctggccggcaacgctagcaaggatctcaaggtgaagcgtatcacccctcgccacctgcagcttgcgatccgtggagatgaggagctggacaccctcatcaagggcaccatcgctggtggtggtgtcatccctcacatccacaagtcactcatcaacaagacctccaaggagtgaatgaaatgcaataacgggtagttgttgtgtgttgtatcttcgtgatcccttgttatgttgtgctatctgttacgtgttgctattatcacaacctgaataggttgtctgaatttgtg

SEQ ID NO: 297 - DNA, 354 bp, Triticum aestivum
  Clone ID: LIB103-006-Q1-E1-H10
cccgggtcgacgggactgactgggagaacatgatgaataaggagttgcatgataaatttcagcaaatgatgagtgaacaggtgcaagatgtggtaaacagatttgaagaggccatggagaagatagatggcatggagaagacgttcgaaacaaagctcgataacaaatttaatgaattgctcgcgcgtcttccaccaccaccacaggctgcccctaacgcaccactccaacaacaacaagaacaacaagaacaacaacaacaacaacgccgctttccaaatcaagtgggacgagcacatcgcgttcccattgaccctaagcaaacttctggtgtcgctgttgatgcctctaacg

SEQ ID NO: 298 - DNA, 426 bp, Triticum aestivum
  Clone ID: LIB103-006-Q1-E1-H3
cggtcctaaattcacgggtcgacgggtggatttgagggaaaatggtaggggcgatggaggtggttgccctctttatatgatgggacgtttcgggcatgtccatggacacgtgctagcccacgaccacagtcttgcatgcgcccacgtatacgcgaccccactcgtcagctaacggtcaaaggcattgacccaacggcaacgtccgttataacctcttatgagggtttcgggcaagggagtggggaaaagtgagcaaaagttaacagagtggggatgaatgagtagagctaaggaaccaggggcacagaaataaaaatccctagaaaataacgatacccgccgcgagcctcaatgttcattggaccacatacatcagtatgtatgatttccaataaatatgtttctcgctccattgttccggagaac

SEQ ID NO: 299 - DNA, 323 bp, Triticum aestivum
  Clone ID: LIB103-006-Q1-E1-H4
ccgggtcgacggggaccgctcatcttcctcctctcttctcgttagggttagggccgttcgctcccaacaatatgacatgagcattccatttcatattgcttagcatgatcgtaagaaagctagcatgatgttttcatggcttgtccgcttcttgatgtcattgctacgctagatcatagcacatcctggtacaccgccggaagcattcatatagagtcatatctttgttctagtatcgagttgtaatattgagttgtaagtaaataacagtgtgatgatcatcattatagagcattgccccataaaaaaagaaacatcatatt

SEQ ID NO: 300 - DNA, 375 bp, Triticum aestivum
  Clone ID: LIB103-006-Q1-E1-H5
aattcccgggtcgacgggggcgtgtcacgagtcgcgtcataaaacggggggtttccgttcgggctctgtcctcatcctcctctcccggcgtttcccgaagcctccgcgcacgacgcgactcgcgccccgagattttgaacgaagaaaggaagttgaaccatggggaagagaaagtcagctgctaagccaccccctatgaagcggatggacgagctcgacacagtcttttcctgcccgttctgcaatcatgggagcagtgtttaatgccgaattgatgtcaagaatctgaatggttaggctaaatgtccaatctggcaggaaagcgtcagcacttccgttaaagcccttactgaacctattgataaactgggccaa

SEQ ID NO: 301 - DNA, 436 bp, Triticum aestivum
  Clone ID: LIB103-006-Q1-E1-H7
ggtcgacggggatgggatatcctacagcagctaatcagccgatccccactgattgaagcggtggacgacactgaatgcatgcgagatccgctgcggcgaatggctgccttgacggttgttggtgtggattaggtgccggcgccggccgcgagtgcagacgcacagatctgctcgagcgtggtgtggttggcagaaggaagaactcgtcgccgccctcgcaggtctccacgggaaggccagcccacatgctccgcggtggttaaagagaacggctgcttcttcagtgcccaggcttgaaagatgttcatgtctatcgatgttgtgatatgttgatcggagcattcataaacgacgtgagccgtggatcaggttctcgatttctgtccggtctgtggctcacaaatgtcgatgactccatggattcaatgcaaggtga

SEQ ID NO: 302 - DNA, 417 bp, Triticum aestivum
  Clone ID: LIB103-007-Q1-E1-A12
gggtcgacggggatcactgcctttgcttcgcgccgccgcggaattgacgaccgcacgacccggaacagtatccagttgggcgcgtttgacattcgcgggaaaatatgctccgcccaggtagacgtgctctcctctcgtacgtaaacaaagccttgagcaatctttgatcaaacttaaacacctgtctcctactccctccgttcggaattacttgtcgcgaaagtagatatatctaaacatattttaggtcgagatacatccatttccaatacacatgattttcagaggacggagtatttgtgaatgcacggtggagtagcatgtgtataattcataaaggactgaggtaccggggcattttcaaaagctaacatcagcggcaaacggtatcatcgaaattcattggtttcggtttgt

SEQ ID NO: 303 - DNA, 259 bp, Triticum aestivum
  unsure at all n locations
  Clone ID: LIB103-007-Q1-E1-A4
cctgccggtaccggtcctaaattcncgggtcgacgggagcactgtgtcaagaggtgactcgcaacgatggcaggacgttgcgatcagcttagtgatgcacaacgggatcgatgctgacgtcaacatcactagttcacagcgatatgatacctcggatcacgtaccaggatgcaatctagactgggcaaagcccaccatcgcccgcctgatcgtccaaacgtgcactagcgtcatctgcacacctcaggcaacctcttca

SEQ ID NO: 304 - DNA, 434 bp, Triticum aestivum
  Clone ID: LIB103-007-Q1-E1-A5
gccggtaccggtactaaattcccgggtcgacggggagttgagcctcatgcgatcgcaggaggagaccgggaggcatgtcaggatgctcatccatgagatcaggagcacgcttgacaggcacaccatcctcaagactactctggttgagctcgggaggacgctgggtctgcaggaatgtgctttctggatgccgtcgaggagcggttcgagccttgagctaactcataccatgcgccaccacatccccacgggctcttctgtggagattaatctccctgttgtcaaccaagtcttcagtaccaaccgggctattatagtgccacatacatctccttttgcgaggatccaccctgttcaagggcggcatgtcccacccgaggtggctgctgtgagagtcccgttgctgcatcttccaaactttcatcctgagcttt

SEQ ID NO: 305 - DNA, 466 bp, Triticum aestivum
  unsure at all n locations
  Clone ID: LIB103-007-Q1-E1-A6
taccggtactaaattcccgggtcgacgggttagttccattcaaatcatgcaaattagagtccaaaacaagggcaaaagagtttggaaaagtagatacgatggagacatatcaatagtcatattgcttaccaccaacatcttattttgattaggcggtattgtgggatgaagcggcccggagcaaccttacatgtccacgcacatgagaccggttccaccgactgacatgcaacttgttttgcataaaggtggctggcgggtgtctgtttctcctactttagttgaatcgaatttgactatgaccggtccttgaagaaggttaaaatagcaaacttgataatcgttgttgtggtttttgcgtagttaaggacggttcttgctagaagcccgtagcagccacgtaaaatttggaacaacaaagtagaggacgtctaacttgtttttgcanggcatgttgtgatgtgat

SEQ ID NO: 306 - DNA, 407 bp, Triticum aestivum
  Clone ID: LIB103-007-Q1-E1-A7
tacggtagagaattcccgggtcgacggggggacaagtggcttattctgatgatgataaaacgctggccaaacagcgtgaggaaataaagcgcatgactgctgagtttgatgcgagcatgctggagatccgcaagaatttggatgctatggatgaaattgagaggcggagtgcggaggactatgagaagttccgtaagaagctaaacaatattgagaaagcatgcaatgttgctttgatcgtgctggtgcctagcactgttctgctttttatgtcactgtagtatcatctctattagttggttataagaaacccttatttaactagtgggttaagaaaccctaccttcagaactctatgtgttgtagtgatccagctttggactttgcattgcatcctaatgaacgca

SEQ ID NO: 307 - DNA, 405 bp, Triticum aestivum
  unsure at all n locations
  Clone ID: LIB103-007-Q1-E1-A9
taccggtccagaattcacgggtcgacgccttctacatgcgtgccaagctcttgggcagcgctggggaccgccaagtcgcgagttcatacctcgaaggcatcattctggcaaacccagataagaataacttccttgtgccttaatttcccgagtaattcatcccctaaccgccccgtaacatatgatttcttagatttcgatcgttcttttttctaacatttcgtgttctgtgcagtgacacacattgcacactcatcctcttaagcccgaaatattccatggccacgtatttcgacccgaaccgtgactccaagatagactacacanatatcaagaaagttcttgatgatgttctccccggctacgccaaatctggaggcaccttcaccaggccagttcgtaggt

SEQ ID NO: 308 - DNA, 432 bp, Triticum aestivum
  Clone ID: LIB103-007-Q1-E1-B10
gggtcgacgggcgacaaggagacgatccggagaccttggaggcagagcgagctattgcgcgggcgaaggggttcggaggaatttctaaatttttgcccgtgactatatatagcccgaccctgtcggtgtgaccgagtggaacaactcggtggcaccgagatgcataactatgttacaattgtgggaggcctggacactattccaatgagtgtacgacaccctacaaaagaagagaagattctccaagaagaagaagtaaaagagaagaatcaccaccaagagagaggaggagtagagatgatcgttatgaacgaagaccctcacggagaagcaaggattcggaaaggaaggacaagtcatcaaggagctgcacaaaacgaagacatcaagctcatgttggtgaatgggtatccggctccgactccgacaatc

SEQ ID NO: 309 - DNA, 354 bp, Triticum aestivum
  Clone ID: LIB103-007-Q1-E1-B6
taccggtactatattcccgggtccacggggagggcgaatacgaggacgagctcgaggacgatgccgacctccaggactagagatcaaccgagtaccgcgtatgattattggttcttttcttatgttaatttgattgtgtagtgctcttctgtctttcttggtgggtgctgttgttgaggaacagaaaactcatggaagggtggttgttggtgagatagcttggtataacctctggcacaattgctgtgtgcaagcaacgccctgttgcgttctactggtagtggtgtgtgttgtctggtgtccattgtctaactatcatgtccaaatctaatgtaatttgaagttgcttgtgtc

SEQ ID NO: 310 - DNA, 417 bp, Triticum aestivum
  Clone ID: LIB103-007-Q1-E1-B7
attcccgggtcgacggggacttgctaaggaaactccatgaattagctaaagctgaggctgatctctctgaccatgaggacaggctctctgttattgaacagaagatcgctgtgctcctgcctctgcataaaaaatatgctgagttgaaatctcagtttgaactcaaatcatatgatctgtcattatttcaaagcagagttgaacaaaatgaacatcacaagttaggtgaacttgtgaagaaacttgagcaagaactccaggaatcaaaagaagaattgaaggaaaaacaagtggagcataaaaaatgtgtctccactgtttctgatttggaaaagacaattaagacttatggcagtgaacgtgaaggtaggctcaaagctctagaaaaaaagataaagtcactgaaatcggaaatgc

SEQ ID NO: 311 - DNA, 417 bp, Triticum aestivum
  Clone ID: LIB103-007-Q1-E1-B8
gtaccggtcagagaattcccgggtccacgggatcgacgcaatgcttcaccagaccggagggtgctttcctcgcccttagaaggagcttgcttgcagcctggctgttctatgtcgtatgctacctttagaactagagtaaaatgtaagaagtgaaagaacttgtgaggctatggttctgtgccataacctgagggggtctggaggtgaaagaacatcggagtactgttgatgtcgtgactgaagtatcatccattgcctaatatatcatgccttgttgtgttcctagtgaaaaaaagaaaaaaaaaggaaaaaaaaaaggcaaaaaaacaaaacaaaaaaagaaagaaaccaaaaaaaaaaaaaagaaaaagcaacggaaagaaaaggatgaagaaaaatgacacagggcataagggg

SEQ ID NO: 312 - DNA, 382 bp, Triticum aestivum
  Clone ID: LIB103-007-Q1-E1-C2
gagctgtgtacggtggtgtcataaggagcctgtcgatctccactagagttatcccaagtttcacttcacatcgtgatgttgtgttaccttctattttcatgtcgtcgtcgcgctgcctgcgattacggacagcgctccctgttggctccgcagtccgtcgagcagcagcacgggtcaggccctacccctggatctgacggcgctgctgactctacaggcctaggctcaggcccatctgagaagacaggcgatcgtggtgacgtcatagacgctgattttaccgacagcaactgaatacaacactacgttaggacatgatgaacaagtgagtatgagtttgttccacattattgcctagtagtataccgggtgaccgctttct

SEQ ID NO: 313 - DNA, 417 bp, Triticum aestivum
  Clone ID: LIB103-007-Q1-E1-C6
gtaccggtactaaattcccgggtcgacggggaaggagcacggggacaaggtcccaggcgatgtcaaggagaaggtggaggggaagctcaaggaactccaggtcgccgttgctggtggatcgacacagacgataaaggatgcactagctgcgttgaaccaagaagtgatgcagcttggtcagtccctctaccagcagcaggggtcaggccctacccctggagctgacggcgctgctgactctacaggcccaggcccaggcccatctgagaagacaggcgatggtggtgacgtcatagacgctgattttaccgacagcaattgaatagaacagtaggttaggacatgatgaacaagtgagtatgaatttgttccacatgattgcctagtagtatacggggtgaccgctttctttggatc

SEQ ID NO: 314 - DNA, 441 bp, Triticum aestivum
  Clone ID: LIB103-007-Q1-E1-C7
taccggtacagaattcccgggtcgacgggtctatcccactaggatcatgcatgtagtacttcatttagataagtaatagatttttgcaataagtatgtgagttctttatgactaatgttgagtccatggattatgcgcactctcacccttccaccattgctatcctcccttgtgctgcgcaactttcgcctgtaccataacacccaccatttccttcctcaaaacaaccacaatacctacctattatggcatttccatagccattccgagatatattgccatgtaactttccaccattttgtttattatgacacacttcatcattgtcatatgacttcgcatgattatgtagttgacatcgtatttgtggcaaagacacctttcataactcttccatacatgtcactcttgaatcattgcacatcccgatacactatcggg

SEQ ID NO: 315 - DNA, 391 bp, Triticum aestivum
  unsure at all n locations
  Clone ID: LIB103-007-Q1-E1-D1
gggtcgacatggcatatgtagtagaccaagcataagtcatgcacgcaaacctggatcacggcgggcttcttcctctctgcctcctttagattcgtctcgcttcccaagactgttgtgcactcaacatctagcccagcgacccactcatcatttgcgttttcgaacatgcgtttgtagcaagcaaggcattctttcaccgttacggaaaaatgggtgtagatgatgtcgaactcatcaccggtgatggttctaaccttgtactcaccgccgatcatggagatttgggacgccatggatttgggaggaaggttacgattagtggaactgccgtaatgtgaaaggacgtgacgactangagcagtttatcgattgtaaaaatgtcgagtggggg

SEQ ID NO: 316 - DNA, 396 bp, Triticum aestivum
  Clone ID: LIB103-007-Q1-E1-D11
gggtcgacgggcgagctcatgtaggaagaagacgacgcgagctctggaggaggaagacgactcaaatttcaaatcgagggattcgttggaagccacacagggcacctgagaaggagaggaggagaatgctctgaagagaagaaatgataggttttattgttttgttttaagagcaagggagttgatatgtagtcccctggcttatttgtattctactatgtgtatggcaaagaaatcatgattttatacacacatatatttttaaacaaaagcctatgtatttttttgctcaaacacagtcatcggaaagcgcacatattttcaatgcgtaaaaaaaaaaaaaaaaaaaaaaagcggccgctcaaaaagctgccgctctagatgatccatgcttac

SEQ ID NO: 317 - DNA, 456 bp, Triticum aestivum
  Clone ID: LIB103-007-Q1-E1-D5
taccggtacagaattcccgggtcgacttcttctcccccggctgcggtggctgccgcgctctccaccccaagattgcgcagttcgctgagcggaatccggacgtgctgttcctgcaagtcaactacgagaagcacaagtccatgtgctacagcctccatgtccatgtcctccctttcttcaggttctacaggggagctcagggcagggtcagcagcttcagctgcaccaatgcaaccatcaagaagttcaaggacgccctcgcaaagcactcgccggacaggtgcagcctcggcccggcacgggggctcgaggaggcggagctcttggctctggctgcaaacagggacctggaattcacctacaacgagaagccgacgctggtgccgatcgccgaggccatccaaatggaagctgcctccattggcggcccatggatgccattgcctgcgggcgctc

SEQ ID NO: 318 - DNA, 412 bp, Triticum aestivum
  unsure at all n locations
  Clone ID: LIB103-007-Q1-E1-D7
taccggtacagaattcccgggtcgacgccttaatatgtgtgggccacttggttttacgggaacgaggcatcattttgggtttggggaccagtggagatatacatacaaaaaattgtggacgtaggttcgaccgaaaggcaatgatgcatgggccctgcattttgatatacccgctgccgtgtgaaatttgctactctactcaaaactagtaaggtacacatgcattaaatgcatgagatttggaaaccaaattatgaataagtacacactatagcatgtaaagctttgagtcatatatgtatgatgtagatgttcatttagttcttatagttaataccattcaaagtcaattagttttataaaaaggttaaaattcatggcattgtgcattgtaaagcataaagtanaaaac

SEQ ID NO: 319 - DNA, 465 bp, Triticum aestivum
  Clone ID: LIB103-007-Q1-E1-D8
gtaccggtacagaattcccgggtcgacgggacaacatcaacaacaagctgcagcttgtcatgaagagcggcaagtacacgctcggctacaagaccgtcctcaggaccctcaggaactccaaggcaaagcttgtgatccttgctaacaactgccctccgctccgcaagtctgagattgagtactatgctatgttggcgaagatcactgtccaccactaccatggaaacaatgttgatttgggaactgcgtgtggtaaatacttccgagtctgctgcctgagtatcatcgaccctggcgattccgacatcatcaacgcaacaccggctggccagtaaacctgtgtatgccattttcagtgtctcgtctgatgcgtcatctaaggtggttctagagtgtagttcttgctggacttgatttggtcttgtgtacatcatttatcagtcaatcaagtttgatgggactatg

SEQ ID NO: 320 - DNA, 414 bp, Triticum aestivum
  Clone ID: LIB103-007-Q1-E1-E10
gggtcgacacgggtcaccacgataggcgtccgcggcaaggactccgtctgcgtcgtcacccagaagaaagtcccggacaagttgctggatgacaccagcatcacgcacctcttctcgattaccaagtacaccggcttgcttgccactggcctcacagctgatgcgaggtccttggtctcccaagcaagaaatgaagcagctgagttccgtaaaaaatggggatatgagatgcctgtggatgtattagcaaaatggatagcagacaaagcacaaatatacacgcagcatgcgtacatgagaccccttggtgttgttgccatggtcttgggttacgatgaagagaaaaatgctcagctcttcaagtgtgaccccgcaggtcacttctttggacacaaggcaactagtgccggactg

SEQ ID NO: 321 - DNA, 440 bp, Triticum aestivum
  Clone ID: LIB103-007-Q1-E1-E12
gggtcgacgggattcacaaaattttttatggtgtacggcgcagaggcagtactgccatgcgacataatccatgactcacctcgagtgcgcatgtacgaagaaagagaagccgagctcgatcggcaggacagcttggacgcattggaagaggagggcaatgtggcaaaggctcgttccgcattctatcaacagcaggctcgaagatatcaaagcagagaagtatgggccaaaacatataacgttggcgaactagttctacgcctgccggacaagaaaatggataaattaaagcccaaatgggagggccccttcatcatcgaccaagtactgaccggcggagcgtaccgtctacgaggcgcatcggacaaccgactcgagccgaacccatggaatgcagcacgcctacgaaggttctacgcctagcaccggactccgtgttc

SEQ ID NO: 322 - DNA, 450 bp, Triticum aestivum
  Clone ID: LIB103-007-Q1-E1-E5
taccggtacagaattcccgggtcgacggggacgatgatgatggtgatggagcagaagatctagatgacgatgatgatgaggaagacactgatgacgatgatgaggattcggaggatgatgatgtgcgagaagagacagaagaggaattccttgcaagatatgctgctgctggcgagtcaatcgaggttgttgaggaaggagagatagatgaagaaacccaagacattgaactgggttccctggacgaaatggacatacaacaagtggttctttcactgattcagaaacatactgcgctcctccaagcgcaggttttgccagatgacctaattgagagaattgcagaaacatttcccgaatatgagcagctgttgcatgctcaccaacttaggtgttagacttgtgcagattttattttccaaacatgttttctgtgttagcttttgcggc

SEQ ID NO: 323 - DNA, 413 bp, Triticum aestivum
  Clone ID: LIB103-007-Q1-E1-E6
gtaccggtacagaattcccgggtcgacgggtggatctgatgcttggaagacccctagttggtgtgtggccgcctgataagagtggccatcgcttggtgggcgtggtgctggtagtagagtaggatagtgttcttcgggacatgcttgtaaaattaaggtttttgggtctttttttccgctcctgtacaagtgtatttttggatctgttgttgtaattttctttttctaatgacatgagcatatactttctgtcaaaaaaaaaaaaaaaaaaaaaaaaaaaaaaaaaaaaaaaaaaaaaaaaaaaaaaaaaaaaaaaaaaaaaaaaaaaaaaaaaaaaacaatacgatacaatcaaaagttatcatatcatccaaaataatgtcaaaaatctgctagtcacgtaaatttaattc

SEQ ID NO: 324 - DNA, 222 bp, Triticum aestivum
  Clone ID: LIB103-007-Q1-E1-F3
cggtcctgatttcccgggtcgacgggggagactactacacgaagacagccgtgaacgcgctcgtcgccaaggcaggtctaggcgctcccagtatctatgaatcctgatgaaattgttcgctcagcgacatctcgctgcatgttgccgatatgctatctccgtatcacacagtaactctcgcgacaaatctgcgacctcctgagaatctcagtcgcttgagtc

SEQ ID NO: 325 - DNA, 360 bp, Triticum aestivum
  Clone ID: LIB103-007-Q1-E1-F4
agagatacagatggagggagagggaccaacaaggtttgtgtgtgggacgcgtgcgacagaactgaagattgtcagagagagagagagagagatcgagggagacggagagggaccaacctcgtttgcgtgttagacgcgtgcgacacaactgaacattatcagagacagagagagagagatggagggagacggagatggaccaacacggtctgtgtgctggatgcctgcgacagatccgaagattatcacagacagagagagagacaccgagagagggacccacctcgtctgtgtgttggatgcgtgcgacctaaccgacgattgtcacagagatagagagagagatagacagagagagat

SEQ ID NO: 326 - DNA, 457 bp, Triticum aestivum
  Clone ID: LIB103-007-Q1-E1-F5
taccggtacagaattcccgggtcgacgggaagatattaaggatcggtcttgtaaagctctgagaggtcatcaggcagatctcttgatgttccccatgacgctgtctgcctcccttccttgcagatttctctgtagccatgaactttaaactgaatggcatcaacatgttcaaaggcttcagaggctttcacttgctggacgaacaggaactgacttcgggagaatttatatgatgctataagaattctgcaaatgaatgcagactatgagaaccaaaggattctcccacggacatgtacctgtgacagcattaatgtgcgagggaaggggaagaggtcatatgcattcccagaatattttgaagataaatcagtttagaagacattgacctcatcgtgcgaagacattcactcatagataaggagttggttccagatctgtacgaatccagagatca

SEQ ID NO: 327 - DNA, 395 bp, Triticum aestivum
  Clone ID: LIB103-007-Q1-E1-F8
attcccgggtcgacgagcatgcactgaggcgggaagtggaaaaggaatacatcgccaagcgaactcaatggtacgatgctggaggtggaagacgtggccaacatggcgctgtatgtcgagtcggacgaggctaggtagctctcaaactgcgcagagtcaagattgatgctatggtaccattaatgattccagctgaagatatttgcaacctgaagtgttacacaagtttactattgtgccaatgtgtcatcatgtgtttccatgatttttgcaaacctttaatatatccccgggttccttttcttctatgctagaattggtttggaaaaactgtatgcaactatggccatgaaattgtattaagaattatgcaaggagtgagtcatcatttcttg

SEQ ID NO: 328 - DNA, 357 bp, Triticum aestivum
  unsure at all n locations
  Clone ID: LIB103-007-Q1-E1-G1
cctgccgctaccggtccgaaattcccgggtccaccgggaatcaagcaaaaaaaagggaatgtgttttccttaccaaggttggggttccggcgctcaagggcaacatttatatggagtagtgggagttgttnagacaagccggccggggtcaaaccgaatgctcgcctcccagtgaacctgcgcatccgactgctcgcatgcctaccaaagtttcacacaactactcgcacgcctcctgatgacactgcgcagcgagcaaccctccgttaaatcacacacctgcacgcacgcctccccgtctgcctgcgcggcggactgctancatgctgatacgtcccaacatatctataatttttg

SEQ ID NO: 329 - DNA, 209 bp, Triticum aestivum
  Clone ID: LIB103-007-Q1-E1-G3
ggagcacaatgatagactgccagtacaaggagggcattgatggagaagatcaaggacaagatcagcggcgacggccacggcgacggcaagaacgactgcgaccatttattctttttcttccttattatctaaagtcgccgctctacaggatccatgcttacgtttccgtgcatgcgatttcatacctcttctattgtgttacctaaatt

SEQ ID NO: 330 - DNA, 465 bp, Triticum aestivum
  Clone ID: LIB103-007-Q1-E1-G7
taccggtagtacattcccgggtccacgggaaataggtagggagagagagagagagggagaggggtagagtgctggatgggtgatggagttgcttctcgaagatggtgggagatgcctactagacaaacttagggtagaacttcaatattatcaataagagtggggatgtgtttccgtgtgtgcgtgtgcgtgatagatgtgtcgggacgcatgcatggatgatgaaggggaaccatgtgtttggtaagcaaatctaactagatcggtagatcaattgttgtttatcggaggaaggaagagacataactaataggtagatcgatcgacgcgttgggaaaaacgagttataacgacctagctagccatatgtatagcgggagatcggtcggtgtacatccatttgttagaggcaaacaaggcccagtgagatggatagacagagagaatggagcctagaggtggtgc

SEQ ID NO: 331 - DNA, 443 bp, Triticum aestivum
  unsure at all n locations
  Clone ID: LIB103-008-Q1-E1-A10
taccagtccagaattcccgggtcgacggggttttcttgaagaaatgaggaacaagatgagggagaagcgagggttgggtagagaggaagctgagagagaaaagtgaaatgatggttgcttcgtccgtccaacttactgctggaaaggagggggttctgtgatttgacggctcattggacattactgcggcgcttcgatcggggtagtccgccgtcactctactacggagtaatttaatgcatggctggtggaccccgatgctggctatcccacacgtcggcgaaagtgagtaatttagtgcatggctgaaggaggatccgcacggtanggcgtgtccactgtttttctgaagaaaaaaaatgattacagcaagcgtttccactcttacgacggaggagtgcgaaacacggcagccacttgaacatacacagtgctcctactac

SEQ ID NO: 332 - DNA, 413 bp, Triticum aestivum
  Clone ID: LIB103-008-Q1-E1-A11
attcccgggtcgacgggatgtgttaggtcttattatgtgtgatgaatgggaagttcatgtctctgcctacgacgacgacgatgtttcgtcccttttatgcattttcagtgactcgtttaaaaaaaaaaaaaaaaaaaaaaaaaaaaaaaaaaaaggtaaaaaaaaaaaaaaaaaaaaaaaaaaaaaaaaggggcggcccaaaaggatcaaagctaaggtaagcgtgaaggcaacttaaaagatcttcaaaagggtaaccaaaattaaattaacgggccgtcgtttaaaaagttcgtaacgggaaaaaccctggggttaacaaatttaaaccccttagaaaaaaaacccctttccgcaactgggggaataaccaaaaaggccggaacggatggcctttccaaaaatttggaaac

SEQ ID NO: 333 - DNA, 423 bp, Triticum aestivum
  Clone ID: LIB103-008-Q1-E1-A12
gtaccagtccagaattcccgggtcgaccatttcatcgaaaaaatgatatgtcgagaaagatgatagaggtgaggaggagtggggcgtggtggtgactggtggtcggactgggcggaggcatggggatggacggcgccggcagcggccaccatgccagattgttccagagacttccttttgtaattgctcagcaatgaggttgtgggagataaggatgaacgaggcaaggccttatctgtaaatgtggagagaggagcgggtatcttttgtaaatttgtcatagtttgctttctatccgtcagatatagatcggacaatctatattataagatggcaggcgcaccatcatcaccaactcggttttttctctactcctactcctataaaagactcagttggtgatgatggtgtgtctgccatccg

SEQ ID NO: 334 - DNA, 356 bp, Triticum aestivum
  Clone ID: LIB103-008-Q1-E1-A6
accggtcaggaattcccgggccgaccgcaggtggaaattcgtccggctatgccggcaccacccccccaggtgcgcattgatgtccatctcctgacacggatatggaggagcctcttaattgccggtagagcagttcctgatatatatcctacatggtagttgccaacttatcagccatttcaaggtataccatatcctgcagacagacgatttgctgctcctgtttgtgcatgcgtacatgtgcgtatgtatggttctctgaacactctgtatgatatcctaatctatctaattgtccagcgtttgcctgtgcaaatctcaagcgttgagttccatcagaatatgcacgtgaattg

SEQ ID NO: 335 - DNA, 387 bp, Triticum aestivum
  Clone ID: LIB103-008-Q1-E1-A8
accggtctagcattcccgggccgacgggtgccgcaaatgtttggcgcccaacgtgtcggtctgggctcatacgtggtcgtgtcacgtcgtagtgacgttactatcctacgcctatttagagcagtgggaatcgggccgatggattgtccgataaatgggtacacagtcatttccatctccgaaacacttggtttcgggcatccgacgtgggagtggacattttgctgcttctttcgaagtttgggacaatcatcatccacgtttaccctagatactacattcgaatccattttgtattcctatacgactctttatcaatcattctatgtgtatttatatatcttcacaatgatgacagcgatgtactccactgtcatatatgaatat

SEQ ID NO: 336 - DNA, 415 bp, Triticum aestivum
  Clone ID: LIB103-008-Q1-E1-A9
ttcccgggtcgacgggacaacaccgagcccaaactatgccccggctgcaccagctcccattcctcgccgtcgagctcaccggacaccgcccgaagccaagatgactacttccaggcgccttgctgacaggaagacatcgaagttccagaagaacatcaccaagaggggttcggtgcctgaaaccactgtgaagaaggggaatgactatcctgttggacctatagtgcttggattcttcatctttgtggtcatcggatcatctctgtttcagataatcaggacagcgagcagtggtgggatggcctgaacactgtcatacattaatacagttgcagctaaatctgtttgatgtcgtcatagtttgtcttcttaaaagtacctagtttgaactgatgttgttagaactgttaacaga

SEQ ID NO: 337 - DNA, 436 bp, Triticum aestivum
  Clone ID: LIB103-008-Q1-E1-B10
attcccgggtcgacccaaagctttgagatccttattcagagagtcgtggacgagacattctgaggtgtcaactttaattactagcagaatccagtggaacctgcagacacgatacatgcacagtacgtcatgcataactcatcgattagccggccacataccatgcatggagtaaacaaaagagaatgtgctcaagacagaaacactcacccaaaatggtaaggaaatagaatatcacttttgagttcctgctttgtaagaaactgccacaggtctgcctccatgtcggcggggtgatgctccaacacatatccattaacgatgtgtgggtcaatgaacccaacatcatggatgttccttactctgcattccttaatcttcattctgcatgtataatagcggacacaacaatatagttaggacatatatatagtgc

SEQ ID NO: 338 - DNA, 404 bp, Triticum aestivum
  Clone ID: LIB103-008-Q1-E1-B12
attcccgggtcgacggggatgaggatggtgacttcgcggagggcgaagaggaaatctcggaaggagaggaatatgacaatcccaaggccagtgacaccaagaagaaacaaataggcgagggtgaggagaatggcgaggatgatgaggaagaacaagaggagcaggagggtggaggaggcgacgatgatgacgacgacgacgacgatgacaatgaggaggacgacgatgatgacgatgatgtcgctgctgaagacgatgaagatggagtagaagaggaggatgacgaccaggacaacgacgatgatgaggaggaggacgacgaggactcgctccagccccccaagaagaggaagaagtgaagcccttcgatgccggctgctttagtcaccatgcgatgagatgtg

SEQ ID NO: 339 - DNA, 402 bp, Triticum aestivum
  Clone ID: LIB103-008-Q1-E1-B3
attccggaccgacgggtcatagaagtagacagagggctccttggaggcatcgaacaagccgtccatgaaacgggagtggttgtacgggacgttccgacagttgaatatatgagcacgttactacgagatttactacaatataaatcatgacggctataacatagattaaactaatcatgcggactagcatagtagatgaacacatcaaatctaggacacagactatacacatgaattctaccacgatttcgaacaggaaggacagacacacataccgtgcaacaggagcagcaccattggcgttgaggttgtcgcccatgccgttgaggaagaggttgccgacgtctgggaagaagtcgtcgttggtgaagtcgtcgctgctagcactcgcaagagtgcact

SEQ ID NO: 340 - DNA, 402 bp, Triticum aestivum
  Clone ID: LIB103-008-Q1-E1-B4
attcccggatcgacggggaacacaatttctcaaaccagggtcgtggtactgttgtgactggacgtattgaacagggggtaattaaaactggtgacgatgttgaagtcatatgtttgactgagagtggtcctgtgaagactacagttactggtgttgagatgttcataaagatgatggatcatggagatgctggtgacaatgttggtcttcttctccgtggtcttaatcgtagtgatgtcaatcgtggccagatggtttgcaaaaccggtactgtgaagacctacagaaagtttgaagcggaaatttacgtccttaccaaggatgaacgtggtcgccacactgcattcttctcgaattacagcccacagttctacttcacgacagctgatatctgtgggaaaa

SEQ ID NO: 341 - DNA, 435 bp, Triticum aestivum
  Clone ID: LIB103-008-Q1-E1-B6
acgcgggcaagtaccggtctagaattcccgggccgacgggtagaacaacatggaaatttgcttttaggcattataaaaactttcatataagtgcattgaatactaagagaagtttgatacttgataattgttttgagatatggagatggtgatattagagtcatgctagttgagtagttgtgaatttgagaaatacttgtgttgaagtttgtgattcccgtagcatgcacgtatggtgaactgttatgtgatgaagtcggagcatgatttatttattgattgccttccttatgagtggcggtcggggatgagcgattgtcttttcctaccaatctatccccctaggagcatgatgcacgtagtactttctttcaataactaatagatttttgcaataagtatgtgaattctttatgactaatgttgagtcaatgg

SEQ ID NO: 342 - DNA, 405 bp, Triticum aestivum
  unsure at all n locations
  Clone ID: LIB103-008-Q1-E1-B8
agtaccggtcaggaattcccgggccgacatggaccgggagcagcgccccaacgacgagttcagcgagcgtgtcgtgcaggtcagccgagtcaccaaggtcgtcaagggtgggaggcagctctcctaccgcgccctagtcgtggtcggcgacatgaagggacacgttggtgttggcgtcggcaaggccaaagaagtctcagaggccatcaccaaggctgccatgaacggccgccgcaatctcgttacagtgccactaaccaagtactgcaccttcccgcacagagctgaggcgaactatggagcagcgaaggtcatgctgaggcctgcttgccctggatctggtgtcactgcangtggagctgtgagggttgtgctggagatggctggagtaganaatgctcttgg

SEQ ID NO: 343 - DNA, 409 bp, Triticum aestivum
  unsure at all n locations
  Clone ID: LIB103-008-Q1-E1-B9
gtaccagtcaagaattcccgggtcgacgggtccgtccagtttggaccatatactcgatcgctcatgccaaatacatggcacccccgacaagccagccaagcacaccaacagggaatgttggatgttcaagcaggccggcaagttaagcgccgaagacaaagataaggggctacatagcgatgacgaggaggagccccggcagccgaacacccgagggcagaagaggttcccccaacaagtgcggacggtgaacatgatatacgcaacccacatccctaagagggagcggtagcgtgcgttaagggatgtatacgtgttggagccagtcgccccaaagttcaacccatggtcctcctgtccgatcaccttcaatcgtanggaccatcccactagtatccgtcatggcgga

SEQ ID NO: 344 - DNA, 453 bp, Triticum aestivum
  unsure at all n locations
  Clone ID: LIB103-008-Q1-E1-C10
attcncgggtcgacgtactcctttcaggctgggagatggtcatggggacgattgtatggcgtccagataggctctcccacaaagagccgcattgccttgatgtagttgtcactatccaatgtaaagcggtgatacattcctgcaggcaaaacaatcatgccacctttcttaactgctatacggatccactgttcgttttggtccctcacatcaaagtatccactgccctcgagacaatagcgtatctcttcatcagtatgcaagtgctcttcaaagaagttcttcagcttggcctcatagtttggcaacttctctgggcatacgtcgcaaatgtccacataagagtatcccctggcctcacggattttcttgagattctcgtctttctcccagtcatcagcattcaggttccagcttacaacacccaattctgaaagtttggcaagaggaatg

SEQ ID NO: 345 - DNA, 439 bp, Triticum aestivum
  Clone ID: LIB103-008-Q1-E1-C12
atgcccgggtcgacggggaagaagaccaaggcggagaagcgggcgccggcgtccaaggaggccggcggcgaggggaagacgaggggcaggaagaagggcagcaaggccaagaagagcgtggagacgtacaagatctacatcttcaaggtgctgaagcaggtgcacccagacgtgggcatctcctccaaggccatgtccatcatgaactccttcatcaacgacatcttcgagaagctcgccggggagtcggccaagctcgcccgctacaacaagaagcccaccatcacgtcccgggagatccagacctctgtgcgcctcgtcctccccggggagctcgccaagcacgccgtctccgagggcaccaaggccgtcaccaagttcacctcctcctagacaacttaggcttgatcctcgtcgcttcatgcgttctgtaagtacg

SEQ ID NO: 346 - DNA, 391 bp, Triticum aestivum
  Clone ID: LIB103-008-Q1-E1-C5
accggtcagcaattcccgggccgacgggactactaacgtctcacgcacacaaacaccccccccctggatcgtcttttaggttttaaaaaaataaaaggaaatgataaaagattaaaaaaattcaaaaaaatagatgcccatgtgttatgtgtcctatttgttaggaaaattaacaaacatgaattttgaatttttttgcaaaaggccgcgtgtttcggtaaaatggccgtaacttttgcatacgacctccgatgaaaaagtttttttatatgaaaaatcatctacttgaaaagttacatccaaattcaattagggggacactatgggagatttttagaatcccctaaaacctgacagaataaaagatacggggcttttaagatctggaggc

SEQ ID NO: 347 - DNA, 425 bp, Triticum aestivum
  Clone ID: LIB103-008-Q1-E1-C7
taccggtcaggaattcccgggctcgacgggtagtacacaaggctctttattttggcggtgtatatgatacctgggcccctggggggggagatgtaagaaaaattaccaatttgacccttagtcccagtgttatatttggttatttactaaaatctccttttggtggagaagggtggattgttagtgtagatgatttagaagatataattggtgggcatgtatggttgggttttatttgtgtatttggcggaatttggcatattttaaccaaacccttcgcatgggctcgccgtgcatttgtatggtctggagaagcttacttgtcttatagtttagctgctttatctgtctttggttttatcgcttgttgttttgtatggttcaataatacagcttatccgagtgagttttatggacccaccggg

SEQ ID NO: 348 - DNA, 401 bp, Triticum aestivum
  Clone ID: LIB103-008-Q1-E1-C9
attcccgggtcgacgggcagcggaagagcgcggagaagaaccagaagtccaaggggtcgcagctcgaggcccgcgccgtcggcctcaaggtcgtctgccccatctgcaagtctcaactggccaacgagaagcagttgattgatcactatggatcaaagcatcccaaggagaaacctccaggtccatcaaatgcagagtgactgatgcgaggcggaagcatgagctatactttgactgtttctgagggtttttcaatctgctccacactcggacgacttgagcctcagctttaccctatgtaatgcatgcatttccccttgttccaggcaagaaccttgatgagcatgtatttgccttatatgagtatcttgtcaaactgtcagcataccttcaaactgtat

SEQ ID NO: 349 - DNA, 397 bp, Triticum aestivum
  unsure at all n locations
  Clone ID: LIB103-008-Q1-E1-D1
attcncgagtcgacggagatcttcaggctggcatgaagcaaggggatctaatcatttggtatgttgagcagcagaatgcccaaggtgcatatagttctacagaagaggtgaaggaggaagtaaagtgcatcaaagccattatagagaggctgatacagagggaaggccatcttgtagtcatagacgaaggaacagcggcagcagaaggtgctgcagcaagggcatcggagcacagaatcctggctgttaacccgaactacgtcattgattgattaaccagctgaggacacagctaactagatccatcatatgtggttgaccaatagagcagacattcaaacggaagacatcctgttgtcatatgctctagaaacgatatgttgtacctgccatcccc

SEQ ID NO: 350 - DNA, 449 bp, Triticum aestivum
  Clone ID: LIB103-008-Q1-E1-D10
attcccgggtcgacggggaatcagatggtgttgttatgtgcccaccagatggcaacactcgtgattgcgaggaagttgttagtggcagtgatcatgatagttctccagagggccaagtaacttctgtagaaccggccatagacggagaaacaggggaagacaagcttataaaccaagattcactgaagttgatcgatcaagaaatgtctgctcttcctaagtcaccaacaaagcctagtatgtctggatcagagaagtctaagcgtactgttcctcaaccattcacactttcaactcaaagaagggtctctggtggaggaaatggtggtgttgctcatccatccagtaatggagaaaaatctgggcaaggaagtagtgcctctccagcaagcatgataaagaagagtactctggtgacacccaagaagatgtcacaacctggccttaca

SEQ ID NO: 351 - DNA, 415 bp, Triticum aestivum
  Clone ID: LIB103-008-Q1-E1-D11
gggtcgacgggcaagggcagcagctgggcctccgcatccgcgccaagcagaagctgcccctcgcatacaacgcgctcctccaggctcacgcggagatcgacaccgccacccggaagcccagcctcctcgccatcctcgcaaggcacttcttcccacagctgtcggccaacgtcggggcgggggtgcagctggagaggggcaacatcttcaggtacaccctccgggccaagaaggccgtctcattcaccgacgacggcctcctcggcctcaacatcaagggacgcctcctcgcagacaagaacttcaagccgaggaggaagagcggcgccgtcgagctcgcctggaccatactcgacttcagaaggggccaggacgtcaggatcaaggccggatacgagctctaccgaaagatgcc

SEQ ID NO: 352 - DNA, 459 bp, Triticum aestivum
  Clone ID: LIB103-008-Q1-E1-D12
ggtaccagtcaagaattcccgggtcgacgggaggttctaccaggtcgtgtccaacgccgtggacatgaagctcagggatgaccttgagaggctcaagaagatcaggaaccatcgtggtctgcgtcactactggggtgtgcgtgtccgcggtcagcacaccaagactaccggcaggagaggaaagactgttggtgtctccaagaagcgataagctgcttcacaaagattcctcatagctttgctactactgtgttggtccatttccagaatcttaagggagtgttcttatttagatgattaccttggatgatgttttgccctagataatgttttggttctggaacctttaatatattgtatcttgaattctttgttgaactcgtacaagagtttgttttgataaaaaaaaaaaaaaaaaaaaaaaaaaaaagcggccgctctaaaggatccaagcttacg

SEQ ID NO: 353 - DNA, 404 bp, Triticum aestivum
  Clone ID: LIB103-008-Q1-E1-D2
acggtcaggaattcccgggccgacggggtaataagcactgcagcacgtgcatgtagttcaaatttgaattgttcacctgaaatggctacaatacatttcaatgtcatataatgttcattcatatccggaaaaaatccacttcgtttacgacacacatatagttgcatgttcaccccaaatctaaggtcgagcacttcatacatcatcgattgccgctgtgaccccatgatgtacctcatagattgattagatttcatgctagatctcaacaatttactatcagcatcgtgtgacatgtgttacagtgtatcttggtgcatcatcagtgtatagtacgcatatagcctacgcgagacagtgcgtcggctacattccacattcagcgtgtcaagcacactatctcg

SEQ ID NO: 354 - DNA, 401 bp, Triticum aestivum
  Clone ID: LIB103-008-Q1-E1-D5
acggtcaggaattcccgggccgacggggaagaagcccaaggcggagaagcgggcgccggcgtccaaggaggccggcggcgaggggaagcagcggggcaggaagaagggcagcaaggccaagaagggcgtggagacgtacaagatctacatcttcaaggtgctcaagcaggtgcaccccgacgtgggcatctcctccaaggccatgtccatcatgaactccttcatcaacgacatcttcgagaagctcgccggcgagtccgccaagctggcgaggtacaacaagaagcccaccatcacgtcccgggagatccagacctccgtccgcctcgtcctccccggcgagctcgccaagcacgccgtctccgagggcaccaaggccgtcaccaagttcacctcatcct

SEQ ID NO: 355 - DNA, 400 bp, Triticum aestivum
  Clone ID: LIB103-008-Q1-E1-D6
acggtctagaattcccgggccgacgggggatttagtaaatcaaatccatggtttaataacgaaccgtgttaacttaccataacaacaactcaattcctatcgaattcctatagtggaattcctataggatagaacatacacagggtgtacgcattatatatgaatgaaacatattcattaacctaagcatgccctcaattttctttaatgagttgatattatattaattgaatatcctttttgttttacgagatttttgctaaagtttcatttacgcctaattaacatcgagtagaccctgttattgtgagaattcttaattcaagagttatagggagggacttatgtcaccacaaacagaaactaaagcaagtgttggatttaaagctggtgttaaaga

SEQ ID NO: 356 - DNA, 436 bp, Triticum aestivum
  Clone ID: LIB103-008-Q1-E1-D7
acggtcaggaattcccgggccgacggggcagagatgctggtgatggcctacgcaaggtcctataatcttccggtgatcaccacacgaggtaacaatgtgtatgggccaaaccagttccccgagaagctcatccccaaatttgctctcctggcaatgagaggcctgccactcccggtttatgggaatggctcgaatgccaggagctacttgtactgtgaggatgtcgcagaagcctttgatgttgttcttcacagatgagaggttgggcatgtgtataacatcgccgcggctaatgagaggggagtggtggatgtggccagggacatatgtgagattcttggggtggaccctgagaaggccatcaagttcgtggatgacaggccgttcaatgagcataggtactttgtggacggtgagaagatgacgaggctggggt

SEQ ID NO: 357 - DNA, 310 bp, Triticum aestivum
  Clone ID: LIB103-008-Q1-E1-D9
cgggtcgacgggtcaactcattgggagagggaaatctccatcaacatgttcacaagcacaatctaactccaaaccctaattcaactcctgcatccaattcctgtctcaaagttcgggaatggtgctagtaagttgctagtagacaccttgtaattggtgctagttggtttaattggtggaagatcatatgttcagatcctatatgcatattattatccctttgattatgaacatgaatatgctttgtgagtaaatacattcgttcctgaggacaagagagaaatcttgcgatgagtagtcacgtgaaatt

SEQ ID NO: 358 - DNA, 381 bp, Triticum aestivum
  unsure at all n locations
  Clone ID: LIB103-008-Q1-E1-E1
attcccgagtcgacggggacacaaaccctagctcactttcctatccacacaacctcttcctccccgcatcaccacagctgccgctgtggagcctcgcggacgcctgctattactcctccctcgtctctgtctggtcgccctctcgtgctccaccatgcagccgcctcttcctcctctattccctcctaccgtggttccggatcgggtgcaggccgtcatactggagagcatgagcgtcaaggtcttaatggtggggtggagatgcangggaggtanggatgtcggatggatctgacgcctgctggctaaagcagcaggagttggcagagcgacggatgcggacgcggtcatcaacaggggttgcaagagaaggagctcaag

SEQ ID NO: 359 - DNA, 427 bp, Triticum aestivum
  Clone ID: LIB103-008-Q1-E1-E12
ctatattgagtcgtatcatcatcctcctcctcgcgaagctcccgtaccaacccgacctctggactcgacccccgcgggagcaacagctgtccaagaatccattccacccactgcgaagagcgagcgagagagagaggaagcggaagcaagaagatggggcaggcgctgcgcaggctcttcgactccttcgtctccaccaaggagatgagggttgtgatgcttggtttggattcagctggcaaaacaacaatcttgtataggctgcacctgggggaggttcttcaaactgtgcctacagtaggttttaatgtcgagaaggttcagtacaagaatgtggcatttactgtgtgggatgttggtggacaagaaaagctcagacaattatggacgatgtacctcagcaattctgatgcactgatccaggttg

SEQ ID NO: 360 - DNA, 388 bp, Triticum aestivum
  Clone ID: LIB103-008-Q1-E1-E2
attcccgagtcgacggggacgaggatggtgacttcgcggagggcgaagaggaaatctcggaaggagaggagtatgacaaccccaaggccagtgacgccaagaagaaacaaataggcgagggtgaggagaatggcgaggatgatgaggaagaacaagaggagcaggacggtggaggaggtgacgacgatgatgatgacgacgacaacgacgatgacaatgaggacgacgacgatgatgacgatgatgtcgctgctgaagacgatggacatggagtataagaggaggatgatgacgatgaggatgatgaggacgatgaggacttgctccagcccccgaagaacaggaagaagtgaagcccttcgacgcggctgctttagtcaccatgcga

SEQ ID NO: 361 - DNA, 429 bp, Triticum aestivum
  Clone ID: LIB103-008-Q1-E1-E5
acgccgctaagtaccggtcaggaattcccgggccgacggggggtcgaccgccccatgaggcgcggagatagggggaggcgtttcgctctccatcatctccggaagaagatcccccgaagacgaactctgtcgagaagggctacgattcgagctgcaagacatatgtctcggttattgtcctcggagatgaagcatgatatatttaccaaaagtactcttgttcacttacagctcggtggagggctgacccccttgcgggcagtgcggtaagaacgccctccggggcagggccccctgacgaaggtttcttccctcgtttggaaaccctcgtttccaagtcttcagaggcggtccttttccatccttggggagagggaattttagattcttctccccaattatcctccttcacgaagacactaattcccc

SEQ ID NO: 362 - DNA, 389 bp, Triticum aestivum
  Clone ID: LIB103-008-Q1-E1-E6
taccggtcaggaattcccgggtcgacgggtcctttatttacaggagacgatgaagagaagattctctcctagtttctttagtaagatcgatccttatggtacttttgactggaactggatcccttcgattggcaaggctgggggtctcctctgtgcggtcaagagacaacatctggaagtttttttcgtggtccttggggaaatcttagccttcatgttactatcttcgatgttaaaaaaacagtgtgtttggtctttgcttaatgtgtatggtgcagcccatgatgagtccatacatgaattccttgaggaattggccaactattgtatccacttatcaatgccttacattgtgggtggtgatttcaacatccttagacactagtggg

SEQ ID NO: 363 - DNA, 410 bp, Triticum aestivum
  Clone ID: LIB103-008-Q1-E1-E7
acggtcaggaattcccgggccgacggggagcgccgcactactataaaagctcgctcccaaaactcgccccgctaccgcagccgccacacacgacgaacaccggaacgaagcagatcggcggcgcgtcactccaatcaccggttcataaaatggcgacggtttcggattctctggtctgggagctcgtcaggaagaacaactgcttcctgatcaagcagttcggcaacagcaatgccaaggtccagttcagcaaggagcccaacaacctctacaatgtccactcctacaagtactctggcctggcaaacaagaagactgtgacagtgcagccagctgctgagaaggagatgactgtggtcctctccacaaccaagtcaaagaagcagaacaagcctgccgcgttcaaccac

SEQ ID NO: 364 - DNA, 450 bp, Triticum aestivum
  Clone ID: LIB103-008-Q1-E1-E8
acggtcaggaattcccgggctcgacgggcccctcaaggataacagggacgatccatcgaacttaaataaaatcctggacaggatatgtcagatacagagtactcccgggaagcccgctaaccatacccacagagattgttgggttttcaaacaatccggcatactcaatgccgaacacaaggggctcgacacactaagagaaggcgaggacgaaccccaaaagcagagcaccaggaaacaaaagaacttcccacaagaagtaaaaacagtgaacttacttcacataacaaaacgtgcggcgcccataaaggtatgcaacacacggtctatccccaaagggtcccgccactggttgtcaaaaccaatcatcttcgatcagctagattattctagaaatatcaagaatgcaggctggactgccttgatacttgatccaataattggcggact

SEQ ID NO: 365 - DNA, 439 bp, Triticum aestivum
  Clone ID: LIB103-008-Q1-E1-E9
attcccgggtcgacgggaagccaaaggtatctgtaccgaacggtgtcagtggagagaaacagcaggatgctgtcaatgggaagccaaagtcgcctgtagcgaatggtgttaacggggatgcgaaggttccggcagagaaagccgctgccaccgctgctcctccagccgttacctacgcggcgaaggtggcccaaacagcagcggccgagaagaagcctgcggcgaccgagaagaagcctgtcgttgccaacggtgctgtcaagaccggtgtagctgcttgatcgcatacccgatcctcccagctagccatgaagaacaaacggacggtgctggcgaaccaggcgagacatgcggggtcccaaggtactgatcaccaaaggtggctgctggaaagcgggtcggatagttaggtttccctagctctcccctttttcctcct

SEQ ID NO: 366 - DNA, 345 bp, Triticum aestivum
  Clone ID: LIB103-008-Q1-E1-F6
acggtcagcaattcccgggccgacgggggacccaagttacattgtcgtcctctctcattctgttccttctggttagcatcagatcagatgtgaatatacttgacgagttgattaatttagaggcagctggtggccctgtactaaggtgtccgtttatatgttggtctgcatatctatgcacaatacgattggaatgaccgggggttcacttcatagttttggatgaaaaatgttggctttgggatatctggcgtacagctgggcacatgatgagttccagaatgttatgtttatgtattggtgccagttttgttgacgttctgttaattccgttgcgttgatcga

SEQ ID NO: 367 - DNA, 428 bp, Triticum aestivum
  unsure at all n locations
  Clone ID: LIB103-008-Q1-E1-F7
accggtctacaattcccgggccgaagggagatggaggtaactcgatctcatgtgaggaattcaatgtgtcgttggacacattgaaaacctccatgacaaccgaggtcaaggacatgtttaaggaattcttagaagggcttaaactttccaccgcgcccgtgaaagtgggtgatcccgccaacacggtgacggatgctaaccccaaaaagggggaagctactagtgagaaagctccgttgtctagtggtaaaaatggcaccggcatctttgcccatgtggaacctccaatttatggagggccgattccctctactcatttaaatcatgctggtcctcctcctaagtatgagaaacatgaagattttgattcttgggtttatcgcttcaagcgtcatttanaacatgtgaatactaacctttggagaatc

SEQ ID NO: 368 - DNA, 400 bp, Triticum aestivum
  Clone ID: LIB103-008-Q1-E1-F8
acggtcagcaattcccgggccgacgggaacgatacgtacacgcagtttggagggaaaggcggaaatgcccagggtgacatgaatggaacaaacagctccgacgatggcgtgtccgacatagagtccgtcctcgagcagctgaagaaggagcttgggctcagctgaacggttgcctgtcggctgcatacgacgggggcaactgcggccaccttgatcggtaccaacccggtgttcatatggaggtccgctgttctcccggatcgatggcggtaatggtacgtactaccagatgttgtaatttagctggtatagctttccggtggggcgacggatccagcgttttgcagaatgtttttgttcttggttcgtagggctgcagtttgttatggacagagaagag

SEQ ID NO: 369 - DNA, 417 bp, Triticum aestivum
  Clone ID: LIB103-008-Q1-E1-F9
aattcccgggtcgacgggacatcttcaccaagccattgcctttgccacagtttgagacttgcaggcgcaatcttacccttctagattcattaaaaagtggctaagattgagggagggtgttagactgtatttacatgtgtatattgtaacgttgtataccacctcattatatatatatgtgataggccacccctagagggttgtgccggttccccccaaagcctattgtcttacactgggcaatgatggtgcctggcgtggacatggaagctgcatatttttctgcctggtcaggcagcctagcatgacaactgtttggttatagcctgaaagctattagtactagaaaaaacaatttgtggggtcatctaccccactgtactttatagcccaggcagccaccaggcgcttgaatac

SEQ ID NO: 370 - DNA, 420 bp, Triticum aestivum
  Clone ID: LIB103-008-Q1-E1-G11
attcccgggtcgacgggacacctgaccgtatactagatcttaccaagaagggcatttgtatgctgaacgaatgttcaatgctcatcatggacgaggcagacaagctgttagctcctgagtttcagccttccgtggagcaactcattcgttaccttccagctagtcggcaactattgctgttttctgcaacctttcctgtaactgtcaaggattttaagcagaagtacctacctagaccttatgttattaatctgatggatgaactaacactgaaaggaatcacacaatactatgccttcgtagaagaaaggcaaaaggttcattgtctgaacacgcttttttcaaagcttcaaataaatcagtctattatattctgcaactctgttaatagagtcgagctactggcaaagaaaatcactg

SEQ ID NO: 371 - DNA, 447 bp, Triticum aestivum
  Clone ID: LIB103-008-Q1-E1-G6
gtaccggtcaggaattcccgggccgacggggagctaaagtggctgaatcctgacaacaatcatgagctattatgggattatagcatgtgtgctgaaacgagtcgtggggctgcgatccgtgatttgattgccagagccttaaaaggtccacttgtacctgctcaacaggagcaagttgttatagaattggtgaaggactctaagctagtctatcactgtgggatgactccacagaaacttccagaccttgttgagcataatccactcattgctgtagagcttctttcgaagcttatgaactctcctgacattgcaggttattttgatgttcttgtgcacatggagatgagcctgcattcgatggaagttgtaaacagacttactactgcggttgaactcccgacaggatttgtccacgaatacatctcaaattgtattcaatcttgt

SEQ ID NO: 372 - DNA, 392 bp, Triticum aestivum
  Clone ID: LIB103-008-Q1-E1-G7
taccggtcaggaattcccgggccgacgggggttgaaaacttcatgaactttatcacaattgagtacggtggtccgaaatcagatgtgctctgcccgtgtagcagttgtatgaattcagttacatgaccccagtcaattgtgcaaagtcatctacacttgtatgggatgtcggtcacatatactaggtgggttcatcatggtgaagctgtgaacgtcaatgttactaactatgtggaagcagcagatcaccatcttgatcagcctgatgctcaggtggaagaggaggaggacgaggaggtgctggcggcagagccagtgagtttgaccaacattgaaacaattcgacgaaatgcttgcacatttcgtgaagtttcacttgcagaaaaacaatg

SEQ ID NO: 373 - DNA, 144 bp, Triticum aestivum
  Clone ID: LIB103-008-Q1-E1-H10
gtgagtcgtattatcgatttcttggtcatttctctccttagccagtcagagctcttgatcttttaagaatcgaaggacaagtgctcgatctacatattcaccatagctaaggttgattcttcccttgcctttgtggtagatctt

SEQ ID NO: 374 - DNA, 397 bp, Triticum aestivum
  Clone ID: LIB103-008-Q1-E1-H11
attcccgggtcgacggggaccgttaagagtcgcacaagaaaagtgtcgcccggctccttggccctcctcctccggcggtgctgccgtcgtgagcgagcatggggaaggtagccaggtctctcctccgtcaagtaggtgtaagattaggtttaggactgagtctaggtttgtctctgtggcgtttgacgtgatgtcgagttggagcttcgtccaggcgtcctcgagcagcgcctggcggctggttctctcccgaggtgagcttccatggtggaagttgacagcgggtggtagatctggtgatagcttccctaataagctcgaatctttccctgatctggaggatctccgtcgccttgttccatttgttcgtcgctgtcgtggagatggggacagaaag

SEQ ID NO: 375 - DNA, 432 bp, Triticum aestivum
  Clone ID: LIB103-008-Q1-E1-H5
acgcggcgaggtaccggtcaggaattcccgggccgacgggtggtggaggtggtgggttgttgttgttgttcccctgattctgattctggactagcaactgcattaatgtgttctgctgctggatcaactgagtgagctccggtgggaaggtaaatctggggtcacatctcggaggcatctgaggggtttagaatagatgagatttaagaatagagagggggtctaaagagaaaacactacccatatgcacatgaggcaaaagcaaacaattcacttcattcaatcaaacaagggcatacaatcggtctaactatcgcaaaagtgctcggactactatatttacatggtggactactactgttggggtggtctactagaaatattcttcggttgcagactccatgatatctgctccagcttcatcaacataat

SEQ ID NO: 376 - DNA, 430 bp, Triticum aestivum
  Clone ID: LIB103-008-Q1-E1-H7
ccggtcaggaattcccgggccgacgggtgccccagaaggcatcccctctttcttcaacaagtatcagtatgttttcgtattcgtttcgttcatgcaatatgtgcaagtcttggagcgtcttttgcatttagttttcacttttcttttatgcaccgtgctggtatgagatagtccttggttgatttatagaatgctcattgcacttcacttaaatcttttgagtgtggctttatagaatgcttcatgtgcttcacttatatcatttgaagtctggattgtctgtttctctttccatagaaaactgccatttgtagaatgctcttttgcttcacttatatttgttagagcgtgggcatatcttttgtagaaataattaaactctcttgcttcacttatatctattaagagagatgacacgaattggtcaatc

SEQ ID NO: 377 - DNA, 398 bp, Triticum aestivum
  Clone ID: LIB103-009-Q1-E1-A2
ggtccagaattcacgggtcgacggcaatagataaataccacacgtccatcaatttatttactaatttctggaggtccataagtatacgtctgatccatattactacagactgttctgtttttgacagattctgtttttcgtgtgttgtttgcctactttgatgaatctatggctactatcggggggtatgaaccatagagaagttggaatatagtacgtctaacacttacaacttggaatgggttcattacactgcctttaactggtgatttgttttcttagacgtactgagctcatcagattttctgtttaagttttgtgttgtgaagttttcaagtttttgggtaacgacttgacggattttggaatatcaactggcattcaccttaacctgggga

SEQ ID NO: 378 - DNA, 352 bp, Triticum aestivum
  Clone ID: LIB103-009-Q1-E1-A6
attcccgggtcgacgggatgaagcagggctactaggccgctggtgttggatgctaattaacgtgaaatccttgctagtttatatctgatgtctgaactgcggtacaaagaaatgaactcatggattgtcgatgagtctgaactcgtagagtatctgcatgtgcgaccgggattgcgtatgaatgtacacttgatgcgcctgctaactgaattgctcgcccttgtgaggttggatagagggtacggaccgagtttgaagcagtccatggattattttgtactgtactacatgaattttacgccaatgtaatgtaaccaacttaaacgggtcggactttatttgcctagcgaaa

SEQ ID NO: 379 - DNA, 453 bp, Triticum aestivum
  Clone ID: LIB103-009-Q1-E1-A8
taccggtccagaattcccgggtcgacattcctggaaaggagctggctattacttcagatgaggctttaagtttggaggagctaccgaaacgtgctgtgattcttggtggcggatatattgctgatgaatttgcttctatctggaaggggttgggtgctgaagtagatctattttataggaaagaacttcctctaaggggttttgatgatgagatgagaacagttgttgcaagtaaccttgaaggaaggggaatccgattgcatccagggacaaatttgaccgagttgagtaaaacagccgatggcaattaaattgtgacagataaaggggatgagctcattgcaaatgttggtccttttgctacaagtcgtgcgcccaaactcaaataggctgaacctggaagctgttggtggttaaggttgatcaaataagagccatcaaagttgatgaata

SEQ ID NO: 380 - DNA, 399 bp, Triticum aestivum
  Clone ID: LIB103-009-Q1-E1-B1
attcacgggtcgacggggtctaggccgctggggcctagacgacgacgcaggacttggcagaggggagacggtctgacgaggaggccggggacgactcgttctggccagagctgaggcaattggcggcggcgaactcctgcggagctccatctccggcgcatggcgtgacctaccggggtcctggaaggcagcgcatgggaggcggcggacgggacagttcgggcaggaggtgtctgcgtggctgcagggaagctggaggaggacgtgggtgtcggtgtcaaaaccggcggatctcgggtagggggtcccgaactgtgcgtctaggccggatggtaacaggaggcaagggacacgaagttttacccaggttcgggccctctcgatggaggtaaaacccta

SEQ ID NO: 381 - DNA, 365 bp, Triticum aestivum
  Clone ID: LIB103-009-Q1-E1-B2
cggtccagaatcacgggtcgacgggaactaagatgctgcagcatgtaaggattgctcgaattgttgctgtgtgacagctggttgaacttgtgatcgttgagatccttggttctagatgaagaaactagtactactatgttgttgcaaaaaacaccaacaccggcacaaaaaaaagacggacccccaaaaggttcaaccttacatacgacttgaagcgaagtccaaacccctccaaaatgtccccgaaaatcaattcaaaggccggacgattacaaaggcctcaatgggaaaaacctgggattacccaaactaagcccctttcaataaatccccccttccccaactggggttataacgaacaaggc

SEQ ID NO: 382 - DNA, 394 bp, Triticum aestivum
  Clone ID: LIB103-009-Q1-E1-B3
ttcacgggtcgacggcggatacacttactcatcatgccgcagctcgtagcaagcgccgcacgtgacgccgccatgtcaaggcgctggatgggatgattggctggaaactaattccggatgtctcttggtctgcctgtggtaccgactgttaactgcgccaacaatacgggcgccaagaacctgtacatcatctccttgaatggcatcaagggaaggctcaaccacctgccgtccgcttgcttcagccacatggtcatggccaccatcaataatgggaatcccgacctcacgaataaggtcatgccagcggtcatcgtgctccagcgcaggccatggcaccaaaaggacgatgtcctcatgtacttcgaatataatgctgcgggtgattgtgaat

SEQ ID NO: 383 - DNA, 357 bp, Triticum aestivum
  Clone ID: LIB103-009-Q1-E1-B6
gtccagaaggtccgggtcgacggggcaatggacttttcctaccaatctatccccctaggagcatgcacgtagtacttgatttttgatggcttcgaaatttttgcaataagtatatgagttcttttgactaatgttgagtccatggattatacgcagtctcacctttccgcctttgctagcctctttggtaccatgcattgccctttctcaccttgagagttggtgcaaacttcgccggtgcatccaaaccgcgtgatacgatacactctatcacacatatacctccttagatcttcctcaaaacagccaccatacctacctatcatggcattttcatagccattcggagattatatg

SEQ ID NO: 384 - DNA, 437 bp, Triticum aestivum
  Clone ID: LIB103-009-Q1-E1-B7
tccagaattcccgggtcgacggggacatatatcagggcccaatgtatggtagtaactgaatcatggatcacaaacacagaactcagttcctgaggacggctacaatgagacaacccaccatgtactcctacatggcctctcaccgctacctttaccaaatcgtgttcacacacttagctcacacacagtaggacatgttcacacgcctctgattcatccccgatgaatcagacctgactcaactctaagcagtagcaggcatgacaaataagcatgaagcgggggtgtacttcttcatacatgtttccaccacttagcgtctgcacacgacatgtgctcggcagacttcaagcgaaagccgacgtgggtgtagaccacgacctacctaaacactcaagtctctagtccaggtttatcgcctattcgggttccatcca

SEQ ID NO: 385 - DNA, 421 bp, Triticum aestivum
  Clone ID: LIB103-009-Q1-E1-B8
attcccgggtcgacgggatgacgaagcgcaccaagaaggctggaattgttggcaaatatggtacacgttatggtgccagtttgcgtaagcagatcaagaagatggaggtgtctcagcactccaagtacttctgtgagttctgcgggaagtttgctgtgaagaggaaagcagttggaatttggggatgcaaggactgtgggaaggtgaaggctggcggtgcttacaccatgaacactgccagtgcagtcactgtcaggagcaccatccgtcgcttgagggagcagactgaagcataagttgctaacagcagtgttttgtcctaaggaattatctgtttttttgcagtttagacgatactttggattcagttctgttggctgtttagtcaagggtatctttgtacttggtgccatggatgttt

SEQ ID NO: 386 - DNA, 256 bp, Triticum aestivum
  Clone ID: LIB103-009-Q1-E1-C1
ggtcgacggcccaggaaagactggcacacagaggttaacgccgttgtaaacttggaacatcgctatgcaaacgtactctttatggaaacagacgaagagctcgatgctcttccttgtcaccatccagcagcatctgtcatatctctcactcatgactatcttcaagacatgtcaaatcctacaactcattaatacctgttgtagcacccatgccataccatgttcaaattcaggataggcaacgtgactctcattc

SEQ ID NO: 387 - DNA, 427 bp, Triticum aestivum
  Clone ID: LIB103-009-Q1-E1-C2
ggtccagaattcccgggtcgacgggaatcctgaacacggaggacgtgtacgaggcatggggcacattccgtggaaaatagggttcccccagaacgatgacctgtacggttacagaagccggaagagaaagatggatcgggaagcagatgttgtggcgcggttggcatcggaaatggatgtgatgaagaaaaccgtgagtgtactagtagccgaacgagatgcagctcgggcgcagcatgaagatcatccagcggatctcagaagccagcagcggagaagcagtgtggcttccacggaggccccaccggctggtgcagatgcaccgacgatcgaaattactgcaccggagcctctggtggtcgaaattactgcaccggagcctcctcgctaccccgtggacgatataaaggagatgaaagaatgtcat

SEQ ID NO: 388 - DNA, 451 bp, Triticum aestivum
  Clone ID: LIB103-009-Q1-E1-C4
tgccggtccagaattcacgggtcgacgggattagctatccccctcttattctggcattctgcagttcagtccaccgatatggccctttacactatatccatgcatatgtagtgtagctccttgcttgcgagtactttggatgagtactcacggttgcttttctccctcttttccccccttacctttctacctggttgtcgcaaccagaggctggagcccaggagacagacgcagggccgtctccagtaatttgggggcccgggacaaaatacaaaatggggtcctaaatttttttaaattcatataacaaaagaagtatccaaagaatatctacactaccaaaataatacctctctatccgaggaacgcatcatgcccaaagcatacataaatttgctcgattgcacaatatatgtggacctaaactcaatgcttagcaatggaatcaaat

SEQ ID NO: 389 - DNA, 445 bp, Triticum aestivum
  Clone ID: LIB103-009-Q1-E1-C6
gtacaggtccagaattcccgggtcgacgggattctgtatttcgtgtgttgtttgcttatttcaatgcatctatggctaataaactaatttataaacgataaggaagttggaatacagtaggtttaacacagaaataaataaataatgagttcattgcagtaccttatgtggtggttttgttttctttcactaacggagcttataagatttcctgttgagttttgtgttgtgaagttttcaagttttgggtaaagcttttatggactatggaataaagggtggcaagagcctaagcttggggatgcccatggcaccccaatatattcaagagtagtcaaaagcctaagcttggggatgccccgggatagaatcccctctttcgtcttcgttcattggtaactttacttggagctatatttttattcccacatgatatgtgttttgc

SEQ ID NO: 390 - DNA, 406 bp, Triticum aestivum
  Clone ID: LIB103-009-Q1-E1-C7
ggtccagaattcccgggtcgacggggaagtcggccgccaaggagggcggcgacaagaagggcaagaagaaggccaagaagagcgtggagacgtacaagatctacatcttcagggtgctgaagcaggtgcaccccgacatcggcatctcctccaaggccatgtccatcatgaactccttcatcaacgacatcttcgagaagctcgccggcgaggccgccaagctggcgcggtacaacaagaagccaaccatcacgtcccgggagatccagacctccgtccgcctcgtcctccccggcgagctcgccaagcacgccgtctccgagggcaccaaggctgtcaccaagttcacctcctcttaggctgttcgtcttcctgtgtctcgtagttagctgttcgggtgtgtttg

SEQ ID NO: 391 - DNA, 457 bp, Triticum aestivum
  Clone ID: LIB103-009-Q1-E1-C8
ccggcaggtacaggtccagaattcccgggtcgacgggcctccccacaaccggcccgtaacatatgaattcttacttttcgatcgtttttcttttaacattccatgttttctgcagtgacacacgttgcacgctcatcctcctaagccccaaatattccatggccacgtatttcgacccggaccgtcagtcgaacgtagactacacaaatgtcaagaaggttcttgatgatgttctccccggctacgcccaatctggaggcaccttcaccaggcctattcgtaagtacggcaagcacgtgttctcccacaatacgacgttctgctgcgtcaagcagccgcctggcggtcagaagggtgcctactacgccatccatcacatgcgggcgatcgtacgggaccatcatcaacttctgctaccgagtaaactccaagattgggccgcgagcgtgtcgggaat

SEQ ID NO: 392 - DNA, 421 bp, Triticum aestivum
  Clone ID: LIB103-009-Q1-E1-D1
attcacgggtcgacggggcagatggtgttcgtgggcgggccgaccaagccgctggagctgccggcgttcgccatcgtgccgggagggaagggcatcgccgggaactgcgtcggcggcatgagggactgccaggccatgttggaattcgcggcaaagcacggcatcaccgcggaggtggaggtgatcaagatggactacgtcaacacggcgctcgagcggctcgcgaagaacgacgtccgctaccgcttcgtcatcgacatcgcaggcagcctcggctcaacctcgtgagctggaatagccaccttgttgatggttgcgttagtttgcttcggcgaacgcgtgcagatttagagcttttagtaactgtacccgttgagtaaattgcaaaaaaacattataattggcgaccctaattcaaaaa

SEQ ID NO: 393 - DNA, 364 bp, Triticum aestivum
  Clone ID: LIB103-009-Q1-E1-D2
ggtccagaattcacgggtcgacggctaatatgaaatacgaaaatatggctgtcaaaattttcaagctactagagtacctcaccttacgttgagagagcgacagcttctttcagcgtctctgccgaatgaaggattttgcttgccttgagaaattgtctgcctatcacaggatcatgcataaggtctatgtgatacttagatgtatttgtcaagtgttctaaaatgctgtccttgtgcctaaattcacgtctgtcacggtcagcatcatcgcaggtctcaatggctaactacgggcatcaagcgaaaccacctgtttgaaggcatcctaagtttacttctgtgaacccttacatatgtacctgtt

SEQ ID NO: 394 - DNA, 301 bp, Triticum aestivum
  Clone ID: LIB103-009-Q1-E1-D3
cggtccagaattcacgggtcgacgggagaagggtactagggtacctagggtttatgacgtctcgttgtttttgcaagctagcatgtgactccgggatgcctgttttaagatttcgcttgtgttgaaagatattattatttactgcttgtagcctacctgagataccatcatattttgctgattatggaactacttttatcctgcttaaaacaaaagtattaaaaaaaaagtaacttaaaaatcaaatcaaatccaacaaagcaaaaaacataaaaatcacaaaaaagtaactaagggacgt

SEQ ID NO: 395 - DNA, 454 bp, Triticum aestivum
  Clone ID: LIB103-009-Q1-E1-D6
gtacaggtccagaattcccgggtcgacggggaaaacggccagcccatggacgaggagtatgaggaggagcaggttccagattactcgagagcctattctggtggattgagaccccttgcccatgtcatgatggatgatgagaccgaggatgatgatgaagatgctgaaggggacggagagggtgacgaggaagaatatgacgtgaaccatgcttccgccgatgttgatgatgagatggacgaggatgatgatataggtgatgatggggatgatggtggtgatggagttgaggtgaatgcagatgaagatgaaggcgcgacctcatactcgtcagagtacagtgaataagagcttctgtctccggtgaccatttatgcaggtagtgatactggtggacaataataagccttttgcccctttttgggggcatagtgggctagatgtggaacgggga

SEQ ID NO: 396 - DNA, 433 bp, Triticum aestivum
  Clone ID: LIB103-009-Q1-E1-D7
tcaagaattcccgggtcgacgggccataagatttacttgataggtgagtgaacaagtatggtaccaattccactattctttcatttcacattgagtgaaaagggatacatcctcaactttgggaaaatgtaacttggtattgtttatctcatttcctactcatctttgctcgagtcttgtgatggatagacaaagcacacctccttcggtctacaacaacaacgacaagttcgatgccatgaaatacaacttggacgccaaaatggatgctcaattggaggagatcaaagccctcatcaaggcctacaagcggtcttcctcatcttcgagaagacgctcaagtgcacatacttccgagctaccatctctggctagatcacattggcattaacaccaccaccgacaagaacatgaaggtcaacagctcaacagc

SEQ ID NO: 397 - DNA, 433 bp, Triticum aestivum
  unsure at all n locations
  Clone ID: LIB103-009-Q1-E1-D8
aattcccgggccgacgggctccaaaaaaagaacactgtcatgcagactccgcatagcaccggttgcagcattgagaagattagtcggtagcatcggcctacccgccacatgcaccctcctcgagatatccttagatgaaggtggcccgtcctgagcacggatcgtactcggtgccggctggctcgcacccttgttattctttcttttccatcccttcttcttctgatgtaatgggatcgagttctgctcagagaccaccctcttgagtgtgttggggctgataatatttcgcacctcggctatctgaggctcggtgaaggcggcagctggaagcatctcctgagaacgtaatgccagacgacgcctgttgcaattgggtttctccgcggtaccagctagatcgcgatcgtcttttgtanggttgggttcttga

SEQ ID NO: 398 - DNA, 401 bp, Triticum aestivum
  Clone ID: LIB103-009-Q1-E1-E1
gtgccggtccagaatttccgggtcgacggcgtctcgtaacatgcacgtatggtgaaccgttatgtaacgaagttcgagcatcagatagtttttgattgtcttccttatgagtggcggtcggggacgagcgatggtcttttcctaccaatctatgcccctaggagcatgcgtgtggtactttgtttcaatgactactagatgtttgcaataagtttgtgagttctttatgactaacgttgagtccatggattatacgcactctcagccttccaccattgcgagcctctctagtgcataactttccccggcttcgacaaccgaccatagtaccttcctcacaatagccaccatacctacctattatggcatttccatagtcagtctcagatatattgccatgc

SEQ ID NO: 399 - DNA, 455 bp, Triticum aestivum
  unsure at all n locations
  Clone ID: LIB103-009-Q1-E1-E2
ctgcagtgcggtccagaatcacgggtcgacgggaaattaatatgatggaaaatagacccgggggccataggtttcactagtggcttctctcaagatagcataagtattacggtgggtgaacaaattactgtcgagcaattgatagaattgagcatagttatgagaatatctaggtatgatcatgtatataggcatcacgtccgtgacaagtagaccgactcctgcctgcatctactactattactccacacattgaccgctatccagcatgcatctagagtattaagttcataagaacggagtaacgctttaagcaagatgacacgatgtagagggataaactcatgcaatatgatataaaccccatctttttatcctcgatggcaataatagaacacgtgtcgtttcccctattgtcactgggatcgagcaccgcangattgaacccaaagcta

SEQ ID NO: 400 - DNA, 408 bp, Triticum aestivum
  Clone ID: LIB103-009-Q1-E1-E3
attcacgggtcgacggggattttgcagatgagtacactccggtttcgcggggaaagaagggaaatgagaaggagaaaagcatttccaatagcaaggtgaaggcttctaaagtaaagaaagaagaaaccggttctgatgatgaatgcaagccaaaatctcagaagagaagtccagctgcgggcaaacccaagatttccaagattaagaaaccaaaagatgaatatgatacaaaggaggaaaagaaaataaagaaggaagttggtatcaagaaagatgaaaagaaggctgctggggtggagggggctattgtggtgaagaaggagagaaagttgtatgaattgccagggcagaaacatgatcctcctcctgaaagggatccattgaggatattttatgaatcgctctatg

SEQ ID NO: 401 - DNA, 433 bp, Triticum aestivum
  Clone ID: LIB103-009-Q1-E1-E5
aattcccgggtcgacgggttgagcaaaaacatgattagatcatgtttattgcaatatggttattcatttaagtaagagaataatgcttattctgtttacataattaacaccttctatggtcatgcacccaatatgaatggtttattgaatctcggttgtagtgatacacatgttcataacgttgatgccaaaagatgaagagttgataatgatagtaccactttcttgtggcactgccgcttaggtcatattggtgtaaagcgcatgaggaatctccatgccgatggacttttgaagtcgcttgattttgaatcgcttgacacatgcgaaccatgcctcattggcaagatgactaaaaccccattctttggaacaatggaacgggcaagtgacttgttggaaatcatacatgctggtgtgtgcttgtcctgtg

SEQ ID NO: 402 - DNA, 439 bp, Triticum aestivum
  Clone ID: LIB103-009-Q1-E1-E6
aattcccgggtcgaccttctagataagttggttattgtacgtacacagatatatggccctatcgagatgatccagatattagctattagagcacaagtggaggagattgaaattgatgaggacagtcttgcatttctaggggaggttgggcagcagacatctttgagacatgctattcagctgctgtcgcctgctagcgtagttgccaaggctaatgggagggagaagatctgcaaggctgatctcgaagaagtccgtggtctgtatttggacgcaaagtcctctgctcgtttgcttcaggaccagcaaggaagctacatcacctaaactaactcctgcacaagaattcccagctgtcggctcaagtgattggactgtcttcccctagcagatttggtaagcagccgcatagacttcatcaagtgtacaattggggcat

SEQ ID NO: 403 - DNA, 440 bp, Triticum aestivum
  Clone ID: LIB103-009-Q1-E1-E8
aattcccgggccgacggggaaaagaaactgaaaacattgaacaacaaagaggacagtcgatgctaaccgacgtaaaacacaatagccgcagagcaaaggataagacgatcgacggaggagaggaggtggagaaacaacatccggacatgaagccaggaccgacacgaggggcggcgccggatgaaacaagacagacggtgatggcgcgaggggggaggggaggaagacagaccgggggaacaaaagaaaagatacattataaaacctgaaatgtttaaggactaaagtgtaaaaggaaaaataataaacagagaaaatttggtttaggcaaataaacagagaaagttttttttttgagacaaataaacagagaaagtgaaaactttttttttgaagctaagaaactgagaactggaaacaggaaaacacgcggccgctct

SEQ ID NO: 404 - DNA, 294 bp, Triticum aestivum
  Clone ID: LIB103-009-Q1-E1-F2
gggtcgacggcgtagtggatgtggattggatagacacttgtgtcgaggtttgcatgtctcgtagcattcacgtatgatgaccgttgtgtggcaaatttgaagcatggggtgtttcgctcaatgacatccatactaatgtacgtctgcgaccaacgatagacctcttctatcaagtccatcacctaagggcatgcgtagtagtacttttcttccatggctaagaaaattttgcaattactaaacgaattctttatgacaaatatgactctatcggtaactggcatatttaccatt

SEQ ID NO: 405 - DNA, 405 bp, Triticum aestivum
  Clone ID: LIB103-009-Q1-E1-F7
cgggtcgacggggtttgccagcaggcggcgagctaagtggttaccaccacaataggcggtgccatgcatagacgcggaggagcttgtgtaggtgtgaatggggaccggaggggtggcgggcggggtgagggtttttatgatgtggggatggtgagagttttctttttttctttttgaattgggtggtgagggttttctgtcccacaaagaatttcagaggcaacaatttgctagagccaaccatgtgtggttgacgtaacaggcaaaatgaaagtcattgcacatagttccaattttgggaatcgtgtgtgattgacgtactaccttcgtcctggtttattggtcccctttgtaatttgtagcagattttgaccaaatatttaactaagagatgtttatgcatgt

SEQ ID NO: 406 - DNA, 431 bp, Triticum aestivum
  Clone ID: LIB103-009-Q1-E1-G2
ggtcgacggcgtgaatcatgtcaaggggtttggatgcaccggtgtagtttgcaccacatctcgaggtgagaaaggacaatgcacggtaccatagaggctagcaaattgcggaaagaggtaagaatgcgtataatccatggactcacattagtcataaagaactcatatacttattgcaaaagtttattagccctcgaagcaaagtactactacgcatgcccctagggggatagattggtaggaaaagaccatcactcatccccgaccgccactcataaggaagacaatcaataataaatcatgctccaacttcttagcataacgagagactatacttgcatgcttcgggaatcacaaaccttaacacaaatattcttactaaccacaatcattcactagtacctcccacatattatcatctctatatcgcg

SEQ ID NO: 407 - DNA, 307 bp, Triticum aestivum
  Clone ID: LIB103-009-Q1-E1-G3
gggtcgacggccaggtgacatgtgatctgctgaataatgaagttttgttctttttctgaggaagagagataagttagtgtcagggtgagttctttgcttgtagtaggaagtaaggtctgttcttgcagagcttgaagctggttgaatagatgaaagctgagctcctagtgttagcaaggaatgttttggcaaggctttgtgtcagagtcaatttgtttccatgtaacactttgttgttcaatcggttaccttaagtgggaatggattattgtgtcaagaaagtggtgaagagaatattgggtaccca

SEQ ID NO: 408 - DNA, 385 bp, Triticum aestivum
  Clone ID: LIB103-009-Q1-E1-G4
ttcccgggccgaaggagggcaaggagcccaagtctcccaagaaggccgccaagtcccccaagaaggccaccaaggcttagaaacacgcatatgttgctgtaggctgtttaatgcttcgtaactgtggtcgttgttctgctaatggtgtcgatgtaatctttgttgctaagagaaatgtcagaaatctctctgattaaaaaaaaaaaaaaaaaaaaaaaaaaaaaaaaaaaaaaaaaaaaaaaaaaaaaaaaaaaaaaaaaaaaaaaaaaaaaagaaaaaaaaaaaaaaaaaaaaaaaaaaaaaaggggccgctcaaaaggttcaaaccttacttacccttgaatgcaatttcaaaccccttcaaaagggtcaccaaaattcaatt

SEQ ID NO: 409 - DNA, 356 bp, Triticum aestivum
  Clone ID: LIB103-009-Q1-E1-G5
aattcccgggtcgacggggagatgcaaccgcttcacttctcccagatagatgaaaggttcgcccatggctccatcacagcccaactctggcctcttcgggggcatcaacatcggctcacgtcggcaccatagcgcgagctgccgccgcgcccgtccgaccgcatagcgaaaggtaccaaaacggtgcatttcgtcatgaacttgatcaggtaggtatctgggattgctccgtatgataatcctatcactgatcttctcaacgttggcaatgacaatcctgccctgacagtggcgaagcgattattgggtaaccacaagatggcgatcaagaagagataggagatgatcagtgtcct

SEQ ID NO: 410 - DNA, 435 bp, Triticum aestivum
  Clone ID: LIB103-009-Q1-E1-G7
attcccgggtcgacggggggctcttatcctactcaggggtgtctgcagatgatcaacacggcgatatccgcggccatggaggcgtggatgtgcgccacagtgcgcccctagggaaggcctcaaggtgggctggcccatgtactgtatcactctcagcccatgcgcccagtaggatttagtattttcacttttcttttctattttcttttctagcctctgttttgcgtttagttggggtactaaatgaatttttccaggggtggaacttggcacataattccattgcagtattttggtgttgtacaaaaagtctcagagcatttggagttgtataagcattttcaaaaattgaaattgttggttaaaatggttgctgatccactgtttaatttttaagggcactttaacaacttaaataatgttgggttcttcata

SEQ ID NO: 411 - DNA, 421 bp, Triticum aestivum
  Clone ID: LIB103-009-Q1-E1-H1
cggtccagaattcacgggtcgacggggacgacgtggagtccagcgcggggcccgagagcgaccaccccgacgccctatagcgcttgctgcgcttcgccttgagcgggactacggcttcaccaaactcacggccttcagccacgcctcgcttctcttcgagtacaagatgaccagtgatggcgaagtgtatgacaacttcaccatccacagggactaccgcgacgtgctcggctgcgtgcacgacagttgcttccccaccacactcgctacgtgactgtcgagccgccatggagccaaccagcggctaataaagggagttggccctgtattttcatgtagtttcatggtgtgcgcatgttgtggtctctgttcttcgcagtctgttgcgctagactgtggaggttttctgtcactgttgctg

SEQ ID NO: 412 - DNA, 439 bp, Triticum aestivum
  Clone ID: LIB103-010-Q1-E1-A2
gggtcgacgggacacatcaaaagtactccagtgtatagagccttgcctccttgcctctaaggtaggccccacatggtttgcctccttttttaatttaacataacgcgtcaagtcacaatttgtttgttcacccgtggtagacaatcctccctccaccaagtggacaaccagtacacgtgcgaaattaccacgtgggctgcctttttcgtacagaaatgagctccaccgtgtacacgcgcgggtgtggttgggaaagaaacgggtgtacgtgtgccgtgcgtgcacctcttctcttcgtgcacgtcccccatctacgtgggtgtgtgtgagagagatacaaacctagacataatgcgccgtccatccccatgcctccgcccagtccgaccaccagtcaccaccacgccccactcctcctcaccttatctctcatctttct

SEQ ID NO: 413 - DNA, 456 bp, Triticum aestivum
  Clone ID: LIB103-010-Q1-E1-A6
gtaccggacttacattcccgggtcgacggggtgtgatgatctaactgtggaaattgagcatgtggatgctgtggcacttgagaagcttgaaaaacagggtgttgtttgtgaacccaaagcctctaccatcgcgattattcaggacaagtacaggcagaaaggccatttctcaaaatttggaattccgatagctgactttgttgaagttgatactttaagtagcatagagaatgctggggaaatgtttggctatcccttaatggttaaaagcaaaagattggcatatgatggtcgtgggaatgctgttgcccaaaataaagaagagctatcctccggtgtttcttcactgggtggattttagcatggcctgtatgttgagcggtggacaccttttgcgaaggagctatctgtaattgtggcaaggagcagagatggttgtacagtctgttatcctgt

SEQ ID NO: 414 - DNA, 358 bp, Triticum aestivum
  Clone ID: LIB103-010-Q1-E1-A9
gggtcgacggagagcgatatataacttgccaaatttcgattcccagactccagatctagcctcatggtttgttctgctgctcctgaaatcgatggcggtccgcctctccgacatcctcctccacggagagccgcccaagcaacgtgatgcattttcttctcccatgaacgcttcaccaagtagcagcacatggagttggtcgcattaagaggaggagcaagattgggatgactcgggcgactatttcctcccctgatctctaatgtctagggcccagatacgcggttgttcatcccacatcttgatgccatttgctttcctgcgaatcttcaagtgtcactgttagattttgatgggt

SEQ ID NO: 415 - DNA, 462 bp, Triticum aestivum
  Clone ID: LIB103-010-Q1-E1-B12
ttcgcgggtcgacccacgcgtccacccacgcgtccgcccacgcgtccgctcgtcaggagtcctcttaccccttcgtatcttttgaacgattatccgtataatagtaaaatttcgagagaggaaataaacggacatatgcttctcaactactcataacaggtgacataatattgacagatgacgttacacagccactttgacgataattttaaacgggattttgtgccaagtgatatctcgtttgagaggtgttgaggatacctatgcaattatactaattttgtttgggtttgagttgattttgatgagtaaatgaaataaatactaaaattttagtttcgcatttgaatctttattaatcggatgcgaaactgtaattttaatatttatttaattaattcatcgaatcaacataaacccatacaaaactacactcaccgggagaaaattcctccaccaaaa

SEQ ID NO: 416 - DNA, 463 bp, Triticum aestivum
  unsure at all n locations
  Clone ID: LIB103-010-Q1-E1-B2
acggtcctaaaatcncgggtcgaccggcagatgcaataaactggcgaatgaagaaatcctgagtattgaagcttttgccattgagaatgtggaagaccaatgtcttcattgcaccgtcgagctttgctgatgaggaatgccctttgatgggcactagagttcgccttatgatatgatagatggtgcggggtagatactctaggtcttcaacaaagaattcctttggatattcagcgtcacgtggcagtggcttcatcatgctcagtatttggctcatgttgagctcagccttctgaaagatgctttccacaacatcgcggtgaagctgacaaccaggttcgtacagttcgcctggagtggatatgccggtaagctcaatgagatcaaaggctttggcttcatgatgaacattgcctgtgatccactcaaggacccatgtcgttgtatccctattgtagccgcg

SEQ ID NO: 417 - DNA, 336 bp, Triticum aestivum
  Clone ID: LIB103-010-Q1-E1-B7
tcgcgggtcgacgggttcaagcaataccgctgccacaccatcaagaactgcacgcatgcctgccccaagggactgaacccggcgaagcagatcgacacaataaagaagctgcagctcggagcctgagtgaggtctaccaccccgtggagatgtggaaaattgtaatcagcctggcatttggtttgttttggctccgtggtgacaaataatgggtggaaacgctggatattcctagcttgacgattccgtgtagttcgtgaataattgctaccagattttattcttttcgtgctgtatctagtttggtggttctccgttgatcatcttttgaaaaac

SEQ ID NO: 418 - DNA, 442 bp, Triticum aestivum
  Clone ID: LIB103-010-Q1-E1-B8
attcgcgggtcgacttccacccaagagatatccatcatctcatcgaaagatgggacagctttgcctctatcaagtggtatcagatttccaggttgctcggtgagattttacagtttttcgtagtttagatcgagtctgttcttcatacctatagtccacgaaaaagccaaaataaaattagggttagttcatcccatccgaaccaatctgagccttgcataatcttttctgtatttgctttgtcgaatttgcggttgcatcgtcgtgtccagttgctggtcttagcgtctagtcttttagagtttcgagttctgttcacaggttgtcacgtcgccgctaccatataccaccaccacatattcaccgccaatccgaatccatatacgccaccacatatccgccgccatcacgccaatccgagttcacctgcaacatatatccg

SEQ ID NO: 419 - DNA, 426 bp, Triticum aestivum
  Clone ID: LIB103-010-Q1-E1-C2
gggtcgaccggtgcatcggaggataagtcgcgttgcggtggaagagaaggtcgcctgagcggccccggcatagaggacgacggctctgatgaagcatgagtacatgatgcaatgctattggtccgtcggcgtaggtgatagacgtcgatctctatcagtggacgacgcgagtcttggtaggtgctcccgtatgctggaagacagtggtcatggatgtagtataagactgttgctatcggtgatgtgtctagtgaaggctggtgtcaccatcgagtgttctaacactgactgtgtacgaatgggaaaatggacggagatgtctggggaaccatgtttttgggacgccactgtcagagatatgggaaagttacgaacttatacgccgtctataatttgggcatcacgtcggttgtggctcgcatcatg

SEQ ID NO: 420 - DNA, 431 bp, Triticum aestivum
  Clone ID: LIB103-010-Q1-E1-C6
gtaccggacaagaattcgcgcggtcgacgggatggcgaaggggtggcctgagaagctgaagcatgagctgcacgagcacgagctcttgctgatccgccgccccaggccgtacggctgcgacgggtgcgaagagatgggcacctcctggtcctacaactgcgcggagtgtgacttcgatctgcacaccaagtgcgcgctgggtgaggagaagaagggagaggaggtgaaggggcaggaggatgctgctgccccagctgggtacgtgtgcgagggagacgtctgcaggaaggcctaggtagcgttgtgttgtgtgtgttcctttccagctgaagcgtgtctgaatcatgtgctgtgtggtgtgatgataaataaatcttgcatccgatggtttggcttgggaagtagtatttgtcgtggtgacattcatgtgc

SEQ ID NO: 421 - DNA, 423 bp, Triticum aestivum
  Clone ID: LIB103-010-Q1-E1-C7
attcgcgggtcgacgtaccataggcatgtcgcctccaatgggcgggcgacatctggcccactgacgagctgacaggtgttcccttcagccaatcataattttacacgtggaaattccccattggtcggggctgttaacgggttatcggatccaaaatcctacacgatagcttaacggcattcctttacggtggatgcctcgtgttggtcacccttgacgaaagcacttctatgacgcgcgatttatcatcatggaagtggacacttccgtgatgataattttggtaatgccatggatcacttctacgacagcacaggtatgactatcttgattctatcataaatttgtcatggatgtacatgcatgataaaaaacgcgacctactccgacaaacacgtatcatcacggaagtgtacttttttg

SEQ ID NO: 422 - DNA, 438 bp, Triticum aestivum
  unsure at all n locations
  Clone ID: LIB103-010-Q1-E1-C8
taccggaccagaattcgcgggtcgacggggatagggagccttgatgcatacagttgtccctctataaccgtttccgataactcgaatatcgcaaacgcttcatccttgctactcatttgtgctcgcattgccatcgcagtcagagttttctggttctgcctaaaaccaggcagattctaggcacgggagctttccaggcagattctaggcagattccaggcatggaagatttacgatgtctggcacatcacaaacagttcatgattataaaccgtatacgataggtagacaatcacacacatttagttttcccgcaccgtatgtgatagtgtctgacatcacacacgctttgcgaacggcaactgtgtgcatgcttgcacacgtttcctctctgtgaaccgtctcggattatgggtgtatacgcanaaattttgtgtt

SEQ ID NO: 423 - DNA, 352 bp, Triticum aestivum
  Clone ID: LIB103-010-Q1-E1-C9
cctatagtgagtcgtattaagcgtccgctcgtcaggagtcctcttaccccttcgtatcttttggacgaatatccgtataataataggatttcgagagaggaaatacacgggcatatgcttcgcaactactcataacaggtgatatactactgacagatcacgtaacatagccactttgtcgatgattttaatccggattttgtgccaagtgatatctcgtttgataggtgttgaggatatctatgcaattataccaattttgtttggatgtgaattgagtttcatgactcaatgacatacatactagaattttagtttcgcactttgaaccttattaacccgggtgcgaaac

SEQ ID NO: 424 - DNA, 437 bp, Triticum aestivum
  Clone ID: LIB103-010-Q1-E1-D1
cggtccatactaccgggactgtcgaagagctatatctactccagcatcggtgaggagctcgcccacttcccgtcgcccccggctctccaatcgcagttctggctgtggttggtgacgtggcacctgggtctgttcatcgcgctcaccttcggccagatcgggttcaagggcaggaccgaggactacttccagaagtagcgaattaactagctttggttcgtgcatgtgcgtcgtccttgggctgctcaagggctgcttctgcgcatgcgtgttcaatgtaaaatctgccatgccttttggttttgtgcatgcgtgtggcttcgcaagccgtgtgattgctgtttgttaattacctcttccatggtaagcacaaaagagttcaacaaaaggacagcggcagctaggaaaaaaaaagcggccgctctagaggatccaag

SEQ ID NO: 425 - DNA, 364 bp, Triticum aestivum
  Clone ID: LIB103-010-Q1-E1-D9
ctcgcgggtcgatacacgcctctacacagagtcgaataatgttttattagttttgttcgctgcttgtttgtcacaagccaaaataaatcaagatatacatttcgattgggtgcagtataccggagaaataccagagaatgctataataggcggatcaactgctgatggtgatccaacgtatgtagcccgttcgttcctcagtgcagatgaagatgatgaaaattactctggaagtgactacaatggttatgtagctggtggtgtgttacctggaaaattgtcgatcgacctttgtactccgcagagtatatacacgctcacaaagaacattgagatactgactgtggtcaatgggacaaaaatc

SEQ ID NO: 426 - DNA, 450 bp, Triticum aestivum
  Clone ID: LIB103-010-Q1-E1-E6
actcgcgggtcgacgggattgaggaataaaaagaatcctactctccgatatatataatcctaagactcaaaaacattttgttctagactcaacaacgtcagcgattcgatcaagtagggggctcctaagtcagggatagctgtgataccaacttgtaacgcccacaatgcggctatatctcccatgtgtcggggcacagcttagaggcatagccacatggtagttttgtcgcaagaggggtaatattcacacaatcccatgtcctgaataagaaagggataaagagttggcttacaatcgccacttcacacaaatacaagttaaacatccatcatccagaatacaatcaagttccgactacggatccaaagtaaaagaagacaaccccaaatgctagattcctgatcgtcccaactgggctccactactgatcatcgggaaaagaaacat

SEQ ID NO: 427 - DNA, 445 bp, Triticum aestivum
  unsure at all n locations
  Clone ID: LIB103-010-Q1-E1-E8
taccggaccagaattcccgggtcgacgggtactatttaaatagtacaaaacatttttaattacatcaatatttgttttacgttctataccatttttctaaaatgtcgcgtacattattttggaacacatgcacatttcttaatgtcatgatttttttggactgctaccaacatcatttataaattacacctttttttacactgttaaaaattcatgacgttttttaaagaagtaagtaaattattttttgtaatatatttatttataatattttcaaaagtaaaaaaataaagaggccaaaagttactggtgcatgtgtacctgcatgatcatgggcgcccatttanggcatccttgaggtgagacgtgctattgttactgttttttgagataccttaccaggcttgatgccgggagcacctatgtgccgcttactgcagaaatc

SEQ ID NO: 428 - DNA, 439 bp, Triticum aestivum
  Clone ID: LIB103-010-Q1-E1-F5
ttcgcgggtcgacggggccatcggagccttcgtctccggcgccaccgtttatggctacagaggaaagagcattaagtctgccctcatcggtggttctagcctggcattcacatctgccatcctggacgttggtggtaatactaccagagtggacaatggaaaagcgtaccatgcatacacaacggaaaagaagcccgagcctgcgcattgaccaaggttgtctacttgtagcacaaatcatgcaaaccagctcggtgaatttttgagctgatgcgtgctgttatgtctgttttgctgatgcacctagttcctttgcaaagctgtagtaacttgttttgctcgagggcaatacaacagacctggaataaatatcttgctttattttgcttcatcgttggttatgataataatcacaatgtgacacaatattgtttaccca

SEQ ID NO: 429 - DNA, 186 bp, Triticum aestivum
  Clone ID: LIB103-010-Q1-E1-F7
gtaccggacgagaattcccgggtcgacgggaaggagatgatgactaagcttggctaagataaatgcgcctttgtgaattgaaaactgtaagcgtagtttaaactgcggccgctcgaaaggatccagagcttacgtacacgtgcatacgacgtcagacctcttctatactgtcaggtaacttgatgt

SEQ ID NO: 430 - DNA, 443 bp, Triticum aestivum
  unsure at all n locations
  Clone ID: LIB103-010-Q1-E1-F8
gtcgacgggaaatatttatcaaagcaaatttcaagcaaagggaatgataaaaccatttgcaaaaagaggctattgatccgatcaaatggcgttaccatggtcggacacgaccaagcccccgataggcgtagctatggttcaagtcagccaggtccccaaatgaaacaatggcattatgccgatcaaaaggcgtgacaatggttcgggttcgaccaagcccccaagtgattctgtggccttaggccgatcaagaggcgtgactatggttcagacgtgaccacaagtccccaagtgatgcattggcattacgccgatcaagaggtgtagcaatggttcgggttcgaccanagcccccaagtgatgctgtggcactaagccgatcaagaagtgtgactatggttcagacgtgaccacaagtccccaagtgatgttgtggctttccg

SEQ ID NO: 431 - DNA, 438 bp, Triticum aestivum
  Clone ID: LIB103-010-Q1-E1-G5
taccggacctaaattcgcgggtcgacggggtaggttgatgaagggatggcgaagcccctggtccagacgaggtgacggagcaggtcggtaaggagacgttgcaacttccatgtcagtcgaggtgttgaagtagttcggcgtgatggacatcggctcgaagaagcaatggtgcggccatgccgatgcaggtcacaactcgtgacgtggtcaatgccggcttgatgaagtgaccgtgcggcgatgccgatgtgcccgctccgtgtaatccgtggggcggcgaggttggtgatgatttatccttcgcgatgctaaaatcttgtttggcttgccgggatgatgatccgaagaagttgagctcggctcaacaaagcgacgatgtgtctagcgcaggtcggcagccgtggagcaacgttgtcgagctggtttgacaccggcgcg

SEQ ID NO: 432 - DNA, 348 bp, Triticum aestivum
  Clone ID: LIB103-010-Q1-E1-H11
acaacaccctatactgagtcgtattaaacatatccaattcaaagttctagcttacaactatacaaatttggaggaataaaagatccgccacaagattatggatttactataagagcagggaagacagactatcaaattcaagtaaaagttaccgatacttctcaagtttcgacagaggaaagcagaaacattacaacttactttcaaacaaataccgttgaagtgaatggaataaacggctggggtatatctaaatggttataccaaaatattgaataaccaacactcacattagaagcaaaacataggcaattttactattaaggaattgaataaaaaaattacttg

SEQ ID NO: 433 - DNA, 327 bp, Triticum aestivum
  Clone ID: LIB103-010-Q1-E1-H4
ttcgcgggtcgacggggctaagttaccaagggagtaatagggaagctctaccgggaaattaagaagcagaaccctcacattggccacttcacaaaggatgtggcaaggcggtcctatgacactgatttgatagttgatggctaccaagactacattaccgaagctgtgtggttcaaggaacagtatgacttcaagctgggtaatctgatggagcactacggaataaatagcgaggctgagataataagtggatgcattcttaagatggcaaataattttaccaagaagaacgacgccgatgctatcaagctggcggtgaaatctttg

SEQ ID NO: 434 - DNA, 441 bp, Triticum aestivum
  Clone ID: LIB103-010-Q1-E1-H5
taccggaccgagaattcccgggtcgactgtccggacgcagaggccctagcagctttcaaacatagcatccgagacgaatggctcgccagacacctcggccaagaaaagccaagaacaatggccgcattaacaagcctcacgacccgcttttacgcaggagaggatagttggttggcaagaagcagcaccagcgacccgagcacatccgaactcagagatggaaatgggaaaccgcgccgtaacaaagaacaacgccggatcaaggataatagcttgatgagcacggcagtcaatgccggattcaaaagctctcggcaaaatcagaaaaaactgccacccaaagatgacagggacgagctgtctaacctcaacaaaatcctggacaagatatgtaaaatccacagtacccccgaggacctgcaaaccatacccacagagatt

SEQ ID NO: 435 - DNA, 356 bp, Triticum aestivum
  Clone ID: LIB103-010-Q1-E1-H6
attcgcgggtcgacgggggggaagaacccaaggcggagaagcgggcgccggcgaccaaggaggccggcggcgaggggaagacgaggggcaggaagaagggcagcaaggccaagaagggcgtggagacgtacaagatctacatcttcaaggtgctcaagcaggtgcacccggacatcggcatctcctccaaggccatgtccatcatgaactccttcatcaacgacatcttcgagaagctcgccggggagtccgccaagctcgcccgctacaacaagaagcccaccatcacgtcccgggagattcagacctccgtccgcctcgtcctccccggcgagctcgccaagcacgccgtctct

SEQ ID NO: 436 - DNA, 434 bp, Triticum aestivum
  Clone ID: LIB103-010-Q1-E1-H7
taccggaccagaattcgcgggtcgacgggattggataaactcttgatgatcttaagggcattagtcccactctatgtaagcacaagatcaaattggagaaatatgctaaaccggttgttgatcaccaacgacggttaaatcctaagatgaaagaagtggtaagaaaagaaatactaaagcttccggaggtaggtataatttatcccgttgatgatagtcagtaggtaagtcctgtccattgtgtccctaagaagggaggtattactgttgttcctaatgataaagatgaattgatcccacaaagaattattaccggttatagaatggtaattgatttccgcaaattaaataaagctactaaaaaggaacattaccctttaccttttattgatcaaatgctagaaagattatccaaacatacacatttttgcttt

SEQ ID NO: 437 - DNA, 426 bp, Triticum aestivum
  Clone ID: LIB103-011-Q1-E1-A2
ccggtcctaaattaccgggtcgacgggacggtggcattaaagttgtcttgatgggagaattatcccttgacgtacgagcggataaaatatgctgccctcgatgcccgtgtgagtttcgagaaagctgcaaggtccaaagagcttgctgcgaagccgtctcgcacagagaatgagaacaagaagaagaagaagaagaagaagaagaaaacgctgcaccagcaggagggcattatggatggatgaactatttcctctcttgtaaaaaaaattattccctctcggtgtatattgatatagatggactatttcgatggtgtgcatgtctttggaacagagtagtagcgtgggtcctcttgactataagaaactacttatccacatatatagctttctctgctactccttccagtgatcggtatgcagtgc

SEQ ID NO: 438 - DNA, 388 bp, Triticum aestivum
  Clone ID: LIB103-011-Q1-E1-A3
ggtaaaggtccagaattcgcgggtcgacttgttgctcaagagatgttacacaaggataaagaggaacttcgcaacaaatcaagtggtgcttacaaagcctcatgtgaagcccccacatcatcgagtgagaaacaaaccttcaatgaagaattgatcttaatggtgaagaactttaacaagttctacaagagtagaagcaaagagagaagctccaagtcaaaggcctacaatgacagaagatcttctactccacagtgaaactgctacaattgtggaaggcccggacactaatccaatgactgtaccgacccctagaagataatagaagaatctcccatgagatgaattatcatagatgaatcaccatctatagaaagaaagagtacag

SEQ ID NO: 439 - DNA, 340 bp, Triticum aestivum
  Clone ID: LIB103-011-Q1-E1-A4
acgctgccagtgacggtcctaaattcacgggtcgacggggatacttaacacgatggtgctccatagcctgatgatattagcactacagaacacgggaggctttgcagcacgcatgatcttgccagttcgacgcgctgagcacgactcagtccttgttacccttgggatctacggctgggcacatcaacactctcaacggtgggcatttcagtggcagactttctacacatcggtgtggtaatagccagacggtatcatgctactcgccttgaagaaggttgccctttcgccaactgtctgatcaccgacgaggggcggaccgatagcacgatcacaatga

SEQ ID NO: 440 - DNA, 404 bp, Triticum aestivum
  Clone ID: LIB103-011-Q1-E1-A5
tcccgggtcgacttcgatcaaagcgatattcatcatcgcatcgaaagacgggacacctttgcctctatcaagtggtatcagatttccaggttgctcggtgagattttacagtttttcgtagtttagatcgagtctgttcttcagacctagagtccatgaatgaaagccacagaataagatacggttagttcatcatatccgaatcaatctgagcctttgcataatctttttagggtttttgctttgttgaatttgcggttgcatcgtcgtgtcaagttgctggtcttagagtctagtcttttagagtttcgagttctggtcagaagttgtcacgccgccgccgcaccagcatcatcgccttgccatctaacaccattgcttatccgccaccgctttgaatccgt

SEQ ID NO: 441 - DNA, 427 bp, Triticum aestivum
  Clone ID: LIB103-011-Q1-E1-A6
attcccgggtcgacggggaactactagtgagaccgaagtctctctgcaaaaacataaaatatgcaaacgtgagtacaaatgtacccagcaagacttacatcagaactaactacatatgcatcattatcaacaaaggggatggtggggtttaactgcagcaagccagctttgactcggtggctatcctaaactacgactgcaatgtaactcttttgaggtggcgcacacgagtccacatattcaccatatcaatacaccactatggaaccgctcccgtctccctacgagaacgccatccatagcactcatgcttatcttgcgtattttagagtatccactttcacttgtctatgaactgatataagcaacccagaagtcctttaccgcggacactgctattcgaatagatgatgttaaccctgcaagg

SEQ ID NO: 442 - DNA, 430 bp, Triticum aestivum
  Clone ID: LIB103-011-Q1-E1-A8
attcccgggtcgacgggtgtgtggccacccttactgcccctacaagttctaccacatccggtgcctgaggacgagccagatcgcgctggagaagcagaagaatctggagtgctggtactgcccctcctgcctctgcaggggctgcttcaagaacaaggacgacgaggagatcaccctgtgcgacggctgcgacgaggcctaccacgtgtactgcatgacgcccaagcgcacctgcgtccccaagggccactggtactgcccgctgtgcagcgtgcggcgggcaagggaggggatgcagaggtacgagaagtcgatcctgaagaaacaacaacatataagcgccaagcgtgcgagccagtcggacgacgcttagcctagttgatgatgctattgcttggccaagaagggagtaataagcagagcaacgttt

SEQ ID NO: 443 - DNA, 444 bp, Triticum aestivum
  Clone ID: LIB103-011-Q1-E1-A9
tacggtcctaaattcacgggtcgacgggaagtttgcactgcttctttcaggtgtgttagaataactatgagttagtgctgctcctcacatgagttgtaacgttgagcaattagagcttagtgctagaatatagaaggtctagagttctctctttattatccatgatcatgtgtttgtaactgctactgtaactcaacctgggtgttctgtatataaagagaagacagccggtgaggttcatcacggcttaacacagcaatacttctgtttacatggtatcagacgccatctgaccaatgtcaacctcttcctcctctctcatggcttccgtgccggcggctaccaccgtcgtcaccgtgcgtctctctcgcgacaaccatctcatgtggaaggcacagttcctcgcattcctgcgcacctacaatctccttggcatcgcatctg

SEQ ID NO: 444 - DNA, 424 bp, Triticum aestivum
  Clone ID: LIB103-011-Q1-E1-B12
gggtcgacgggccagtcgtaaacatgcattaaaattaatttacaccgaatacaagcatgagtagaatataatctaccatgaacataaatatcgtaaaggctacgttgatttgatttaactacatgcgtgaacatgtgccaagtctagccactcaattcatttaaaggaggataccatcccatcataccacatcataatcattctaatagcatgttggcacgcaaggtaaaccattataactcatagctaatcaagcatggcacaagcaactataatctctaaatgtcattacaaatatgcttacttcataatagctgactcaggaacgatggatcatcatatttacaaaaacaagagaggtcgagttcataccagcttttctcatcccaataagtccatcatatatcatcattattgcctttca

SEQ ID NO: 445 - DNA, 409 bp, Triticum aestivum
  Clone ID: LIB103-011-Q1-E1-B2
gggtcgacggggatgttctagctggcatgaagcaaggggatctaatcatttggtatgttgagcagcagaatgcccaaggtgcatatagttctacagaagaggtgaaggaggaagtaaagtgcatcaaagccattatagagaggctgatacagagggaaggccatcttgtagtcatagacgaaggaacagcggcagcagaaggtgctgcagcaagggcatcggagcacagaatcctggctgttaacccgaactacgtcattgattgattaaccagctgaggacacagctaactagatccatcatatgtggttgaccaatagagcagacattcaaacggaagacatcctgttgtcatatgctctacaaatgatatgttgtacctgccatccccttcccaaggagagcatag

SEQ ID NO: 446 - DNA, 359 bp, Triticum aestivum
  Clone ID: LIB103-011-Q1-E1-B5
attcccgggtcgacggggtagtcacaatcatgcttatccgcaatatgcaaactggtcaatcaatgggatatagatttgcaaacatcattacccatacctcaacagacacatctcttcaaaattttaacgggcatgtgaatctcacaactgatccaacccttatcatttactggacgacctaaaccaagcagtgcacatcatcatcagtcgtctctcatgacgcaactcttggtggccatttaactgcagatgttactcatcatatgataatcgagctttttgccaacatgtcactctccgtaaacggacctcatattaacagtcacacgaacacaggctgttcaaagggccatggactt

SEQ ID NO: 447 - DNA, 416 bp, Triticum aestivum
  Clone ID: LIB103-011-Q1-E1-B6
attcccgggtcgacgggacggtagacgggtgcatcggcggataagtcccgttgcagtagtagagaaggtcatgtgagcggccccgacaaagaggacgacggcaccgatgaagcaagaggacgcgatgcaaggctattagtctgtcgccgtggatgagaaacgtccatctctagcagtggacgaagcggtcttggtaggcgctccggcatggtggaggatggtggcgttggatgtggtggaggacggcggcgatggatggggtggaggacgacgatgatggatggggtggccgacggaggctggtgtggggatggtgttcttgcgcggacagtgtatgaatgggaaaatggagggagaggtatagggaacaacgtttttgggatgcgcctctctgaaatatgggaaagttacgaact

SEQ ID NO: 448 - DNA, 424 bp, Triticum aestivum
  Clone ID: LIB103-011-Q1-E1-B7
attcccgggtcgacgggggaggtcaccaagtacaaggttggcgctcctgctcgtgttgggctagttgcacctgttgatgtggtggttccccctggcaacactggtctggatccctcccagacgtccttcttccaggtgcttaacattcccaccaagattaacaagggtactgtggaaattactatcccagtggagctgatcaagaagggtgacaaggtgggctcctctgagtctgccctgcttgccaagcttggtatccgccccttctcatatggactggtcatctgcaatgtctatgacagtgggtctgtcttcagccctgaggttcttgaccttactgaggaagacctgatggacaagtttgcttctggtgtttccatggttgcctcactgtccctggcgatctcataccccaacatggctg

SEQ ID NO: 449 - DNA, 430 bp, Triticum aestivum
  Clone ID: LIB103-011-Q1-E1-B8
attcccgggtcgacgggtcacatagatgcataattattcaactactcattgatcttcacttatatctttcggagtagtttgtcatttgctctagtgcttcacttatatcttttagagcacggcggtggttttattttgaagaaatagatgaactctcatgcttcacttatatcatttttagagtcctttagaacagcatggtaatttgctttggctataaaattagtcctaatatgataggcatccaagatggaaataataaaaactttcatataagtgcattgaatactaagagaagtttgatacttgatgattgttgagatatggagatagtgatattaaagttgtgctagttgagtagttgtgaatttgagaaatacttgtgttgaagtttgcaagtcccgtaacatgcacgtatggtaaacgttgg

SEQ ID NO: 450 - DNA, 426 bp, Triticum aestivum
  Clone ID: LIB103-011-Q1-E1-C12
cgctgccagtgccggtccagaattaccgggtcgacgggggctgcaggcgcgtcttcgaggtcgccgtcgagctgtccaggaacatgggctgcagcttcatctcccccgagcacctcgccatcgcgctcttcacgctcgacgatcccaccaccaacaatctcctcagaagcttgggagcggatccgagtcagctagcgtcagttgcagtcacccgactccatgaagagcttgcaaaagatggcagagatctcgcaggagcatcttctctcaaagtgcccgagaaagcacccgctggagctggagctggaagatctgccttcagcaaatccttaagcaaaaagaaagataaaggcgcgctagatcagttttgtctagatttgaccacacaagccagtggagggtttattgaccccattattggccgcg

SEQ ID NO: 451 - DNA, 394 bp, Triticum aestivum
  Clone ID: LIB103-011-Q1-E1-C2
ggtcctaaattaccgggtcgacgggaaaatgttaatagagcatttgagaaatgctaaaaatgtgtatagaaaaaatgttgaccttgtactaaaaatatttaattttgtattgaaaaaatattaaacatgtattagataaatatcattgccatataaaatatatatatatagaaaaccaaaaaaaaaaaaaaaaaaaaaaaaaaaaaaaaaaaaaaaaaaaaaaaaaaaaaaaaaaaaaaaaaaaaaaaaggacaacaaaaaaaaaaaaaaaaaaaaaaaaacggggcccccaaaaggttcaaaccttacttacccttgaatggaagttaaaacccctccaaaagtttcaccaaatttcatttaacggggcgtcttttaaaaactccgtaacggg

SEQ ID NO: 452 - DNA, 405 bp, Triticum aestivum
  Clone ID: LIB103-011-Q1-E1-C4
gggtcgacggggggcgtaaaaaaagttgtactattggcggaagaaatcttcagggcggtgctgggatggagagccgttcacaggactgcggcgacgtgatcttctgaagtttcttcacactggtgaaagcctttgggagatttattctgtcatcgatctatacatgtagctcctgtcttatttctccagtctgaactgttgggggttatgctactagttatcgtttgttctgaacttgatgttctggttgtttttgcttgagtcgtcctggagagcccggcttgtgagatttctcagggctgtgctgggtggttgcgttttgcgtttgtgaaacctagtcagtttcttagattgggtaaaaatctgcacttcaaaggagggaggctgtgggatttgctctttttc

SEQ ID NO: 453 - DNA, 199 bp, Triticum aestivum
  Clone ID: LIB103-011-Q1-E1-C7
gcgtatgacattactacaccctaaagtgagtcgtattaacttcatcggaggggctatggtgatgatgtataagccctccgtgattgatgccccctccggctgagctccggatcacgccacacgatgggatctcctgagtacacaacgttgcggcggtgaaagtacgtttttggcctcgtatctgatcgtttgggggtac

SEQ ID NO: 454 - DNA, 409 bp, Triticum aestivum
  Clone ID: LIB103-011-Q1-E1-D10
attcacgggtcgacggctgatgaagaccacactacacatgaacaacttgaggtgtatatgcagacccacagtctcgttagggatgattccttgtagcagcttcatgttgctgtcataaaagccatcacagcacatgtctgccatatagtgcttcatgaccccttgggtagtaatgcagaccagcgtcttcgtgccaaatgactgagatctttacggaaaactttctatggtgttaaactcaccattggcgatggggaagggtctcacatgaagaatatagataacatcgatgacactgccggtagctcccctgattcgtcatcaaaacgggagtcatcattcactcccattcctaaccctcctcttacccagagtctatatttggacgctccccactttggcggcacct

SEQ ID NO: 455 - DNA, 266 bp, Triticum aestivum
  Clone ID: LIB103-011-Q1-E1-D2
gggtcgacgggaacgagcaaatctgagcatgggtgtcggtgtcaacaccagttgatctcgggtagggggtcgctaactatgcgtctatgacggatggtaacatgaggcaagggacatgaacttttacccatattcgggccctctcgatggagggtaaattcaatacaaaatatatcctaagttcagcggccgctctagaagatgcaagcttaagtacccctgtatacataatcatatctcttccacattgacacctaaattcaatt

SEQ ID NO: 456 - DNA, 72 bp, Triticum aestivum
  Clone ID: LIB103-011-Q1-E1-D6
cgcgtattacattactacaccctaaagtgagtcgtattatagctcttctcggtgatgaagcaggtgcagtcc

SEQ ID NO: 457 - DNA, 465 bp, Triticum aestivum
  Clone ID: LIB103-011-Q1-E1-D7
gtacaggtccagaattcccgggtcgacgggccatttatctacaacaacatagacatgcaaaatactattaggtactaagttcatgataaagtaaagttcaattaatcatattacttaagaactcccacttagatagacatctctctagtcatctaaatgataatgtgatccatatcaactaaaccatgtccgatcatcacgtgatatggagtagttttcaatggtgaacatcactatgttgatcatatctactatatgattcacgctcggcctttcggtctcagtgttctgaggccatatctgcacatgctaggctcgtcaagtttaacctgagtattctgcttgtgcaaaactggcttgcacccgttgtatgtgaacgtagagcttatcacacccgatcatcacgtgttgtctcggcacgaagaactgtagcaacggtgcatactcagggagaacacttatacc

SEQ ID NO: 458 - DNA, 401 bp, Triticum aestivum
  Clone ID: LIB103-011-Q1-E1-D8
attcccgggtcgacggggcagatcaacgaacgctcctggagagctccggattcgggtaagtaatagataattttctttcacatgcctgctttgcataaagaatgccttatccgccgctattttctttatcgcctcgatctcctggagggccttctgggcttcggccttagcgtttttggtactcacaagagccaaggcgagctcggacgctcgagtcttcgagtcacgctccaaactctcgtgtttttccatcagagcctgcagctcttgccgcacctccgccatacgtgcctccggcacgtctcgcacggtgcgctccaatgccccactgttctcggacttggatacagcctccttcagggccgccaccttgggacgaggcccctgcaacatttacgttg

SEQ ID NO: 459 - DNA, 440 bp, Triticum aestivum
  Clone ID: LIB103-011-Q1-E1-E1
ggtcctaaattaacgggtcgacgggttgaccaaagtcaaactgcctagagtttgaccaagtttatagaaaaatataaacatttaccataacaaatatgtatgatgtgaaagtacattcaataatgaatctaatggtctttatttgttattgtatatgttaatattttttgttataaactttctgagagtttacaaaacttgactttgaccaatgctaatatgccaacttaaataaaaattgagggagtacacatttgttttcttagtttgtagtgaattaatcatttgttgtaattgtgaaataaatatattaggctactgactttgaatgtaatgggctatacaattcaatagttacaatcattgttgaattccaagatgtataagaggtctttagtacttcacaatatgctcaaactcaaataatcctagtcaaatag

SEQ ID NO: 460 - DNA, 391 bp, Triticum aestivum
  Clone ID: LIB103-011-Q1-E1-E10
gggtcgacgggaacgctcagtgaaaccatcctcttcaagtttagcttcagtacatatcattgagagccctttccatgtacgacagcaggtttcatgtgtaacgaaggcattcttggtggcaaggtttcgaagacgattgacatccaccaagaggctcttcatctgacgttttagccagtcgtgatgcctatcttgcttctggtgaagggccacaagaagctctcgatcagtgaggacacgagcacgcttcttgggtcttggagcatttgtgctgtctgtggcttcagtagatgctggtgcacgtgtagtgccagccaacggatataccctggatatggcttcaacaccttcaacattctgcgtgaagctctggtgttctgcattctgaaga

SEQ ID NO: 461 - DNA, 425 bp, Triticum aestivum
  Clone ID: LIB103-011-Q1-E1-E2
gggtcgacgggttttgggcatgatgttgagacatatcgtgatgagagaggaagggttagagtaagtagggtcagaggaatgggaattcgtatgactcgtgatattcaaaggaatttggattttatcaaagagcatgagcagtcaaaaagcatgggacaggccaacattggcaaaggatcaactagcaatgaagaacctccagattttccggaacatctttttgaaaatgatgggctgcaaagctctgttgatctcagtgaagattttgctgaaactatcggtgacaaccatcacacgtcgtcacttgtaggaggatctgatgatatttctgagggttcctgccatggaagcaaagagacaatagagatatcctttgtggatgatcaaattggagtgaaggacaatgatgacaagctgtttttgca

SEQ ID NO: 462 - DNA, 435 bp, Triticum aestivum
  Clone ID: LIB103-011-Q1-E1-E4
cggtccagaattcacgggtcgacgggacatgttacgaacgaatcctttgatgatcccattcatcctctcaaacggcatcatgttgtgcaggaatgacggccccaggtctattatgtcatccacaatatggacacacagatgcaccatcacgtcaaagaacgcgggcgggaagtacatctcaagctcattcagtatcacaacgatctcttcctgtagccttcggagctgcttcacactgatcgactttcgagagatgacgtcgaaaaagttgcagagaccaataagcgtgtcacagacgtgcttgtccattatccctctaagggcaacaggtaatatctgcgtcatcatcacatgacagtcatgagacttcatcccgctgaaccttttcttgtccgtgtctagatatctacttatcttgccacagtaatcgggact

SEQ ID NO: 463 - DNA, 458 bp, Triticum aestivum
  Clone ID: LIB103-011-Q1-E1-E5
tacaggtccagaattcccgggtcgacctgaaaacaaataataaacttcaacataacaaactttgggggccacattcatttgcaggaattttgcaggcaaggaaaatgggaaaaattcctacaaaacagagggccaatatgtcacttactcggcacatgatgagaaatttctgtgcacttcaaactactccctccgtctcaaaatataagaacatttttgacactttgcaagtgtaaaaaacgttcttatattttgagacggagggagtacaatacaaatagtttgggtttatctttccatgctttgttgccaacttcattaagaaaaagtactccccaattaggcatgggtaactaacgtttcattttgattttgtacggtattttctcctgtagttgaattccttttcttctctcgatacatactccatatgcaagatcgggagaaaactgcaccgc

SEQ ID NO: 464 - DNA, 421 bp, Triticum aestivum
  Clone ID: LIB103-011-Q1-E1-E6
attcccgggtcgacggggatatgtattttgcttggagtgtcgtgtattatattagtctttgctttttagtttaccacaatcatccttgctgtacacaccttttgggagaagcctatttgattagaattttctagaatactctatgtgcttcacttatatcttttgaacttgatagtttttgctctagtgcttcacttatattttttagagcatggtggtgtcttaattttgaagaaattactactctctcatgcttcacttatatctttttgagagtcttttagaacagcatggtatttgctatggttataaagttggtcctagaatgatgagcatccacgttgggtataataaaaagtatcatagaaagtgaattggatgctacgatcaatttgatgcttgataattgtttttgaagtca

SEQ ID NO: 465 - DNA, 422 bp, Triticum aestivum
  Clone ID: LIB103-011-Q1-E1-E8
attcccgggtcgacgggtccctggaccggtgctggacggccgagcgccgcgcacgccagggcctcacgcacaacaccgtttgcatcctatgccatcaggagatggaatccatcgaccacctcttagctggatgcgttttcgctcgggatacctggcacgaaatcctggcctggtgccggctcatctccccgcccatggatagcacgacgaccttcttcgcttggtgggtgctcgcggccgacacctcgccgagcggcctgcgcaaagggctcaactccgtcatcactctgaccgcttgggccatctggaagcatcgcaacatcgtcatcttcgacggccttcacccctccacctatggtcttgtgctttccctccaggatgacgctcgcctatgggctaatgccagcgccaagggactagcc

SEQ ID NO: 466 - DNA, 428 bp, Triticum aestivum
  Clone ID: LIB103-011-Q1-E1-E9
gggtcgacggcgaaaagacactacaacatcaaggagggagcagaggccgctacgaagctgtcgtgtagaagctgagaagatgggttcaacatcctgcccttctactaaatcaggacacaaagctggcaactcgaatgaagccggcatagaagctcctatgcccaacaagtcctacatagtgcctaaatctggacgctcagctcgagcttttgggctcggctcgcgctcgttgcaactcggcccgagctaggctcggcccgtcaagtaaaaaggccgagccgagctgtacttttaggcttgtttcgacctcggaccgagccaggctcggctggcccaactagcgagctaaaagctcgcagcccagcgaaggcccaatgaacaccacacaccacaatttagcccatctagcccagcaaaatgactacaga

SEQ ID NO: 467 - DNA, 436 bp, Triticum aestivum
  Clone ID: LIB103-011-Q1-E1-F11
attcacgggtcgacgggatgacgttgcaagattctcggaaaatgaattacgatagcaagctccaaaacatgagctggttctgctacaacatgtgaacatgttgtccaagacaagcatgaccacaaagtagtcttataataaaacactactgagttcaggaaagggaaccatcatcgaggatttcgaagtccttgcataaggcatgctcttaagaaggaacttttcctccttgaacaattcaatcagtggcttggtgtgctcgggacacatatggaatgaaggttgcaagtctccagaccacagaatacttcgcacgtatgcatgactgacttgggatgattccagaggaagcaaaactaactttcccaaattcacggcagcaactttcaccaaatgcacgtgtataagaggaagtcactcctttcatcaaacacag

SEQ ID NO: 468 - DNA, 431 bp, Triticum aestivum
  Clone ID: LIB103-011-Q1-E1-F3
ggtcgacggcgaccgacagcgcaagtgttgctgataagtggaaccccgggaggctgagttaagcaccatggctgaaggagttgtaaggaggaattacaccacatgggatgatgagatggatggtgcactgcttgaggtgcttgttgatcatcacaacaatggcgaccattcacaaaatggatggaaaccacatgtgtattgtgcagccataaggaatgtgaaggagaagtgcaacaagaatatcacaaaggacaacattttgggaaggcttagaactttcgacaggtactatgaagtcattaccaagatactttcccaaagtggttttgggtgggattgggtgaatcataagctatcaatggatagtgatgatgtctggatcaaatatgtggaggctaataagaaagagaaaggattaacttcctacaaga

SEQ ID NO: 469 - DNA, 416 bp, Triticum aestivum
  Clone ID: LIB103-011-Q1-E1-F4
ggtcgacggggggtgctcaaggggtccacgagatatgagggtgcgcccagtaggggggggggcgcccccctatctcataagctcctcgagtatcttctgacgtggactccaagactccaggatgataatcttccaaaaaatcatgttgccgaaggtttcattccgtttggactccgtttgatattccttttcttcgaaatacttaaacaggcaataaaacaacaatatgggctgggcctccggttaataggttagtcccaaaagtaatataaaagtgtataataaagcccgtaatcattcaaaacagataataaaatagcatgaatgcttcataaattatagatacgttggagacgtatcagcatccccaagcttaattcctacttgtcctcgagtaggtaaatgataaaagaaag

SEQ ID NO: 470 - DNA, 421 bp, Triticum aestivum
  Clone ID: LIB103-011-Q1-E1-F5
attcccgggtcgacgggaatacgaaaaaaggggcaaatccgggttaggcctccagtaaggaagctagtcctcctcctgaagcagcagtggacaacgctactggattctatcaaagcgacttgatagaacaccatctgccagacagcccctatgcatctctcagacacataacagacgctgcagcaggatcatcttcagcacagccacacctcactaggttgatcatgaacactctcagcatcccacatctggtgccctcgacattgttccctcctaccccatctgcccatgagcttgctccttacaatacatgcgatcgtccaagtgcacaattatcccacctgaccatagatccatcaagcatataaatatttcgcataaaatacgagtcaccttttctcctacacagaggatatccatg

SEQ ID NO: 471 - DNA, 414 bp, Triticum aestivum
  Clone ID: LIB103-011-Q1-E1-F6
ccgggtcgacgggaaagcctaatctggcctccggcggctagcggctctacttagcatgcatcgctgcgaagtgctaccccaccgccggccaggccacacttccacacctcttgttattctccaccgactacagccccacgccacaccagaaccacttataacccttgtactcctctcaatctgcgactccactgccgcatcttcccatctccgggtcgttcctgtccggggcctcgccgacgtccacggcctcgccgcgctcgacgtggcgtggtcaacaaacaaggtcatcggaagaggactatacgtggagagcctgatggctgggacccacaaggtccatggttgcacgcaaggaaagttcctccttattaaccctagaagatgtttcctccccctgacagttgggaccca

SEQ ID NO: 472 - DNA, 352 bp, Triticum aestivum
  Clone ID: LIB103-011-Q1-E1-F8
aatgcccgggtcgacgggcaaccaagagggatttaataaaaacttccatatagagtgcattgaatactaagagaagtttgatacttgatgattgttttgagatatggagatagtgatattaaagttatgatagttgagtagatgtgaaagttaaaaatacttgtgttgaagtttgcaagtcccgtagcatgcacatatggtaaaagttgtgttacagatttgacatatgaggtgttatttgatctgtcctccttatcactggcggtcggtgacgagcggtggtctttttcctacaactctagccccctacgagaatgcgcgtaatacctggcatctgactacatgtagattt

SEQ ID NO: 473 - DNA, 293 bp, Triticum aestivum
  Clone ID: LIB103-011-Q1-E1-F9
ggtccagaattaccgggtcgacggcggatctccttccggagatcacggaaagctacacgccccctacctctgtcacgcctagcaaggcggcctacaccgaggtgtcgtcacacaggacatcgcccaatctgccacaagcacaaggtggtcacatgacccctccgggttctccataccccgccttcgaacagggccatgtggacgagtccggcgccgactggtgttcggccggaggagtctgacgttttggcatgccgaccctctatctcagaagagcatcacgtgttaatgca

SEQ ID NO: 474 - DNA, 433 bp, Triticum aestivum
  unsure at all n locations
  Clone ID: LIB103-011-Q1-E1-G11
cggtccagaattaccgggtcgacgggatcaagatatccggggagaaatccatggtggggagtttgtagattatataaccaacgaagaggctcggagtcgccgccgcggagtctaactgtcttgtgacgaaaggcggtgtccacccccaaactgtataaaagtgaggaagattggtttagtagtgcaggaattatggcgtggcgtggcatggcgcatccaccggtttttgtcgcagcggatgtcgcccccctgaagcagcggctttgaatcgcagtcgggagtttgctangtccccccctcttttgaccccccgaactctgtacagatagatgtggggagttgatgatgactggatgatgatgcttttggtttggttttctgtaaagaacaccaattgtacagtcggatggatacttgtgctagttctgcatgc

SEQ ID NO: 475 - DNA, 177 bp, Triticum aestivum
  unsure at all n locations
  Clone ID: LIB103-011-Q1-E1-G12
ttgccactccctatagtgagtcgtattagntggtggggagtttgtggattagcgcgccagcgaggaggctcggagtcgccgccgcggggtcgcgctgtcttgtggcgagaggcggtgtccaggcccaggctgtatgagggtgaggcagattggcgttagtggtgcaggaattatggg

SEQ ID NO: 476 - DNA, 410 bp, Triticum aestivum
  Clone ID: LIB103-011-Q1-E1-G2
cggtccaaaattaacgggtcgacgggtaggcaacacaaaagaaacggtcatccagatcaaggtgtgtgcgatatacgacatgcggttcactcggatgaactatttgcattgatacaagagaacagaaacggttcaatataacaaataccataaatattgcaaggttcaaattcaaagattacaatgcccaaatttctgtaaaggggtcagctgttgacaagtcatgtatgggtttgccacaatgacttccaattactctgtcatatgctcttccaatacgaagtttagcttttttggagcctcttccattctacagtacctgccagctctgatcaacataccattcatctttcctaattaaatgtgtgttcaacctcagtaccctcaacaccctttctctggcaagaaag

SEQ ID NO: 477 - DNA, 425 bp, Triticum aestivum
  Clone ID: LIB103-011-Q1-E1-G3
ggtcctaaattagcgggtcgacggcggcgttttgccccgcttaggagcccttacctcccaattctcggaggcggcccttttcttaccatgggaagaagggatgtcagcttctccttcccttttgtcttcggaagagggagccctagtctccccggacacagtgtgtgatttgcctccaggatggaggccgccttcggctccaccgctcttctcattctcctcctccaccggcacctggtatggcgccgggaccagcatccatgctagtatgggactagctgagtcctcaacaagaggagccgaacacctgatttgctcagccttctttatccagccctggaaaaagatggttttctcagcatcttatcatgagatgtgtatctaacttgtgtttgagaattgagtgcttaccgaggtatccggat

SEQ ID NO: 478 - DNA, 437 bp, Triticum aestivum
  Clone ID: LIB103-011-Q1-E1-G4
ggtccagaattcacgggtcgacgggactttacttggagatatattttattcaccacatgatatgtgttttgcttggagcgtcattttattttattttgtttttcttgctgtttaaataaaatacaaagatctgaaattcttaaatgttagagagtcttcacatagttgcataattattcaactactcattgatcttcacttatatctttcggagtagtttgtcgttgctctagtgcttcacttatatccttttagagaacggtggtggttttatattatagaaataattgatctctcatgcttcacttatattattttgagagtcctttagaacagcatggtaatttgcttttgatataataaaaaaaactttcatataagtgcattgaaaaatatgagaagtttgatacttgatgattgttttgagatatggagat

SEQ ID NO: 479 - DNA, 390 bp, Triticum aestivum
  Clone ID: LIB103-011-Q1-E1-G5
attcccgggtcgacggggaagaactgccttgtgccaatgagtgatgtagagatgcttcttcctatcacggtaggagactacacggatttcttttgttctgtgcaccacgcaaggaactgtggattcatcttccgtggaccacagactccagtcaatccgaattggtttcacttaccagttggttaccatggacgggcatcatctgtaatcatatctggaacagacattattcgacccagaggacaaggtcatccaacaggaagcgctcaaccttatttcggtccttctcaaaagcttgattttgaacttgagatggctgccattgttggaccagggaatgaactgggcaaacctattgatattgctgacgctgaggatcatatatttggc

SEQ ID NO: 480 - DNA, 399 bp, Triticum aestivum
  Clone ID: LIB103-011-Q1-E1-G6
tacaggtccagaattcccgggtcgacgggaagtatagcaaggcccgtttcgaagaaagttatacctgatggtcgccgagatgtcgctaggtgggcgacgggaggccggatctgcccacactacgacagcgaggaataagaggtcggaggccctccctcgccagcggtgcttgggaaagaacgacaaggaaggctgatcgggacgcgcccagcagtgggtaagagccgtcgccgaggacgaccgcatgaacgttgcaccttctcaccttccctggcagagaggatccggatggatctgtgacaagcggtgagaagagagagagagagtgtgtggccaccgctgtcgtgtttagatctggagaggccgagacaggtgtgaagagagcaacactagcaacca

SEQ ID NO: 481 - DNA, 423 bp, Triticum aestivum
  Clone ID: LIB103-011-Q1-E1-G9
gggtcgacggggattattattcccatacgttgtttgctcacaaaatccctatgcataggaagtgggttagacttaaatgttctagtcatattcttcatgatgctctctttatgtttcaattcttatcttttatgtgagaatcattgaaatcatcatgcctagctaggggcgttaaacgttagcgcttgttgggaggcaacccaattttatttttgttccttgctttttgctcctgtttagtaataaataattcatataacctctgtttagatgtggttttatgttttaattagtgtttgtgccaagtagaacctttgggaagacttgggtgaagtctttgtgatcttgctgtaaaaaacagaaactttagcgctcacgagattagctgccattgtttactggagagtgcttttaggttgatta

SEQ ID NO: 482 - DNA, 423 bp, Triticum aestivum
  unsure at all n locations
  Clone ID: LIB103-011-Q1-E1-H11
gggtcgacggtgattcctaatacactggaggtgcctactactacgtgcaggatgctgacgacgcccaggagtagtttaggaggatcccangcangaggcctgtgcctctttcgatctgtatcccagtttgtgctagccttcttaaggcaaacttgtttaacttatgtctgtactcagatattgttgcttccgctgactcgtctatgaccgagcacttgtattcaagccctcgaggcccctggcttgtattatgatgcttgtatgacttatttatgttttagagttgtgttgtgatatcttcccgtgagtccctgatcttgatcgtacacatttgcgtgcatgattagtgtacgattgaatcgggggcgtcacacgatgcgcctccccacttgcctggtaaaatcgctttttccccaagcgccg

SEQ ID NO: 483 - DNA, 471 bp, Triticum aestivum
  Clone ID: LIB103-011-Q1-E1-H3
cgctggcagtgacggtccagaattcacgggtcgacgggcaccttgcaagccaatacacacaatagcccaaacggcggggttatgtccaagaatatgcattttcatcttatgcttccaactagcaaaatttgtaccatcaaagtaaggacctctacggtggtaatttccctcgctagacgccatactctcctaggttgtgaaaccaaggctatgaccaacaaaagctatggaaatcaaagcaaatggagaccaaggctctgataccacttgtaggatcgaaagtatgtctagaggggggtgattagactacttgaccaaataaaaatctagtcttttcccaattttagttcttggcagattttagcaacttagcacaagtcaagcaatcaacctacacatgcaattctaagagtatagcagcggaatataaagcaattgcatatgaaggtaaagggaagagaatgggggaac

SEQ ID NO: 484 - DNA, 431 bp, Triticum aestivum
  Clone ID: LIB103-011-Q1-E1-H5
gtacaggtccagaattcccgggtcgacggggataggccatcctggcacacaggttggggcaaaatgagctcgtgtgcgatcttgcgaggcatcaaaacccaatcattttcgttcgtatgtacatcccacatggtgaatcccagaaaaacatttatgtttgtatgtatatcaaacacagttttttgtgttgaaacgtttatgcaaggtggcctaatgcaaacagttatctgccagaagttgtgtgtgattgttatttgatcgaacacgactactttctagaaaccatgtcggttgtttgagttcatcgctcatggtgctatctgagtaaccgtatgcaatagcaaaccccaataagtagggtaattagcttattattgataatccatgtagtaatcaaattgacatttcttatataacacaccagatatttc

SEQ ID NO: 485 - DNA, 398 bp, Triticum aestivum
  Clone ID: LIB103-011-Q1-E1-H6
ccgggtcgacggggcattgaaggggcttctaccggaaaacgtccgattagccattgtgaagctatgtgcattcctcaatgcaatctctcagaaggtgatcgatccagaaatcataccaaggctaaggaatgatgtggcgcaatgtcttgtcagtttcgagctggtgttcccaccatccttcttcaatatcatgacgcatgtcctagttcatcaatcgacgagattgtcattctagggcccgtatttctacacaatatgttcccctttgagaggttcatgggagtcctaaagaaatatgtccgtaaccgcgctaggccagaaggaagcatctccatgggccatcaaacagaggatgtcattgggttttgtgttgacttcattcctggccttaagaagat

SEQ ID NO: 486 - DNA, 418 bp, Triticum aestivum
  unsure at all n locations
  Clone ID: LIB103-011-Q1-E1-H7
taccagtccagaattcccgggtcgacggggctagcctccggatccatccatccgcccctcgctgccgctgcgtctcgtctccaccacccaacttgcccccggactcaggaggatcgtcggagatgtcggacaccgatgagcaccacttcgagtccaaggccgactccggcgcctccaagacctacccgcagcaggccggcgccatccgcaagggtggacacatcgtcatcaaggcccgtccctgcaaggttgttgaggtctccacctccaagactgggaagcatggtcacgcaaagtgtcactttgttgccattgacatctttaatggaaagaagcttgaggatatcgttccttcatcccacaactgtgacgtcncccatgttgaccgccaagattatcagctgattgacataactga

SEQ ID NO: 487 - DNA, 414 bp, Triticum aestivum
  Clone ID: LIB103-012-Q1-E1-A1
taccggtctagaattcccgggtcgacgggtgaagaagacgcatcttgtcaaggctgctccggcggacaagtcgggagctgctgtgcgagaacggacctgagctgtgtgcggtggtgtcataaggagcctatccatctccactagaattatcccaagtttcacttcacatcgtgatgttgttttacctttttcctgtcattgtcctgctataacggatagcgctccctgttggcgccgccgccggcggggatgccctagtggtggagggtgtatgtcctcttccgcggggtgcccctgcttgtacctagatggttactctttccgtccattgtcaccggctaacattgtgataatatcagtctgggtaatgttagattaagctgttgtcctcgcctgaaaaaaaagaaggggggg

SEQ ID NO: 488 - DNA, 378 bp, Triticum aestivum
  Clone ID: LIB103-012-Q1-E1-A4
ggtctagaattaccgggtcgacgggcagtaccagatcgttgagcgtttattcaactttgcatctctgaattgattattgctgaccatttttgctaccatattataagccttcccagctccacatacatctacgtcgtgcggttgagtctccctggtaatcgctctatccaagctttgagagtttttgactacaacgattgccgatcaccgcctgctgctgggtaagaactggtaagaatttgagatttgcttgacggatttgtgacacccaccaccacctcttggtagtagtctgtaggatcatattcttgtgtgtttctattgctgctaaccatgccaggatcacaagccgatgagactgactgggagaacatgacg

SEQ ID NO: 489 - DNA, 368 bp, Triticum aestivum
  Clone ID: LIB103-012-Q1-E1-A5
gtcaagaattcccgggtcgacgggcctggttggggatgcgtcctccgtttggcgctgctcggccatggagcttcttagcctaccatgaacgatgaatgactatgatttaccctacggcacgaaggaatgtaggaaggaggaaaacgccaccggcgatggataaatcccccataatcggcagctcctccacgtcccaagggatggatgacgtccatcattatctaattgataaatgagccccttggtggggtactaagatcacacttacctcaatgacgatcaggaattacgatggcaagaacgccgaggcggcccaagagttcaggaactgccgtgcgttcacatgcgagagaccatctgtgtttatc

SEQ ID NO: 490 - DNA, 414 bp, Triticum aestivum
  Clone ID: LIB103-012-Q1-E1-A7
taacggtcaagaattcccgggtcgacgggaagctgatggggtggtggcgtaatcatgccttctgaagcacagcctgaagaggaacttatcatctctgcaccaaatcaacctgaagacaatgctcagaccgaagacaatcctcccaatgatgacaatgatcagcaagagcaaagtcttcatcctgttcatcctcgtgttgcaaatgaagtacaaatcgagaagataattgacagcatcaatgcgtctggtccgcttactcgctcaagagcaacacagctagcaaacttctatgggcacttttcatttgtgtcaatatcagaacccaagaaagttgctgaagcttttatggaacctgaatggattcaagccatgcaagaagaacttcaacagttcaagctgaacaatgttccggaa

SEQ ID NO: 491 - DNA, 449 bp, Triticum aestivum
  Clone ID: LIB103-012-Q1-E1-A8
ggtaccggtcaggaattcccgggtcgacggggacagaactcctgaaacaatcaagagtcacacagccctagcaagtttagcagatccagagccgaagatgagcggggtgaagaaggtgacggacgttgcggccaaggccgggaaggcgatcgactgggacggcctggccaagatgctcgtctccgacgaggcccggaaggagttcgccaacctccgccgcaccttcgaggacgtcaaccaccagctccagaccaagttctcccaggaaccaaagccaattgactgggaatactacaaaaagggaatcagatcgaaagttgtggatatgtacaaggaggcttatgatagcattgagatcccaaagtatgttgacactgtcactcctgagtacaagccaaagtttgatgctctgttaatcgaaatgaaggaagcagagaagacatctctga

SEQ ID NO: 492 - DNA, 392 bp, Triticum aestivum
  Clone ID: LIB103-012-Q1-E1-B2
tgccagtgccggtcaagaattaacgggtcgacggggggtgtcagcagcaacaattaattcatttatccgtggaatggggataacaagatgtgacaatagcttaattcctttcggacgtcttgaatatcacatcagagaagaacttaacataacagcttctcgagccatggttgttctgcatcctctaaaggttgtaataactaacttggaacatggaaaagtcatagaccttgatggaaataagtggcctgatgctcctgctgatgaaccttcgtcgtactacaatgttcctttcacaagaactgtctacattgaaaaagctgattttcgcctacatgacccgaataactattatgggctagctcctggtaaatctgacctgctaaggtatg

SEQ ID NO: 493 - DNA, 397 bp, Triticum aestivum
  Clone ID: LIB103-012-Q1-E1-B3
cgggtcgacggcagcaaggagtccacggtagtggatggggcgtcaaggaggtcagcgtggatgcagaggcggcggcagggcccttggtgggaagaaatgatgcgtgataaggcaccaacgagctcatccccatgattgaggccgcggcagtcgaggttgagaggggcggaacgccagaggtggcgccaccgggacgcgaggatctgggtgcgggcgccgtccttggtggggaggagcgagatgatctcgccgaggacggcgtcggggaggttgctgatggtgtcttgagccggcggttcagattccgccaactttcttcttcgggtaatagggccgccggccggcggcagtagcggaagaggctcgcgccgcctcatatctcagatgcgcaccgcaa

SEQ ID NO: 494 - DNA, 406 bp, Triticum aestivum
  Clone ID: LIB103-012-Q1-E1-B4
gggtcgacgggtccgccaacggccagccgaatcgacggagaaggaatggcttcaaccaggggagacgtaggatgggagttcggccaaggcgaactgatagggaggatagtgtacggcgaactgtctatgtctcagacattgatcaacatgtcactgaacagaagcttgctgaggttttctcaaactgtggtcaagtggtagattgccgtatctgtggtgatccaaactcagtgatgcgctttgcttttatcgagttcgccgatgatgtctgtgcaagagcagctctaacgcttggtggaaccattcttggtttttatcctgtcagagttctgccatctaagactgcaattttgcccgtgaaccccaaatttcttcctcgaactgaggacgacaaagaaatggtatc

SEQ ID NO: 495 - DNA, 424 bp, Triticum aestivum
  unsure at all n locations
  Clone ID: LIB103-012-Q1-E1-B5
attcncgggccgacgggcttttgaaatcactaggttatgaatcacttggtacttgcgaaccatgcctcatgggaaagatgactaaaacgccgttctccggaactatggagcgagcaactgatttgttggaaatcatacatactgatgtttgtggtccaatgaatgttgaggctcgcggcgggtatcgttattttctcacattcatagatgatttgagcagatatgggtatatctacttaatgaaacacaagtctgaaacatttgaaaagttcaaagaatttcagagtgaagtggaaaatcatcataacaagaaaataaaatttctacgatctgatcgtggaggagaatatttgagttacgagtttggtttacatttgaaacaatgcgggataatttcgcaactcaggccaatccggacaacaaa

SEQ ID NO: 496 - DNA, 428 bp, Triticum aestivum
  Clone ID: LIB103-012-Q1-E1-B6
ttcccgggccgacgggcatacaaagctaggaaaaaaattagggccatttcaaggatgttgagaactaatgtgctctcagacggagccttctgaacttcccaaacacccttcattcaacatggtctatttttaaaatccttgaaatttgcaagtaggtgggcatgcccatggtaggcctccatgtcagatttgaacgatttctacaccgtgtgcaagttgcgacacgtccaaccatttatctgctttttttatcaagaaaactctagaaaatacaaaaattaccaaaaatagaaacaaggcatgatgccttaaattgatcatacaaggccatggggagaaatggggccattttaaagatgtcaaagaacaacgaactctaggacagagccttctcgccttttgacaccatttgcaagttgcgacacatt

SEQ ID NO: 497 - DNA, 369 bp, Triticum aestivum
  Clone ID: LIB103-012-Q1-E1-B7
gtcaagaattcccgggccgacggggagaatcactgtttttcctctcgctcctcctgtgggcggcgccgccgctgcgcacagaacacatcctcgccagcgtagcttctccggcgtccggccaacgcgctcactagcctcccgccttcctccacatctcctcgcctccaccccatccagttcgtgccattcgctgctccaagacaagggcatggcgctcggcggctgcggcaacgaagctgatggtgcacgagccaaccatgaaggcagtagcacggggcagcgacagcagcatggagggcgtcctcttgtttgggaaggtaatggaactgcaaataggagtggcagcggcgaccaagatgcaaatggaag

SEQ ID NO: 498 - DNA, 426 bp, Triticum aestivum
  unsure at all n locations
  Clone ID: LIB103-012-Q1-E1-B8
taaaggtcaagaattcccgggtcgacgagcaggtgcacaaggtggtcatggccgcgaacagggcagccacggcggcgcgggtggcggcgatcaaggcggtccagaacaggatggacgggaaattctgcgatacctatgtgtgaagcgtgtgtgttcaagaaaacatgcccctttcctctaactgtacattagggtagtggaggccaataacactaatcggtgagagtttcagacgacggcgacgacgacgaccggggcggcacaaccgcgtgctccgagtccgtgagagagaccagcaacaaggcgggagcctccgaggagcggagctgacaagttttgcatttcaaaaacagctcagatcctgcgacgatcgcgatcgcgatcatcggcggtcncttccttcgcccccttccttccagcaagctg

SEQ ID NO: 499 - DNA, 420 bp, Triticum aestivum
  Clone ID: LIB103-012-Q1-E1-C6
gtacaggtcaagaattcccgggccgacgggatgacgtatgcgagattctcggggaatgaacaacgatagtaagctccaaaacatgagctggttctgctacaaacatgtgaacacgttgtcccagacaagcatggccacatagtagtcttataattaaacactaccgagttcaggtggggaaccatcatcaaggatatcgaagtctttacgcaagtccatggattagatcccaagcatagacttcttttccttgaacaagtcaatcagtggcttagtgtgctagggacacatatagaatgaaggttgcaagcctccagactacagaataattcgcacgtgtgcatgactgatttgggatgattccaaaggaaacaaaacaatcttcctcgaattcatggcggcaacttacatccggtgcac

SEQ ID NO: 500 - DNA, 426 bp, Triticum aestivum
  Clone ID: LIB103-012-Q1-E1-C8
attcccgggccgacattcacccacacgaaatcaccgaacgcgctttcctacttggggtcacgagtggcgctgatggtgaaggtatgaccaatgccatccaccttggaggacaccttcttggccacaggtggagctgccattgcattcttacacttgccggtggagctcgatggtgcatccgctacagtagcgcagcactccgaataggtgcgcttgccagagtgggcatcaaagctcttgccggacatggtcttcttcgacccgggagcttcaccagcaagtatcttgctctctgcagctgctgctgcttcccggtagaccttgtcggcacacataatagcatccttcttgttgccactgacagagatgacacttattgggcctgacattttcaatacgtgctacgcatagtgagaggctgccatg

SEQ ID NO: 501 - DNA, 395 bp, Triticum aestivum
  Clone ID: LIB103-012-Q1-E1-D1
ccggtctagaattcacgggtcgacgggcgtcgagatcaaggagcccgtctggttcaaggccggctcgcagatcttctccgagggcggcctcgattaccttggaaaccccaacctcgtccacgcgcagagcatccttgccgtgctgggcttccaggtccttctcatgggtctggttgaagggttccgcatcaatggtctcgacggtgtcggcgagggcaacgacctctaccccggcggccagtacttcgacccgctcggccttgccgacgaccctgtcaccttcgctgagctcaaggtgaaggagatcaagaatggccgtctcgccatattctctatgtttgggttcttcgtccaagctatcgtcaccggtaagggcccattggagaacctgttcg

SEQ ID NO: 502 - DNA, 414 bp, Triticum aestivum
  Clone ID: LIB103-012-Q1-E1-D3
ccggtcaagaattatcgggccgacggggatgcccagggaaggcatcccctctttcgtcttcgttcattggtaactttacttggagcaatatttttatttgccacatgatatgtgttttgcttggagcgtcgtgtattatattggtctttgcttgttagtttaccacaatcatccttgctgtaacacaccttttgggagaagcctatttgattagaatttgctagaatactctacgtgcttcacttatatcttttgagcttgatagtttttgctctagtgcttcacttatatctttaagagaacgacggcggtgtcttaattttgaagaaattgctagtctctcatgcttcacttatatcattttgagagtcttttagaacatcatggtatttgctattgtcataaagttggtcc

SEQ ID NO: 503 - DNA, 425 bp, Triticum aestivum
  unsure at all n locations
  Clone ID: LIB103-012-Q1-E1-D4
ccggtcaagnattaccgggtcgacggggccatggaggccgccgcgaagccgatgaggagggaagacaaaggttgttgcaaggagagaattaagctgctgctgctgctgagctgctgtcagtggcgttgttggcgtctagaagcttctaggtgaggcggcaccgccttctagggtcatggctgccgtgccgcgctgcgccgcccgtcggaattcatttcagtcgatccatcaaatccgttccgttccttcgggtgacattttctatttcctgtgttcgtttgtagtagtagtggtgataataaaatgacggtcctcctcactgtggtgcaagagagtggagagccctccctagccaggcaggctcctcttcttctgtgtacaaaggcttgaacttgaagttggtactaaataaataaaacccaagc

SEQ ID NO: 504 - DNA, 399 bp, Triticum aestivum
  Clone ID: LIB103-012-Q1-E1-D5
cccgggtcgacggggccatgcaacttccatcatcatcatatacatgacttgagcattcattgtcatattgctttgcatgatcgtaagatagctagcatgatatttttatggcttgtccatttttgatatctttggtacgctagatcattgcacatcccggtacaccaccggaggcatccatatagagtcatactttgttctagacattgagttgtaatattgagttataagtaaataaaagtgtgatgatcatcattattagagcattgccccagtgaggaaaggatgatggagactatgattcccccataagtcgggatgagactccggacttcacaaaagaataaaagaggccaaataagcccaaataaaaaaaagaggcaaagaagcccagcgaaa

SEQ ID NO: 505 - DNA, 434 bp, Triticum aestivum
  Clone ID: LIB103-012-Q1-E1-D6
attcccgggccgacggggggtgaaaatgcaatctcatatcataatctttaatgagctccaaccatctcctctgtctgagatttaactccttctgcgtgaaaatgtacttcaaactcttgtgatccgtgtacacctcacaatggtttccgatgagaaaatgtctccatgtcttcaatgcatgcaccacggctgctaattccaaatcatacgtagcataattcttctcatggggtttaagttgtcgtgaagcatacgacacaacttttccttcctgcataagcactgctccaagtcctcgacgtgaagcgtcgcaataaacttcataatccttgcgttgatctggcagaatcaacactggtgatgtaaccaatcgtttcttcaactcttggaaactagcttcacattcctcagtcgaattgaatttggtgtccttc

SEQ ID NO: 506 - DNA, 354 bp, Triticum aestivum
  Clone ID: LIB103-012-Q1-E1-D7
ggtctagaattcccgggccgacggggtcaggaagaagtggggcggtggcgtcatgggctccaagtcgcaggccaagaccaaggccagggaaaggctcatcgccaaggaggctgcgcagaggatgaactaagcctagccctataagtattgtcagagcatatgccatgtagtttccctttcagtctgtcctgattttgacgaggaactcgaacccttttagcagcactgtggaatcgtattgtggttttctgattcgctgttccgttctccagacttctgcaaagatcagatgaggtttacccatgtttggattctatatagttttatgtcctttgtcgagtcaaaaaaaagaaa

SEQ ID NO: 507 - DNA, 401 bp, Triticum aestivum
  Clone ID: LIB103-012-Q1-E1-D8
cgggccgacggggcgaggagcctggagggatggcctcggtgtgaacctgggtggcagggcagtgttgggcacccacacgcggcgcttctgaggaccagcaccggatgaggaacccatgtcacggccatgcttgcgtgttgcatcataatcagtctgaccagtttcagcactgatggccttgttaacaagtttctgaaaggatgtgcactcatgcagacggaggtcgcggcgaagctcaggactaagccccttacggaaccttgcttgcttcttggcatcggtagaaacttcctcagtggcatatcgtgcgaggttaccaaactccctgctgtaagcatccacacagagtcggccctgagtgagactgcaaaattcctcacgtttacggtccatgagaccct

SEQ ID NO: 508 - DNA, 401 bp, Triticum aestivum
  Clone ID: LIB103-012-Q1-E1-E1
cggtctagaattcacgggtcgacggggtggagggtcatgagcaccagcaggcgcgtcgaggggcaccatggtcactgtgggagcacgccaaaccgaaggccatcaccagccactggataggtgagcaaatccattctcctatcagattcagatatctttgggtagtcaaggtaaatcctttatgcttgagggtaccataaataggctattgattgaatgaaacttgtggttggctgctattgtgttgtttgatgtttggttcagaggaaaaattgcatttatttatatagaaggtacttagtaaaattcagtctgatttaatcatcacttcagggttatgtatctctgtacgtatagatttccatgtttagagaaaaaactgtatgttaaaacaagatgct

SEQ ID NO: 509 - DNA, 446 bp, Triticum aestivum
  Clone ID: LIB103-012-Q1-E1-E2
cggtcaagaattaccgggtcgacgggtatcaagaacatgatacaccagcttagtgtattcacgggaataagttcatctccaacaatgatcatcagaacggacaccttcaactgtccacgggcatctggccagatgccggtcatccaatgctaacgttcaggatttctcctgttgaacctattagctagtaggtttttcgaatgggcgattgcctaactttatcatatagatagaagagaggtacagtctggttatcagtctaagcgtactagatctgattactgtctaaagcagccatttacagccttacaataggaattatacatgtacttccggtgctctcacactatgctccgagctctacatgtcaaccggccgcactccaaatagcaatatcttcacagacgaaatccagcaccctgtcggagctgcttgccatctgatca

SEQ ID NO: 510 - DNA, 417 bp, Triticum aestivum
  Clone ID: LIB103-012-Q1-E1-E3
ccggtcttcaattaccgggtcgacggggagtttaagcaaaagtcaaccataccaagtacccatcacaatccctatctctcgcattacattatttgcctcttgttttcctctcccccacttcacccttgccgttttattcgccctctctttcccaatctcatcctctctttctcttttgcctttttctcgtttgtctttttgttgcttgtgtgttggattacttgttaccatggccgaatcaaaaggaactaagggatttctcccgagttctagtgccttggataacctttctatcctttctaagctcataaacaatgatgctacagagagacccaccgggatcaccaataagaatttagatgattttgatgatgatgactccggaatctttcgctatttacttgatgaatccttaaa

SEQ ID NO: 511 - DNA, 408 bp, Triticum aestivum
  Clone ID: LIB103-012-Q1-E1-E5
aagtcccgggccgacgggtattttgaagaaattgacgaactctcatgcatcacttatattattttgagagtcttataaatagtatggcaggttgcttgggttatgaatttagtcctaatatgatgggtgttcaagggggatataataaaaactttcatgaagatcattgaatagatgagaagtttgataccttgcatttgttttgcgatataaagatggtgatattagagtcatgctagtgagtaattgtggtttagtaagaatatttatgttaaggtttgtgattcccgaagcatgaatgtatggtctctcgttatgcgatgaggttggagcatgattttttattgtcttccttatgagtggctattggggacgagcgatggtcttttcctaacaatctaaccccct

SEQ ID NO: 512 - DNA, 442 bp, Triticum aestivum
  Clone ID: LIB103-012-Q1-E1-E6
ggtaacggtcatgaattcccgggccgacggggatgataacggagctgtcaatgttactcctgaggaaatgagagccatcatcgaagttatagctgagacggggaagttctggcacgactggagttttctcaagagattgttgtctctccaattgatgcaggtcttgggtgaatattctgaggctcaaatggcaatccaagaggacgggcagcaacagaattccttatttagagagacgcactcagagctgtttagccagctcaatgatgctctcttgaggtttgaagagggtcctccgtttacacttcaaaggctttgtgagattttgttggatccaaaaggaacatacacaaaattgtcgaagcttgctttggccttggagaagaacctcctagtcacgtctaccataactaagtgtactgaaccctaccctactgctcat

SEQ ID NO: 513 - DNA, 404 bp, Triticum aestivum
  Clone ID: LIB103-012-Q1-E1-E7
cccgggtcgacaaatcttaaaactaatccgtttttgaaaacaacacacacacttgcctcggtataccacttcgtcatcaggtggttacccatctcattatctccctcgggcataagtggcacccgacggggtttccgaaaagtcttttgaaaatactttgtctccatcaccatgcacattcccgtcccttattgtgtagcaactactttagcatcctatctactcccaccggcataaccctcataagaaggtagggtcatgcacaatgcaagtatcaacaatgaggaaatggaggcaacccaccaaagtggctaccatctcatcatgattccgatgcaacaataataaagtgctatatgaaatgcataaaaatggtttcatagacatggtcaaagggctgcttg

SEQ ID NO: 514 - DNA, 375 bp, Triticum aestivum
  Clone ID: LIB103-012-Q1-E1-F1
ggtcgacggcccaggccagcgctatgtggtggtggtggagtaccagcacggcggcaccctgaagacgctgctgttccagcaccgggacaagaagctgccttacaagaaggtggtccagctggcgctggacatggcgagagggctgagctacctgcacgcgcagaagatcgtgcaccgggacgtgaaggcggagaacatgctgctggacaggaagaagtcggtgaagatcgccgactttggggtggcccgtgtggaggcgcaggacgacgacaacatgacggggcagacgggcacgctggggtacatggcccccgaggtgctggaggggcggccgtacgaccacaagtgcgacgtgtacagcttcggcgtcctgct

SEQ ID NO: 515 - DNA, 388 bp, Triticum aestivum
  Clone ID: LIB103-012-Q1-E1-F3
gggccgacggggagcagtacacggtgccgtcgctggcggcgctggagcacaacctggaggcggccatgcacaaggtgcgctccgagaaggaccgcaagatcgggggcgagatgagctacctcgagaacatgatcagggggaaacaagctgagcgctacggcctatgtgacaagctcgctcatgctcagagcctgaaggtcgtggaaggcggatccacctcgctgaacaacggtctggacctcaaacttggattcaactaggaacgggtgaaagcttctggccgtggggttctgctctagtgttgctgttgagctcgagtgttatgtcaggttcaaatattctgcaatttccttcgaagggattgtatgaacttgtaagagaccactgt

SEQ ID NO: 516 - DNA, 428 bp, Triticum aestivum
  Clone ID: LIB103-012-Q1-E1-F5
gtcaagaattcccgggccgacgggtgtctcacttcgattcgcgcaacgagaacatcagcgccaagtgccgcatggccaaagccaccaacaaggtaacccccaacatcaaaattaccatcattactaatccttccttgatggattgcattgacgaaagtgaggggtctaatgaggaagtaaatgaatttgagtcttttatgagtaagctcaagggaaaatccaagaagcacctcattgctgtcttggaacaacttggtgaagccaatgacatgattgaggctcaggaagacaccatctataagatggaaggtcatagtcgtgactgtgcgatgagatatcggatctctccaatgctcttggggaagagcgtgttcatcatttgactcttgaggagtcacacaatgatgaccatgccaaattaaagaaag

SEQ ID NO: 517 - DNA, 461 bp, Triticum aestivum
  Clone ID: LIB103-012-Q1-E1-F6
gccggcaggtacacggtccggaattcccgggccgacgggggaggaaagaagcacccaagccccagtcagttctaagaccgagagaggcgagaggaagccagggggctctgctgcgaagggagatggccgggaagggaggcaaggggctgcttgcggcgaagacgacggcggccaagggcgccgccgacaaggacaaggacaagaggaaggcgcctgtgtcccgctcgtcccgtgccgggattcagttcccggtgggccgtatacacaggcagctcaagcagagggtctcggctaatggccgtgtgggtgccactgccgctgtgtactctgcagcaatccttgagtacctcactgccgaggtccttgagctggccggcaacgccagcaaggatctcaaggtgaagcgtatcacccctcgccaactgcagctcgcgattcgtggagacgaggagctggacacc

SEQ ID NO: 518 - DNA, 405 bp, Triticum aestivum
  Clone ID: LIB103-012-Q1-E1-F7
gtaccggtcaggaattcccgggccgacggggaagttgaatatgctaaaaatatatgtgcatttgtacgtgacatttatagggaactgacccttcttgtgccactgatggatgacaataatgagatgaagaagaaaatggaggttatgcttcaaagtgtagtgaaaattgagaatgcttgcttcagtgttcatgtgagaggatctgaatacatccctatgctgggaacatctggcgagtcagactacgccttcttcggtgccgccgattatgaccaatgaagccagactgcctaacaggcatgtttctgggacctatctcaaaaaagaagctttgaacacgactattatttgttgcttgtgcacatcacaccgtagaacatgtaatcccggccctcagctacctgt

SEQ ID NO: 519 - DNA, 415 bp, Triticum aestivum
  Clone ID: LIB103-012-Q1-E1-G1
cgctgccagtgacggtctagaattcacgggtcgacaatggtgtgggcgacaccgacaatggtgatggtgatgctggcgatgatgatggtgatgccagagatggtgacgacgacaccagcgacacgtgtgagggcgacccggaggacacggtgagcgatatgtccgattgagctcgtgcttccttgtcgttgaccctacatgtgaaagctcgggcacggccctgaaagttgtaagagcattttgggagggggagcccctcatgtaaatagattactgcctctattccttaagccaagctggagatttatttttatgatcccgcgagtctcgctgcgagcttactactgcaatttaccttattcagggccagttcccgactggctcatgacgtcgtgagctttttaggggcctgctg

SEQ ID NO: 520 - DNA, 398 bp, Triticum aestivum
  Clone ID: LIB103-012-Q1-E1-G3
ccggtctagaattcacgggccgacgggttgtgtaagaagtagtgcaaaatttgtgctatttgttgaaaaagggcggtcagccggccatgccggcatatatgggtcggcgcgttgggcacactgccgacccaaatctcaaatgggacggacgccgagcgggtgaccacccaaacggataaaaaacggacaaaaacaccgtccgtttggtcggcgcgttggagtaactagttcaacttctccgaagagagcctaacgcccataagagcatgacagacgccacggcgacacaccaaaggccgaatcccttgtgtgccaggccgccccatgacccttcgtgctcagccttggtgtagcgccgacgaaggacatcatcaccagaggagcctgccctgctgctg

SEQ ID NO: 521 - DNA, 374 bp, Triticum aestivum
  Clone ID: LIB103-012-Q1-E1-H1
gacgggaagatggacgccttctactcgacctcgtcggcggcggcgagcggctggggctacgactccctcaagaacttccgcgagatctcccccgccgtgcagtcccacctcaagctcgtttacctgaccctatgctttgccctggcctcatctgccgtgggtgcttacctgcacattgccctgaacatcggtgggatgctgacaatgctcgcgtgtgttggaaccatcgcctggatgttctctgtgccagtctatgaggagaggaagaggtttgggctgctgatgggtgcagccctcctggaaggggcttcggttggacctctgattgagcttgccatagactttgacccaagtatcctcgtgacagggtttgt

SEQ ID NO: 522 - DNA, 385 bp, Triticum aestivum
  Clone ID: LIB103-012-Q1-E1-H3
ggtcaagaattcacgggtcgacggcaatcaagggaccgctcgagaccccaagatcatattatgcattgtctggtggagctggaaaagccgtgtcaacaggaagcaagattgcgctggagagtccaaggacggcggagaagccatcggcaggcgacatcgtgtcgatggtgatgaagaggaggcgtgcgatgccaaggagcgaccagccctctgaagctgggcgcgtaaaagcttctggtgggatttttggatacgtgcgagaatccagtggtaaacaagagaaggagaaggagggcctggcatcatctggggagggggagaaaacacagagcaaaggtgtggtggtggctgcttcaaggggtgctgcagatgcgccggtttctgc

SEQ ID NO: 523 - DNA, 422 bp, Triticum aestivum
  Clone ID: LIB103-012-Q1-E1-H5
gtcaagaattcccgggccgacgggaatcaaagtagcgcacgagatccaacgattacattacgcatggtctggcgtttcagttttagccgtgtcaacaggaaataatattgctctgagagagtcctaggatagagtgagtttccacctgtatgatatatcgagtctattgggaataaatatgaggcttcgaatttaattgagcgatcactccgctaattctgggctcgtcatagcttctggagagaatttcggataagtgctataatccactggaaaacactagaaggagaaggaagatctgacatcaactatcgagagggagaaaatagagagcatttgtgtcgtgctagttgcttaacagtttccaggagattcactagtttcagcagagcatgcgttcacagtttgttctgcaaatattt

SEQ ID NO: 524 - DNA, 406 bp, Triticum aestivum
  Clone ID: LIB103-012-Q1-E1-H7
gtaaggtcaagaattcccgggtcgacggggaggagaagcctgaggaggagctaggaactgaatatctggtgcagccgcttggccgtgctgaagacgaagagcattccagtgactttgagccagaagaaaatggtgatggtgctgaggacgaggagattgaggatgatgatgctgaggatggtgaggattctgtcaaggcgcaatcctcttcgaagaggaagaggtctggcgcggaggatgaatatgatgatgacggtgatgatgatggtgatgatgatgagaagcctccatcaaagcgatagtcaatttgttcttgctgatctggtatcttttctgcttgggccaagaaggaaaataatcctcacggagagggttgttggtaaatgctgtagctttaggacatctg

SEQ ID NO: 525 - DNA, 396 bp, Triticum aestivum
  Clone ID: LIB103-013-Q1-E1-A1
taccggtctagaattcacgggtcgacgggggatagctatcgtcaaggagggggatcaaagatctactagtcctcatgcaatactcatatactttttcagtatggaacataagacaatgtcatcgatttcttaaactattcagcacattctaaaaggtgcccatgtatatcaatcttcatgacatctgctgtatgttgtcagtgtccattgcaacattaccctactcctgacgcactatgcaatcgtgcaccagtagcatttttggcaaatattcaatggaatataccagtgggtcacttttgcaagcagcaccattatcagcttagactagtcatagctcactaataggtagtccaccattaatagttttgcggagttgatctacaagaagagtta

SEQ ID NO: 526 - DNA, 432 bp, Triticum aestivum
  Clone ID: LIB103-013-Q1-E1-A10
gtaacggtctacaattcccgggccgacgggataagcaaatttcaaagtgtctggcaattgttttaattcaaaaacaggatcacctttaggtggaggaggacctcctagagtttcaatacgcaaattgtgtttaagtagaggacgttgttcaaagaaaatattatctatttcatttctttcatgcatatgtaaatcatcttcatgatcattttcaaggtgtgataaaagttatcttctccagatcctcaaccaccatcttaatctgatgataactagaataagtatccaggaaacatagcctctcacaacccgtcgttacatcaataatctggtcgatacagggaagagaaaaaggatcagctagacacgccttattgagatctgtgtaatcaacacacatacgccacgtgccattcttttttagcacaagca

SEQ ID NO: 527 - DNA, 429 bp, Triticum aestivum
  Clone ID: LIB103-013-Q1-E1-A2
attcacgggtcgacgggcatgtacggatgtgtgaactacataagggagaagtacaacaacccgacgatcatcatatccgaaaacggaatggaccaacccgcgaacctgacccgcgaggagttcctgcacgacgcctccagggtcgagttctacaagacgtacctcgcggagctgaagaaggcgatcgacgacggcgcgaacgtggtcggctactttgcgtggtcgctcctcgacaacttcgagtggctgtcgggctacacctccaagttcggcatcgtgtacgtcgacttcaccaccctcaagcggtaccccaaggactcggcctactggttcaagaagatgctgcaggcgtcggggcccggctcctcgaaagacggcacggttacttccggcggcactcaggctggctccggcgtgtcaggcagcaac

SEQ ID NO: 528 - DNA, 461 bp, Triticum aestivum
  Clone ID: LIB103-013-Q1-E1-A6
taaggtctaaaattcccgggtcgacgggccaacacatgcatatttctgcctagagggattttttttttattcggaagaatggaagcattagttctgacgttgtaggctgtacctaagatgctcatctcttcacatgtagacaattagacaaacactgtagctctagcatttgcttgtttgtttagggcttagctgccttcataattatttgattgatgtttttattggatattcatattttattttggagaagctgcatatggtgcttgatcaaactccatgaattagataaactttccaatttgatagagtaaatccatccagtttattacagcccttcccattcaattactcctgtatgctaagtggtaattgatcacaatatagcgtcttgcgcgtgtacatcgaaatggcgtcttcagtgttgctgctgctttggctcctacacaaataattgggtt

SEQ ID NO: 529 - DNA, 448 bp, Triticum aestivum
  unsure at all n locations
  Clone ID: LIB103-013-Q1-E1-A7
attcccgggccgacgggtgcataaaaatatccaagcgaaccccgaaaaatcacaaaaaaatcacacaacactcctgttgttctatgttgacacgagaaagaaatttgaaagcaataagaggcaatggatattgtttcgtccacaatggtgggatgttccctaccgaaaaccatcatgcttgttgtgagaagctccagttagtgaaaagcatataccaaacctgccccaaatgggacaaaatttgtaccatggcatgttgatgccgctccatgatagcatgccaagttccatgaatttcagacgagttttggatttactagaatttaaaaatcagacatctcaatgttttgccggcaatcaacggtgccctggtgtttgaaattcattcncatttcttgcatgggacctaagcatgcaccgaaggacacaaatttgatttttcaaccaa

SEQ ID NO: 530 - DNA, 443 bp, Triticum aestivum
  Clone ID: LIB103-013-Q1-E1-A8
ggtctagaattcccgggtcgacgggacccagcagatgcccgcctaacggggctgctggctccggcaccccacgtggtgccggagaagaaggccaagaagaaggccacggggactcggaagagttcccgttttcaggtgctatcggatgacgactccgaggccgactcctctcaccaaggtgaggaggagaagaaaaaggcctctcccccagtgggggagagaagaaaaggaaggcctccccaacgagggaggccgaagggtgcaagaagggaaaaactcttcccccggactgctctgccaacgccagtgacgacgacaaggactggcctccaagggccaagcccctggcgagatcgtgagtatccggactcccgaataacttcatggtttttcttttttgccacacaatgtctttctaatgctgcatacaaccctgcaatctg

SEQ ID NO: 531 - DNA, 367 bp, Triticum aestivum
  unsure at all n locations
  Clone ID: LIB103-013-Q1-E1-B10
ttcccgggccgacggggaagtccaccgccaaagaaggccgcgacaagaaaggcaagaagaaagccaagaagagcgtggagacgttcaagatctacatcttcaaagtgctgaagcaagttaccccgacatcnggatctcctccaaaggcatgtccatcatgaactccttcatcaacgacatcttccaaaaactcccccgcgaagccgccaaactggcgcggtacaacaagaaacccaccatcaccttcccggggatttaaaactccgttcgcctcgtcctccccggcgaactctccaagcacgccgtctccgacggcaccaaagccgtcaccaagttcaactcctcgtagagtgctcctgctcctgtg

SEQ ID NO: 532 - DNA, 432 bp, Triticum aestivum
  Clone ID: LIB103-013-Q1-E1-B11
acggtctagaattcccgggccgacgggggtgatgatgaagatgatgacgatttggatttggaagattttgagtctgatgatgaagagggtgcggggaaatccggcggagatataaggtatgaggatttttttgaggaaagctgtaagcaacaagtcaagaagagaaatggtttcacaaagaaagtccacttcaaggatgaattgcatgaaatggaagtggataacattgagaaggatgatgtaaatgatggtccagcactagaggatgaacaaggtctttcaactcatgaaaaggggctcttgaagatgcgtaaccaaatagacataatggagaaagctagtcttgaacccagtaaatggatcatgcagggagaggttgatgcttccaggaggcccaaaaatagtgccctggaagtggatcttgattttgag

SEQ ID NO: 533 - DNA, 405 bp, Triticum aestivum
  Clone ID: LIB103-013-Q1-E1-B2
ggtcgacggcgttcaggcaaaagtataaacatagcctttataatttaataagcattgttcttacaattgagatacatgtcactagaacatgatatgcttcgagcactgagcctctattacatgagcgccttctaagacttcctcaaaatagtgctcggccgatacccggcctaccgccgaactctgggatgcaatagtggtggcttccatctctgcccagtatgtcttgacacgggcaagagccatccgtgcaccctctatgcacgccgacctcttcacagcgtcgatatgcggcacaacaccaatgaattgttgcactatgccaaaataactattcggcattggtccctccggccaaaggtgatccccgatgaacctcatatcaagtccggacaacctatggag

SEQ ID NO: 534 - DNA, 427 bp, Triticum aestivum
  Clone ID: LIB103-013-Q1-E1-B6
ggtaacggtctagaattcccgggtcgacgggaagatcaaatccatctagaacgtcaaggtcatctacgcccgcgccaagcagtactccgaggagtacgatgcccaggacaaggagttggttcagcttatgcgtaaggcccggttcaatggtgggttctatgtcattcatgaggcaaacccgctgtatgctgtcataatcaggcgtatcaatgccatgcacccaaagcacacgaagattttgcaactgttgcgtttgcgacacatattcaatggagtgttcctgaatgttaccacagccaccatcaacatgctccacatggtcgatccatatgttgcataagggtacccgaatctaagtaatgtgatggagttgatctacagaataggttatggcaagctcatcaagcacaggattccattgaccaac

SEQ ID NO: 535 - DNA, 415 bp, Triticum aestivum
  Clone ID: LIB103-013-Q1-E1-B7
gtctagaattcccgggtcgacgggtttacaacatacatccaaatcacaaaccgttttcgctgttgggtttatcacttcaagatctttgaaactggatcccatattaataggtttgactgagctttttttcacgaagaaaccaaaaaagatccagaaaacaaaaaaaacaaaaactaaaaaaaggaaaccgaaaacacggaaacttgtgcatatttgtgcttttcactctttttcggaagcacacttgtgctttttcacttttagagaagtacatatgtgcgtcaccatgaagcacatatgtgcttttcacttttcggaaagcacagttgttgaaagcataactatgtttttttgactaacgggaagcacaattgctcttcacgcagaagcttttcacacgtgcttcacgtgagaa

SEQ ID NO: 536 - DNA, 406 bp, Triticum aestivum
  Clone ID: LIB103-013-Q1-E1-B8
gtacaggtctagaattcccgggtcgacgggcgtacaaagtttaccggagatcggggtgatatacattgttaggtccgcagtttgccactttgtaatgttcctccctacatagcgctgtcatgccatgtgtcatgtgtgccttgctctcagcagggaagttgagttgttgtatgttgtgtaacagaacgatgctttctgcctgtggatgtaaaacataagattgtctatgtgtcacgactcaaatggtattgtcatctactcatctctattatggcaatggcactttttgctagaaacacatatgtgcttttcacttttcggaaagcacagttgttgaaagcataactatgtttttttgacgaacgggaagctcaattgctcatcaggcagaagcctttcaaaacgt

SEQ ID NO: 537 - DNA, 451 bp, Triticum aestivum
  Clone ID: LIB103-013-Q1-E1-B9
agccggcaggtaacggtctagaattcccgggtcgacgggtgtgataatgatgtgtacgtgtgattccacccaagtcttaccaaaatggatcccctcttgatagtacgatgactcctacgaagctagtccaccaacaatgaaaggaaggagctacaccgtcttgaattacaacaccgaggggaggaaatcgtctcgtgccaatggatgaatctctgaaagaactaacgcacacgattagtctgcacaagcattgtcatcaatcaccaaaacatattgggaataaatatgcccttacaacgtgaatgtatttgactttttgagccttggaataattgagtgcgagagagaaaatttctcgactctagtggggaagaacataatggtcgggctccggtgagatttggatttaggaaggaggagcttgcatccccaagtccttccatctgccccg

SEQ ID NO: 538 - DNA, 413 bp, Triticum aestivum
  Clone ID: LIB103-013-Q1-E1-C10
tacaggtccagaattcccgggtcgacgggtgcggctcttaggggcgccagatgaaggaaatatgccctagaggcaataataaagttgttatttatattttcttatatcatgataaatatctattattcatgctagaattgtattaaccggaaacttgatacatgtgtggatacatagacaaaacagagtgtccctagtaagcctctactagactagctcattaatcaaagatggttaagtttcctaaccatagacatgtgttgtcatttgatgaacatgatcacatcattaggagaatgatgtgatggacaggacccatccgttagcttagcataatgatcgttaagttgtattgctattgctttcttcatgacttgtacatattcctttgactatgtgattatgcaactccc

SEQ ID NO: 539 - DNA, 420 bp, Triticum aestivum
  Clone ID: LIB103-013-Q1-E1-C11
ggtctagaattcccgggccgacgggacatactaatatattgcttatgtattgtctgtgaattggtactaacgtttcgtttggctagtgcatagcgatgccgacgtatgtcgtgtacaagggtaaggttcccggagtctacgatgactgggaggagtgtcggagacaggttcaccgattcaacggtaacagttacaaagggtacaccactagggccgaggccgaatctagatacgcccgctatctagcgggagaggggagggagcgttggaggaaccggatgaatacgagtttcatcatgatgatgctcatcgtgatgaccgcagctctcttctatgtgatggtagtttagatgatcgatatcgacttgtaatgtgaagacaaactcgctactcgcggtctcgagacttgtaatataatgt

SEQ ID NO: 540 - DNA, 446 bp, Triticum aestivum
  Clone ID: LIB103-013-Q1-E1-C12
ccgccaggtaacggtctagaattcccgggtcgacgggggtcgccactgtctctctactactccatcccagccaaacttttctctcgccctcgaagcagcagccgccgcagcatccatggcacccaaggccgccgagaagaagccggtggagaagacccccgcgggcaagaagcccaaggcggagaagaaggtgccggcgtccaaggagggcggcgacaagaaggggaagaagaaggccaagaagagcgtggagacgtacaagatctacatcttcaaggtgctcaagcaggtgcaccccgacatcggcatctcctccaaggccatgtccatcatgaactccttcatcaacgacatcttcgagaagctcgccggcgagtccgccaagctcgcgaggtacaacaagaagcccaccatcacgtcccgcgagatcagacctccgtccgcct

SEQ ID NO: 541 - DNA, 449 bp, Triticum aestivum
  Clone ID: LIB103-013-Q1-E1-C2
cggtctagaattcgcgggtcgacgggatcatcaacatcaccatcactccgatcagcaggtacagggaagaactcggggaactcagtggcagaaggaaaatcgacctccagaagaggaagtcgagcgggaataggctcatcaggctcaacaggactgccaggacgcgcacgaagatgagccctaagggcatttgcctcagagatgcggcgaacctcctcggtagcaatgtgagtagcagtgtagcggcaggtgtcaaagatggctttatgggacttcccaataaagcgagcaaggcggtcaaatggcttgacgaaaggtttggtgtggcaagaagagctctcaccacacgacggagcaggagccttgcccctagaagtgtcatcacgcggagtccacatggattgaatgttgttcttgttgatggggcaagtgaagatagaatcaatgac

SEQ ID NO: 542 - DNA, 387 bp, Triticum aestivum
  Clone ID: LIB103-013-Q1-E1-C3
ggtcgacggcatggaaaaggagcatgcggcgttcgcatctgggtgaggatgaaatgaagatgcaagtagctgaagggtctgttttgcactcatgcccatatgtttgcgagttaaggatggtgatcttagagtcatgctagcgggtacttgtggattgtagaagtacttgtgttgaagttcgtcattcccgtctcatgcacgtccggtgcagcgtcacgttacgaagtcggtacaatagttaattattgattgtcctgctcatcagagccctgtatctactatttgaggacgaatctttgcgtgacacaccccaaaaaccatacacgtaaaaaaaagcggccgctctaaaggatccaagcttacttacgcgtgcatgcaacgtcaaaa

SEQ ID NO: 543 - DNA, 450 bp, Triticum aestivum
  unsure at all n locations
  Clone ID: LIB103-013-Q1-E1-C4
ccggtctagaattcacgggtcgacggcgagctcatagtgcacatccggccgtcctcgcaaagtggctccgagcacagcgccaccgttgacgccgaccaacagctccccttcacctgcggacatccggaggcgggaacgccgtccttttacgacggcggtccttaccgcgcgctgttctggtcgctgcccgagcttgacgaccaaggcccaaaaaacgtcttgccgttaccatggtcgcggttggagatgtggggcaggctgacggcggcggcgctggatgggacttgggccgtaaaccccccgattatacacgaacatgcgttacctgagtccgtgacgctctccaccgacgtggtgatgttctaccggccggacncggaggctgggggaacgaatgtgatgattgctgcaaccgaggatgtggagcatgtgtatagcatggaggaacat

SEQ ID NO: 544 - DNA, 414 bp, Triticum aestivum
  Clone ID: LIB103-013-Q1-E1-C5
attcccgggccgacggggtggcctacaaggagatgccgaaggaagggtgctcgacagtgagaagggggtccgtggcgtggatcgggtcagggccggagttcctgatcagcctggcggaccacgaggagtggagagacgcctacacggtgttcgggtccgtggtgccggaggacatggccatcgccgaggagatggcgatgctccccaccagcacagacgtctggagcggtgtgaccgtcaggctgctgaaggacccggtgtatatcaaggtgaagaggagaagcaacgtgaccgcctactgagctcgccggcgattttgttgttcctcttcttctttcacttgagatgtcaaaagataagaacacaaattacatgtccaaaggaagaaagaaagaaaaatagaggaggtttggc

SEQ ID NO: 545 - DNA, 450 bp, Triticum aestivum
  unsure at all n locations
  Clone ID: LIB103-013-Q1-E1-C6
ggtaacggtctagaattcccgggccgacgggggctccgagtcggctcccactgatcgcttctagaagcttccagaaagctccggcccgccgccatggccgcgcccttcttctccacccccttccagccctacgtctaccagagccaacagggatctgtgacggcgtttcagatatccggtggggatgtgcaggtcctgcaggtgatggtgaagtcgcaggacaagttgactgcgaaaccaggtacaatgtgttacatgtccgggaacattcagatggacaacaattacttgcctgaaaacgatggaggcgtgtggcagtggatatttggaaaaagcataaccagcactgttttcttcaatcctggccctgatgatggatatgtggggatttctgcgccatttcctgngaggatactgcctatagatctagcgaactttggtggagaacta

SEQ ID NO: 546 - DNA, 424 bp, Triticum aestivum
  Clone ID: LIB103-013-Q1-E1-C7
gtctagaattcccgggtcgacgggaactggtcattcacatggttagtcataaaatcctacataaaacttgtagatcactgaatatgatatgtttgattccttgcaatagttttgcgatataaagatggtgatattagagtcatgctagtgggtagttgtggattgtagaaatacttgtgttgaagttcgtgattcccgtagcatgcacgtacggtgaaccgttatgtgatgaggtcggagcatgatttatttattgattgtcttccttatgagtggcggtcggggacgagcgatggtcttttcctaccaatctatccccctagtagcatgcgcgtagtactttgtttcgataactaatagatttttgcaataagtatgtgagttctttaagactaatgttgagtccatggattatacgcactct

SEQ ID NO: 547 - DNA, 460 bp, Triticum aestivum
  Clone ID: LIB103-013-Q1-E1-C8
gtctagaattcccgggccgacgggcctggacatgaagcagatcaacaactggttcatcaaccagaggaagcgccactggaagccgtcggacgagatgcagttcgtgatgatggacgcgtaccacccacctaacgccgccttctacatggacggccacttcgtcaacgacagcgggctctacaggttcggctagctcggccaggcctcgtctcttaccgttaccggtgaccttggtcggcgccaatggcggcgaccgagtgccttatgctgaagcacttggggaccgacgaccgaagctagttaagttagcgtttgtgtgccgcatgcgagctggaatgatgccgcatgcttattttgtttatcatcactacttatacctacgtacctatcatttatgcatggactcgatcgcctttgtgtgggtttgtagcgattgacgccaacatatggacaaccgccg

SEQ ID NO: 548 - DNA, 431 bp, Triticum aestivum
  Clone ID: LIB103-013-Q1-E1-C9
acggtctagaattcccgggccgacggggagaagaagaaatccagcgagaacatcaaggtcatctacgcccgcgccaagcagtacgccgaggagtacgatgcccaggacaaggagttggttcagcttaagcgtgaggcccggatgaagggtgggttttatgtcagtcctgaggccaagctgctgtttgttgtcagaatcagaggtatcaatgccatgcacccaaagaccaagaagatcttgcagctgttgcgtttgaggcagatattcaatggagtgttcctgaaggttaacaaggccaccatcaacatgctccgcagggtcgagccatatgttgcatatgggtacccgaacctgaagagtgtgagggagttgatctacaagagaggttatggcaagctcaacaagcaaaggattcctctgaccaacaacaa

SEQ ID NO: 549 - DNA, 354 bp, Triticum aestivum
  Clone ID: LIB103-013-Q1-E1-D1
ggtcgacggcggtgataattgataatgatcttgctgaaaaacagaaactttttcactcaggaaaataattctcacttgtagcggatgcataataagacattgactcctctttgagaaagatcaatggttaaatttcctaggtcgtgcgaatgtttcggatgataccggagtgagtcaagtataccgactagcaagattgctacagacggttcggtctttgatatattcaggtttctaagtgttgtctgcttaatttgacaaatctatgggtagtatcggggggtatgaaccatgcaggagttgaaatacaatagagatcacacatattaaaaggaagaatgagttcacaacagt

SEQ ID NO: 550 - DNA, 465 bp, Triticum aestivum
  Clone ID: LIB103-013-Q1-E1-D10
ccggcaggtataggtctagaattcccgggccgacgggaaatcaaagcagaagtcaaaaaggatggtagagagtgacagtgaaattggaaatgcgagtgatagcagctctgaggatgccagaagaaagcggcaacgtcatggaaggaaatctaaggccacatctcaaatttctgctgaagatcacacagcagtagctgctctgaaggatgccacttcaactcaggaaaagattggaacaccaaggagtctggcacaagaagacaaatctcaactggagaatggcgagatgtgcacaaatggtgttaccgactccaaatctgaaaggaagtccggtatcgtgcctgttctaactggcaaccgaagcaaatctaggagccagagcacgagtgctaatcactccatgagcaagagcatgagtgtaagtcccagaagcccaatcaaaaggtcaaacgttaaccttgaaaa

SEQ ID NO: 551 - DNA, 452 bp, Triticum aestivum
  Clone ID: LIB103-013-Q1-E1-D11
taacggtctagaattcccgggccgacggggacaacaacaacaacaagctgcagcttgtcatgaagagcggcaagtacacgctcggctacaagaccgtcctcaggaccctcaggaactccaaggcaaagcttgtgatccttgctaacaactgccctccactccgcaagtctgagattgagtactatgctatgttggcgaagatcactgtccaccactaccatggaaacaatgttgatttggggactgcgtgtggtaaatacttccgagtctgctgcctgagtatcatcgaccctggcgattccgacatcatcaacgcaacaccagctggccagtaaacctgtgcatgccattttcagtgtctcgtctgatgccattttcttgctggacttgatttggtcttgtgtacatcatttatcagtcaatcaagtttgatgggactatggtttttcact

SEQ ID NO: 552 - DNA, 413 bp, Triticum aestivum
  Clone ID: LIB103-013-Q1-E1-D12
cccgggccgacgggaagaagaaggacgcggagaacaccaaggtcatctacgcccgcgccaagcagtacgccggggagtatgaggctcaggacaaggagctggtgcaacttaagcgtgaggcccggatgaggggtgggttctatgtcagtcctgaggcaaagctgctgtttgtcgtccgtatccgtggtatcaatgctatgcacccaaagaccaagaagatcttgcagcttttgcgtttgaggcagatttttaatggtgtgttccttaaggtcaacaaggccaccattaacatgctgcgtcgggttgagccatatgttgcttacgggtaccctaacctcaagagtgtcagggagctgatctacaagagaggttacggaaagctcaacaagcaaaggattcctctgaccaacaac

SEQ ID NO: 553 - DNA, 458 bp, Triticum aestivum
  Clone ID: LIB103-013-Q1-E1-D2
attcacgggtcgacgggcacgatttagctctgcagctagacagtaccctggaggccgcactcgagcccgctccaatcttcaattcagagccggctgcgcagatcgaggacggatggctagacaccgcctcgggggctgcaacctctacggagatagagccgaacactgaccttgtccctcatgaagcttgtgacttcgaggtaccggactccgaatctcccacgccccctccaatcgaatccgattgggtgccggtcatggagttcaccgcagcggacatctttcaacactcaccttttggcgacatcttgagttcgctaaagtatctctcgttatcaggagaaccctggccggactgcgctcaggacggttgggatgcggatgacgaagaaattcaaagaccaaccaccaatccattccccaccagcaccttccggcgaaccaccgcaactcccccg

SEQ ID NO: 554 - DNA, 446 bp, Triticum aestivum
  Clone ID: LIB103-013-Q1-E1-D4
cggtctagaattcacgggtcgactctggcaagtcaaccacagactggccacctcatctacaagcttggaggcattgacaagcgtgtgatcgagaggttcgagaaggaagccgctgagatgaacaagaggtctttcaagtacgcctgggtgcttgacaagctcaaggctgagcgtgagagaggtatcaccattgatattgctctgtggaagttcgagaccaccaagtactcgtgcactgtcattgatgctcctggtcaccgtgatctcatcaagaacatgatcactggtacctcccaggctgattgtgctgtgcttatcattgactccaccactggtggttttgaggctggtatctccaaggatggccagacccgtgagcacgctctccttgctttcactcttggtgtgaagcagatgatctgctgctgcaacagaatggatgccac

SEQ ID NO: 555 - DNA, 425 bp, Triticum aestivum
  Clone ID: LIB103-013-Q1-E1-D5
taaaggtctagaattcccgggtcgacgggtcggatcatgtgggtaaagtgtgcaacctctgcagagtgtcaaactattcgaataggcgtgtccacggtcaaggacagttggataaccgctcttgggatacgcccattgtttacaagagctggtgcgtgtgtttgtgtgggtgaaagctacttgagtcgagtttaatgacttgaatgttgattaagctggagttgatccaaactctgtttatgttgatacctataacctattcacatggagatctaaatacttatgatgcatgctttacaaagttgttaggacatgtcattgcactcaaaactagctttatgcaaaattatctacttagtgctatatcatgcattgttgtaccttgtttcaaaacatgggttgcttgtgagtacattaaaattact

SEQ ID NO: 556 - DNA, 440 bp, Triticum aestivum
  Clone ID: LIB103-013-Q1-E1-D6
ggtaaaggtctagaattcccgggccgacggggaggaataagaagaagaagaagaagccaacccatccaagcggcagcagggcagacggccggcgacgaaccaatccagccagccgaactcgtcagcgcgcagcagcctctcccgcgagataaaccatgggtggggtacttggtttgatacagattgatcaatcaacagtagccatcaaggagaccttcgggaagtttgatgccatcctgcaacctggatgccactgcttgccatggtgcctagggcagcagattgctggatatctttctctgcgtgtgcaacagcttgatgtccgatgcgaaacaaaaacaaaggataatgtctttgtcaacgttgtggcatctgtgcagtaccgtactcttgctgacaaggcatctgatgccttttacaggcttagcaacaccaaggag

SEQ ID NO: 557 - DNA, 428 bp, Triticum aestivum
  Clone ID: LIB103-013-Q1-E1-D7
attcccgggccgacggggtgtgtaatcatgcaagatggcaaagtggtggcctatgcatctcgccaactgcggcaacatgaaggaaactatcctactcatgatttggaattggccgcagtggtgcacgctttgaaaatctggagacattatctgattggaaagaagtgccaaatattcaccgagcataaaagtctcaagtatatattcactcagcccgacttgaacctttgacagcgaagatggctcgagttggttaaggactacgacctcggaataaattatcacctaggcaaagctaatgtggtggctgacgccctcagccgcaaaccagccaaccttaatgctctaatggattccttacctccggagctttatgaagaaatcatgcagctaaacttggtgatcaccgacgcccgtcttaacaatat

SEQ ID NO: 558 - DNA, 463 bp, Triticum aestivum
  Clone ID: LIB103-013-Q1-E1-D8
ggtaaaggtctagaattcccgggccgacggtcacgtcggcggggaggagggccgtctcctcgacgaaccggagggtcatgtcccctgagagcttccttgcaaggtagaggaaaggcttctcgaagttgtagttgctcttggcagagatctcgtagtactggaggttcttcttcctgtggaaggtcaccatcttggctttcacctgccggttcttcacgtccaccttgttgccgcacaggacgatcgggatgttctcgcacaccctgcagatgtctctgtgccaggtggggacgttcttgtaggtgagtcgggaggtgacatcgaacatgatgattgcacactggccatggatgtagtatccgtcacggaggccaccgaacttctcctgtccggccgtgtcccagcagtagaacctgatcttgccgtggctcgtctggaaattcagcggccgctctagaagatc

SEQ ID NO: 559 - DNA, 438 bp, Triticum aestivum
  Clone ID: LIB103-013-Q1-E1-D9
ggtaacggtctagaattcccgggtcgacggggtgcttaatggtatgctccaaataccctcaattgctttcccacttccacacatatgtcctaaacctaaagtcaaactcggccccactaattctttctatctggcgccaccgagtttggatgtcttagccactgccacaaaccctaggcaaatcagtctcaccgatagggatctcggtctcaccgagatgggattgtaatctctctgtgtatgtccattatcaaaatcggtctcaccaagtttgagcaatcggtactaccgtgattacaatgcaaactctctggttaacttattatcaaaatcggtcccaccgagtttgataatcggtccaaccgagtttgcctgaccgacactctggttagctaattaccaaaatcggtcctaccgagtttgtgtaatcggtctcac

SEQ ID NO: 560 - DNA, 421 bp, Triticum aestivum
  Clone ID: LIB103-013-Q1-E1-E1
ttcacgggtcgacgggctccctgaaggatagtctcgcatgtaaggtagtcattgccggagcccttgaatggcctcgactgaggcctctggcttcagcaagatcgccttggcactgtttcatggcagtcagaaaatagagatgaacacatgcattaaatatcattcttacctaaaggaaggttatggcgccaatatggatgatgaggattggaacacagatctccctttgtgcagttccaccaaaatgaaccaactgttccattctgacattccagttaaacaacacaaaagtcacttcttttaagaagagttttgtgcagtgcaccaaaaggtcacaacagcaggtgaattggatatccctgtttgcacaaaaaggcacaaaggaaacagtcagagtctcaaacaattataggcaaaaaca

SEQ ID NO: 561 - DNA, 435 bp, Triticum aestivum
  Clone ID: LIB103-013-Q1-E1-E11
gtctagaattcccgggtcgacggggactggcatccaagggccaagcccctggcgagatcgtgagtatccggactcccgaataacttcatggtttttattttttgccacacaatgtctttctaatgccgcatacaaccctgcagtccgcccaacgacgatcttcccgcttcattgagcgggtctttaggtgcatcggatatggattcttttccgaccgtctccaccccccgtgacacggacgatgccgaggtgggatcccgggaagggacccgccaggaggaggaggccccggaggtgtcgcaggacaacctcccggactttgcaccggactcggttccggatcccattgtggctctggagtccggcgggcggccccttcataagaaaggcaagaccgtgacgccggcaagctccgtccaactggaggggccggat

SEQ ID NO: 562 - DNA, 435 bp, Triticum aestivum
  Clone ID: LIB103-013-Q1-E1-E12
taaaggtctagaattcccgggccgacgggtctaccaagggtccatggggtttacgatggaagctcaccatattcgactccgaagcaaacgaggcctaggaaatcaagccactccggggagcagcaacaacctttcagtggcaatgggttttgatattgcctttcacgatcatcccctggattagtagtgatttgagccagcggatgtgctggtagcaacacatcattccgccttgggtttgtcagttcggtacccaatagatatatgttttttctctagccattgctattctttttagtgtgttgcgcccaacgaaagcattggcgtggtgccaaatttttgccatgtgccctcttgtacagtatatcactgcccaatcatttctacttaaaatgaaaccggtgatgggtatagatttttttttgttaaaaaccc

SEQ ID NO: 563 - DNA, 348 bp, Triticum aestivum
  Clone ID: LIB103-013-Q1-E1-E5
aattcccgggccgacgggtcggggaaagcccccgcgatacgtaaatcgatctggacagacctgctcgactgaacatctcctgtcgcacgtcgaatgtaagtcaccgagctagtttcattttgccttaaggatgaggtaatgcataactggagttcagacatgaattgacacattgactcagacacatcatggtctatcatgacgactacatactgagggaacatgatcgaacagaccaaaataaacaatctgtgtgagaaagtataaactgtgtctctagaggatcgaacattaagatatatcacatgtgacttcaaaactcttctgtaaagccacacacattcaatt

SEQ ID NO: 564 - DNA, 445 bp, Triticum aestivum
  Clone ID: LIB103-013-Q1-E1-E6
tataggtctagaattcccgggccgaccagcacctgtagcttaatgaggccagcgaaaatgtcgtcgttgctggcccgggacttcagcaatgccagctcgtcgtgatcgccgacacggcgagcaagcttgtgagagcccttgcatgctagtgagagctcgatcgagggctccgcagtgcgccgggacatctctgctacggttgccgcatggcggcgggacctctctagtgcttctgcggccttggtcttttttccctggtcacatgtccacccgaaactcctcctaccggtcatggcggaacgacttgacatgaaagaccgggttgtgggtgatgaggagaggaactatgaagtaatttttgagtgggtagtttttatagcccggtgctaagtgtgaacacatatttgtttgatcggtgtgaacagatttgcaattacttagtgca

SEQ ID NO: 565 - DNA, 91 bp, Triticum aestivum
  Clone ID: LIB103-013-Q1-E1-E7
cgcgttgtctattactacacccaatagtgagtcgtattatgagtctgtcgtcgcagccgggccggcacttctgcagtgcgaggtcgtcatg

SEQ ID NO: 566 - DNA, 422 bp, Triticum aestivum
  Clone ID: LIB103-013-Q1-E1-E9
ggtctagaattcccgggtcgacggaatgagcgaagggagctttaatgagcagaatgatcaatctggtaatcgcgatggctatacgaagagtagtgatgaaggcaagatgatgtcggctttgtctctgggcaattcagaaatggcatacacaccgccaaaacctgaccgcactcatccctttgccatatcatacccatatgctgatccttactatggtggtgcagtggcagcctatggcgcacatgctattatgcacccccagatggtgggcatggtaccatcctctcgagtgccgctaccgattgaaccagctgccgccgaagagcccatttatgtgaatgcgaagcaataccatgccattctccgaaggagacagctccgcgcaaaattagaggctgaaaataagctggtcaaaagccgta

SEQ ID NO: 567 - DNA, 447 bp, Triticum aestivum
  Clone ID: LIB103-013-Q1-E1-F12
ttcccgggccgacgggccacccaacgtgatccccaggacttccctccgaccactatctttaaccgacgagcgtccaaagtccaaatctgggggaaggacgataacacacaaactgcaactggcctctttcgagaaggtgcctagccaacagagaaccagagcaccacacctccaatcatcggctcctcgccgatcatgcaggccgaaagagtcgattgaaacactgacaacaagccccatcaaaaggacgttcctgtcgtcgccacctggggccgccacctcgactttcgagcccccccccccccacatgagtttccctggccgaatccacatgtgaagccaccatgagtgtcgctgtctctaggacggtcagatttgagtcaacaaactttcccacccccggagctgggtgtgccatccacttcctaacaaaccgcaatgggaaaa

SEQ ID NO: 568 - DNA, 401 bp, Triticum aestivum
  Clone ID: LIB103-013-Q1-E1-F6
gtataggtctagaattcccgggccgacgggtgatggaataaatgatgctccagctctaaagaaagcagatattggtattgctgttgctgatgccactgatgcagccaggagtgcttcagatattgtcctcacagaaccaggcctcagcgtgatcatcagtgctgtgcttaccagtcgtgcaattttccagcgtatgaagaactacactatctatgctgtctccatcacaattcgtattgtgcttggatttatgctacttgccctcatctggaagttcgactttccaccgttcatggtcctgatcatagcgaatccaaatgatgggaccatcatgactatatcaaacgatcgggtaaaaccatctccactacccgacagctgggagctgggctgagattttc

SEQ ID NO: 569 - DNA, 380 bp, Triticum aestivum
  Clone ID: LIB103-013-Q1-E1-F7
gtacaggtctagaattcccgggccgacgggtcagtacaagctcatttcatctgcacaatgatccatgtaagaatatgggtcataattaggatggttcttcaatgtattcaaagggatgcattggagattttcgatgttgctagaaagacattttcacgagaaatgtcaccgatatattatggaatagtctaggaagaacggaagtgtgctaacttagggtggattcatgacgagtggtcacagtctttgagtatctgccaaacaagccactgaatcatgtatgaggaagagaaaacatgtgtgattatagaaagacgagtcagcgatgaagcatattacagcacgcgtcatatcaagtagaacgtgcagaatcacctcac

SEQ ID NO: 570 - DNA, 455 bp, Triticum aestivum
  Clone ID: LIB103-013-Q1-E1-F8
gtataggtctagaattcccgggccgacgggttctaaatggggagtttgtcgtggttaacaagcatcttctccatgacttgactgagatgggtatctggacacctgctctgaaaaataagataatttatgaagatggttctattcagaagatggaagaaatccctgatgatcttaaagcaatttacaagactgtttgggaaattaagcagaaaactctggttgacatggctgttgatcgtggatgctacatcgaccagagccagagccttaatgtccacatggatcaaccaaactttgcaaagctaacttcgttgcatttccatgcttggtccaagggcctgaaaactgggatgtactatttgagaacaagggcagctgctgatgcaatcaagtttactgtggacactggctttctgaaggtcaatggggatgctaatgggactaatggcactaat

SEQ ID NO: 571 - DNA, 438 bp, Triticum aestivum
  Clone ID: LIB103-013-Q1-E1-G1
ccggtctagaatttacgggtcgacgggggagtgcgactggagccacgataatcgaggtctgtgcgacatgcctcacctggatgatgattggtgcttcagcattaagcacgaggagaccttcgaagttgaaacggtacacaacaacgacaagtgttattttcataattaagcatgacttaaactctttcaacgtgtaattttcatcttttacaattcgagtatagcttatcccatgccatgcaagatgctatgtcttggagaggatggattttgaagaccatgaaatttctgaaacaaagaaaattcacctaaggactcatcatgatgtggactttgaagtaaatctatataattctgagagcacaacccatttggttgcaaaaattgggaagcattttgcaagatgtatggttttgatgagggtatgcttatcaccat

SEQ ID NO: 572 - DNA, 407 bp, Triticum aestivum
  Clone ID: LIB103-013-Q1-E1-G2
ggtctagaattcacgggtcgacggggcttggaacatcttgtatgatattagtatttgctttttagttttccacaatcatcctcgctgtacacaccttttgggagaagcccacttgattagaatttattagaattctctatgtgcttcacttatatcttttgagctagatagtttttgctctatgcttcacttatatctttcagagcacggcggtggcttaattttgtagaaattgctagtctctcatgcttcacttatatttttttgagagtcttaaacagcatggtaatttgaatgaaaactatcataggaggtgaattggatgccatgatcaatttgatacttgataattgttttgagatatggaggtagtgatattaaagtcatgctagttgggtgattatgaa

SEQ ID NO: 573 - DNA, 460 bp, Triticum aestivum
  Clone ID: LIB103-013-Q1-E1-G5
gtctagaattcccgggccgacgggcgcgcttatgatctgcttctttttgctctggattggtacacgaattgcttaggaattcctaatttgatatgaattttggagttccaaaagtatacgttcaatacagattactacagactgttctgtttttgacagattctgttttctatgtgttgtttgcttattttgatgaatctatgagtagtatcggagggtatgcatcatagataagttggaatatagtagatattacacccatatgagcttagaatgagtttattatagtacctaagtggtggttttactttattatactaacggagcctacgagttttctgttgagttttgtgttgtggagttttcaagttttgggtgaattcttttgatggattatggaacaaggagtggcaagagcctaatcttggggatgcccatggcacccccaagataatccaag

SEQ ID NO: 574 - DNA, 452 bp, Triticum aestivum
  Clone ID: LIB103-013-Q1-E1-G7
gtaccggtctagaattcccgggtcgacgattgaagcaaccatgtattccattcatttttttcacgatattttactttctcaagatccaatccatacctagttcaatcttgttactggccatatctctttacatgttctataatacaatatccgcataaccaaacacatttatcacatggttgcaagctacttaggatgttgtattaccgagagggcccagagatatctcttcgtcacatgaagtgaaaaatcccaatctttatccatgcaacccaactaataccttctgagatgcttgaagagtaccattatgatcacacagttatgaaattttggttgatacccacaaagcattcttccggttttagagagtgtcatgatctcatagtctaaggaatatatacttgacattaagaatatgtagcacataaactaagtgatacgatcatatg

SEQ ID NO: 575 - DNA, 281 bp, Triticum aestivum
  Clone ID: LIB103-013-Q1-E1-G8
gtctagaattcccgggccgacgggcttgacgattctggtttgagcgacttatcccgagtaaccagtgtagcatccttctttgtcagccgagttgacagtctgatcgacagaatgcttgacaagattggtacaccggaagctcttgccctgaggggaaaggctgccgtagcacaatcaaagatagcaaatcagctttacctgaaaaaattctctggcccgacgtcgcatgctttggtgatgaaagtaccaatcagcataagttgttgtgggcatccaccatc

SEQ ID NO: 576 - DNA, 447 bp, Triticum aestivum
  Clone ID: LIB103-013-Q1-E1-H1
cggtccagaattcacgggtcgacgggactttagggttgtctcggtgtcttctatatagtttttatcagctttcttggagcccaacagggatgtctcactatcttgaaccttatctacattacttcctttaccattggataacagggtactcttctccaatattttattcgcattctaaaagagaaacaaacaaatgcatctcaggtttacaatgtagtatatgaaactcattttggtaaaccagttaagtagtaaggtggacaggataacagcatgaaacaaacatatatctatgtagtatggtcactgtatggtctatatcattctagtttatgttgccaaatcaagatagatacagttcaaatcatatctatttaagacaaagcagcatagacataatataagtgtgggaaactaaacagcaataacaacacttgtaatgtgcat

SEQ ID NO: 577 - DNA, 159 bp, Triticum aestivum
  Clone ID: LIB103-013-Q1-E1-H11
cgggtcgacgggatttgagagaacaaaaaaaaaaaaaaaaaaaaaaaaaaaaaaaaaaaaaaaaaaaaaaaaaagcggacgctcatagaggatcaaaagcttacgtacgcatgcatgtgaagtacatggctcttctaaagtgtcacctaagattcaatt

SEQ ID NO: 578 - DNA, 457 bp, Triticum aestivum
  Clone ID: LIB103-013-Q1-E1-H3
ggtctagaattcacgggtcgacggggtcatgctagttgagtagttgtgaatttgagagatacttgtgttaaagtttgtgattcccgtagcatgcacgtatggtgaaccgttatgtgatgaagtcggagcatgatttattgattgattgtcctccttatgagtggcggtcggggacaaacggtggtcttttcctaccaatttatccccctaggagcatgcgcgtaatactttgtttcgataactaatagatttttgcaacaagtatatgagttctttatgactaatgttgagtccgtggattatacgcactctcatccttccaccattgctagcctctcttataccgcacacctttcgccggtatcagacacccaccatataccttcctcaaaacagccaccatacctacctagtatggcatttccatagccattctgagatatattgccatgcaact

SEQ ID NO: 579 - DNA, 446 bp, Triticum aestivum
  Clone ID: LIB103-013-Q1-E1-H7
ggtataggtctagaattcccgggccgacgggtccatgaaagcatgccaagtttcatgaatttcagacgagttttggatttactggaatttaaaaactaggcatctcaatgttgtgccggcaatcaacggtgccccggtgtttgaaattcattcccatttcttgcatgggacctaagcatgcacccaaggacacagatttgattttcaaccaatttatatgcactgaagcatgtgcatgtagttcaagtttgaattatgcacataaaatgcattgaaaactcagttaatgcataaaaatgtccaaacgaaccccgaaaaatcacaaagattcacacaacactcccgttgttctatgttgactcgagaaaaaaaattgaaaacaatgagaggcaatggatataatttcgtccccaaagctgggatgttccctaccgaaaaccatcatg

SEQ ID NO: 580 - DNA, 404 bp, Triticum aestivum
  Clone ID: LIB103-014-Q1-E1-A1
taccggtctagaattcccgggtcgacggggtctcgcttcaagaagtccggaaagatattcccagccggcgtcgtgtccctcctttccttggtcatggtcggaggctacgcccatgggattatgcgtagctcgcatgcgtgacgcagtcagtgcggttaccatatgcacctccggacttagacttgcgagttctttttcttttttgtgtgtttcgaagcagttgtctgcatatcttctgtgttttcggacctttggtgactgactgactgtcgtgttacattgtcgttgaactcgaagttgatgttctagtgaactaagtgaagtatgtatgggcggatggtggaaatcaaaaaaaaaagaagaaaggagaaaaaaaaagcgggcgctctagaggatccaagctt

SEQ ID NO: 581 - DNA, 391 bp, Triticum aestivum
  Clone ID: LIB103-014-Q1-E1-A10
attcacgggtcgacggcgttattaactcatcgaaagatcggggccctcgcctctatcaagtggtatcagttttcaggttgctcggtgagaatttccagttttttctagattagatttattttcttacctattgtccaagaaaaagccacaaaacaaaagttagatctattcatactttgtcctagccagactgggcctttgcaatttttcttttcattgtttgtattattgaattatcggttgcatcgccgtgtcgagttgctggtcttagtgtctagttcctttagagtttcgagttctgttcacattagtcacgccgctgctgcatcattatcccatccgctgtccaccatcccatccaccaattttcaccacgtgctacgcgctgttc

SEQ ID NO: 582 - DNA, 426 bp, Triticum aestivum
  Clone ID: LIB103-014-Q1-E1-A12
ggtcgacggcccacggtacatgtgagccggagacaggagcggcacgctgttgatcactgaccgttgccggtgcatgtacattttacatctggagaatggcgccatggaggaggtgacggaccacctccgtggcctccgcgactacaagaccgccatggccgtcgagatagattggccggccttcttcgtctgtcggcttcttggtggaaaggcacatgtttaatttggagcgaacatttctatctcatcggcgtaaactggccgacctgtgtattaagtcgtgttaattatgttcaagatcgcaactacctttgtgcgaccggaacaaaaacctcaacatctatttctgtactccctcccggaacgttttttttgttttaaaagaagacccgttgccaaaaaaaaacaaaagtttaagaaataaaa

SEQ ID NO: 583 - DNA, 330 bp, Triticum aestivum
  Clone ID: LIB103-014-Q1-E1-A5
cgcccagtccattgcaacaccctatagtgagtcgtattactgtgtcagaactcagcgagcttccgatcgttctggccgcacatattatggacatccagttttggccactgtgggagagactacgacagacagcgatgttcacagtgatgatgtcagtctaagggccgactatacgattcctccgacatgcgtagccgatcgacttcatggtatccccgcggatgctactcttgtggcgaacctttcttgcgctctatgctcgaacgacttggaatgggtactcgctattatatcgcatttgctcgatcagttacctccttatgctatcag

SEQ ID NO: 584 - DNA, 391 bp, Triticum aestivum
  Clone ID: LIB103-014-Q1-E1-A6
gtaccgagtctagaattcccgggtcgacgggcttatatctttttagagccggcggtggttttactttgaagaaattgatgaactgtcatgcttcaattatattattttgagagtcttataaataatatgccaattttcttgggttatgaatttagtcctcatgtgataaggtattcaagagggatataataaaaaattcatgaagtattgaatatatgagaagtttgattccttacatttgttttgagatataaagatggtgatattagagtcatgccagtgagtaattgtggtttagtaagaatatttgtgttaaggtttatgattcccgaagcatgcacgtatggtctctcgttatgcgatgaagttggagcatgatttaattttgaat

SEQ ID NO: 585 - DNA, 442 bp, Triticum aestivum
  Clone ID: LIB103-014-Q1-E1-A7
gtaccggtctagaattcccgggtcgacgggatcttcggccccatcaacgaatcatatttctcggtcaagatgtttgagggagtcattgcaacatcttacaacgaaggtgacaagttcttcattgaccccatgaagctgctgcccctctcacgcttcctgccgcagccaaagggcttgactccaagaggtggtggtcgaggtggaagaggtggtggtcgtggtggatttggtggccgtggtggattccgtggaagaggtgcaccaaggggtcgtggacctcccaggggtggagggcgtggtttcagaggacgaggcagattctaggatgtagttttaagtttgctgtttgttgaaacatgatgctctacattatatgttcagctggaaacattatgctaagtcagctgtgagcgcactttgtgtggaaattgaattccttgcg

SEQ ID NO: 586 - DNA, 420 bp, Triticum aestivum
  Clone ID: LIB103-014-Q1-E1-A8
aggtaccgagtctagaattcccgggtcgacgggttttgaaattgaagtcatcacaagcgcctcactatcgacgagaacgtcattttcaattgaaaatattgttccttaatgagacaccaaagtgtcagacgtcgggtttaatccctgtttgcattggggtaccactgccctattaatcatccaatcagatgttggttgtcatgattaaggcgaaactaccgattgaagtaaccttccttatttattcagtagccacgcatccatgccctgtagtaatggacaataaaggatgatttgtgtttcttctattcctcggcatgcgcttccctaccccatcgtgctgcactgatggatgttttggcagacatctcaattttctcttttgttgcaacgcacagccatatgtgccatctatcccta

SEQ ID NO: 587 - DNA, 395 bp, Triticum aestivum
  Clone ID: LIB103-014-Q1-E1-A9
ctcgcgggtcgacggggatccctatagtgagtcgtattaaagcgcgtggtccccggggatacgtaattcgtccggcgcggtatcattgctgagcgatcgcacgctatctggaaatggagtgttagtttcagagagagattgtgtgggtgtgaagtgtactgaagattgaggttcatcctctgactaacttagtcacagatgctaacccaacagtaaatgaccaacgaaccttcgaatgagtaggataaggaagattagtcggaggattcaataacggaattagagaaaacagagcagcagctcaataataacacctaagctttagaatcaacactgcgatttggaaaacggaggataagacagtacacgaagttatcgaaactctgaaccacatg

SEQ ID NO: 588 - DNA, 389 bp, Triticum aestivum
  Clone ID: LIB103-014-Q1-E1-B10
ggtcaatgggacaccctatagtgagtcgtactagcatcgctcgaaaagcacaaggccacaggggaacgctccggacttgcgagatatattggaggataaggcaagacaatcaagatcgatctacggatcacgtggacgccccatgatacgcgacgacagccgtcgcgccggacacagtaagtctgggcgggccgaacaaaacagacaaagctcttttgagctccgtcgtgatatcgcccagtacagaggcgccgcacgcccactatgcttcacagatgaagtaatggatcatcaaatccccgaagggtttaaacctgtcaatattgaatcttatgatggcacaacagaccccgcggtttggatcgaagattatctcctccagatccaca

SEQ ID NO: 589 - DNA, 264 bp, Triticum aestivum
  Clone ID: LIB103-014-Q1-E1-B12
attcaagggtcgacggggttagaaattgtaaatatgcattgttgtatcgcgacctgaatgaatgaaataaacgaaataacgctcttgttcaaaaaaaaaaaaaaaaaaaaaaaaaaaaaaaaaaaaaaaaaaaaaaaaaaaaaaaaaaaaaacaaaaaaaaaaaaaaaaaaaaaaaaaaaaaaggggccgcccaaaaggatcaaagctaaggtacgcgtgaatgcaaggtcaaaccccttcaaaagggtcaccaaaattaaatt

SEQ ID NO: 590 - DNA, 311 bp, Triticum aestivum
  Clone ID: LIB103-014-Q1-E1-B2
ccgggtcgaccggtacagctacgaaaagactacagaagtcgacggagaatacgcgacactggatgcccatgctaacaggagtgcgagggttgactggctccgctgcaatgtgaggctgtcatcgactcaggatcacaagggttgtgcgtgcttagagggattgtctgcctaaaagttggactagggtcaggccatcaaacaagaactaattccatgacgtcaaatcgggcgatctataggatcaaaccttacgtacccgtgcatgccacgtaaaatctcttctacactgtcagcgaacatcagttcaatga

SEQ ID NO: 591 - DNA, 419 bp, Triticum aestivum
  Clone ID: LIB103-014-Q1-E1-B5
attcccgggccgacgggataatgaaggggcggatggcgatgttcctgagagtggtcctgtcaaaaatgaggagcatattgcttccctgaggcctaaaagatcaaagagactagtgaggagcacgggcgaggataaggaacccgttgctgcttgtgatgttgagaaacctgcagatgcagctgaaaacaatgacaacaatgatgcagaagagttgcaagaccagactccttctgcctagttgacctactgggctgacctgatgagaacataagatgcgaatggcaagactctaatttgtggtgtctagtacgagcatcaaagatggcagccagaggaggagctctggatctgcgtaaggtgttacgcggtttaataagtagtttaactctgcggtggagcttcctttcagaaccctggga

SEQ ID NO: 592 - DNA, 404 bp, Triticum aestivum
  Clone ID: LIB103-014-Q1-E1-B6
attcccgggtcgactggtattgaggataaagaattgagaagaacactccagtcacttgcatgtggcaaagttagggttctccaaaagacaccaaaaggacgagatatagatgataaggacgaattcgtatttaatgaagattttagtgctcccctttatcgcataaaggtgaatgcaattcagatgaaggaaacagtagaagaaaacacaagcaccactgagagagtatttcaagatcgtcagtatcaggttgatgcagccatagttcgaattatgaagacgaggaaaactctcagccacacccttctaataactgagcttttccagcagctcaagttcccgattaagccagcggatatgaagaagagaatagagagcctaatcgacagggagtacctggagag

SEQ ID NO: 593 - DNA, 75 bp, Triticum aestivum
  Clone ID: LIB103-014-Q1-E1-B9
gctctataggatctacgcttacgtacgcgcgcatgcgacgtcataactcttctacaatgtcacctagattcagtt

SEQ ID NO: 594 - DNA, 417 bp, Triticum aestivum
  Clone ID: LIB103-014-Q1-E1-C1
ggtctagaattaccgggtcgacgggacccactatattggatttcaaggaatttaattatgaaagttgctctttaattgattgtatttccttgttgcaatccgtgctaaattctccacatgcttatagtcaacataaagccttcaccgaacatattgttgatgccttgatgcaatcttatgaagaaaaacttgagttgaaagtttctatccctagaaaactctatgatgagtgggaaccaactattaaaattaaaattaaagatcatgagttttatgctttgtgtgatttgggtgctagtgtctctactattcccaagactttgtgtgatttgctagattttcgtaattttgatgattgctctctaaacttgcatcttgcggattctactagtaagaaacctatgggaaggagtaatg

SEQ ID NO: 595 - DNA, 396 bp, Triticum aestivum
  Clone ID: LIB103-014-Q1-E1-C12
ggtccagaattcacgggtcgacgggccgcggcaagggaggaaaggggctcggcaagggcggcgccaagcgccaccggaaggtcctccgcgacaacatccagggcatcaccaagccggcgattcgtcgtctggctcgcaggggcggcgtgaagcgcatctcggggctcatctacgaagagacccgcggcgtgctcaagatcttcctcgagaacgtcatccgtgacgccgtcacctacaccgagcacgcccgccgcaagaccgtcacggccatggacgtcgtctacgccctcaagcgccagggacgcgccctctacggattcggaggctaggcgaattcagctcgcaccacttgatcagatattcagattagcagtagctaggcgttgttcagtgttc

SEQ ID NO: 596 - DNA, 333 bp, Triticum aestivum
  Clone ID: LIB103-014-Q1-E1-C5
gtaccagtctagaattcccgggtcgacgggggcaagggcgccgtgcagaagggttccaagggcccaaagattggcggtggcggcgggaagcgttgaaagttgattacgccatagacatagagttgtgctgcctagccttgtttcctatcctactatcatagacctttgtcaagttattaccccgccctcttgaatttgcaccttatctctgaggctgaatggtgttaacgttttggagtgtcttgatgagtttatttataatgaatggttcttatgttggctcttatcaagacaaacaccagggacgcgccctctacggattcggaggctagg

SEQ ID NO: 597 - DNA, 411 bp, Triticum aestivum
  Clone ID: LIB103-014-Q1-E1-C6
ggtaccagtctagaattcccgggtcgacgggcgtcagtccgggttagttccattcaaatcatacaagttagagtccaaaacaagggtaaaagcatttggaaaagtagatacgacggagacgtatcaactcccccaagcttaaacctttgctttccttcaagcaatttagttgataaactgaaagtgataaagaaaaattttacaaactctgtttgctcttgttgttgtaaatatgtaaagccaacattcaggttttcagcaaagattatgaactaaccatattcacaataacatttaggtctcatgtttactcatatcaatggcataatcagcaagcgagcaataataacaaatctcggatgacaacactttctcaaaacaatcataatatgatataacatgaagggaact

SEQ ID NO: 598 - DNA, 375 bp, Triticum aestivum
  Clone ID: LIB103-014-Q1-E1-C7
attcccgggccgacttcttctcccacggctgcggtggctgccgcgctctccaccccaagattgcgcagttcgctgagcggaatccggacgtgctgttcctgcaagtcaactacgagaagcacaagtccatgtgctacagcctccatgtccatgtcctccctttcttcaggttctacaggggagcccagggcagggtcagcagcttcagctgcacaaatgcaaccatcaagaagttcaaggacgccctcgcaaagcactcgccggacaggtgcagcctcggcccggcgcgggggctcgaggaggcggagctcttggctctggcggcaaacagggacctggaattcacctacaacgagaagccgacgctggtgccga

SEQ ID NO: 599 - DNA, 360 bp, Triticum aestivum
  Clone ID: LIB103-014-Q1-E1-C8
acgcgcgggccgatggggaacccgatagtcagtcgtattatctttttataagtgggggagaggaaaatgagaggtgaatggcgaataatgtaatgcaagagatgagagtttatgatgggtacttggtacgtcttgacttggcatagatctcctcggcaacgacgccagaaattcttcccgctacttcttgagcttgcgttggtttttcccttgaagaggaaagggtgatgcaacaaagtaaagataagattttccatcagtttgagaaccaaggtatcaatccagtaggagacaacgcatagatcaccgagtacacacgtaagcagacaaacttgcaccaaacgcgatagaggggttgtc

SEQ ID NO: 600 - DNA, 432 bp, Triticum aestivum
  Clone ID: LIB103-014-Q1-E1-D11
attcacgggtcgacgggtatcaatttatatcagtggatttatccatgaaaaagttattttacagtagacacaatgcaaaaacaaaatatgaattggtttgatacagtacttagagtggtgatttgctttattgtactaatggatcttatcgagttttctgttgaagttttgtgtggatgaagtgtctaaacgaggaggtctcgatatgaggaaaaggaagagaggcaagagctcaagcttggggattcccaaggcaccccaagtaaatattcaaggagactcaagcgtctaagcttggggatgccccggaaggcatcccctctttcttcaacaagtatcggtatgttttcgtattcgcttcgtttatgcattatgtgcaagtcttggagcgtcttttgcatttagttttcatttttattttatgaaccatgc

SEQ ID NO: 601 - DNA, 402 bp, Triticum aestivum
  Clone ID: LIB103-014-Q1-E1-D12
cgggccgacggggtgcatgagcccccaatgactagtgtcgaggctctccttcagcagctccaccaagccgtcaatgaactcctcctgcttattgagctgatcgggcatgttgttgagggataacgactccagcgccgccagctcggcatgtttacctccgcggctagggcgctcctgggagccctcgccttcccgtgagagatctttcgaggtctctgccaggcggtgagccctctcatttttttccgcatccttggttgctgctcccttgttacgagtagttctcgacctagagctctgcacaccgtccatggctagttcccctttttataacctagtactagcaccagtactaaaacctgcatagtgggaacacattcagatttgatacgtactaggtgt

SEQ ID NO: 602 - DNA, 375 bp, Triticum aestivum
  Clone ID: LIB103-014-Q1-E1-D4
gggtcgacttagccatcggcgaccacccggcggtcatcaccaccgacagtttcatggggaatatgcccaccgcgcaggtcaagcgcatcgccgaggacctgcaagaccaaacggaggagtcagctcttgtgatctccggcatcacggggaggattaacagggccgtgtgggggcccggcaaccggaccatcatcaccgccggtgaggatgccaccatccgcatctgggactctgagaccggaaagctgctgaaggagtcagacaaggaggttggacatcagaaggcaattagctcactgtcaaaatccttagattggtctcatttcctcacaggttccttggataaatctgctaagctatgggatgcaagaacac

SEQ ID NO: 603 - DNA, 312 bp, Triticum aestivum
  Clone ID: LIB103-014-Q1-E1-D5
tcccgggtcgacgggaaaagttctgtcagcacgacagcgtggtgacgatcctgatgtactattgtcgcaggggttcccctaagcaacgccaaaatattaaccaaggaataatgtgcaaggggggcaacgcacaccgctaaaaacatgattacattgattaaccttgtgtctccaatgggtgccccctgcccccgtttatcaatgaataatagacgggatgggccggccctccccaaagccccccctatgggagtcccactcccaaccggaataaggatccccccttccaaattcaagataagagtccttcca

SEQ ID NO: 604 - DNA, 360 bp, Triticum aestivum
  Clone ID: LIB103-014-Q1-E1-D7
taccggtctagaattcccgggtcgacggggttgttccatggctacttccttccccgtagaaaacaaagattagtgacaaagagaagaaggagaaggaaaaagcctagagagagaaggacaaaggggcggcgacagctgctgggatggcctgctcgtggcatagctagagctcctctccaagcgcggtcggaggcaggaaggccgggctgctggagtgggaagaaggggggatttgcgtggttttgctgtaaaagtaggtttattatcagaataaatagtatctcctcgctcatttgtaatcaataggatcaatttatatacaccagctgcttgaggcatctacaagcagaggaagggaat

SEQ ID NO: 605 - DNA, 399 bp, Triticum aestivum
  Clone ID: LIB103-014-Q1-E1-D8
aattcccgggccgacgggcgataaactcgagcttgtggaccaagatgaggaagggcactgtaactcggaatgcaagaccattgagcgtgcatgccaggaggtgatgggttatgctgataccgatgttgctgagtttgtctacacaaataagccttcagttgatcagctgataaagtttgtctgcaaagatattaccaaagcatgtgctgcagatccaccaccagttccaaaagaccgggtccctggagaaccctttgcagcaaagccctcaaaggatgctgagatggagaagataatgagatcaatggagggcatgccaggagccccaaacatgaagatgtactccagagacgatctgatgaagaacaactttggcgttgaaggtgatgaggatgatga

SEQ ID NO: 606 - DNA, 436 bp, Triticum aestivum
  Clone ID: LIB103-014-Q1-E1-E10
ggtctagaattcacgggtcgacgggcttgttaaaggagcaagtgcaggggagggtctgggcaatgccttcttatcccatatacgtgctgttgatggaatctttcatgtcttgagagcatttgaagacacggaaatcactcatattgatgatacagttgatcctgttcgtgatttggaaactattagtcaagaactgaggctcaaggatatagagtttgtgcaggctaaaattgatgaccttgagaagtcaatgaagaggagcaatgacaagcaacttaagatagaccatgaattatgtcagagggtcatgacacatctccaagacgggaaagacgtacgtttaggagaatggaaagctgctgaaattgagatcttgaatgcctttcagctgcttactgctaagccagttgtttaattggtgaacatgaatgaaaaa

SEQ ID NO: 607 - DNA, 107 bp, Triticum aestivum
  Clone ID: LIB103-014-Q1-E1-E11
tgaatcgtattatgagtgacccggggtacttttctactgcaagtatgccatctttgtcgtcggcgataatgacgaccgcatatatctttgcagttcgggcattaggt

SEQ ID NO: 608 - DNA, 376 bp, Triticum aestivum
  Clone ID: LIB103-014-Q1-E1-E2
gggtcgaccggtcgtactatactgggtacggtggctgagacgatttcatctgccaaaagtgggttgcatgaagcttttatgagcctgctaagaggctttgaggtacacaaagtaatatatatatatatattttgacggtaccgcacatgctaggtgtgccctatacagatagtagcccctgagactctggttgctgtccaaaggcagcaaacagagaatcatagtaccaggtgatgatcatgctactttcatgtgcaggcggctgatggtccggtggctggccggactggtgagtttgctgaactgaggcggcaacttgatgcggcagatgccgacatcgttcttgtaaacaagcagcttgatgaggcacagggta

SEQ ID NO: 609 - DNA, 438 bp, Triticum aestivum
  Clone ID: LIB103-014-Q1-E1-E6
attcccgggccgacggggacatgaattatgatgcacttgcaagcacacctcgtggagaaatctgcatcaagggagaaacattattctcagggtactacaggcgtgaagaccttacagaggaagttttggttgatggatggttccatacaggggacattggcgagtggcaacctgatggaagtatgaagatcattgatcggaagaagaatatcttcaagctttcacaaggagaatatgtagcagttgaaaatttggagaacatttacggtgttgtttctgctatagactcgatatgggtatatggaaatagtttcgagtcattccttgttgccgtagtcaatcctaacaaggaagcccttgagagctgggctgaaggaaatggaaccagtggtgattttgaggcactgtgtgagaatccaaaagcaaaagaatatattt

SEQ ID NO: 610 - DNA, 408 bp, Triticum aestivum
  Clone ID: LIB103-014-Q1-E1-E7
tctatactaggactcgtgggccgatggggatcgactatagtgagtcggatcaaggaactgaatatctagtgcagccgcttggccgtgctgaagatgaagagcattccagtgactttgagccggaagaaaatggtgatggtgctgaggatgaggagattgaggatgatgatgctgaggatggtgaggattctgtcaagccgcaatcctcatcgaagaggaagaggtctggtggggaggatgaagatgatgatgacggtgatgatgatggtgatgatgatgagaagcctccatcaaagcgatagtcaatttgttcttgctgatctggtatcttttctgcttgggccaagaaggaaaataatcctctgggagaggattgttggtaaatgctgtagctttaggacatctgtg

SEQ ID NO: 611 - DNA, 407 bp, Triticum aestivum
  Clone ID: LIB103-014-Q1-E1-E9
attcacgggtcgacgtcgactcccacgtctgtgttggctactccgctctccagctcataattgctcaattcactgaccgtatcacgaacctactatacacgcctattggctatgaggtgcactgctccatgtgctacatcctccatggctcagtgtgcccttgcttcaagttcgacgctggagggataagcaattcttcctgcgtcagctgacacgggtctgccatcaacaacttcagcgtcacccctgtgatctggtccactatcctgtgtaacctcttttctggattatggctcaattctgcagcattctgctatctgtgagttatgtaggatctatttgtcaccatggtggatattccgttactgttctagctctccaaagctatccagatggaagctgcctcc

SEQ ID NO: 612 - DNA, 397 bp, Triticum aestivum
  Clone ID: LIB103-014-Q1-E1-F10
ttcacgggtcgacgggatttgaaagaactcttgcaacatcccttgcagcctaagacattctcacgccgctatttggctggggctggtatttcaccattgcttcaaaagcaactagaagagttgtccaaaaggaatgtaaacagtaatagcagtaatgacaataataaaggatcgcggtttgttattattggccaggatcgtgtggaaccattgcaagctcttcaagattctgggcaagagatttgtgtgaacatggacaagcaaaaggagaagagaagacttgctgagaactggaggcgaaagaaacacgaagagaagaaaagcacacgggaacaaaagagaaaggacaggagaagtgctaaagagagggactgaataataaatgaaatactgaaag

SEQ ID NO: 613 - DNA, 410 bp, Triticum aestivum
  Clone ID: LIB103-014-Q1-E1-F11
gtccagaattcacgggtcgacgggactgggtatcttagtgatggctgctctgatgatgatgagtttcttgatgctcaccgtactatggaggatgatgtcacagcagaagtttttcactatctgaactatcacagaacgcactgcttaatgcttctcaactgatcttttatcaggccatttgcacacacatggatcgtgtgcatctgtaaaggatgagaccttaaaaggcaagacacaaattactgactatagcagagaacacatacccttacttcgtgataatacaagttccaagaagaaaaacatacaggtaactccggtaagctgcaacatggatgaaagtttgatggtggaacggtatggaaggacaaaaaaaaaaaaaaaaaaaaaaaaaaaaaagcggccgctct

SEQ ID NO: 614 - DNA, 400 bp, Triticum aestivum
  Clone ID: LIB103-014-Q1-E1-F5
aattcccgggccgacggggggttctacgccgactagccgccgctggcgtggtggacggagccgacggatccctgcaagtgaggcgcggcggagagagagagactcggtgggagacgacacctcgcgcggggaataaaagattagtgaagaaagcaggggcttttctgaaatttttgtaaatctcgtttttatctactcctttcctgtcaaaccctcgccgtcgcagcatcagcaatagtactactactactactagtgccatttccgcccccgctctttctgccatttcctttttcctcccgtaaaccctcgccttttagctaaaaacttaaatgttcaagcagaatagacggggtaaagtgagtaggaagcaagcggccgctctagaggatccaagctt

SEQ ID NO: 615 - DNA, 380 bp, Triticum aestivum
  Clone ID: LIB103-014-Q1-E1-F6
attcccgggtcgacccaaagctttggatccttattcagagagtcgtggacgagacattctgaggtgtcaactttaattactagcagaatccagtggaacctgcggacacgatacatgcacagtacgtcatgcataactcatcgattagccggccacataccatgcatggagtaaacaaaagagaatgtgctcaagacagaaacactcacccaaaatggtaaggaaatagaatatcacttttgagttcctgctttgtaagaaactgccacaggtctgcctccatgtcggcggggtgatgctccaacacatatccattaacgatgtgtgggtcaatgaacccaacatcatggatgttccttactctgcattccttaatcttc

SEQ ID NO: 616 - DNA, 385 bp, Triticum aestivum
  Clone ID: LIB103-014-Q1-E1-F8
taccagtctagaattcccgggtcgacgggcgcggcgaggtggtaggtattggccatcctccgcaatgggtgcgcaacctccctcattccctagatcgaccatatcctctaaggttgtgaaaccatatactagagcacgaggctctgataccaattgaaaggatcgatacagtcgaatagagggggtgaatatgagactacaaattttaatctttcttgtcaattttaagatttagcggataaataggattcactagatatgcaacttggtgaacacaacctacatgacaagcaagcttaaagcaaagtatgctgggtaacaatctaattagcgagccaacaagcacacaaggcaaagtaaagtgcgggaaaggattaaccacaag

SEQ ID NO: 617 - DNA, 431 bp, Triticum aestivum
  Clone ID: LIB103-014-Q1-E1-F9
attcacgggtcgacgggggggggtatgaaccatagagaagttggaatacagtaggtttaacaccattataaataaagaatgagttcattacagtaccttttgtggtggtttttctttcttgcactaacggagcttatgagatttcctgttgagttttgtgttgtgaagttttcaagttttgggtaaagatttgatggactaaggaatgaggagtggaaaaagcctaagcttggggatgaccatggcaccccaagatattcaagaataaacaaaaacctaagcttggggatgccccggaaggcatcccctctttcgtcttcgtctatcggtaactttacttggagctatatttttatttaccacatgatatgtgtttttcttggagtgtattgtatgatattagtctttgctttctagatttacacaatcaa

SEQ ID NO: 618 - DNA, 456 bp, Triticum aestivum
  Clone ID: LIB103-014-Q1-E1-G10
attcacgggtcgacgggctattgactaattcaatcgattcaagttgtgtgtattgtacaaattgcagctaatatgtgagcaaaggttgtcaccaatcaaagtccgtgtccttatgtaaacagatccttgtaaatgtgtgaacaaactgatgagaggtaaaaaggaacggtgtcttaaaaaattggaaaccaagttcttagccccattcccctttatctggtttttaccttgcttctgctaataaaaagattgttttcacgtaaacaattcaaatgcacactctgatcttttcctaaaccatctcgtaatggcaaaagaattgcattcagagaaatcgcatttacctcagcacagcaccctgctcaaatagtcatctccatcaatgtagaccaaccatcgtgcaaggcacctataatttacctttttttttttgaaaactttacggggggggaaaaa

SEQ ID NO: 619 - DNA, 414 bp, Triticum aestivum
  Clone ID: LIB103-014-Q1-E1-G12
attcacgggtcgacggctgttgagatttgtgttgtgaagttttcaagttttgggtaaagcttttatggactatggaataaagggtggcaagagcctaagcttggggatgcccatggcaccccaagatattcaagaatagccaaaatgctaagcttggggatgccccaggaaggcatcccctctttcgtcttcgttcattggtaactttacttggagctatatttttattcgctacatgatatgtgttttgcttggagcgtcgtgtattatattaatctttgctttttagtttaccacaatcatccttgctgaacacaccttttgggagaagcctatttgattagaatttgctagaatactctatgtgcttcacttatatcttttgagcttgatagtttttgctccagtgcttca

SEQ ID NO: 620 - DNA, 434 bp, Triticum aestivum
  Clone ID: LIB103-014-Q1-E1-G5
taccagtctagaattcccgggtcgacgggtgcggggtgtttgaaattcattcccatttcttgcatgggacctaagcatgaaaccaaggacacatacctgatttttcaataagtttatatgcactggagcatgtgcatgtagttcaaatttgaattatgcacataaaatgcctggaaaacccagttaatgtatgaaaatttacaaacgaaccctgaataattccaatttttttgacgacacacctatagttgcatgttcacttcagataaaagttctaacaattcaaacaccatcctttgtagcagtgaccccattacgtaattcaaatgatcaagacgataaatcaattagatcacagccagtttattatcaccaaccacgtgagatgcagcacaaaatatcttggagcaccgtccgggtatagtacgcccaag

SEQ ID NO: 621 - DNA, 342 bp, Triticum aestivum
  unsure at all n locations
  Clone ID: LIB103-014-Q1-E1-G6
attcncgggtcgacggggatggtctggctggcatgaagcaaggggatctaatcatttggtatgttgagcagcagaatgcccaaggcgcatatagttctacagaagaggtgaaggaggaagtaaagtgcatcaaggccattatagagaggctgatacagagggaaggccatcttgtagtcatagatgaaggaacagcggcagcagaaggtgctacggcaagggcatcggagcacagaatcctggctgttaacccaaactacgtcattgattgattaaccagctgaggtcacacagctaactagatccatcatatgtggttgaccaatatagcagacattcaaa

SEQ ID NO: 622 - DNA, 391 bp, Triticum aestivum
  Clone ID: LIB103-014-Q1-E1-G8
aattcccgggccgacggggaagaagcccaaggcggagaagcgggcgccggcgaccaaggaggccggcggcgaggggaagacgaggggcaggaagaagggcagcaaggccaagaagggcgtggagacgtacaagatctacatcttcaaggtgctcaagcaggtgcacccggacatcggcatctcctccaaggccatgtccatcatgaactccttcatcaacgacatcttcgagaagctcgccggggagtccgccaagctcgcccgctacaacaagaagcccaccatcacgtcccgggagatccagacctccgtccgcctcgtcctccccggcgagctcgccaagcacgccgtctctgagggcaccaaggccgtcaccaagttcacctcatcc

SEQ ID NO: 623 - DNA, 406 bp, Triticum aestivum
  Clone ID: LIB103-014-Q1-E1-H11
ttcacgggtcgacggggacttacaactgggacaaaaaaaaggtcgagacactgccgcgagtcaagggtggacttgcaactggggcaaaaaaatcgcgccccagatgcaaatcaagggtggacttgcaacgaggacacaaactgttgggctcagttgcgagtcgagggtggacttgcaactgggaaaaaaaagggcggggccaagctgcgagtaaagggtggacttgcaactggacaaaaaaagatcacaccccagttgcgagtcgagggtgaacttacaactaataaaaacatgttaggctcagttgcgagtcgagggtggacatgcaactaggacacaaaatgttaggcacaattgcgagtcgaggatgggcttgcaactgggacaaaataaaagggcggggccc

SEQ ID NO: 624 - DNA, 429 bp, Triticum aestivum
  Clone ID: LIB103-014-Q1-E1-H5
attcccgggccgacgggtataacaagatggtatctcgctagccctctctgagaccgcaaaacataaatgcagagcacctttaaagatcaaggactgactagacattgtaattcatggtaaaagagatccaatcatagtcatacccaacataaattaatagtgatgaatgcaaatgacagctgtgctctccagctagtgctttttaataagagggtgatgactcaacataaaagtagatggataggcccttcacagagggaagcatggatttgtagaggtgccagagctcggttttgaaatagagataaattgtattttgagcagtatactttcattgtcaacgtaacaactaagagatggcgatatcttccatgctaaacacattataggcggttcccaaacagaatggtaaagtttaacaccctctcc

SEQ ID NO: 625 - DNA, 381 bp, Triticum aestivum
  Clone ID: LIB103-014-Q1-E1-H6
ttcccgggccgacgggcgggaaagggctgaacgcgacgggcgagtttttccggcgccgtgacgagtggaggaggcaccccatggtggggaaccagctgcgccacgccactccggggctaggcatcgccatcgtcgcctttggtatctaccttgtcggcgaggccgcctacaaccgcctctaccgccgcgccggcgacaaccaccactagatctcccccagaggtgaagtagatggagcaaaccaatgttgatcttttccggtttgatctcataaggtctgcatgaccaccttgtaattcgcgatcaggatgtgtgctgttggtccaactagtgttcctggaacgcgtgtcctttaaatctgatactccctccgtccgcaaa

SEQ ID NO: 626 - DNA, 374 bp, Triticum aestivum
  Clone ID: LIB103-014-Q1-E1-H7
attcccgggccgacttcttctcccacggctgcggtggctgccgcgctctccaccccaagattgcgcagttcgctgagcggaatccggacgtgctgttcctgcaagtcaactacgagaagcacaagtccatgtgctacagcctccatgtccatgtcctccctttcttcaggttctacaggggagctcagggcagggtcagcagcttcagctgcaccaatgcaaccatcaagaagttcaaggacgccctcgcaaagcactcgccggacaggtgcagcctcggcccggcacgggggctcgaggaggcggagctcttggctctggctgcaaacagggacctggaattcacctacaacgaggagccgacgctggtgccg

SEQ ID NO: 627 - DNA, 413 bp, Triticum aestivum
  Clone ID: LIB103-014-Q1-E1-H9
attcacgggtcgacgggaaacggaacactacgtttcttttaggtagtagagattttacctgagagggagcagtaagagtgattagctagtgttagtggtaatgactctgatgatttttattagctactgttgctggtgattagatagctacaacagctagtgttggtggtgattagctagctagaatgagtttgaagatgatgatgtgctacactatgactatgatgattaaataactactgttgatgttatgactatgatgatgattaaatagcttgtgctggcggattagattcaagtggaggcaacatgtggtgcacattgaaagtactactaatccaaacaagatcaagtttggtttagtagtatacttttgacatgcaccacatattgcctccatttgaacctaatcc

SEQ ID NO: 628 - DNA, 448 bp, Triticum aestivum
  Clone ID: LIB103-015-Q1-E1-A1
taccggtccagaattcacgggtcgacgggagataggtgtaatgcgtctgaaaaaaagactagtctatagctcaccacgtggctattcctgtcgaacgccccaataaccgtaagatatgtatccgacagtgccacttattgcacgtacacattagtagaaaaagaactaccatggcatatgctacaccacggccgagaacacgtgcccacattacgccatctgagaatagtgtcgcacttcgaaaatagaactgtcaataaattttgagcttgtgtgtcgtcacattccaaattacactactaccacgctatatttaattgcaaacctgttcacaccaatcacaacataaacggtttccaacttaggagcatattagtactcggttataagtactactatgccaagatgactgcacattcctcctcaactcctcatccacaaaaacaaa

SEQ ID NO: 629 - DNA, 374 bp, Triticum aestivum
  Clone ID: LIB103-015-Q1-E1-A11
gcgtatgacaatactattccctagagtgagtcgtagtatatgtcaacagttcgttttctccaagcccagacgagctgataattgacttgtataataattttgcaatagacgggaagcttgtggtaaactatgctttatcggcagcgtggggttaaaagattggatttgcgggaagaatcgaatggatcgaaaacgccgtttgaaatttgaccgttttactgtgtatagctggagttgtagttggtcagtcaaagaggcactagctctcacatatgttgatgatgaaagtaaaggttcttgcgagactgccttttctggcattgaactgtccaagtgttctctctctctacagtatgtttattggttcttgattc

SEQ ID NO: 630 - DNA, 426 bp, Triticum aestivum
  Clone ID: LIB103-015-Q1-E1-A12
tactaaaccctaaagtgagtcgtattaggacagcgagtgggaattcggctacaacgcgatgaccgacaagcacgagaacctggttgaggctggcgtcattgacccagcgaaggtgacgaggtgcgccctgcagaacgcagcgtcggtggccggaatggtcctgaccacccaggcgatcgtcgtggagaagccgagcaagaaggctcccgcgcccgccgggatgccccagggcatgatgtagaagcgcaatgatatgtagcaacctgggggcatgcaattttaggggcgtgtggtgatcgttttgccaggggagagaaccgtggcaccttaaggaggaaatcatggtgtgtaatggataatgatggcctgttctattgtctgtttggcacgcttcgttgcgattgccatgttgaaaactaatttggg

SEQ ID NO: 631 - DNA, 456 bp, Triticum aestivum
  Clone ID: LIB103-015-Q1-E1-A2
gctgcagtgcggtccagaattcacgggtcgacgggccattccttaagatccagttcgcaaggttcccgttccgacctccgccagcccatgaagatcggaaacgccttagcgctcgctgatcgccgtcatctatatatctcccccctttgccagcagtgtatcgtaggcagtgggccattgtagatcagctatgtttgttcagcctgtagtagcaacctgtcacgggcctttgtcagctggagattggctagctagacagacttgcctggtacccacctgcctgccctggcacattcgccgtgttcccgcgtcacatttttcgcgggtggatatgctagaaatgatatgacattcgccgtgttcccgcgtcacatttttcgcgggtggatatgctggaaatggtatgcataaactgaaaaaaaccgtaggaagaaagaaaaaaaaagcggccgctct

SEQ ID NO: 632 - DNA, 387 bp, Triticum aestivum
  Clone ID: LIB103-015-Q1-E1-A7
ggtccagaattcccgggtcgacgggagtcactaattgtcgccgcatgcagattccagaaacctgatgaagcaccgacttgtttagttcgctatttcctctgtagtttgaactcaatcgtggaacaaagttattcgcatatagtgttggagaaattcatggacagcaacaaagtcagaaaaaaagagaacaataaaagaagaataaagaaccagaaaaaagtcacgaacaacagaaaccgtgtatcaagaatgaagtaaaagtggcaccctcaaaaggatcaatctgtagttatcgttgaaggtaattttaaactttctcaaaactgaaactagaatccagacttaggcctttaggtataaaacgtggaacatggaaaaacctagggg

SEQ ID NO: 633 - DNA, 453 bp, Triticum aestivum
  unsure at all n locations
  Clone ID: LIB103-015-Q1-E1-A8
gtaaggtccagaattcccgggtcgacggggtgcgcggtatgttcaatttcaccctaaattggttggcatggcctactttcctgaagatattctaaatatttctacatttggataaaaggtgctacatgcaccatatacgtcaaaggagatttttccccctcttctttctatattaggcaaattaatgatgtattgttcttttgattactctcatatttccatgacatcatgtttaccctatctatttaattatagattttagtccttcaatttcaattgttgtacagttctttcaatttgagcccatatttgcatgttacagtatttcctttaacaatccttccattttctgctgcgcatcncttgctatgcaacaaattatgtagtgcacaattttttcctttacatagatgaaggctgcacggatgtcatactgcacacaaaccatggatt

SEQ ID NO: 634 - DNA, 443 bp, Triticum aestivum
  Clone ID: LIB103-015-Q1-E1-B5
cccgggtcgactgtccggacgtagaggccctagcagccttcaagcataacatccgcgatgagtggcttgcccggcacctgggacaggaaaagccgaaatccatggcagccctcacgacactcatgacccgcttttgcgcgggagaagacagctggctagctcgcagcaacaacttatcaaagaaccctggtaattcggataccaaggacaaaagtggcaggacacgtcagaataagcaaaaacgtcgtgttaacagcgacaacaatgaagacacggcagtcaatgccggattcaaaggctataaatctggtcagcggaaaaagccattcaaaaagaatactcagggcccgtccagtttggaccgaatactcgatcgcttgtgccagatacatggcacccccgaaaggccaaccaatcacactaacagggattgttgggtgttc

SEQ ID NO: 635 - DNA, 446 bp, Triticum aestivum
  Clone ID: LIB103-015-Q1-E1-B6
caggtccagaattcccgggtcgacggggtggttttggtagttgtgcccggaactaaaaatgcaaccgcacgctaacatatttatgcatggctactatttgcaatagaggcacacgagaaggctgtgattatttatggcgatgcaagattacacaattacagggcgtggacatactgaggctcggtaacactcgagtgacttactctacctcgtttatatctaagcgggcgtgccttgtggacgtcgaggcttctccacgggtttcaccgtcgaggttagctggatggggttgaggagctgcagggtcggggtagcgatgatgaccatcgcgggggttgttgaccacaatcccgttggagcgtgttcccaaaaggcgacaaagcacttctggggacaccaaagtattttggttgatggctggggtagacctcaaggactcgattggt

SEQ ID NO: 636 - DNA, 426 bp, Triticum aestivum
  unsure at all n locations
  Clone ID: LIB103-015-Q1-E1-B7
ggtccagaattcngggtcgacgggttttgagagtcttaaacaacatggtaatttgaatgaaaactatcataggaagtgaattggatgctatgatcaatttgatacttgataattgttttgagatatggaggtagtgatattaaagtcatgctagttgggtgattatgaatttaaagaatgcttgtgttgaagttagcaagtcccgtagcatgcatgtatggttaaagttgtgtaacaaatttgaaacatgaagtgtacctagcttgtgcatccttatgagtggcggtcggggacgaacgatggtcttttcctaccaatctatccccctaggagcatgcgcgtagtgcttggtttttgatgacttctaaatttttgcaataagtatatgagttcttttgaccaattttgagtccatggattatacgc

SEQ ID NO: 637 - DNA, 432 bp, Triticum aestivum
  Clone ID: LIB103-015-Q1-E1-B8
gggtcgacggggacagagatgacacttattgggcctggcattttcagtacgttgtacgcatagtgagaggctgccatgaacttggcgagtgccggtcggccaaggattccattataaggtaatggaaaatcggcaacgtcaaacgtgaccctctcagtcctgaagttcagctcactgccaaacgttaccggcaacgtgatctttccctttggcttgctccttcccgggttgattccttgaaatgtgccggtctcttcgagctcgccgtcagggatctggagtttccggagcaccgcggaggagatcaggttcaagccggccccgccgtcaactagcatcttagtgaccttgaggttgcggattgttggtgaaaccagcatcggcaagcacccgaccgcagttatgcgatcaggatggtcctcaatgtcgaag

SEQ ID NO: 638 - DNA, 417 bp, Triticum aestivum
  Clone ID: LIB103-015-Q1-E1-B9
gggtcgacgggctgtttgatcttgttgttgtaacatgaaaggccaacattcaagtttcagcaaatattatgaactaaccatactaacaataacacaaaggtctcagaattactcatatcaataacataatcagctagcgagccataataataaaattcagatgacaacactttctcaaaataatcataacatgatataacaaaatggtatctcgctagccctttctaagaccgcaaaacataaatgcagagcacctttaaagatcaaggactgactaaacattgtaattcatggtaaaagagatccagtcaagtcataccaatataaaccaataataatgaatgcaaatgatagtgtgctctccagcgggtgctttttaataagaagggttatgactcaacataaaagtaaatagat

SEQ ID NO: 639 - DNA, 433 bp, Triticum aestivum
  Clone ID: LIB103-015-Q1-E1-C10
ggtccagaattcccgggtcgacgggtgccccatcaaatattatatgcttgatcaaatggttgatgttggacaaggaaggcaatgtaataggttatgttttcttatattcacatagaagttatattgtcatggatcctctaacatgtggtgctaataatctttagctagccaaaaatcgtactgagttgagatactacttgtgtatccaaaacccttgaacccaatttcttgccctgagagtccacagtatctacctatggattgaatgagatcctcgaagtaatttgtcatcggtgcaaaaagcaatacaaatttctcctaaatatatatgatcttttattataaggaaaaataagctttgtacaaacttgtgatggtaaagaaataaaagcgaactttctaacattactttgttcaatgctagcccgcaaag

SEQ ID NO: 640 - DNA, 432 bp, Triticum aestivum
  Clone ID: LIB103-015-Q1-E1-C3
cgggtcgacgggcccgtaccacccgagcttgatcttggggacttttgtcccattaaatttagcccttttgattacttttgcttgccacaaataaaacttgctgctgaacgtagggaatatgagacgagttttcgtgatttaccttaccatcattatggtaatacctagatctatccttgcctttatgcctagctaggggcgttaaacgatagcgcttgttgggaggcaacccaattttattttagtttcttgctttttggttctgtttaggaataaataatccatctagattctgtttagatgtggttttatgttttaattagtgtttgtgccaagtagaacctttgggaagacttggggaaagtctttgcgatcttgctgtaaaaagcagaaactttagcgctcactagattagctacaactttttactgg

SEQ ID NO: 641 - DNA, 439 bp, Triticum aestivum
  Clone ID: LIB103-015-Q1-E1-C6
gtccagaattcccgggtcgacccctctgtggaggctaacctatatttatgatggcctcggtcctcttcccccaaaacgtaggcaggaagggatcccacagtggccaatttgaaaataggcaagtagtacatcttatcctgacgaaaggtggtcttcgcctgctaagcttctggtcgtgtcgctgtggtgggctcggtgatgacatctatcctaccgtgctggcgatcttggtctcgttgcaccgaaatggaaacctttgccagatgacatccgtcctactgtgcctgtccttgcctccttagcaccaaacaccaaacaggaaactgcctcctctgcgcccgctggagcccacctgccattgttatcacggcttgcgtcactgctagattgatggggagagagttggtgatgagggtagcaagattgccgtcatgatcct

SEQ ID NO: 642 - DNA, 442 bp, Triticum aestivum
  Clone ID: LIB103-015-Q1-E1-C7
tcccgggtcgacggggaacaagacacatgctgataagcgggcgccggcgaccaaggaggccggcggcgaggggaagacgaggggcaggaagaagggcagcaaggccaagaagggcgtggagacgtacaagatctacatcttcaaggtgctcaagcaggtgcacccggacatcggcatctcctccaaggccatgtccatcatgaactccttcatcaacgacatcttcgagaagctcgccggggagtccgccaagctcgcccgctacaacaagaagcccaccatcacgtcccgggagatccagacctccgtccgcctcgtcctccccggcgagctcgccaagcacgccgtctctgagggcaccaaggccgtcaccaagttcacctcatcctaagctagtctgccgtgtccgtgaactgatggcggcattcggtatgtaatttaa

SEQ ID NO: 643 - DNA, 436 bp, Triticum aestivum
  Clone ID: LIB103-015-Q1-E1-C9
gtccagaattcccgggtcgacgggtatccatctgtactattttcatgcatgatcaaacaagttaaattgatgttttaagcagaataaggaaaagcacttaaagaggccatgtttgagtttgaaatttgaatctttgattcaaatttgttcaaacccttctggttttagttgcattagcccaacacactcatattgccatgtttcatgcatgcatcatattgttgcacattgtttggtgatgcttgtgtatcgatgtcctttgcgacaggttctgtctccgaggagtaccgtgattaccctaacgaagaatcatatccgagcatcgaaccatcaggcaagcaaccaaccatttgatcatatcgatacaatcccatgttctcgctcctgctctcttttactgcattaagacaacgcgattcaaactgctgtgtgctac

SEQ ID NO: 644 - DNA, 445 bp, Triticum aestivum
  Clone ID: LIB103-015-Q1-E1-D1
cggtccagaattcacgggtcgacgggagaattctctaatattgagcactcttctattaagcgcgccgttactatctttttggctcatgaatttatatttatcacaagagaagccaaagaaatctttgcacactatagggtggacgccggtcgtccacccatagaagcaatcctctatgatcaagaggaaattagacgttttcaatctttggactatgtcgctttcaatgaaaaccttagaaaaaaggtccctatcaatgtcttggttgattgcatcaatgagcttaataatgattttttccttagaaataatgagctaggatactctctcgagtataagctcacaagattttgtcaaaagaatgctttcagtgatgaaatagttgtgcactatgaagggccaagggaggaacccgttccttccgtgattgatcttggggattttt

SEQ ID NO: 645 - DNA, 421 bp, Triticum aestivum
  Clone ID: LIB103-015-Q1-E1-D2
attcacgggtcgacggaggagtacaagacacggcttgggtttttgctgcttcgcgcgatccatcgatacaaacccggactaaaaaaaggcgagggcgggtcttttcccgcgcggtaggcaggggagtttggcatagtctgttcgaggcaaggaggcaggaagggaaagaagcaaataaaggttgagcgacttagttttgggaaaatctgattttacggaatatgtacccactagggtttatagggctcatctaaaaaacattcgtttttccattttataagtctcagttctactactagtagtagtaccatcacatgttggatttcgaggtgcgttagatcacccgatgcaagcatgtcaagagaaaactcaccaatgcatgtagaagttcatggaaatttagtggtcattcatgcattcg

SEQ ID NO: 646 - DNA, 425 bp, Triticum aestivum
  Clone ID: LIB103-015-Q1-E1-D5
cccgggtcgacggggaagaaaacaaggcggagaagcgggcgccggcgaccaaggaggccggcggcgaggggaagacgaggggcaggaagaagggcagcaaggccaagaagggcgtggagacgtacaagatctacatcttcaaggtgctcaagcaggtgcacccggacatcggcatctcctccaaggccatgtccatcatgaactccttcatcaacgacatcttcgagaagctcgccggggagcccgccaagctcgcccgctacaacaagaagcccaccatcacgtcccgggagatccagacctccgtccgcctcgtcctccccggcgagctcgccaagcacgccgtctctgagggcaccaaggccgtcaccaagttcacctcatcctaggctagtctgccgtgtccgtgaactgatggcggcaat

SEQ ID NO: 647 - DNA, 452 bp, Triticum aestivum
  Clone ID: LIB103-015-Q1-E1-D8
taaggtccagaattcccgggtcgacgggcaaaagaggcaaatagagagggaggatagagagagagagagggcgaataaaacggcaagggtgaagtgggggagaggaaaacgagaggcaaatggcaaataatgtaatgcgagagatagggattgtgatgggtacttggtatgttgactttttgcatagactccccggcaatggcgccagaaatccttcctgctacgtcttgagcttgcgttggttttccacgaagaggaagggatgatgcagcagagtagcgtaagtatttccctcagtttttgagaataaaggtatcaatccagtaggaggccacgctcaagtccctcgtacctgcacaaaacgatagctactcacaaccaacgcgattaggggtttttaatcccttcatggtcacttacgagagtgagatctaatagatatactatttttg

SEQ ID NO: 648 - DNA, 433 bp, Triticum aestivum
  Clone ID: LIB103-015-Q1-E1-E1
attcacgggtcgacggcggggtgggagctaaaaacaacatttgaatgtagatagtaatagacttaatatcgatgttttaatttagtgtacattgtaatatttgaactaaggaccatgcatatgggtaatttatttcgaattcgtgccatactagatttggaaaagttggcattgactcgattgttgtgttattgtgtaggtcatatgtttgaatccatccaaagttttctcactaccatggtgttcatcatgtacatatgaatttgtattgagaaagtagcgtggatactgtgaaatgcgaaatccacgttagaattggagatcactatgtgacacacactctaattcaaataactcctcattaattaatttatagtatctcctttccaatgactaattatttgcaaggcatacacaggcatggtaatacata

SEQ ID NO: 649 - DNA, 403 bp, Triticum aestivum
  Clone ID: LIB103-015-Q1-E1-E10
cgggtcgacgggacacgataacgacagtcatcctgtacacagtcatcatgtagaagatgtcggacatgatgatgaggaagatcaagacgaagggcatgatcatgaagatgaagatgccggagcatacgatgatggaccatcgatgggctgggtgcaagaccctcatattcaagagctgcttctcaagcagacggataacgcaagagctgctgcctgagagaaagccaagctggatcaactggacatagatgcggttactccattgtatgaaggatgcaggcccgaggatacccgcctgaaagcaacgctcatggctctggagatgaaggtaaaacacaaaatgaccgacgcatgcttcgacgagaacatgtcattctggcacgaacgtcttcccaaggggaac

SEQ ID NO: 650 - DNA, 422 bp, Triticum aestivum
  Clone ID: LIB103-015-Q1-E1-E2
ggtcgacgatctggttcaatttggatagaaacctagtccaaaatttcctggctgactctccaggttgttggactatgtggcttcagtcatcggcgtctggtggtcggacatatgtaccttggaagttgttaaggaaggcttcttccaagtcctcccatctgccgatagagttttcaggaaggttgtttaactagtgccgagctggccctttgagctttagtgggaggtatttgatagcgtgtaggtcatctccgcgggacatgtggatatagagaataaaatcctcgatccataccgcggggtcggttgttctgtcgtatgattcaatattaatgggtttgaacccttcggggaattcgtgatccattacttcatcggtgaagcaaagagggtgtgcggcacctctatatcgggccgcatcg

SEQ ID NO: 651 - DNA, 421 bp, Triticum aestivum
  unsure at all n locations
  Clone ID: LIB103-015-Q1-E1-E3
ccggtcctaaattcacgggtccacgggaggcgaattatcctatctgggactctattccagaataactttggacaacttcatgccgtcatgccccggttactttcggctaatgatgaagccattgatttcttcattactttgacgctangaaacctctcgacccctccgagatcctcgaccctcgaccgctcagcgatccacgaccctctaccctagttcccgacccttgacccccatgtcacatttgtctagtgtcaaaggattcaacaccatgtcttcatcattagacgaaagtacactagtgaagaaccgggcaatagcaccggttggtaagggcctttagtgccggttcggtaactggcactaaattgtgggcactaaagcccccccctttagtactggttcatcacgaaccggtgct

SEQ ID NO: 652 - DNA, 445 bp, Triticum aestivum
  Clone ID: LIB103-015-Q1-E1-E4
attcacgggtcgacggcgagaagaaaaaatccagcgagaacatcaaggtcatctacgcccgcgccaagcagtacgccgaggagtacgatgcccaggacaaggagttggttcagcttaagcgtgaggcccggatgaagggtgggttttatgtcagtcctgaggccaagctgctgtttgttgtcagaatcagaggtatcaatgccatgcacccaaagaccaagaagatcttgcagctgttgcgtttgaggcagatattcaatggagtgttcctgaaggttaacaaggccaccatcaacatgctccgcagggtcgagccatatgttgcatatgggtacccgaacctgaagagtgtgagggagttgatctacaagagaggttatggcaagctcaacaagcaaaagatccctctgaccaacaacaaggtcattgaggagggtcctggaaa

SEQ ID NO: 653 - DNA, 292 bp, Triticum aestivum
  Clone ID: LIB103-015-Q1-E1-E5
ccgggtcgacatttgattcttttttctttctctcctttttcttttgggctctcaacttctccccatccagcccttaaaaaaaacttctccccttcccacccgagatgagctgcagcggcggcggcaacaacttgtcgtgagcggaggcagcggcacagtctggtcggcagcggcggctgcaagttcttctcgggagcggcggcggcaagatcttctcacggtagcagcagcatcctctcgcggctacgtcgtcctgcagttcgactcgagcctagcagggcgtcggtgatgt

SEQ ID NO: 654 - DNA, 408 bp, Triticum aestivum
  Clone ID: LIB103-015-Q1-E1-E8
attcccgggtcgacgggcacaggcaaaataacattgggggttgtcctcggctcgctcgacaacttccaacgtgacgacttgatcttcgatatcgtaaccttccgaagtggctatcacgcattgctcggagggaacgcttttgctcgattcaacacagccccgcactatgcgtactgaaagctctagatgtttgatccacgcggcatcatcacaatcaacggtcacacggaacgctccctttgcatctatgagcacattgcaactcttgcagccgatgtgcagcgcggcccctcaagtcgacacatctcatcagccatcaagctgtcggactttgtgaaaagagtccagtcagtctcgcatcctgatggctctgtatttccggaactagactaacaatttcgcctctgt

SEQ ID NO: 655 - DNA, 175 bp, Triticum aestivum
  Clone ID: LIB103-015-Q1-E1-F6
agtcgtattaagtgtagtcttgcaacgtgcgtttttgttaaagtccggcaccctgcacaacggacctgttcctttgagttttggttattatcttgctggagttatagattgtgttagctggattatgtgccgtgctggcatttggatattgatcttgatccgttcgtcttgcaaa

SEQ ID NO: 656 - DNA, 266 bp, Triticum aestivum
  Clone ID: LIB103-015-Q1-E1-F7
attcccgggtcgacgggacaatggccacatgcgggatgtgcgtggactgcaacaaccactggaagttctgcagaagcggtggcgctaaatgatccaagcgtaagtacgcttgtacggtaatcaaagccctcccagtctggacacgaaagtcaggtcagtcgtgttcgtcttacacctacgaggatgggaaaatcctgtggtgacccatctgatgtcgcggtaacccagatctacccttcgcgagtaggagttgaacccataaagct

SEQ ID NO: 657 - DNA, 391 bp, Triticum aestivum
  Clone ID: LIB103-015-Q1-E1-G2
gggtcgacgggctggctcaatgccaatcagcatactaagcattgaaatcattgctgaggactttgatttcagactggatcttcacaagatcatcagttgtcatagtgacaacgttgtacttcaggaatttttctttcctgtactgcgctttctaaatctgcctggccttctcaaatttccatttctcttcttggatgaaggcagtcaccatatgactttggccaggagtcaacttgaaatcaggcataggagtgtttgggtccttgtgccagagatcaatgtaatcgaggatcaactttggatccaaaagcagaggcacatttgtgcccttggctctagcggccctgacttgcctatctctgatgttttcagcaagttcttcatcatcagc

SEQ ID NO: 658 - DNA, 408 bp, Triticum aestivum
  Clone ID: LIB103-015-Q1-E1-G6
gtccagaattcccgggtcgacggggatgagaaagacaagacggtcgccgccccgccgcagcctgctgccaaggctcaggtggtgggatggccaccagtccgcagctatcgcaagagcacgatggcaaccaccaccaaccagctgaagagcagcaaggaggattctgacacgaagcaggggcaagagtttctgtatgtcaaggtcagcatggatggtgcgccttacctgaggaaggttgacctcaagacatacaagaactacaagggcatggttgtggggctagggaaaatgttcattggcttcaggacagggaaggatggtgaatatgtgatgacttacgaagacaaggatggagactggatgctggttggtgacgtcgcatgggagatgttcaccgagtcttgccgg

SEQ ID NO: 659 - DNA, 423 bp, Triticum aestivum
  Clone ID: LIB103-015-Q1-E1-G9
ctcccgggtcgacgggacaccataacgatgttcatcgcatgtaggtctctgaaaccaagcccaccctgctcctttgggagagtcaacctgtcccaaccaacccagtgatgtttatgctcgtcctcctgattatcccaccaaaatcggcatatcatgtggctaatgctctcacatagggacttagtgaggtcaaaacaggccatagcataggcggggattgcctgggctacggttttgattaaaatttcttttcccttttttgacaaaagtttgattttgtatccctgaagcagctcccaaattctgtcccggaggtactcaaagcagaggcgacgcgactttcccacataacgtggtaaacctagatacttgccctgctgttcctcattctgaagtccaagtaagttcagaaagatttgtttc

SEQ ID NO: 660 - DNA, 172 bp, Triticum aestivum
  Clone ID: LIB103-015-Q1-E1-H1
ctgaatctgatgctgttgctgttgttgttgttgttgttgttgctgttgttgttgttgttgttcgtgttgctgttgctgctgcagttgttgctgttgttgccattgcggttgttgccattcttgttgctgctgtcgttgttgcctgttgctggtgtcgttgtcgttgttgttg

SEQ ID NO: 661 - DNA, 411 bp, Triticum aestivum
  Clone ID: LIB103-015-Q1-E1-H2
gtcgacgggctgttgaggacgaaattcggggctagatcatggaaatctatcccgtagtagaacatgaccccgcggacgaaggggtgcagcggaaaccccagtccatggacaaagtgggcgagaaacacgaccctctcgtggggtcccggagttggagtgacctgcccatagtccggtagccggtgcgctatgtctgcggccaagtatctggccgcccgaagattcgtgatgtgcttctccttcacggtggaggccacccacttgcctcctgctccggacatgtctatctgtacggagaagatttggactagggtgctggagctcggggaggtaaggatgagcgaaggaggaagagggcatgggtgaaaatgaggggtccttatcccgttatagaggccacgaagtggtgcg

SEQ ID NO: 662 - DNA, 435 bp, Triticum aestivum
  Clone ID: LIB103-015-Q1-E1-H3
ctgcagtgcggtccagattcacgggtcgacgggtaggggagacagggttcagggaggtcgcggcgtacctgttggatcatgaaaacttcgcaaatgttcctgcaacggctctggtgaagataacacactcggttttcaatatcaatcgtccgatgaacggcggcactccggctcatgaccataagccgcaggtcaccagtaagattgcttcatttcagcagttcatcgctcatgacttcgatgccagtgaccacggcacttcgagcttcccggttgcagctgttcacaggatcggcatattagacatcaggattttcaacactgacaggcatggtggcaatgtcctggtgaggaagcttgatggaggaaccggccgctttggttgccaaacagaactgttcccaattgatcatgggctgtgcttaccggagaact

SEQ ID NO: 663 - DNA, 433 bp, Triticum aestivum
  Clone ID: LIB103-015-Q1-E1-H8
ctccttggtcgttaggaatccctaaaatgagtcgtattagagcgacctcaccggcgcgcgtgcagcggcagatgctgccccgcacttccccctgaaaggacctggctgggaggtcgtggtggctgccgggggcggtatgctctcagcgctcaccagctgagccccgggcccgctccagtgaccggcctgtcaacggcgaccgacgccttggtattctggtgcttcggctttgttcgtcgcctgtgttaaggccgatgtttttgtgaacatgatgtggacatgacaacggcatcctaccccccctaagtaattatggacgaccgaggcgttgcagtgtgtactgtactgcaccccctagattaggagctgatcgatcctttggcgagctgtgttgttatgtaactcgagctcgtgccttcatccaaggcaaccg

SEQ ID NO: 664 - DNA, 372 bp, Triticum aestivum
  Clone ID: LIB103-016-Q1-E1-A1
ctcacgggtcgacggggccaacttgcgtcacgtatttcagcatctgagaggggagagaaagagagagagcatgggatcctgtatgtaatgcctggtctggagtccgaactggtggtagtctgtagcgtcgattgatcttgaatcaccgctgaattgaagctggaaacttgatcgtttagccaattacaaaaaaaagagaaaaaaaaagaaaatagaagcagaagagagtaagaaaagggaagagagaagacagaggaaaaagcaaatggtgaaagtcaagggacgaaaaaaaagcggccgccctaaaggattcaagcttaatttagcgtgcagggaaggtcaaagcccttccaaagtgtcaccaaaattcaa

SEQ ID NO: 665 - DNA, 436 bp, Triticum aestivum
  Clone ID: LIB103-016-Q1-E1-A5
ctcccgggtcgacggggttcactaaaatatgtactcatgattgactatcagttcttttccagcaccatgttatgtatgtctcttgaaatgactgtatatggtctgccacctatatatgtcttgtctatgatctgccacctatatatgactgtatgatctgccacctttatatatgatatgacttagtagtgttaacaaaaaaaaataaactccaacatgtacccgcgcaaggtgtagttcagaaagagacaggagtaaatacccatgttcgtacaactcttcacatcaaaaaaagtggcccccctaaaggttcaagtcttactataccttgaatgaaacttaaaacttcttcaaaattgccactcaatttaaatccatggcccttcttttaaaaatttttaaacgggaaaaacccgggctttaccaattttaaccc

SEQ ID NO: 666 - DNA, 358 bp, Triticum aestivum
  unsure at all n locations
  Clone ID: LIB103-016-Q1-E1-A7
attcccgggtcgacgggagaagccgaatgtgaagcacttcatctgctcctgtgactttctcgtgtgatatactgtgtggcgatcttactgtgatgtgaagctcgcttttgagcttccctaaggtatttgctctggcatcttttatcagccggcagattggtactacgtatcctccagcctacttttttcagctggatgatgatcgtgatgaaataagactgtaggttagtcgagtgatgatgattgtcggcatttgtcctatttttaatggacgcgtatgcttgcatgtaacctgttgtggacttgcatttgcatgtntgcgatcgatatgaaaatatgagagattttgttgggtttc

SEQ ID NO: 667 - DNA, 367 bp, Triticum aestivum
  Clone ID: LIB103-016-Q1-E1-B1
ccggtcctaaattcacgggtcgacgggcaatgtatacgaatagcatggaatgcccatgatatctgtgctctccaactggtgctttttaacaatacgaggatgactcaacatatttctaaatatatacgctcttctcaaagggaagcacggatttgatacttgtgccaaagctcgtttttgaaatcataagtgaataacattttgaacagtataatttcattgtcacaattacaatcaacatatcgcaatatcttccatgctacacacactagatgcggttcccaaacataatggctaaatttgtactcgcccatccagcaacaatcatcaatccattgattgctccaatcaacgagtgcctcctact

SEQ ID NO: 668 - DNA, 392 bp, Triticum aestivum
  Clone ID: LIB103-016-Q1-E1-B2
cgggtcgacgggatctacgtatgaaacggagtacatggcagcctcggaggcagcgcatgaagcgatttgggtgaaggagttcatcactgacctaggagtcatacccaatgcgtcggggccaatcaaactcttctgtgacaacactggagctattgcccttgccaaggagcccaggtttcacaagaagaccaggcacatcaagcgtcgtttcaactccatccgtgaaaatgttcaagatggagacatagaaatttgtgaagtacatacggatctgaatgtcgcagatccgttgactaaacctctctcgcgagctaaacatgatcaacaccagaactctatgggtgttcgattcatcacaatgtaactagattggtgactctagtgcaagtggg

SEQ ID NO: 669 - DNA, 410 bp, Triticum aestivum
  Clone ID: LIB103-016-Q1-E1-B4
ggtccagaattaccgggtcgacgggaactggcaacgtgactcccatgccgcctccttcatcatatattggttcacctgttttctggattggcgttggtgtagcattatctgcggcattttccatggtctcttcgatggtaaagaaatatgcaatggaacaagcattcaagtcgatgatgacccaggcaccaccaaacacatttggtgcaaactcgccattcccattctccatgccaccacaggcaggttccacggcaccaagtagttacccatactcaggaccaaggaaaaataccccaaaaggtgcaactgttgatgtttcagctactgatgtggcagcaactggatcttcggaagcagctgatgtggcagaaacatcgaagccttcaaagaaatttgccttcgttgat

SEQ ID NO: 670 - DNA, 379 bp, Triticum aestivum
  Clone ID: LIB103-016-Q1-E1-B5
cccgggtcgacggggtgacacaggggatgtgcggcgaagtgtggtggctgcaagttctcggcagaggcaagtcctccagcttgaccacatcttcatggtgctccctgccgccatgcattggtatggacatggaactgggcccctttggacatgaacggtggctctcctctagacattccacaagtgcaagcacgtcgtgggcatcctatttgcgagtgtgagcatcgtccacctacagtaatgtgcaaccacattgcatcattccaacgttcggcacactactgattcgtcacaggcctgagaatctcatttgcctcacaacatggagatatcagaacagataagtatgatgcattagctagcttttcaggggtttaag

SEQ ID NO: 671 - DNA, 391 bp, Triticum aestivum
  Clone ID: LIB103-016-Q1-E1-B7
cccgggtcgacgggaagtcttaatagagattccaatatggactacatacagatgtatatagacgtagtttagagtgtagattcactcattttgctccgtatgtagtccatattggaatctctaaaaagacttatatttaggaacggagggagtacatgacctaatacaaacacaatgattcaagtagtaattgaagtgcagaaggacaagtatttgagaatagttggatagcctataaggtcatctgttttgaaacagagggtttgtactgataattttttcattctagactaagatattctagagcaacattggtcatgccagatgattttgatattccgaaggactacaagtaaagcacaatgctgcattacacacctttaaaagctca

SEQ ID NO: 672 - DNA, 452 bp, Triticum aestivum
  Clone ID: LIB103-016-Q1-E1-B8
ctcccgggtcgacggggactcaaaacaccggcatcagtcactcctcttcactcctaaccagcgagtaacagccaatggcgttctccaagcccgtggcggctctcctcctcgccgtggcgctggcagcgactgccatgtccgccgccggtcaggatccccaaaactgcaagccgagccgcaaggttacggtgcagaacctgtgcggcaaggacctttacctcggcatcgagccgctggccaacagcaagctactctacagccctggccacctgctccgccacggcacccacgtgtcgtacgacgtgtgctcgtggacggggcgcgtgaaggtgcaggacgccgtggtgacggagttccacatcgggtacgacggcggggcgtggtaccaagtgagcacctaccagtcgcacatgcgcatccgtggtcccaacaacccccaagggcaacccctg

SEQ ID NO: 673 - DNA, 415 bp, Triticum aestivum
  Clone ID: LIB103-016-Q1-E1-C2
gggtcgacgggccggcaagatcgtcagtatccggattcctgattgatttataatttctcttttgtgccacatagtgtccttctaatgccgcacactacctgtagtccggccgaggatgatcttcccgcttcatcaagcgggtccttggctccgtcggatgtagattccattccgaccgcctccacccctcgtgatgctgaggatgccgaggtgggatcccaggaggggacccgccaagagggggaggctccggaggtgccatagggcaacctcccgggcttcgtgccgaactccgcaccggaacccgcagtggttccggagtccggcaggcggccccttcgtaagaagggaaagaccgtgacactggcagcctccgttcaaccggaggcgccggacaaacttgttggaggcgctc

SEQ ID NO: 674 - DNA, 429 bp, Triticum aestivum
  Clone ID: LIB103-016-Q1-E1-C6
attcccgggtcgacgggaagaagccaaatgccgagaagcggctgccggcggggaagtcggccgccaaggagggcggcgacaagaagggcaggaagaaggccaagaagagcgtggagacgtacaagatctacatcttcaaggtgctgaagcaggtgcaccccgacatcggcatctcctccaaggccatgtccatcatgaactccttcatcaacgacatcttcgagaagctcgccggcgaggccgccaagctggcgcggtacaacaagaagccaaccatcacgtcccgggagatccagacctccgtccgcctcgtcctccccggcgagctcgccaagcacgccgtctccgagggcaccaaggctgtcaccaagttcacctcctcttaggctgttcgtcttcctgtgtctcgtagttagcggttcgggtgtg

SEQ ID NO: 675 - DNA, 355 bp, Triticum aestivum
  unsure at all n locations
  Clone ID: LIB103-016-Q1-E1-C7
gggtcgacggngtcaccataatgcggtccgagaaggtcaaggatgagatcgtcctcgacggcaacgacatcgagctcgtctcccgctccgccgccctcatcaaccagaaatgccacgtcaagaacaaggatatcaggaagttcttggacggtatctacgtcagcgacaagggcgccatcaaggaggagtagagtgcgaaaaccgtcccagaagccgtgtttctgcctgccgtgtttcatcgtctttgtgtcgtggttgtgattttgaactttctctagactgaattttgtagtggagttaattagggatgcgctatgcaacatgttatccttattatcctacatattgtcacccg

SEQ ID NO: 676 - DNA, 425 bp, Triticum aestivum
  unsure at all n locations
  Clone ID: LIB103-016-Q1-E1-C8
gtaccagtccagaattcccgggtcgacgggatccttagacacgacaaattcgtcgtcgtcgaggcttgcctcgtcttcggagggaggcatgcaattatcgtcctcaacctctctttctgccgctctctcatgagggctggcttctccatcctcctgtgctaaatcctgctggagggggttgtcttcggcactgtctgaggtgttattatctcccatgccagaatcgccgtttttgctttggcaggatttagagcggcgccgctgacgccgacgcttaggctgtttcttggaggggtcatcctccgttgttccgtcgccattcccttcttttggggtgtccaccatgtatatgtcgtatgacgaggtggctttccagtgccctatangcgctggttcttggtcgtctccttcatcagcgtccatac

SEQ ID NO: 677 - DNA, 388 bp, Triticum aestivum
  Clone ID: LIB103-016-Q1-E1-D1
cgggtcgacgggtgccatatttgaaatgcttggcatttccaaactgtgtctccgattccggtgttctttacatcgatttcaacgaaatcacctcacctttccagtggcacgcttggatttccaagttgaggccgggttcattctttccttatcaaatcttgcatatgcatcacatatcgcatcccgcatagcataccatgtttgcatcatgttgtttgagctttgcacgtggttgattgtgttcctcttgcatgtttgtcttgtttgggtagagccgggagacgagttcgctaacgaggagcccgttgagtttgctttggaggatccagtcaactctgacaactttgcaggcaagatgatcataccctcgaaatcacttcaatcgttg

SEQ ID NO: 678 - DNA, 418 bp, Triticum aestivum
  Clone ID: LIB103-016-Q1-E1-D2
gggtcgacgggacttgtgttaaagtttgtgattcccgtagcatgcacgtatggtgaaccgttatgtaatgaagtcggagcatgatttatttattgattgtcttccttatgagtggcggtcggggacgagcgatggtattttcctaccaatctatccccctaggagcatgcgcgtaatactttgctttgataacttctagatttttgcaataagtatatgagttctttatgactaatgttgagtccatggattatacgcactctcacccttccacctttgctagtctctctaataccgcgcaccttttgccggtatcatacacctaccatataccttcctcaaaacagccaccatatctacctattatggcattttcatagccattccgagatatatttccatgcaactttccagcatc

SEQ ID NO: 679 - DNA, 368 bp, Triticum aestivum
  Clone ID: LIB103-016-Q1-E1-D5
tcccgggtcgacgggacttgaggcgatcatttgtttcaccagatcatatgtgtgtctcttggatcgtcctgtgcgtatctgagtccttgcattttactataccgacagtcattccttgctgtacacatctgtttgggagattactacagatggaatcaactatttatgatgagtcactctaacgtccttcatcgtatgatcttttaagtcaagatactctggccctatatgcttcactaacgtgcgtcgtaaaataccggtggtgatgccatgttatatatgcacatgatgacccaagcgtgtgttagattgatatgctaggcatgtataggatcaggctatctagctgtggatctgaagtaacccct

SEQ ID NO: 680 - DNA, 413 bp, Triticum aestivum
  Clone ID: LIB103-016-Q1-E1-D6
attcgcgggtcgacgggcacctcaaacggatccgacgatgacctgtaccgatccgttgactggggtgtcgtcctgtgcgtttggaggaagcaatggccatccgcattgcactccgccgctccctaggaggataacgcccgaccgacggcatgatctgtctggcgcgagtccattgcgtggcgcattgggcgctcgaatcctcctgtgctggataattgcggtcctcttgggagccttccaatctccatttccccatcaccagtccgctggagtatgagtcctaccgggaccggtgtgcccgtcgtgggaaggagaggatgagggcggcggatgcccgcctcgcagccgacatggccgtggcagaggcggttgatgtggcgcgcgggcagccgcagagaaggaagccatccagg

SEQ ID NO: 681 - DNA, 408 bp, Triticum aestivum
  Clone ID: LIB103-016-Q1-E1-D7
ctcgcgggtcgacaccctgcactacctctagtaggtgcacctgagagtcaatagcgcagcagatgaaataaccaacttcattgtagaagatttgaaggccatcaagaagccaaagataatcgtggatcatgtcatcaccagttgaaatgtggtattctcttggagcgctttctcatcatcctacatttccactctgtttgttgagattattgattttatcgatgccgttcgtactccaacaaatacggttcctgtacgccactattatttatttggttttgaacttgacaccttatttcattctgggcttgtaagttgatgttgcaagagttgatgttgcaagagttgattttaactcgaaaaaaaaaaagagaaaaaaaaaagcggccgctctagaagattcaagct

SEQ ID NO: 682 - DNA, 432 bp, Triticum aestivum
  Clone ID: LIB103-016-Q1-E1-E4
cgggtcgacggggccgctagcaaggatgatccgctaaaagtgcagaccgtcgaatcacaagatcttcaccatagtcctgaaaaagattcctagtctacaaagaataaaaccaacaaaaacaacaagacacacagatataaactcttcaaatctgaacaattaaatcagggaggacacatacatacctccatgccgccaccaaaaagggcagagtaatttttttcgcaagaaacatcatgatcaccactagacaccgataaaaaaataatctattgatgatccgaggtccctcactctcggtgaagatgacagctgaaggagaggggattaaatatatctccgatggccgatacttcctcaaaccctagccaactgttgatctctagccagcccgcctggaccaactcaaggtcagagtgcgacactgctttc

SEQ ID NO: 683 - DNA, 435 bp, Triticum aestivum
  Clone ID: LIB103-016-Q1-E1-E8
attcccgggtcgacggggttcttcttcacagaacaatagggccagagagcttgcttgtgagtggaggaggtattgcggtaaggacggaaaccaactggagtctcaagcccgtgatcttccaccccaagtaactccatgaaggccttccacttgacagaaagcaacttgccattagtcatccaagtcagagtccattcggcatcagtcccaagatggacagtggcatagaattgggccaccaaatttgcatcaaagtccttgttgaattgcatgatactgaggatgttcagccgagtgcacatctaaagggcttcgccaaagtactcagggtccttctccatagaatccgtatcgatggagcgcacatcaacatatagattcttcttggccttgatcacatcaaagtagatggcaaattgaaaatgattctagaat

SEQ ID NO: 684 - DNA, 390 bp, Triticum aestivum
  Clone ID: LIB103-016-Q1-E1-F10
ggtcgacgggatgatgaagatggccaccggtgatggatccccctccggcagggtgtcggaacagggtcccgattggtttttggtggctacagaggcttgtggcggtggaactcctgatctattctgctcctcgatgtttctagagtatatggacatatataggagaaacaagtcggtcaggggaaccatgaggggcccacgagggtggggggcgcgcctccctgccttgtggcttcctcgttgcatccctgacatactctccaagtctcctggattgcttcagttccaaaattaactctcccgaaggtttcattccgtttggactccgtttgatattccttttctttgaaacaccgaaataggcaagaaaacagcaatttgggttgggct

SEQ ID NO: 685 - DNA, 377 bp, Triticum aestivum
  Clone ID: LIB103-016-Q1-E1-F11
taggtgcacctgagagtcaatagcgcagcagatgaaataaccaacttcattgtagaagatttgaaggccatcaagaagccaaagataatcgtggatcatgtcatcaccagttgaaatgtggtattctcttggagcgctttctcatcatcctacatttccactctgtttgttgagattattgattttatcgatgccgttcgtactccaacaaatacggttcctgtacgccactattatttatttggttttgaacttgacaccttatttcattctgggcttgtaagttgatgttgcaagagttgatgttgcaagagttgattttaactcgaaaaaaaaaatgaaaaaaaaaaaagcggccgctctagaggatccaagct

SEQ ID NO: 686 - DNA, 444 bp, Triticum aestivum
  Clone ID: LIB103-016-Q1-E1-F2
cggtccaaaattaccgggtcgacggcgggtaattatgaaattgagaaatacttgtgttgaagttggcaagtcccgtagcatgcacgtatggtaaaagttgtgtgacaaatttgttgcatgaggtgctcttttaattgccttccttatgagtggaggtcgggatcgcgcgatggttaactcctaccaacccgtcccctaggagcatgcgtagtagtactttgcttcgagggcaagtagacttttgcaataagtatatgagttctttatgactaatgtgattccatggatatacgcacactcatccttccactttgctagcctctattataccgtgcaactttagccggtatcatgcacccattatttaccttcctcaaaacagccaccatacctacctattatggcatttccatagccattccaagatatatttccatgcaactt

SEQ ID NO: 687 - DNA, 395 bp, Triticum aestivum
  Clone ID: LIB103-016-Q1-E1-F4
gggtcgacggcgttgccgaacggaaaaaccgtactctaactgatttggttaacgccatgttagatacatcgggtttatccaaggcatggtgggggaggctatattgacgacatgtcatgtcctgaataaagttctgacaaaggataatgagatcactccctatgagaaatgggcaaagagaaggacaacactcttgtacttgcgtacttggggctgtttggcgaaagtcaatgtgccgatccccaaaaagcctaagcttggaccaaagactgtggactgcgttaatttgggctacgcgaagaacagtgttggctatagatgtctagtagtgaaatctgaggtacctgaccagacagtcggtacaattagtgagtctaaggatgctacattcttcg

SEQ ID NO: 688 - DNA, 405 bp, Triticum aestivum
  Clone ID: LIB103-016-Q1-E1-F5
gggtcgacgggacattttatcatgcatgttgcaacggcaccttggtggctattattgtcgatcatcccggactgcttcctgcgttgcatgtaagcaaagatgaagccttaacctctgaagaggattccttccttataccatgccttatgcacaaatatcatatttttatagaggcgaccatcagaatgcagcgccgagcccctggggactcgtcagcaaaaggtatccgggccaggaaggctcaagaggaaggcggttagggtcgaaacaccatcgcagaggtatagtttaattctgctctgtgattatcatgctagaaatgtaacagtttccatcgtgtcctggcacaaagagtagtcgccagactatgtccggagatcctgccggtcacgcctccaccagccg

SEQ ID NO: 689 - DNA, 375 bp, Triticum aestivum
  Clone ID: LIB103-016-Q1-E1-F6
ctcgcgggtcgacggggggcacgggagccgttcataatggttccaagggcccgaacattggcagtggcggcaggaagcgctgacagtcgattacatcagagacataatattgtgctgcctaaccatgttccccagcgtaccatcataaacctgtgtcgtctgattaccccgcgatcttgaagttgcaccgtatctgtgacgctgaatggtgttaacgttttggattgtctcgataactttatattagaattgaatgcaagctaaatgaccctgaaattgaaaaacagctgacgcgctataggatccagtcttacgtacgcatgcatgcgacgtcacagctcttcaacatgttcacctaaattcaaatcattagca

SEQ ID NO: 690 - DNA, 415 bp, Triticum aestivum
  Clone ID: LIB103-016-Q1-E1-F8
attcccgggtcgacgggctgtcttcaacaccgccatcaaagtggtccttcagccgccgaggaggagggaggtgatggcggccaggaagaaaactaggcgaagctctggatgctccatcatgcacttgatgtgtggcagcacgtgtgctgcctgaattagcaccctggactgactctggagacgaagcatggtgtagtggcaagtcgatttgctgacatagcgcgggcgtctttctaatgcttcggttctgtttagctactacgatatgttgcgtgtttcggtttctacttcccaatcctggagctgtctacgatcgactattcggattgtaggtgtaatgttatgtaagcgaggttgtgtaacaactagatacaggcaagctataagtttatggttagcatctcgtagggatttg

SEQ ID NO: 691 - DNA, 428 bp, Triticum aestivum
  Clone ID: LIB103-016-Q1-E1-F9
attcacgggtcgacggcgatccaataaagtcatactcaatgtaaactaacagtaaaggatgcaaatgatagtggtgctctccaactggtgcttttcaataagaggatgatgactcaacataaaagtaaatagataggcccttcgcagagggaagaagggatttgtagaggtgccacagctcggttttgaaatagatatgaataatattttgagccgtatactttcattgtcaacataacaaccaagagatggcgatatcttccgtgctacagacattatatgcggttccgaaacagaatggtaaagtttatactccccctccaggaacaagcatcaatccatggcttgctcgaaacaacgagttcctccaagtaacaacaatcccgggggagttttttttgcaattaatttgattttatttgcgttaa

SEQ ID NO: 692 - DNA, 404 bp, Triticum aestivum
  Clone ID: LIB103-016-Q1-E1-G1
taccggtccagaattcccgggtcgacgggtatagtagtaactggtagctaacctaacttggcgcgtgatgccatgagctatatcatgttccttgttatatgcaattagagactttcaacatgtagatttgcttccaagacttctgtcatagaagagtacctttcctgttgtcccacggtaccatcttgaattaatgaatcttggctaccttttagttcgtaaaaaaaaaaaaaaaaaaaaaaaaaaaaaaaaaaaaaaaaaaaaaaaaaaaaaaaaaaaaaaaaaaaaaaccaaaaaaaaaaaaaaaaaaaaaaaaaaaaaaggggccgccctaaaggttccaagcttacttacgcgtgcatgcaacttcaaagcccttcaaaagggtcaccaaaattcaattc

SEQ ID NO: 693 - DNA, 439 bp, Triticum aestivum
  unsure at all n locations
  Clone ID: LIB103-016-Q1-E1-G2
gtccaaaattaacgggtcgactcccacttctccaatgcataacctttcattcacttctcgcattcaatgaagttgtagtgttgaaatgttatctggcaagacaccagaagagtatgacttgtgaaaactctcgggttcacatggattanggaaggcataggttcaacccatangggcatcttaggaacatataccacaaacctcaggagtaatataacacaagctcgaaggcagaggatacaatttaccaaaggcattatgtatccgaggaaaggctcaaaaggttattaaatatgaaggacgttgtcggataaaatccaacaaaggatctggcggtccacataggatctgatgtgagtatcggtactcaaccagaagaagaaagaatgcaaaggcatcagattgtagatatatctggataacttcaaagcttgaatac

SEQ ID NO: 694 - DNA, 447 bp, Triticum aestivum
  Clone ID: LIB103-016-Q1-E1-G4
ggtccagaattaccgggtcgactggtgttttaccgtggtgaaaaccaaaagattccccgctccctccgccttcctgtagattgcattgcctttcagccgtttcgccccctttgcttcctctccccattgcttctacctggtgccatggtggcgcagctgatcacgaagtacgaggtgaggctcctgacacaggagctccatgccaaggatgcggagctcagggccaaggacgtggagctccatgagctcaaggaggagaggagtgccatgctcctccgttatgtgcgggagttcacggagcttcaaaagcggcagccgtccaccacaaagatgctcgaggcgttggcggcgttgctgcagaaagagggagatacgataggccgtcaggggagccggttggagcgcgagcgggccgatcgtgacgaggtccaggatcgcctcagccac

SEQ ID NO: 695 - DNA, 414 bp, Triticum aestivum
  Clone ID: LIB103-016-Q1-E1-G5
taccggtccagaattcccgggtcgacggggcaggaaggagctggatgcgatatggcacgccctcgtcgccggccccctcgagtccgtccagctgaccctgcgtgagatcctggccgccggcaacctgttccgctgccgcagcttccacctcggcaccctctcaggtgctttgctggtcgttgcttgggttttccaactctgcaaaacgtcacccacccttttcgtggacattgttcttggctctgtgttctacaagctaagcgttttatccggacagttgcaaagggagggcaagtcatttagcatatgtgcacggatacagctagtccttctgcttattttgtctttcaaggataacggtgcttctcaaggcttctaccgctttcttgtggaatcaatctggttgctcaacat

SEQ ID NO: 696 - DNA, 376 bp, Triticum aestivum
  Clone ID: LIB103-016-Q1-E1-G6
tccagaattcccgggtcgacggggccgacgttgctgtggagggcacagaagaggttgatcctgcactagaggaggagacggtcatggaggagaccatccgcgtgacacgtgccaagctaaggaggcgcgccgccgccgaggcgggcgcatgaaactagctgcaaaccattgttttattggcgcatggtgttgttgctcctatttttttgagtcttttttagattgtcatgttgtctggtggagagaatatctgttggtcatccaattggtccttctgtttcagagttatcacccgttcctttcttctttcttgtggctctcgctggcctgtttatgtgcctggaagtttgtaatatcaccgggcatatgtatatac

SEQ ID NO: 697 - DNA, 447 bp, Triticum aestivum
  Clone ID: LIB103-016-Q1-E1-G7
ggtaccggtccagaattcccgggtcgacggggtacttcatccgactgaaaatcgcactgcatcagaagaaaaaccgcactgcatcagacgggtaagagaactgcttggtttcttttattcaaacataattttttcaaggacgagaaagtagagtgcacttcacatcgagtgtaaatgaagcacaacactatcaagaagtgaaccgcactacttttttgcttctgtaagaattttttgcacttacggatgaacaacatcatacaacggaccgcactgcatcggacaggcaagtgaaccccataagttttctcttttttcaaacttttctacgcttatttgtgaacctcatggtcaaagttagtgaaccgcgtggcctagactagagaacaacatttttttgttggtgaaagtaaatcgcagggcagaaactattggacttcattaaaa

SEQ ID NO: 698 - DNA, 421 bp, Triticum aestivum
  Clone ID: LIB103-016-Q1-E1-G9
ggtcgacggcgtagccaaaggcgacagccagtactccttctccctcaccaccttcagcccatcggggaagctggtgcagatcgaacatgcgctcacagcggtcggatcaggccaaacctcccttggcatcaaagctgccaatggtgtagttattgccaccgagaagaaactgccttctattttagtggacgaaacatctgtgcaaaagattcagtcattaactccaaatatcggtgttgtctacagtgggatgggtccagattttcgtgttcttgtcagaaaaagtcggaagcaggcacagcagtattatcggttgtacaaggaaaccatccctgttacccagcttgtccgagagactgctgctgttatgcaggagttcactcaatctggtggcgtaagaccgtttggtgtagcactgttg

SEQ ID NO: 699 - DNA, 425 bp, Triticum aestivum
  Clone ID: LIB103-016-Q1-E1-H10
aattcacgggtcgacgggaaagatgaatccccaagcactggggtggatcaaaaggcttagcattggtgttgccgcacctagcagaacaccattatttgcggctggatggagttattgtagggctcgtttcctctctggagctcctggaagtttcaattgtgaaatagaggagcttgtagaggcgaagtcgggcgtaggagacgacgccattgttggatgtgttgtccccggttttgcctgatactgtatcccgttgcgagaaatactgtaacaaatccgtccgtggtgtacctagttaaattatcgagaagtgacattagaaatggtctgtggagagctttggtaataagcggtgcttctgtgcctggtagaatcaaaaaggagaaatcaaaccaagtgtccgagcagttaaaaaggaaaaaggg

SEQ ID NO: 700 - DNA, 437 bp, Triticum aestivum
  Clone ID: LIB103-016-Q1-E1-H3
gggtcgacgggcaatcaaatctttatacttcttgttttatcactaatttagtttataaaagaaaactaccaaaaaatggagttaagtttgtctcatacgcttcgtctttttaatatctttcgtgagtatgatggaaaggaaaattgtgctcaagtgctagaagaagaatgcattaaaatgcttgatactaaatatttgaatgatgagcatgattgcaatgttgttagtatgaattccttgaatatccaggatgctaatgatatgcaaagccacaagcttggggaagctatgtttgatgaatataatattttttgtcccccaagttttgatgagaatatttattatgatgaaagcatgcctcctatttatgatgattatattgatgaaagtgggtttggaagagtgtcaactttagtaagtagtgatcccactatttt

SEQ ID NO: 701 - DNA, 474 bp, Triticum aestivum
  Clone ID: LIB103-016-Q1-E1-H6
ggtccagaattcccgggtcgacgggatctgcgggaggtgatgcagcatcctcaagctattcagatgcgcaatgtggtgttgcatatccgcgatgtgcaaggcctgaagggaactggatccatggaggccaggcttgaagctatggaacaggaagtcttccgctgcaaggggatggtggaacatggactcaatgccaatcacctcatgatcgcggactacacccgtgatctcaaggtggatggcaattccatgaaggacatcatcttctccttcaaagagcaaatcaacttcctccagagccagatctacgacctccaaaaccaagtctttgaatatgaggcaaggtttaaaggtatgagtttggctgccggttgcaggaatcgagagactcactcttcctcttacgacggtgagcctctaccatggaaacctgaggacaagattgcttctacttctacactaccaactccttct

SEQ ID NO: 702 - DNA, 311 bp, Triticum aestivum
  Clone ID: LIB103-016-Q1-E1-H7
accggtccagaattcccgggtcgacgggatgagcaaacgcgacatcgcacgctgcacatgttggaaaaaacggtacacatcacggcgccaatttgacatactcgtatacccaagttcgggcggctcagtagtctaagtacctacgcgagcttctgctggaatgtatgcgatgagaaggaaagcagttggaatttggggatgcacggacggtcgaaaggatacagccggaggtgctcataccagcaacatcgcaactctactcactgtcacgaacactaactgtagcgtgaggcatcatactgaatcataac

SEQ ID NO: 703 - DNA, 363 bp, Triticum aestivum
  Clone ID: LIB103-017-Q1-E1-A1
gtaccggccctaaattcccgggtcgacggggtctacaacgtatacgtctcggagtgcgcgtttgcgctccctctttgggatgtgggtgacgtaaatcatgttcactgttttgaccttcagttgaaattttttctgtccccagtgttcggttggcgagattcgtcctcatcttcacttggcggctccttccctttgtgtttggtgcttagcttgccagcctacttgaagacccaacattctttgttggtgtgattcgcaggtttctcggtggtgccgttaatctgacaggacttgtctagacttttatttaagctggacggaccatctccgcaggcttcaaatggctttttccgttgaccgggt

SEQ ID NO: 704 - DNA, 426 bp, Triticum aestivum
  Clone ID: LIB103-017-Q1-E1-A6
ggtcccagaattccgggtcgacgggcatccccaatctcagaaacaagtcagctggcatcttctggtaaacgaccagcttcacatctacctcgcaatcatctgggaaggcgatcctttatgtcaacaccagtctacccgctagtcttccgcaatccagtgtcagaagcagaagcctcgggggtggctgaggctagtaatgctgggcgtaccacaccgagtgatgacagcctggcttctcctgtgtggaggcgcagtttggcgagtcctgagctcaagttccatgacacactgagtgaacttcggaagatggaggcttctcctgagccgaacacaagctctaggagggaaggattcagatggagcagtgctagcagctatgattttggatatgatggtgatgccattgacatttcagaccatatcagc

SEQ ID NO: 705 - DNA, 299 bp, Triticum aestivum
  Clone ID: LIB103-017-Q1-E1-A7
ggtccagaactcccgggtcgacgggacttgatatatatatgtattgcaattgaatactcgtggtgacaatggggtatcgtattgattcacttgatatatgttttggcactcaactcgcagattcccgaggtgacattggggtaatctatgcataggggttgatgcatgttcttgtctttgtttctctggtagaaatcttggggcattatttgaagttctatgtgctggattgatgtattatgaatctgaatttgctttggtgttatctagtacagtctcttggttagatctatcagatt

SEQ ID NO: 706 - DNA, 442 bp, Triticum aestivum
  Clone ID: LIB103-017-Q1-E1-A8
cggtccagaattcccgggtcgacgggtcctagccatagacatgagttgtcatttgattaacgggatcacatcattaggagaatgatgtgattgacttgacccattccgttagcttagcacttgatcgtttagtatgattgctattgctttttcatgacttatacatgttactatgactatgagattatgcaactcccgtttaccgaaggaacactttgtgtgctaccaaacgtcacaacgtaactgggtgattataaaggtgatctacatgtgtctccgaaggtacttgttgagtttgcgtatttcgagattaggatttgtcactccgattgtcggagaggtatctctgggccctctcggtaatgcacatcactataagcttgtaagcaatgtgactaatgagttagttgcaggatgatgcattacggaacgagtaaagaga

SEQ ID NO: 707 - DNA, 417 bp, Triticum aestivum
  Clone ID: LIB103-017-Q1-E1-A9
accggtccaggattcccgggtcaacgggccgttcaataaccattaccggaacctgaatgctcatattggctccaacatattctatgaagatctttatcggtcaaaccgcataacaacatacattgttccctttgtcatcggtatgttacttgcctgagattcgatcgtcggtatcatcatacctatttcaatctcgttaccggcaagtctctttactcgttccgtaatgcttcatccttcaactaactcattagtcacattggttgcagggcttatagtgatgagcattactgagagggcccagagatacctctctgatacatggagtgacaaatcctagtctcgatctatgccaacccaacaaacaacttcagagacacctgtagaggatctttataatcaaccagttacgttgtg

SEQ ID NO: 708 - DNA, 410 bp, Triticum aestivum
  Clone ID: LIB103-017-Q1-E1-B10
gggtcgacgggtggtcttcatcttagtcccgggagcttcaacggcaagtgacttgcgatcggttgcggctggcgcttcccggtaaattttgtcggcgcaaaataaaacatccttcctgtcccaaggacagagatgacacttatccggcctggcatcttcagcatgttgtatgcatattgagaggttgctatgaatttggcgagtgctggacggccgagtatcccattgtaaggcaatggaaagtcagcaacgtcaaaagtgaccctctcagtcctgaagttcaactcactgccaaatgttaccggcaacatgatctttcccttcagcttgctccttcccgaattgattccttggaatgtgccggtctcttcgagctcgctatcaaggatctggagtttctggagtaccgc

SEQ ID NO: 709 - DNA, 110 bp, Triticum aestivum
  Clone ID: LIB103-017-Q1-E1-B6
ggtcatgaaactcccgggtcgacgaacataacaatcgtaagtcgtactagtgaagtcactgtgagataacggtggtgtttcgcggatggagctgtgacgttattgtcgct

SEQ ID NO: 710 - DNA, 428 bp, Triticum aestivum
  unsure at all n locations
  Clone ID: LIB103-017-Q1-E1-C12
ggtccagaattcacgggtcgacggggaagaagcacaaggcggagaagcgggcgccggcgtccaaggaagccggcggcgaggggaagacgaagggcangaagaaaggcaacaagccaagaagagcgtggagacgtacaagatctacatcttcaaggtgctgaagcaggtgcacccagacgtgggcatctcctccaaggccatgtccatcatgaactccttcatcaacgacatcttcgagaagctcgccggggagtcggccaagctcgcccgctacaacaagaagcccaccatcacgtcccgggagatccagacctctgtgcgcctcgtcctccccggggagctcgccaagcacgccgtctccgagggcaccaaggccgtcaccaagttcacctcctcctagacaacttaagcttgatcctcgtcgcttc

SEQ ID NO: 711 - DNA, 425 bp, Triticum aestivum
  Clone ID: LIB103-017-Q1-E1-C3
tcgacggggacagagatgacgcttatcgggcctggcatcttcagtacgttgtatgcatagtgggaggctgccatgaatttggcgagcactggacggccgagtatcccattgtaaggcaatggaaagtcggcaacgtcaaaagtgaccctctcagtcctgaagttcagctcactgccaaatgtcaccggcaacgtgatctttcccttcggcttgctccttcccggattgattccttgaaatgcgccggtctcttcaagctcgctgtcagggatctggagtttctggagcaccgcgggggagatcaggttcaagccggccccgccgtcaactagcatcttagtgaccttgaggttgcggataattgggtaaaccaacatcggcaagcacccgaccgcagttgtgcgatctgggtggtcctcaatatc

SEQ ID NO: 712 - DNA, 318 bp, Triticum aestivum
  Clone ID: LIB103-017-Q1-E1-C6
ccggtccagaattcccgggtcgacgggccacccttctgggctccggatcacgcgcatcgctgccgaggccgtgcggcttgtgggaggcgggggcgcgcggtgggtggtgctcgtggacgacgacaccgtgctgtccccggacaacctggtggtgtgctcgggaagtacgactggagggagatggtgtacgtcggggcctcgtcggagagccactcggccaacagctatttcagccacggcccctcgccgctgtgctcgcgcggacactcgaacgtgttgctcgagaggttacccaggctgtagggaagccacgaccgc

SEQ ID NO: 713 - DNA, 436 bp, Triticum aestivum
  Clone ID: LIB103-017-Q1-E1-C7
ggtcctagaatcccgggtcgacgggctcgctaaccctttctgagaccgcaaaacataaatgcagagcacccctgaagatcaaggactgtctagacaatgtaattcatggtaaaagagatccagtcacattcatactcaacataaattaatagcaatgcatgcaaatgatagcagttctctccaactggtgctttttaataagaggatgatgactcaacataaaagtaaatagataggcccttcgtagagggaagcagggatttgcagaggtgccagagctcgagttttgaaacagagataaataatattttgagcggcatactttcattgtcaacataacaaccaagaaatctcgataccttccatgctacatacattataggtggttcacaaacagaatggtaaagtttatactcgcccaccaccaacgagcatc

SEQ ID NO: 714 - DNA, 408 bp, Triticum aestivum
  Clone ID: LIB103-017-Q1-E1-D1
attcccaggtcgacgggtctcttgatgcttcacaccctccgggcactcaacgcaaccgagagggatgccagcgttattggcatttcgtcacactagacctatgcatgtatctggaaatttagggctcattatcgagggcgttactcagcccagtatatgttgtaaagtccgaataccttagggagtgttcggcgtcgcgagtttggccttatatgcatcagctccaaatcatgtcttgggtcaatagttgggttttcccggctcccgtgtttttctaccttacgttttgctctatcggctaaggtggcaccagggagaactactgcgattgtaccctggttcgtctggatgagcaccttagtagagaaagccgaaaactgactgtcatgatatagcgcgagactggtc

SEQ ID NO: 715 - DNA, 230 bp, Triticum aestivum
  Clone ID: LIB103-017-Q1-E1-D3
ttcccaggtcgacgggacacttggatgcttcaagttaaacccttttgagcatcttaagctgtcttttgattcttctgtggatgaggtgaagaagcaatatacgaagttgtcactgttggtccatcctgacaagtgcaagcatccacaagcacaagaagcttttggagccctggcaaaagcacagcagctcctacgtgatccacacgaaagaaggtacattcccgattaag

SEQ ID NO: 716 - DNA, 432 bp, Triticum aestivum
  Clone ID: LIB103-017-Q1-E1-D9
attcacgggtcgacggggtcttctgacatgcagcagcaaagttgttgttgttgttgttgtttttgtcgttgttgttgtgagcatggaacttgcttctaacttatttattcattgctttgatggtagagatattggagcagatgagatgagagaataaccttgaagttcagtggtttgtaataggaagcatgctcgacggtgcaatcagggtcaatcagctccgtgagccgtgctatgtccttgtcattgagggaggaatacaactcctgaatcacatctgtcaggggggaagatggtaaggcattacctccatctccctggtaagctttgttgagaccactggttgcttttggccctggtattgatcgtatgggctttggtgagcattgttgtctcttctcccacttggcgcttatctgctgtcgtcgggac

SEQ ID NO: 717 - DNA, 421 bp, Triticum aestivum
  Clone ID: LIB103-017-Q1-E1-E1
attcccaggtcgacgggggggacggggaaaaaaagacgggcaggagggggacgggaaaaaaaaggaaccagcgacttcgtcagccacccccggcgccggcgggacgacggcggctccaacgcaccatcgttcctgatctccacggtctctgcacctctacaagagagtttgtcatcatgcacagccccagtaagcggttgattacctctgtgtccaaacgccttgccgtgtccaatctccaaggctgggcagacctcccagatgacctgctgcactcaattgttgctctcttgggctcctccattgaccttcttgcctttgctgccacctgccgcccttggcgtgccgctttcttctcacacccatccaaatctaccttgtgcttctcatgcccccctgttctcacccgaaaaaaccccat

SEQ ID NO: 718 - DNA, 402 bp, Triticum aestivum
  Clone ID: LIB103-017-Q1-E1-E2
tcgacgggcggccatccaacggccggagcaactcgaggaactcgcaggcgaggatacagaagcctcaggtcgcgccgccgcctccggagaggtcatcgtcctcgtccgaccacagcaccgcaaacaacaacagccaccacgactggcgcgaagggtcgtcggtgctggacctcaacggtgacaactacttctcgtgcgccgtcgggaggaagcgctccaacgcccgttacctgctcaactcgtcggaggacgtcgtctccttcctcaaggagatggccgagtcgacgacgccccgtgccggtggcctcccccccggcgccgccgctgattacatgttcttggataggcagtaagactaagtttgcctctgctaatcagcaatcacccggcccgccggcccgc

SEQ ID NO: 719 - DNA, 95 bp, Triticum aestivum
  Clone ID: LIB103-017-Q1-E1-E5
ggtcatgaactccgggtcgacggaatgtactagactgagtcagtatagaaacttcgggcaagtttgttgattgtaggagcattgagacgcaaagg

SEQ ID NO: 720 - DNA, 355 bp, Triticum aestivum
  Clone ID: LIB103-017-Q1-E1-E6
ggtccagaattcccgggtcgacgggagggcaggaggaagaagaaggcgagatcggctgtgcaattatttggcggcttgtctttagtttcctttgcgattctttcccttgtttaagtttaccctgtagtgtgtgtgtgtgtccttgcgagactatttcggctctctgtctggtctctgcgacttggtagcttctcatgggctccatggtgttggatgatgtggagggaggagggttcgtgttagctaagttagtccactccctctgttcgtgttttgtaagttaattagtagtatgtgtgctactagtatatggaactttaaatcggttcaccggcgaaaaagagcaggggggcgc

SEQ ID NO: 721 - DNA, 137 bp, Triticum aestivum
  Clone ID: LIB103-017-Q1-E1-E8
ggtcctacattccgggtcgacgggtgtgttgagaagttttcaagttttgggtaaagatatgatggattacggaacaaggagtgtcaagagcctaagcttggggactcccacagatttccaatgtaaacggacggaca

SEQ ID NO: 722 - DNA, 421 bp, Triticum aestivum
  unsure at all n locations
  Clone ID: LIB103-017-Q1-E1-E9
ggtccagaattacgggtcgacggggaggacgaggatgaggacgaagaagacgactcggacgacgaagaagacgaggattcggaggacgaaggggacgaagacgaagactccgacgagganggggaggacgaaggccaagactctgacgacgacgacgaagacgaggacgaggactcggatgaggaggaggacgacgaagacgaggaggaggaggaggaggaggacgacgagtagcatgggatggaagtggagcctgtggcgttcgcatctgggtgaggatgaaatgaagatgcaagtagctgaagggtcggtttgcactgatgcttaactgtatgtaagggatggcactcggtaaccgaatgttgcggatgaagaatattgactgcggcatgactaaatattgtcctcagggttgatggct

SEQ ID NO: 723 - DNA, 407 bp, Triticum aestivum
  Clone ID: LIB103-017-Q1-E1-F1
attcccaggtcgacggggctgtcacaggggtgaagaaccatccggatgagggcatccttaacagaaaaaccaacttcatcaaattccacagttacagagttatcacgagaaagcttacgaacacagactaaattctgaatcagtttagagacacaagaacattattaagataaagtggtctagaggtggagcgaaaactagtggaaccaatgtgagtgataggaagaccaacaccattaccgacaatgatacgagaagaagtgtggataggagacacggaagagaggttacccgggtaagcggccatatgcgaagatgcaccgatgtccataaaccagtcgccaccgtcggaataagccccggtcgggggctattggtcaggtgcaacgagtagtgtcgggtcataa

SEQ ID NO: 724 - DNA, 382 bp, Triticum aestivum
  unsure at all n locations
  Clone ID: LIB103-017-Q1-E1-F2
tcgacggggacgttgtactggtctcagtatactgggaccgaacacccgatgcctatgagcgaccagctgaagcaactggtcgagctgcacaaggcggctgagcaggccatgaggggccttataatccggatgtggcctggcgactcccttcccaatagctacttcggcctggtgaggcggcttgtagatgcctgcccatggctggaggtcataaagcggtccgtctgcatcgaaggtgcacgccgggcctttgcccatgcgaagctgcactgggccaagatggacgccgagaagctggtgaaggangggccgccgcggggcaaggagcatcgccaccccaaaatgtattatgagggtgttctgaacggtgcctgtcttgtgg

SEQ ID NO: 725 - DNA, 390 bp, Triticum aestivum
  Clone ID: LIB103-017-Q1-E1-F6
ggtccagaattcccgggtcgacggggtggcggacggaggctggtgtgggaatggggtgttctagcgcggatggtgtatgaatgggaaaatggagggagaggtacggggaaccatgtttttgggacgctcctgtctgaaatatgggaaagttacggacgtatcccccatttcaaatttggacgtctcgtcggttggggataggacggtaatctcgcatctcccaagtatttgccggtaactatttcgggcgaggagagggtgttttgctgcccacggttggcgcccatggtgtatgaacggggctgatacgtacggcggttgtgtcacgtctgatggaagttacacatctgcccctatttaaaatattagcctacatctacttcggacgag

SEQ ID NO: 726 - DNA, 446 bp, Triticum aestivum
  Clone ID: LIB103-017-Q1-E1-F7
cggtccagaattcccgggtcgacgggacaacatcaacaacaagctgcagcttgtcatgaagagcggcaagtacacgctcggctacaagaccgtcctcaggaccctcaggaactccaaggcaaagcttgtgatccttgctaacaactgccctccgctccgcaagtctgagattgagtactatgctatgttggcgaagatcactgtccaccactaccatggaaacaatgttgatttgggaactgcgtgtggtaaatacttccgagtctgctgcctgagtatcatcgaccctggcgattccgacatcatcaacgcaacaccagctggccagtaaacctgtgtatgccattttcagtgtctcgtctgatgcgtcatctaaggtggttctagagtgtagttcttgctggacttgatttggtcttgtgtacatcatttaacagtcaatcaag

SEQ ID NO: 727 - DNA, 311 bp, Triticum aestivum
  Clone ID: LIB103-017-Q1-E1-F8
ggtccagaactcccgggtcgacgggcatgctcaatccggttgttatttattttgcttgtcacatgctaatagttcactcttttgcagcagctggatagattctaaaggggtccgtagtcccaactgcctcatcagcgtcctgctgaacttacactggccggggttgtactgtccggattcagtcatgcacccggatcatcgggtcttggccacgagctgggagcactgggaagcggccctccacgcggagcatgggacccatcccaaggccatgatcaacactttctgggtgagttctcttcagaagcaca

SEQ ID NO: 728 - DNA, 433 bp, Triticum aestivum
  Clone ID: LIB103-017-Q1-E1-F9
cgggtcgacggggatgttcaggctggcatgaagcaaggggatctaatcatttggtatgttgagcagcagaatgcccaaggtgcatatagttctacagaagaggtgaaggaggaagtaaagtgcatcaaagccattatagagaggctgatacagagggaaggccatcttgtagtcatagacgaaggaacagcggcagcagaaggtgctgcagcaagggcatcggagcacagaatcctggctgttaacccgaactacgtcattgattgattaaccagctgaggacacagctaactagatccatcatatgtggttgaccaatagagcagacattcaaacggaagacatcctgttgtcatatgctctagaaatgatatgttgtacctgccatccccttcccaaggaagcataagatctctggaattgtatcttccat

SEQ ID NO: 729 - DNA, 423 bp, Triticum aestivum
  Clone ID: LIB103-017-Q1-E1-G1
cctgcccgtacggtccagaattcccgggtcgacacaggatgtcggcgcgacgaggtgacaaaatccggattcgcagggttgcccgagttacggacataacacacgtaggacaatggtggcatatgggatcaccctggaacgacgtccgcagtgtagaccggagtgcaaagcctgtagcaccaagaatcgctgaccaatagaaaatactgtttgatatattattaatatgcacatcgcgaataacttacaacgattgcacctggtatttatctgacgacgtccatactgatggcagacgagatgattatggatgagggacatcctggccagagtgcctcaagactgcatcgggccgaccaacatacggaacggccgatctgatgcataggtcggctggccgaggtgatgtcaggatattgttac

SEQ ID NO: 730 - DNA, 408 bp, Triticum aestivum
  Clone ID: LIB103-017-Q1-E1-G10
gggtcgacggcaagtggacaagtgatgatgactacagcacgccgcttgacttacgagacacataccagcagcgtagggtcatatcgatgccagacaacttgcttgagtgatcacagtactggtactccctatagtacatactacagtactatgccctagcttgctagagtagagtagtagagtaggactctgctctactactagcaccggaggagtagtatattctaatctaaaatagttacaaacttcgatgcccgatcgtggaacgactacaaaccatgctcaaagaccgtgtctatgtggtgtttggacttatatgcaaaaaaatagcaagatgcccgtgcattgcacgacacatcatcatcaccaactcggttttttctctactcctactcctataaaacactc

SEQ ID NO: 731 - DNA, 439 bp, Triticum aestivum
  Clone ID: LIB103-017-Q1-E1-G5
ccggtccagaattcccgggtcgacggggaagtttgatgacgataatgatgccggtgatggggatgacaccatggaagaggagcatggcaaggaggatgctgaagatggtggtgatgaggggatggagcaggaggaagggagtgacggcgatgaagacgatttcccgcatgccttcttctttgtgaggtatctgtgtgatcgggaggactgctatggcatgcttgcgccgttgccacccttaccgaacggtgagctgtcccatgtatttgagtgcaatgcctgtgggcaactgaagaaggaagaagacgaggttgaggctgatgctgatgctggtgattgcagcatggaccagtaggatgtttgctgctgtttttttggagcacttggtgatgaaatggatgcactggttggcgttctccgtactttgggggctgtttgc

SEQ ID NO: 732 - DNA, 430 bp, Triticum aestivum
  Clone ID: LIB103-017-Q1-E1-G6
tcccgggtcgacgggtctatcacacataaacctccttatatattcctcaaaacagccaccatacctacctatcatggcatttccatagccattccgagatatattgccatgcaacttaccaccgttccgtttattatgacacgctccatcattgtcatattgctttgcatgatcatgtaattgacatcgtatttgtggcaaagccacctttcatgattttttatacatgtcactcttgattcattgcatatcccggtacaccgccggaggcattcacatagagtcatattttgttctaagtattgagttgtaattcttgagttgtaagtaataaaagtgtgatgaccatcattattagagcattgtcccatgtgaggaaaggatgatggagactatgattcccccacaagtcgggatgagattccgggct

SEQ ID NO: 733 - DNA, 452 bp, Triticum aestivum
  Clone ID: LIB103-017-Q1-E1-G7
taccggtccagaattcccgggtcgacggggatcaccgggatgcgcagtcccatgcttatgcaaatcaaatcaaaataattgcaaacaaaactcccccgggactgttgttagttggaggcactcgttgtttcgagcaagccatggattgatgcttgttggtgcagggggagtataaactttatcattctgtttgggaaccgcctataatgtgtgtagcacggaagatatcgccatctcttggttgttatgttgacaatgaaattatgccgctcaaaatattatttatctctatttcaaaatcgagcgctggcacctctacaaatccctacttccctctgcgaatggcctatctatttacttttatgttgagtcatcaccatcttattaaaaagcaccagttggagagcaccgctgtcatttgcatccattgctattaatttatattgggtatg

SEQ ID NO: 734 - DNA, 320 bp, Triticum aestivum
  Clone ID: LIB103-017-Q1-E1-G8
gtccagaactcccgggtcgacgggttatgctagttgtatcgctcaccaaggcatgacatgacagttgacgtgtcgctgctgctagtctgtatccaacgccaatttgtgacatgtctgtaaaattctgcatcatacttaatcggatttgtgagagacgggataggcgaatgcttgttcaaattactgtgggagacatcgcactttgtgtcttcattgcagtacattatttgtcacagattgcactcttgattcagtgcctatcccggtcaagctccggtggctctctaatacagtcataatctgtgtgtaggtattgagtt

SEQ ID NO: 735 - DNA, 435 bp, Triticum aestivum
  Clone ID: LIB103-017-Q1-E1-G9
tgacggtccagaattaccgggtcgacggggattgtgactttccggacagcccaggacagcaacggggtgctcaactcgtgggcgtcaaacctggagaagctcctggacctggtagagaagagctgccaccaaatacacaaggagacgatgatccacaaggcagtgctaaaggcgtgattaacgtgcatacattttgaatggaatggcctccttttagtgttttgtgggtagtagactttctatggtctgatttcacaatgtcggggtgggtaaaatactattgtctagtcaaacatcatgcatgcgaattggtcttaaaacactgtaaccacaagatgatggataccatttgcggccgtggcattgatgtgcgccagtttccacaagtcatgtattttcctgaataaaacagaaaaaaaaaaaaaggaagcaaaa

SEQ ID NO: 736 - DNA, 238 bp, Triticum aestivum
  Clone ID: LIB103-017-Q1-E1-H4
cggtccagacctcccgggtcgacgggcttacgaaatcgcgagtcaacttttgagaccttggttgatgcatttgtcgtcttggataatactaaagtatgggtctctgagtatggatgagattagtctagcaataactaatagcataccaggggaacactctgctagccttacaaccattaaaagacttgagcgacatcatttggacacgagtgtgatggctagccatctcgaccttctc

SEQ ID NO: 737 - DNA, 391 bp, Triticum aestivum
  Clone ID: LIB103-017-Q1-E1-H6
attcccgggtcgacggggagttctatatgactaatgttgagtccatggattatgcacactctcacccttccatcattgctagcctcttcagtatcgtgcattgccctttctcaccttgagagttggtgcaaacttcactggtgcatccaaaccccatgatacaatacgctctatcacacataaacctccttatatcttcctcaaagcagccaccatacctacctacgatggcatttccatagccattccgagatatattgccatgcaactttccaccgttctgttcatcatcatgacacacatcgtcattgtcatattgccttgcatgatcgtgtagttgacatcgtatctgtggcaaatccaccatgcataaattttcatacatgtcact

SEQ ID NO: 738 - DNA, 441 bp, Triticum aestivum
  Clone ID: LIB103-017-Q1-E1-H7
cggtccagaattcccgggtcgacgggacagcaccttccaggcatcttcgtacgtagtgtcgaagaacttgctcaaggtttggtgatgtgccagatcaaactcccacaatttgaaggcccgttgttggcatgggacgatccggcggatgagcatgacctggactacgttgacgagcttgatattcttgttcactagcttttggacgcaggcttgaagtctggtcagctcttccaaatctccccacattaggcccgtctctttccaggaggtgagccgtgtggggaaaccagatcagaattcaggggccgccgcccatttggggtcacgcggctcggtgatgtagaaccaccccgactgccacccctttattgtctccacaaaggagcccttgagccataggacgttggccatccggcccaccatggcacctccgcactccgc

SEQ ID NO: 739 - DNA, 381 bp, Triticum aestivum
  Clone ID: LIB103-018-Q1-E1-A11
ctatattgagtcatattatctcatcagcgtgcgacgaatctccgcccgatcgaatctccagggtgataacagggatggctactggtagtgatgctggaaagtccgctgaggcagtgttggagtggcctaagcaggacaaaaagaggatgctgcatgctgtttaccgtgtgggagatctcgaccgcaccattaagtgttacacagaatgctttgggatgaagctgctgaggaaaagagatgtcccagaagagaagtacaccaatgccttccttggatatggacctgaggatactaattttgcacttgagctgacttacaattatggtgttgacaagtacgacattggagctggctttggacattttgccatcgcaaatgaag

SEQ ID NO: 740 - DNA, 433 bp, Triticum aestivum
  Clone ID: LIB103-018-Q1-E1-A12
ccgggtcgacgggcgagtaaagagacttgacggtaacaagattgaactaggtatgaggataccgacgatcgaatctcgggcaagtaacataccgatgacaaagggaacaacatatgttgttatgcagtttgaccgataaagatcttcgtagaatatgtaggatccaatatgagcatccaggttccgctattggttattgaccggagatgtgtctcggtcatgtctacatagttctcgaacccgtagggtccgcacgcttaacgttcagtgatgattggtattatgagtttatgtgttttgatgtaccgaaggttgttcggagtcctggatgagatcagggacatgacgaggagtctcgaaatgttcgagacataaagatcaatatattggaaggctatattcggatatcggaaaggttctgagtggttcgggt

SEQ ID NO: 741 - DNA, 417 bp, Triticum aestivum
  unsure at all n locations
  Clone ID: LIB103-018-Q1-E1-A2
gggtccacgggatgacgaaaatgaccaccggtgatggcttcccctctggcaaggtgccggaacgggctctcgattggttttacatggctacagaggcttgcggctgtggaactcccgatctaggcttatttctgggggtttctggatttataggaatttttggcatcggtttcaagtcaggggggtccatgagtcagtgacaaggcagggggcgcgccctccacccttgtcgttgattcgggactcttctggcccaactcttgtgcttcgggggcttcttctggtccataaaaaataatcgtaaattttcagctcatttggactccgtttgatattccttttctgcaaaactcaaaaacaaggaaaaacagaaactggcactgggctctaagttagtangttagtcccataaataat

SEQ ID NO: 742 - DNA, 392 bp, Triticum aestivum
  Clone ID: LIB103-018-Q1-E1-A4
actccctaaattgagtcgtattaagccgacggtgccggcacctactgcttccatatcgcgactcgtgagtggagcatagctggcgactggctcatgcccttcaatggcaaggcggattatgtccccgaacttggactctggtttggcatcaaacaagccatcgtcccttgcgctgccgacctctcatgcctcctcagaggggaggagctgtcgccagacaagatgcggatctgggagcctgatgacctgccagaggagtggcagccaaagagcttgcacaattcgtgtgctgtcagccttggttctggcagattcatcatcgtggacgtcttggatctcatgaaattcgacaaggaatgcaacgacatgagtcccgtcaaggaacttgccct

SEQ ID NO: 743 - DNA, 414 bp, Triticum aestivum
  Clone ID: LIB103-018-Q1-E1-A6
tcgcgggtcgatggtacacgctaaagtgagtcgtattatttccttccgcatcaagagatccacacagctgaagaagctgatgaacgcttactgcgaccgtcagtctgtggatctcaactccattgctttcctttttgatggtcgtaggctccgtggtgagcagacccctgatgagcttgagatggaggaaggcgacgagatcgacgccatgcttcaccagaccggagggtgctttcctggcccttagaaggagcttgctgcagcctggctgttctatgtcgtatgctacctttagaactagagtaaaatgtaagaagtgaaagaacttgtgaggctatggttctgtgccatagcctgagggggggtctggaggtgaaacaacatcggagtactgttgatgtcgtgactgaacta

SEQ ID NO: 744 - DNA, 401 bp, Triticum aestivum
  Clone ID: LIB103-018-Q1-E1-A8
attcccgggtcgacgggaaagagagagaataagccatctagctaataactatggacccgaaggtctgaaataaactactcacacatcaccggagaggccatggagttgatgtagaggccctccgtgatcaatgccccctccggcggagctccggaaaaagccccaagatgggatctcttaggtaaaaaaggttgcggccgtggaattaggttttcgtggttctcctggatgtttgggggtacgtggatatatataggaggaagtacatcggtggagcaacgaggggcccacgagggtggacagcacgcccaggggggtaggcgcaccccctgccttgtggcctcctcgattgtttcttgacgcccactccaagtctcctggatcacatttgttgtgaaaat

SEQ ID NO: 745 - DNA, 441 bp, Triticum aestivum
  Clone ID: LIB103-018-Q1-E1-B10
atgcccgggtcgacggggctcctaaggtcggggaaggctctgattaccaacttgaaacgccctcgatgcggctatatctcccacgtgtcgaagcacgacttagaggcataaccgcattgaaagcaatgtcgcaagtgaggtaatcttcacacaacccatgtaatacatcagggaaagagatacatagttggcttacaatcgccacttcacacaattacatgaataaagcattacatcatccagatacaatcaaagtccgactacggaaccaaaataaaggaagaaccccaaatgcgacaaggtccccgattgaccccaactgggttccactactgatcaactagaatgaaaaacaacacaaaggacaagatcttcatcgagctcctcctgagcttggttgcttcatctgcacggtctcatcggcacctgcaaactggtttt

SEQ ID NO: 746 - DNA, 440 bp, Triticum aestivum
  Clone ID: LIB103-018-Q1-E1-B12
tcccgggtcgacggggaacacgatgctaagtcgcatcagtgacgtggcggacggaggagggtggggtttcgcggctggagcggagaggttatggtagcctgggatttcgaatggcgaaaagggggcgatgggagggggtgaagcatgactttggaacgtgcttgtccaaaatgtagggtgtgttacaaaagtacccccccaccgatttgaactagcggccctttcggctcagggttagaagggggatttagcgtgtcaggatttggcagctggagggagttttcgcgcatgttgtaatttcgggatagcaaggcgcgggttgtgaaggcgctagttttgggagcacgatatctgaatttttgggatataacaagacgcaggttgaatttttgggacaagcctaacatgtagtaatattgtacttgtacgtaccaaatcaa

SEQ ID NO: 747 - DNA, 421 bp, Triticum aestivum
  Clone ID: LIB103-018-Q1-E1-B6
tcgtttgtcattacgacagccctatagtgagtcgtattaagtcaattcttgaaatgggcggtggaacatgggacagagacactgtgctgcgtgccctacgtgctgcattcaacaacccggagcgggctgttgagtatttatattctggtattcctgagccgatggagattcctgcaccaccaccaagtgcccagccagctgatcctgcccaggtttcacaagcagctcaacctgcagttgcctcttctggtcctaatgctagccccttggacctcttccctcaagccctgccaaatgcttcagcaaatgctgctggtgaaggaaatctggatgttctacgaaacaatgcacagttccgaagcttactttctttagtgcaggccaaccctcaaatcttacagccattgcctcaagagctggg

SEQ ID NO: 748 - DNA, 412 bp, Triticum aestivum
  Clone ID: LIB103-018-Q1-E1-B8
cgcgtaggtcgatgggggtccctatagtgagtcgtatgacttgctgatgatccgcgaaacctggagactcgaagtaacaggcggcgcactccgggtattctattgcagacaaacaaacaaacatacaataagtactcatctaattcacaggtaaaactcaaatagaagatcgaaccagaaagttcaacttaagaactccggtttgcaaaaaaaaacaaaacaaatgaagctacggaagtcaaacggcgaaagaaaacagcttcgttttactaatctggatctaagtcaaattttacaaaagcaaaaacttgtttaagttggttattcggaaagagggtttcgagacgaaactccacacgcttgaattgcctgattccgataaacgagcgaaaagttatactaaaacgaaaat

SEQ ID NO: 749 - DNA, 436 bp, Triticum aestivum
  Clone ID: LIB103-018-Q1-E1-B9
cccgggtcgacgggggtcgcgattgtcagtcctcttaatctagacaaatctcgaggaaaatggagctttgaggtcgagcttcgagaggagaaagcttaactagtgtggctcgggcatttcatcgaacacctcatgtgcataggaggtgagatagagcaccacaaacccctcccctcgccggcccagaaaaacagagcactagagtgctctgctctggcgcgagggttatatataggcagcaccactggtcccggttcatggcatgaaccggcactaaatgggagcctttggtcccggttcttgccacgaaccgggaccaatggtggtgggccaagagccaggcccattggtcccggttcgtcccaccaaccgggaccaaaagttccagacgaaccgggaccaatggcccacgtggcccggccgcccccctgggctc

SEQ ID NO: 750 - DNA, 400 bp, Triticum aestivum
  Clone ID: LIB103-018-Q1-E1-C10
tcgcctaggacgttgcgacacgctatagtgagtcgtattaagtcgacgggggccgccatctccttaggtttcagttctcctccgcctccggtctcgagagctcgccagaatggtcgcccacaggttccaccagtaccaggtggtgggtcgcgcgctgccgacccccggcgatgagcagcccaagatctaccgcatgaagctctgggccaccaatgaggtccgcgccaagtccaagttctggtacttcctgaggaagctcaagaaggtgaagaaggccagcggccacatgctcgccatcagcgagatctttgagaagaaccccactaccttcacgaactacggcatctggctgaggtaccagagcaggaccggttaccagagcatgtagaaggagtagcgt

SEQ ID NO: 751 - DNA, 360 bp, Triticum aestivum
  Clone ID: LIB103-018-Q1-E1-C12
tatagtgagtcgtaataacatgtacccaaaccagtcgaggtctttgtccgcgccccactgcccgtcggtaaagcggcatcgcagtggtaccgacaccaggagctgaccgaggtagaagaggagctgagacccaagtggcattactgatgctgcggttgccaaatgcctatttttggtctctgtgtatgctgctgttgctgctggagcagctccgcgtgatccagttgcgcaccgacattatgtttcttggatgatcttatagggatgaattcatagttctagcttaggatcagctgatgaaaatgatccaggaaacctcgagtgaaatgttgctgtggttacacttgttgcatatatatg

SEQ ID NO: 752 - DNA, 412 bp, Triticum aestivum
  Clone ID: LIB103-018-Q1-E1-C4
ctatagtgagtcgtattagctaagttttcttcatttaattagctatagactcaaaattgtcttttcacctaggtaaatgcgcttagcaccgtttcttccttgggtcagcaaactagtctctctcttcttgataaacttgcaacatcagactttatgcttaggtggcaagcttaagcacctgtaggagcaagtaaaagtaagtacaatagtgcgttttacatggcatttttgcatatgtggaggaaagagaggcaaggaaaaagtggagaagtgggatctcatgcaagagccagcctctactacatggtggagcattgggagactcacgccggtcgtagcgccgcagttaaaatgataatggcaagtcaaatcacgggggcccacctgtccagcagtaactccctgttaaatc

SEQ ID NO: 753 - DNA, 255 bp, Triticum aestivum
  Clone ID: LIB103-018-Q1-E1-C5
cctatagtgagtcgtattaagttcttgatgcatactcaggatatcattacatcttcatggcagaagaagatgaggagaaaaccgcattcattactccatgtggcacatactgctttgtacggatgcctttcggactaaagaatgctggttcaccatttgcaagggtagttcacgaagcttttgaaccacagttgcacagagatgtataagcttacatggattacatactggtcaacagcacagatagaccaactc

SEQ ID NO: 754 - DNA, 250 bp, Triticum aestivum
  Clone ID: LIB103-018-Q1-E1-C6
atagtgagtcgtattacgttcgcgtacctgaacccggtgctccggcccttgttagtcacagcaactggcttgtatccagtgtgggtacccctgaactcatcctcggtgatatcggcaaactggttggcctctagccaaaacttgctgttcccggcgttcgtggactcgttgaaagcaacgttggccttgaaaccctccagccgcctgtgctttctcggcagcgtcaccgtacacgcggccatacttgccc

SEQ ID NO: 755 - DNA, 423 bp, Triticum aestivum
  Clone ID: LIB103-018-Q1-E1-C9
ttactacaccctatagtgagtcgtattacctcatcaacaagcttggaggcattgacaagcgtgtgatcgagaggtttgagaaggaagccgctgagatgaacaagaggtctttcaagtatgcctgggtgcttgacaagctcaaggctgagcgtgagaggggtatcaccatagatattgctctgtggaagttcgagaccaccaagtactcgtgcactgtcattgatgctcctggtcaccgtgatttcatcaagaacatgatcactgggacctcccaggctgattgtgctgtgcttatcattgactccaccactggtggttttgaggctggtatctccaaggatggccagacccgtgagcatgctctccttgctttcactcttggtgtgaaacagatgatctgctgctgtaacaagatggatgcca

SEQ ID NO: 756 - DNA, 363 bp, Triticum aestivum
  Clone ID: LIB103-018-Q1-E1-D1
cctatactgagtcgtattactgtgagactgagaacccgagaaccacaccggacacacctctcagccccagcgaccaaatccgccaccgcgccgccgccgccggaaggaaggaagagagccccgcagcgcgcgatgaacaccgacatcaccgcgtcggtgaagccggagtacccggtggtggaccggaaccccgccttcaccaaagtcgtccccaacttctccacgctcgactacctccgcctctccaccatctccgccgtctccgtcaccgtcggctacctctccgggattaacccgggattcgcggccgtcgatggtgacggggggcctcatcggcgtcttgggaggttcatgtacgcctac

SEQ ID NO: 757 - DNA, 358 bp, Triticum aestivum
  Clone ID: LIB103-018-Q1-E1-D10
attactacaccctatagtgagtcgtattaaaacgcatggactggtgggtatatagctgggacaagcattggcacattggcatcaaacaggattctcaaagaagagcaagcctgtttgcaactacaaggatcttaaggacatgtatgaaatcatgagaaggagggtagtgagtcaaggattcctagttcttactggctgacaaactttgttaaaacttctgagagtataaagttgggtcagctattttggaacggagtgagtagtcaagaatattgtagctaaaagtagcaggcaggagataaccaagtttcacattgacttaactggtatcgtcgtcttgtagcgataactttgctgt

SEQ ID NO: 758 - DNA, 404 bp, Triticum aestivum
  Clone ID: LIB103-018-Q1-E1-D12
tgggacaccctatagtgagtcgtattaagggttcatggagaagaacacaatagagttcatgagggagctgtggagcctccttctcagtgcgcagcagaatgctagtggtgtgccccagcaatttttggatgcaaaggaggctgagattcagcagagaaaggcggaagaggctagaattgcccaggaaatccagaagaagcgagagaatagatggaatggacacggaactagataaacgcaaaatgatggccggggatactggtaattcaagatttcatggtgattcacttggctctgcgttaaacaatcccagtgtctatgctgataaagaagaggagctggacttgaagcatagctcgagaacaaagagccgggaagatcgaacacctaggagcacatctttg

SEQ ID NO: 759 - DNA, 384 bp, Triticum aestivum
  Clone ID: LIB103-018-Q1-E1-D5
cgcgctggtcattgcgactccctatagtgagtcgtattatggggccttttccggagctctgccgaaggggcaacgatcacagagggcctctacatcaactccatggcctctccggtgatgtgtgagtagtttactttagaccttcgggtccatagttattagctagatggcttcttctctctctttgaatctcaatacaaagttctccttgatcttcttggagatctattcgatgtaactctttttgcggtgtgtttgtcgagatccgatgaattgtgggtttatgatcaagtctatctatgaacaatatttgattcttcgctgaaatcgtttatgcatgagtggttatctttgcaagtctctttgaattaccagtttggtttg

SEQ ID NO: 760 - DNA, 394 bp, Triticum aestivum
  Clone ID: LIB103-018-Q1-E1-D6
cattgctacaccctatagtgagtcgtattatcgccatgtgattaacacccaaagagtactaacgtgtgatcatgttttgcttgtgagagaagtttagtcaacgggtctgccatattcaggctcattcttgttgagagcaggatccaccgtcttgcccgttactacaagcgcaccaagaagctcccgcccacctggaagtacgagtctaccactgccagcactctggtggcttaggagggctcttcatctggtgtgctcttaccggcttcaggatggtcttgttctacatattatcaatttcatgtaacgcttttgagtttggagcgatttagatgaacacgagaccaaattttctaggtttacctggagaatctcataaaccatttttggtttt

SEQ ID NO: 761 - DNA, 428 bp, Triticum aestivum
  Clone ID: LIB103-018-Q1-E1-D9
ctcccgggtcgatggggatctcgagaatgaatcctactagtggaagaaacagaagaaggagaagctaaagaaacggagcaagtacaaaccgtcgaacaaggcatcctccaaaaccaaaaggaaaccccaccctaagaagaaagcaaaacattaatcaaggtagagctagggctcggcaaaggctgttgacgaagtgctatgctttcagtcatgagaaacacctgcctgtcacgggaaattttgtttaagttgagaattacacaaaaaaaaaaaaaaaaaaaaaaaaaaaaaaaaaaaaaaaaaaaaaaaaaaaaaaaaaaaattaaaaaaaaaaaaaaaaaaaaaaaaaaaaagcggccgcccaaaaggatccaaccttacttacgcttgaatgcaacttcataccccttcaaaagtgtcacctaaat

SEQ ID NO: 762 - DNA, 282 bp, Triticum aestivum
  Clone ID: LIB103-018-Q1-E1-E10
attacaacaccctatagtgagtcgtattaagtatccttgacgacattactgattgtaaactgcaaaactctgactggatatgcacaagctcctcttgagccattggcgtctgaaaggagtcggcacctgataagtctggagtctcttagcatggaggtctgccaaagttcactagagatgtacaacgtagcggcaactctcaagaatagtacgattgatgggtgaatgaagcctgaatccacatttgggaagatgcatggcatggcacagtgagtcggagtc

SEQ ID NO: 763 - DNA, 327 bp, Triticum aestivum
  Clone ID: LIB103-018-Q1-E1-E12
atagtgagtcgtattatgaaggctatgttgatttgtttcaactacatgcgtgaacatgtgccaagtcgagtcactcaattcattcaaaggaggataccatcccatcataggacatcataatcattctaatagcatgttggcacgcaaggtaaaccattataactcatagctaatcaagcatggcacaagcaactataatctctaaatgtcattgcaaatacgtttacttcataataagccgaatcagaaacgatgaactcatcatagttacaaaagcaagagacttcgagttcataccagcttttctcatcccaataagtccatcat

SEQ ID NO: 764 - DNA, 190 bp, Triticum aestivum
  Clone ID: LIB103-018-Q1-E1-E4
ttgctactccctaaagtgagtcgtattaaatgatggaggcttacgtgcgtaatgcatgcgacgccctagatgatctaaactgacgtatgcgttcaagctgacttcatatctcgttctagagtgtcacgaggggtgcaaatcatgggccgtccatttataacgtcgttactgggaaaagcctgtcgttacc

SEQ ID NO: 765 - DNA, 338 bp, Triticum aestivum
  Clone ID: LIB103-018-Q1-E1-E5
ccctaaaatgagtcgtattaagagcagccgtcttgtctgggagacatgtctcagtgagttcaagtcacttggcaaagtggccgtcaggctcatcttcctccatgcaaccgccaaggggttcaaatgcacgccgtcgatgacgcggtggctcaccgcgccggggagctcagccggcagcatcggccgggcgcaccggctggtgttcatcgcggcgaattcaaagctgcagaggagggatttctcaaacgacgaccacaaggacgtggagctgcttgacagaacgcgacgaagacatgctacacgagactggcaatgtggattccccaccctcctcagtg

SEQ ID NO: 766 - DNA, 414 bp, Triticum aestivum
  Clone ID: LIB103-018-Q1-E1-E9
caatactacaccctatagtgagtcgtattaattcggacacgatggtgaatggcaatcgcgggacagatggggaaaagccacgtcaacctgatgcaaaggagatgcgtggaacaaatccaacaaaacttcatcacaccaacaaatcacatgacacggattggggctatttttggcggggattttcggatttaggacgaacacaccacaatcaatctagaaaacacggggtacgggctccataaacgtgatcaccgtggctcaagataccaacatgatgtagggcggaaccctaggggccgatctttcacatttggaatggatcctacaggggaaacacgaataacgcgcgaaaaacacaaagggaaacacggcgagatacagtacgatcacttgactgaccaggaatcaatcaca

SEQ ID NO: 767 - DNA, 406 bp, Triticum aestivum
  Clone ID: LIB103-018-Q1-E1-F12
attactacaccctatagtgagtcgtattaatgatagttgatttgattgtgccgaaaaacagaaactttgcacgcatgaatttagttttgttaaatcacagaaacgtgattttgtgttgattctttttcttctgatcaatagacaaattgtccaggacttcctattttggtaggatttttagagttccagaagtttgcgttagttacagattgctacagactgttctgtttttgacagattctgtttttcgtgtgttgtttgcttattttgatgcatctatggatagtaaaatagtttataaaccatagagaagttggaatacagtaggtttaacaccaaaatacataaagaatgagttcattacagtaccttaggtggtggttttgttttctttcactaacggagc

SEQ ID NO: 768 - DNA, 202 bp, Triticum aestivum
  Clone ID: LIB103-018-Q1-E1-F6
aattcccgggtcgactttctctgtaaatatcaaactcctcatagacttatagacctgtgtacactcataaacgcattagtcccttaacctataagtcttcaatacaccaaaatcactaaggggcactagatgcacttaaaatctccccctttttggagattgatgacaatatgggtaatttttacaggggagataaacatat

SEQ ID NO: 769 - DNA, 277 bp, Triticum aestivum
  Clone ID: LIB103-018-Q1-E1-F9
attacaacaccctatagtgagtcgtattatgggctgatagatcgtgggagtcagaacaactgcctgattggaggcgatgatctcaagagtgggcagactaggataaattccgtctgggcggagatgcatgtgggcgctggatgcaagctcaggcgacttggcagcgctgataacctggggaagtacgatggggtgggtctgtaggcgcatcagctgtccagtggcgggggtatgtccagcagtgacgtcgcggaggacacggacgcaagcaccggag

SEQ ID NO: 770 - DNA, 369 bp, Triticum aestivum
  Clone ID: LIB103-018-Q1-E1-G1
acgacaccctaaagtgagtcgtattacatgttctaagcctaacaaatatgtatgacagtatggctcatgtccacataggaccgcctcttgagtatagactagccaatgctcacaaggattactccacaaaataccgttaccgatctatctgatccaggctaacctagtcctgctatctacctgactacctcttcgtgacagtcaccgagttacacttcactggacgtcgttttacattgtcattatcgtgacaaccttgttgttaccagactatccgcacttcaacacatcgtcatttctcaaactaggcattgctctataatggcagcaccgatcacccttctcaatagttcaccagcctgaattgcc

SEQ ID NO: 771 - DNA, 418 bp, Triticum aestivum
  Clone ID: LIB103-018-Q1-E1-G10
accctatagtgagtcgtattagatgattagtagataaattcctcacgtccagcaatttattttagaatttttggggttccagatcttgcgctagatacagattactacagactgttctgtttttgacagattctgtttttcgtgtgttgattgcttattttgatgaatctatggctagtaatagtatataaaccatagagaagttggaatacagtagttttaacaccaatataaataaataattagttcattacagtaccttgaagtggtcttttgttttctttcgctaacggagctcacaagattttctactttaagttttgtgttgtgaagttttcaagttttgggtaaagatttgatggattatggaacaacgagtggcaagagcctaaacttggggatttctcatgggaccccc

SEQ ID NO: 772 - DNA, 404 bp, Triticum aestivum
  Clone ID: LIB103-018-Q1-E1-G12
agtgagtcgtaatatctcatgcttcacttatattattttgagagtctcttagaacatcatggtatttgctatggttataaaattggtcctagaatgatgggcatccaagttgggtataataaaaactatcatagaaagtgaattggatgctatgaccaatttgatacttgataattgttttgagatatggggatggtgatattaaagtcatgctagatgggtgataaagaatttaaataatacttgtgttgaagtttgtgattcccgtagcatgcacgtatggtgaaccgctttgtgatgaagttggagcacaattttatttactgattgtcttccttatgagtgacggtcggggacgagcgatggtattttcctaccaatctatccccctaggagcatgcacg

SEQ ID NO: 773 - DNA, 352 bp, Triticum aestivum
  Clone ID: LIB103-018-Q1-E1-G3
actagtccctaaagtgagtcgtattaggcagggtgttactgaatttcgggagtcttgtccggactggatccggaaagggagcgtcgtcaatgtaaaaccacttcgaagtcgagttatctggtgccttcttgggagtaccggatatgtatccggtctcagcgatatgccatacttcggtctcgcccacttgacatatggattctcactggttgcaggggacaatgcagaatagcttcttccatagtccgaaatgagcctcgcagcctagaaatagctcgcaaatggcgacgtaccctgctatatgcagtaaggacgctggggtaaagttgtgcaactggaggtcgtagaactc

SEQ ID NO: 774 - DNA, 387 bp, Triticum aestivum
  Clone ID: LIB103-018-Q1-E1-G6
gcgcaggtcattactacaccctatagtgagtcgtattacgtcaaggtcatctactcccgcgccaagcagtacgccgaggagtatcatgcccaggacaaggagttggttcagcttaaccgtgaggcccggatgaagggtgggttctatgccagtcctgacgctacgctgctgtttgttgtcataatcataggtatcaatgccatgcagccatggaccaagaacatcttgcagctgttgcgtctgacacagatattcactggagtgttcccgaaggttaacaaggccaccatcaacatgctctgcagggtcgagccatatgttgcatatgggtacccgaacctgaaaagtctgagggagctgatgtacaagagaggttacggaaagctc

SEQ ID NO: 775 - DNA, 379 bp, Triticum aestivum
  Clone ID: LIB103-018-Q1-E1-G7
ttactacaccctaaagtgagtcgtattaatccccctaggagcatgcgcgcaatactttgctttgataacttctagatttttgcaataagtatatgatttctttaaaactaatgtacagtccatggattatacgcactctcacccttccacctttgctagcctctctaaatatcgcgcacctttcgccggtatcatacacctaccatatatcttcctcaaagcagcgagcataccaacctattacggcatttccatagccattctgagatatattgccatgcaactttccaccatctagttcatcatgacacattcatcattgtcatattgcgtagcatgatgatgtagttgagatagtatttgtggcaaagccactgct

SEQ ID NO: 776 - DNA, 438 bp, Triticum aestivum
  Clone ID: LIB103-018-Q1-E1-H11
ccgggtcgacgggcaaacgtacatgctacgggaatcacaaactttaacacaagtatttctcaaattcaaaactactcaactagcatgactctaatatcaccatcttcatatctcaaaacaattatcaagcatcatacttctcatagtattcaacacactcataagataatttttactaatcttggatgcctattataattaaagaaaattaccacactgttttgtaggactctcaaaataatataagtgaagcatgagagaacaatagtttctataaaacaaatccaccaccgtgctctaaaagatataagtgaagcactagagcaaaaactatatagctcaaaagatataagcgaagcacatagagtattctaataaattctgaatcatgcgtgtctctctcaaaaggtgtgtacaacaaggatgattgtggcaaac

SEQ ID NO: 777 - DNA, 231 bp, Triticum aestivum
  Clone ID: LIB103-018-Q1-E1-H3
gggtccacgggggtcccaaaattcagtcgtatgaatgatgatgatgacgacgacgatgatgatgaatcttgtatgcatattgcagattccatgtcttcatgcatgttgcttcacgcgcattggataatttcgcaggtctagaggatcgggatttacgtatgcgtacatgtaacgtcatatctctgctatatggtcacctagattcaattcactgtgcgtcactgaatacca

SEQ ID NO: 778 - DNA, 436 bp, Triticum aestivum
  Clone ID: LIB103-018-Q1-E1-H6
ctcccgggtcgacgggccacgctaacatcagtcgcggcaggacttcaattgatggattgaccacttcttcgacatgcacgaacactcgatacaggtacatccctaacgtggtccgcggcggccttggtggcgacaaatagtacaaccccggttcctggaccggtatctcaacaccaatcaccttcggtatggttgacggcttcttcatccatgccataaccgtcagagcccagctgtctggaggaacaaacatacttacgagctcacatccaaggtccttgataagctcattcatggactcgttgttccaagcatgtcgaggcatgctgtggaaggtaagctttgttaaaaactcaagctcagagggcaccgagccccatcctgggtgctcactagcgagccatcgtagaacaaacgccgggaagattcgaacaca

SEQ ID NO: 779 - DNA, 194 bp, Triticum aestivum
  Clone ID: LIB103-018-Q1-E1-H7
attacaacaccctatagtgagtcgtattatgacttcaattgatggatggacccgatcttcgacatgctcctacactcaaagcaagtacatccctagtgtgggccgcagatgacgtggaggtctggcttattacaggacttgttcctgtttcggtagtcgaatgcaaatcaccttcgttaagggatgacgggatc

SEQ ID NO: 780 - DNA, 405 bp, Triticum aestivum
  unsure at all n locations
  Clone ID: LIB103-018-Q1-E1-H8
taccggtcctaaattcacgggtcgacgggatccggatacttgtttattacgagatgaatattcatttaaattcgagaataatggttgttctatttatacgagtaacatattttatggtcatggacccaatgtcaatgggttaccattgtgtgtgtgctgttgtctaggagcacctgtgaagagccatgtaggcagggaaggaagaggtggtcatcgtgtggcttcacacgtctggcatgagcgccttacgtacacacgtgaggaggatcgtgacagagggcctgcagtggtgggctctgccagctttgtgtggtctgcacatgttngtggccatgtaagtgacccatgtaagcgttctctctctcttttctaaactcgctcagttttctaatttctgtaattgtg

SEQ ID NO: 781 - DNA, 436 bp, Triticum aestivum
  Clone ID: LIB103-018-Q1-E1-H9
cccgggtcgacgggtcactccaaaacatgaagttcttaattttaagcaaagggagggagaaaatttaaaagatgcttggcatagaatttgcaatgctcaaaatagatctactaggaagctttctacttctgttcttctccgcagtttttatgtaggcatcactccttggaatagatgtgttcttgatactgttgccggaggtgatttcttgagtagccatgcgtttgatgcttataatgctatgttagatttgtttggcccaccacctcttttggttaatggaacggttttaactttagaacatgtgatgcaacggcttgatattattgaaaataaaatggccactattgagttgattgacaatttggataaaaagattcataatcacattacccaatatggatctagggttggagttactttgaaaaatcttaaa

SEQ ID NO: 782 - DNA, 449 bp, Triticum aestivum
  unsure at all n locations
  Clone ID: LIB103-019-Q1-E1-A10
taccggtcaagaattcncgagtcgacgggcacaaccacacccgggccgaaaaccgcatacggccttcaccggaacaacttggtgacttcacccgataaaaaggcgcggaaaacccctaagccttaacggacaaggtaatggaccacaatttccaaaaagggttaaaaaccgtgacaattgaatcatacaatggaacgacagatcccacaatatggatcaaaaattcccttctccacatcaacatggctcagggcgatgatctccatgcaatcaagtacctccccctaaaactcaagggaccagcacggcactggttaaacagcctcccagaaaactctattggtagttgggaagatttgggagatgcctttggagacaacttccaaggtacctatgttcggcctccagacgccgatgaccttagtcacatagtccaaaaacccgaagag

SEQ ID NO: 783 - DNA, 314 bp, Triticum aestivum
  Clone ID: LIB103-019-Q1-E1-A2
attcacgggtcgacggcgttaggaagaagtggggtggtggtgtcatgggctccaagtcgcaagcgaagaccaaggccagggaaaggcttatcgcaaaggaggctgcgcagcggatgaactaagtttagcattgttgaaccatatctattcctcatccttgagtagtgtgcaagcatactgtggcagtttggctccagttttgaaagtcatttttgtttgtctgaaacatcttggaaagaacagtgtaagaatgaagtatttctgtttaatgccagttagtattttaaaaaaaaaaaaaaaaaaataaaaaataa

SEQ ID NO: 784 - DNA, 436 bp, Triticum aestivum
  unsure at all n locations
  Clone ID: LIB103-019-Q1-E1-A4
ggtcaagaattcacgggtcgacgggagttccagagagaggtgcgcgccatcaggcggacgagccaccgcaacctggtccgcctcctcggcttctgtcacganggcgcgcaccgcctcctggtgtacgagttcatgagcaacggctcggtggccgacctgctcttcaggggtgcctcaacgccttcgtggtccgactgccttggcatcgcactcgacgtggcccggggccggcactacctccacgacgagcttagcagccgcgtgacccactgtgacgtcaagccgcagaacatcctcatagacgcagccggcacggccaagatcgccgacttcaggcttgccaaactgctccaacctaatcagacacgcacttttcacggtgtccgccgcacgcgtgggtacctgggccccgagtggtacaggggcacgggccctg

SEQ ID NO: 785 - DNA, 420 bp, Triticum aestivum
  Clone ID: LIB103-019-Q1-E1-A6
aacggtctagaattcccgggccgacgggccgcaaagtggagctcctctcgccgttaccgccgccgccggaggagaagaaggaagaggaaaagaaggaggaaccagagccgccgaaacctgaagagaataaggagccaacggtgatctccgtggtgctgaaggtgcacatgcactgcgaggcctgcgcccaggcgataaagaagaggatcgaaaagatgaaaggagtgcaatctgcagacccagacctgaaggcgtcggaagtgacggtgaagggcgtgtttgaggaggtcaagctggccgagtacgtgcacaagcgcaccggcaggcatgcggccattatcaagtccgagccggtcgccccggccgagaaagccggcgaaggcgacgccaaggatgagaagaaggcagccgaaggcggcg

SEQ ID NO: 786 - DNA, 418 bp, Triticum aestivum
  Clone ID: LIB103-019-Q1-E1-A8
taccggtcaggaattcccgggccgacgggggagagacggaggcgggcggcttttataggagggcaagaggggttcgggggtaaaaagcacagagccgtgcctggcccgtttaacccaggccgtgccgtgccgtgccgggccgggccggcccatttgaccaggtttgattgtgtatccgcctcgcattttctgatttttaccaatttattaatagtagcaaaaatgcccgtgcgtggaagtattggacatatagtttattgcatggttacttatatttgtatcatgatatttatttatttaactaacacatcatgtttttcaatttgtcttcaaatcacccgtgagatttacatatgtatccactaatgcatcatgtgtttcatcagtttatcttgtctgcatgacaccctcattcaac

SEQ ID NO: 787 - DNA, 387 bp, Triticum aestivum
  Clone ID: LIB103-019-Q1-E1-A9
gtgaagaaaacgcatcttgtcaaggctgctccgggcggaaaagtcggaacctgcggttcaaaaacggaccttaaccgtgttgcgggggtgtcataaggagcctatccatctcaactagaattatcccaagtttcacttcacatcgtgatgttgttttacctttttcctgtcattgtcctgctataacggatagcgctccctgttggcgccgccgccggcggggatgccctagtggtggagggtgtaagtcctcttccgcggggtgcccctgcttgtacctagatggttactctttccgtccattgtcaccggctaacattgtgataatatcaatctgggtaatgttagattaagctgttgtcctacaaaaaaaaaaaaaaaggggcc

SEQ ID NO: 788 - DNA, 438 bp, Triticum aestivum
  unsure at all n locations
  Clone ID: LIB103-019-Q1-E1-B10
gtaccggtctagaattcncgagtcgacgggtaacatgacccatccagttggaaccatacccaagggatacctgatcaaaaattgaatctctttcggtaaaagtaatctattaggcaccggaaaccctgttgttggtttgcccgtcaacaagcactgtggaaggctcgaaggcaaaggtcacaccaatggtcatagggatgtgaatgtgttacgctcgggccaacaaaacgaccttgatanggcaaacttagtagtgctacaacacctagatgtgctagaagatttcatgacactgcacaaagagaccatcgcaaagaagtaccgtgaccgtggggtgcacaggacggacgcttaagttattagagagcacaactccactttcttgttttggttcaaagagcgagttctggctaatcccccggaagaaggttgtccaaa

SEQ ID NO: 789 - DNA, 435 bp, Triticum aestivum
  Clone ID: LIB103-019-Q1-E1-B2
ggtctagaattcacgggtcgacggcgaatactctatgtgcttcacttatatcttttgagctatatagtttttgctctagtgcttcacttatatcttttagagcacggtggtggttttgttttatagaaactatttttctctcataattcacttatatcattttgagagtcccacaaaacaacatggtaattttcttaagttgtgaaattagtcctaatatgataggcatccaagattagtaaaaactttcttataagagcgtttgaatactaagagaagtttgatgcttgatgattgttttgagatatgaagatggtgatattagagaaatgctagttgagtagttgtgaatttgagaaatacttgttctaaagtttgtgattcccgtagcatgcacgtatggtgaaccgttatgtgatgaagtcggagcatgat

SEQ ID NO: 790 - DNA, 424 bp, Triticum aestivum
  Clone ID: LIB103-019-Q1-E1-B6
ggtcaggaattcccgggccgacggggaggagtacgagtaccaggccgaggttagccgcctgatggatttgattgttcacagcctctacagccacaaggaagtgttccttcgggagcttgtgagtaatgcgagtgatgccttggataagctgagatttctcagtgtaactgatccatccgtgctggctgatggtggtgacatggaaataaggattaaacctgaccctgatgctggcacaataactatcactgatagtggcattgggatgacaaaggatgagctcaaggactgccttggaactatcgcacaaagtggtacctccaaatttttgaaggctctgaaggagaacaaggagcttggtgcagataatggacttattggtcaatttggtgttggattttattcggcttttcttgttgcagag

SEQ ID NO: 791 - DNA, 363 bp, Triticum aestivum
  Clone ID: LIB103-019-Q1-E1-B7
ggtctagaattcccgggccgacgggagattcaacatatattttctaaaagacatgtcacttggtcgaggccttgatcatggtgatatgtgtttattcgtccggtggctcagtagaacgataacctctgtgcacagtgatgtttcagtttctacattgatggtttcaagcataagaaggtttcaaaattaaatgagccttgtacaggactgataacaaattatgctttctgagtttcaagctactgaaagtaattgaagctttgccttcgctatgtaagaatggttgcatgtgttaattagtggtgcacattttttgagactgtccaaaattctattataaaatgcttatatgaaattgatggg

SEQ ID NO: 792 - DNA, 440 bp, Triticum aestivum
  Clone ID: LIB103-019-Q1-E1-B8
taacggtctagaattcccgggccgacgggagattaaaatgatggaaaatagacccgggggccataggtttcactagtggcttctctcaagagcataagtattacggcgggtaaacgaattactgtcgagcaattgatagaattgagcatagttatgagaatatctaggtatgatcatgtatataggcatcacgtccgtgacaagtagaccgactcctgcctgcatctactactattactgcacacatcgaccgctatccagcatgcatctagagtattaagttcataagaacggagtaacgctttaagcaagatgacatgatgtagagggataaactcatgcaatatgatataaaccccatctttttatcctcgatggcaacaatacaatacgtgtcgtttcccctgctgtcactgggatcgagcaccacaagattgaac

SEQ ID NO: 793 - DNA, 440 bp, Triticum aestivum
  unsure at all n locations
  Clone ID: LIB103-019-Q1-E1-C10
taccggtcaagaattcncgagtcgacgggggagacatggatcccttcctccggccaattaccaccaccaaaccatttttaaccagaatgaccaaaacacctggaaccaggggtcaaatgcccctccggcaaaaacttgcacatgaggacaaccttaattcacttcttcaagttgataaaatggtccaatctaatggcgcagcacacagctcacatatgaaggaagagcctcgaagctaatgcgtggcatgcaccgaaattgttaaggccagatagatggcttcagctattttccttcggttccatagcggtgctgctaggaatccctacatgatgttatactgatggagcgccatgaacagttgccgtacatccttgagatcatttcttacccttccagctgaagctcgggaaagcgtgtttggaaggaacagattctgc

SEQ ID NO: 794 - DNA, 411 bp, Triticum aestivum
  Clone ID: LIB103-019-Q1-E1-C2
attcacgggtcgacggctatagcagttgatataacagccaattgcaaagataattcaataagtgtcaacttaatcaaatcaagtccacgatataaagaaagagggataacactaacaacgggtccaagattacataaagcaattttaacaaaatttcctttaatggagcaagggaaaatgggtaatcctcgaaaaccaagtttccttgggaatccaaccctaaaagttaaatagcagcatggggaaaccaactcgggaacttctttaatatacaataccttcaaaaactaggcataaggatttattttgagcatatcaagttaaccgcatacgcaaaaagataggtcaaatcatttaagcaaagcgctcaaaatcctcatcatcctttttcttggatggtttgggggggaa

SEQ ID NO: 795 - DNA, 421 bp, Triticum aestivum
  Clone ID: LIB103-019-Q1-E1-C3
attcacgggtcgacgggatttcagaagggtggaatacacaaaaccccgatggataattcatgtccaatcaagaatttccatgcaagagacaaagagttcacctatcgcccaggcgttacctattatgcttgtggagaagaagggcactatgccaagcagtgccccaagccaaggaactcaaccccgaagcccaataatggtggaaataattcagcgccaaagcgaagcaatttcaaccccaataacaaccatcggaaaggtcacctgaaccatgtgacccatgaggaagcacagaacgccctagatatcgtgctcggtacgtaccccgtcaacacaatacctgccatggttttgtttgattctggagcttctcactcattcatttcgaagagttttgctttgcaaaataatttttcgatgc

SEQ ID NO: 796 - DNA, 55 bp, Triticum aestivum
  Clone ID: LIB103-019-Q1-E1-C4
tacgtaagcttggaaccgctaaagcggccgctcgacaggatccaagcttacgtac

SEQ ID NO: 797 - DNA, 428 bp, Triticum aestivum
  Clone ID: LIB103-019-Q1-E1-C5
tacggtcaggaattcccgggtcgacgggcacctctggaaaggaaccctttggccatggagcatcagcaattttacttattagagcacctccgcacgctgcgtactgcccctcgaccatcttcggcttcacatcgaaggtcttgagccacaggccgaagtgaggggtaatgcggaggaaggcctcacaaacgacaataaatgacgagatgtgaagaagggaatccggggccagatcgtgaaaatccagcctgtaatagaacataagacccctaacaaagggatccagagcgaggcctagtcctcggaggaagtgggagacgaacacaatgctctcgttgggttcaggagtagggacgacctcccctcgggcgggcagcctatgcgaaatttcggcggtcagatatctggcctccctcaacttcttgatg

SEQ ID NO: 798 - DNA, 439 bp, Triticum aestivum
  Clone ID: LIB103-019-Q1-E1-C6
cggtctagaattcccgggccgacgccgcttttaccaagctaccgcttcttctccgagcagccacctcgccggagccgtcgcttgcttcccggtgatgccgcctcctcgccctgccactgaagtgcgagggcgccaccggattcaatggggtgtgccgacggccgtcagacaactacggcgtcgagtttgaacacaccggtattggctcgacacatactcgtcagcctacctcatgacatcgctgtgtggaggctcagcctcccccgcccgaaactcaattccctgcaaattgagtctggtgaatgcggagctcgtcagcccgccggtgacaattgaatctagcccaatttgggcagctcctcacattgttgtcgatgagtgggaaaacattcgagagagcgataaggatgccatggcagcgttcactaaggcacatcgg

SEQ ID NO: 799 - DNA, 448 bp, Triticum aestivum
  Clone ID: LIB103-019-Q1-E1-C8
gcaggtaacggtcaggaattcccgggccgacggggaagacaccgcgggcaagaagcccaaggccgagaagcggctgccggcgggcaagacggcgtccaaggaggccggcggcgagggcaagacccggggccgcaagaagggcagcaaggcgaagaagggcgtggagacgtacaagatctacatcttcaaggtgctgaagcaggtgcaccctgacatcggcatctcctccaaggccatgtccatcatgaactccttcatcaacgacatcttcgagaagctcgccggggagtccgccaagctggcccgctacaacaagaagcccaccatcacctcccgggagatccagacctccgtccgcctcgtcctccccggggagctcgccaagcacgccgtctccgagggcaccaaggccgtcaccaagttcacctcctcctagactgacgatgcg

SEQ ID NO: 800 - DNA, 440 bp, Triticum aestivum
  Clone ID: LIB103-019-Q1-E1-C9
accgggcaagaattcccggatcgacgacgacgcgcatacggtgacttcgtaaatctcaagatgatatgtcggctcattctctcaaaggtgcccataggggtagggtgtgcgtgtgtgcgttcatagggatgattgtatgcgcgtgtatataagcgcttgtgtctgtattgatgctcaaaaaaaaaaagttaaccatcatgatttacattgcaatttcttttaaagttatgctaaagtgctcccacctgtcgaactaatgtaggagcaatcgtgaaatagatactactctctccatttccaaatatgtgtctttctagagatttcaacaaatgactacatacgaagcaaaatgagtgaatttacactctatatacatccgtatgttgaaatccatttaaaatataaaagacaaatatttaggaataaagggaattccaaaa

SEQ ID NO: 801 - DNA, 407 bp, Triticum aestivum
  Clone ID: LIB103-019-Q1-E1-D1
attcacgggtcgacgggataataatggtgcggatggtgttgttcccgagagtggtcctgtcgaagatgaggagcatattgcttctctgaggcctaaaagatcaaagagactagtgaggagcacgggtgaggataaggaacccgttgctgcttgtgatgttgagaaacctgcagatgcagctgaaaacaatgacaacaatgatgcagaagagttgcaatcccagactccttcagcctagttgacctactgggttgacctgatgaaaacataagatgcgaatggcaagactctaatttgtggtgttgagtaggagcatcaaagatggcacccattggaggagctctggatctgcttaaggtgttacgcagttcaataagtattttaactgtgctgtgcagcttcttttc

SEQ ID NO: 802 - DNA, 439 bp, Triticum aestivum
  Clone ID: LIB103-019-Q1-E1-D12
gtacggtctagaattcccgggccgacggggcacataaatctgttcaagcacagaagtaatcttctttagtcatgaaaagaattgttattaggagggaacacaacagatgaaatagagctagtggcagatgcttgcatacatcagatccaatgcttttactacataaaacaatcccttgaattaatagtggcaaaatgcaatggataaaaacaatgggtaagccctttctcttttgttagtattggttctactcctccttgctactttgaagtactgataattctcctccttgggcatgtcatttcccagagggttaaaatgggcactcttaatttctctttcggaggaagcggagaagctgtagatgacgctaaggcacagaggaagagcaagaactgcaacacctgtggatgttgtcaacgtttctcattgtaattga

SEQ ID NO: 803 - DNA, 419 bp, Triticum aestivum
  unsure at all n locations
  Clone ID: LIB103-019-Q1-E1-D3
attcacgggtcgacggctacggcaccaggggctcacagcccatggaggagagcatccttggagcagatggcgccgtggtggagggcaggtaccaccacaacctggacctcttcacgatgtccaaggacgtcgccgccacaaagatgccgtgcgcgtgacacggcctaacccgaccaacccctgggggaagaaagacaccactgccacggttcactgtcagccttcagccgcggtgctcttgggcacattctccggtggtgcttangagtctgcaccggttactgtacccatatgagcttatgttggtggttgtgactgttagaggatctcatgcttggctatatataggaatcctggtttgtcgaaactcgaataatgaaaagttgaaattgcattctgaatttgcgcaagaatataat

SEQ ID NO: 804 - DNA, 428 bp, Triticum aestivum
  Clone ID: LIB103-019-Q1-E1-D4
ggtcaagaattcacgggtcgacggcgagggcagatgaaaatgtgctgaagcttgtggcaaaacacaagagggagaaaaaggctgctctagatgagattatcaagttagagcagaaactggatgccaaacagaagcttgagctagaaataaaacagttgcagggaaaattggaagtgatgaagcatatgccaggtgaagaagactctgaatcaaagaggaaaatagatgaacttagtgccgagctccaggacaagtatgatgaaatggatgcagtggaagcactccaccacactctgcttatgaaggaaaggataagcaacgatgagttgcaagatgctcggaagaagctaatagatggtctgcgggatgttacaactgcccgagcaactataggcgttaaaagaatgggtgaccttgatctgaaatcg

SEQ ID NO: 805 - DNA, 305 bp, Triticum aestivum
  Clone ID: LIB103-019-Q1-E1-D5
acgccgccaggtaacggtcaggaattcccgggtcgacgggaactggtgtttccagtgtctaacgggtgactaacacgtacaagtctgcccttggaaggggaacatcaactggaaccagttgcggataccccgtatgctggggatgttcaaaacatgaccaatagctttgatgtccggactctctagacgatccaagcatatctacccatgcattccagctcatcgatcctctataatggcaccaaaattcttatcagtggtcgtagtatcaaaaggtcattctgggtcatggcctcgagttaccc

SEQ ID NO: 806 - DNA, 437 bp, Triticum aestivum
  Clone ID: LIB103-019-Q1-E1-D6
gtaccggtcaggaattcccgggccgacgggagtgttaccacgatgccgaaaactttatgtgatattctaggtttccatgatcttgatgattgctctttaaatttgcaccttgcggattccatcattaaaaagccaatgggaaggatcaattatgttctcattgttgcaaatagaaatttggtgcccgtagattttatcgttcttgatatagattgcaatctttcttgccctattattcttggtagacctttccttagaatgataagtgcgattattgatatgaaggaagggaatattagattccaatttccattaaggaaatgcatggagaactttccaagaaagaaaattaaattgccttattaatctatcatgcaagctacttatgaattgggtgccaaagatggcactacttagatctatccttgcttttatgc

SEQ ID NO: 807 - DNA, 356 bp, Triticum aestivum
  Clone ID: LIB103-019-Q1-E1-D7
tacggtcaggaattcccgggtcgacgggaggttgcatcggtgaaaatttccagtttttcctagattagatttattttcttacctattgtccaagaaaaagccacaaaacaaaagttagatttaatcaacctttggcctaaccagactgaacctttggaattttcctttcaatggttggaataatgaattaacggttgcatcaacgtgtccaattgctgggcctaatgtccaattcctttaaagtttcgagttctgttcacaataatcacgcaaccgctggatcaatatcccaaccgctgtgtaacatcccatacaacaatttccaccaagtgctaagcactgtttaatgtcacaat

SEQ ID NO: 808 - DNA, 443 bp, Triticum aestivum
  Clone ID: LIB103-019-Q1-E1-D8
gtaccggtcaggaattcccgggccgacggggtcataattcagggcccaatgcatggtagtagctgtatcttaaatcacacatacagatctcagtgcttaagatcggcttcaatgaaacaacccaccatgtactcctacatggcctctcatcgatacctttaccaaaccgtgttcaccacactactctcattaccgacataatcatttcactctagccatcacccagatgaaccagacctgacacgactctaagcatagcaggcatagcaaggtaggaacaacacatacatatggctcaatcaactcctacacatgctagtgggtttcatctagttactgtggcaatgacaggtcatgcagaggaaatgggttcaactaccgtagcacacagcagtttgaaacgcgttgtcttaatgcagtaaaagagagcaggagcgagaaca

SEQ ID NO: 809 - DNA, 421 bp, Triticum aestivum
  Clone ID: LIB103-019-Q1-E1-E1
attcacgggtcgacgggtcctcatccggggaggtggacgagggacatcgagctgttgcggtggacggcgtcgtcggggaagaggctccggttgggcagcgtgacgtggcggacggaggagggtggggttttgcggctggagcggagaggttatggcggcctgggatttcgaatggcaaaaagggggcgatgggagggggtgaagcatgacttagggacgcgcttgtccaaaatgtagggtgtgttacaaaagtaccccccaccaatttgaactagcagcccttttggctcagggtcagaagggggatttcgcgtgtcgggatttggcagctggagggagttttcgtgcgcgttgtaatttcgggatagcaaggcacgggttgtgaaggcgccagttttgggagcacgatatctgaattttc

SEQ ID NO: 810 - DNA, 427 bp, Triticum aestivum
  Clone ID: LIB103-019-Q1-E1-E10
attcccgagtcgactcggtaactgatttataggatgaaggtctgacgagaactgtttgggggccgattgatacgaatagaattttggaggttcctatggcaccatcaagaattgaagattttgttgcatggaaccacactaagagcgggatgtttagtgttcgctcagcttatcatgcggaatggagctatcgatttggtaggcacgaaagaaacttacttggcgtcgaggggtcacatatcatcccgggtgtggaagaagcggtggagcttatttgggtggtgagcactatatggaatattgccgaggggtgtcggtgtaccaaacattatttgtaccgaaattaatcttaactgttgcatggtacatttggtgggagagacggcaaacggcaaaccgttcacaatggaccagtatagacgcctca

SEQ ID NO: 811 - DNA, 407 bp, Triticum aestivum
  unsure at all n locations
  Clone ID: LIB103-019-Q1-E1-E11
taccggtcaagaattcncnagtcgacgggtatgtgcatcacttatatcttttgagctatatagtttttgcccaataactcaattaaaacctttaaaaaaacggggggggtttaatttaaaaaaattaattgaaacccaggctcaactaaaataatttgggaatcccttaaaaacacaatggaaatttgctttagggcataataaaaacttcatataagtgaattggatactatgagaagtttgatacttgataattgctttgagaagagatggtgatattagagtcatgctagttgagtagttgtgaatttgagaaatacttgtcttgaagtttgtgattcccgtagcatgcacgtatggtgaaccgttatgtgatgaagtccgagcatattatatttattgattgt

SEQ ID NO: 812 - DNA, 443 bp, Triticum aestivum
  Clone ID: LIB103-019-Q1-E1-E12
accggtctagaattcccgagtcgacgggtgccctcattgaagattgaggtgttgtgcatgctggggtgcagagaagcacaagtgagagtggtcgccatataaccttggatggggatgaattatgtgctcaggggaggtggtgtgtgttgtgtgtgtgtgtcagatattgagagaaaacaaacctaaggagagaaatgtgtgtgtatgtgacggaaagctacatgctaaacagggtattcacgaagagattgtgcgtgcgagatagagagcgatgtgcgggccttgaggtgggcaggggccaggtgagggtgtcaaaatgtgcatgttgatgcatgtgttacatgcgatcgtgcgagggacagacaaatcgagagagatggttgttgtgttacggatgctcctctctctctcacacacacacacacaagtaaaatagaagaccg

SEQ ID NO: 813 - DNA, 432 bp, Triticum aestivum
  Clone ID: LIB103-019-Q1-E1-E2
tcaagaattcacgggtcgacgggcgtgctccggcgtggtcaataacctctcggagttggtttagcgattgctaaggcgcgacgtcctcgcacgttcgtagtcggatcgtgaaagtctactctttcgaaacgataatcgccatctcatcgaaagacgggacacctttgcctctatcaagtggtatcagatttccaggttgcttggtgagattttacaacttttcgtagtttagatcgagtctgttcttcatacctatagtccacgaaaaagccaaaaaattagggttagttcatcctatccgaaccaatctgagcctttgcataatcttttctgtatttgctttgttgaatttgcggttgcatcgtcgtgtcaagttgctggtcttagcgtctagtcctttagagtttcgagttctgttcacaggttgtcacg

SEQ ID NO: 814 - DNA, 430 bp, Triticum aestivum
  Clone ID: LIB103-019-Q1-E1-E4
aattcagcggtcgacggcaactagtatgcatcacaccctgatgatctcttatgtatatcttatcatgttacttctgtaatcaaacatctaagatgcgctgttgagcgcattatcagctaataaagggcatctgccatcattgtataaaaaaaaaaaaaaaaaaaaaaaaaaaaaaacaaaaaaaaaaaaaaaaaaaaaaaaaaaaaaaaaaaaaaaaaaaaaaaaaaaaaaaaaaaaaaaaaaaaaaaaaaaaaaaaaaaaaaaaaaaaaaaaaaaaaaaaaaaaaaaaaaaaaaaaaaaaaaaaaaaaaaaaggggccccccaaaagttttaaactttaatttccggtaaaagaaaattaaaaccccttcaaaagggcccccaaatttaatttaaaggggccttttttaaaaaccttttagggggaaaa

SEQ ID NO: 815 - DNA, 416 bp, Triticum aestivum
  Clone ID: LIB103-019-Q1-E1-E5
ggtaacggtctagaattcccgggtcgaccccttctacatgcgtgccaagatcttgggcagcgctggggaccgtcaagtcgcgagttcttacctcgaaggcgtcattctggcaaaccaagataaggataacttcctcgtgccttactttcccgagtaagtcctcccctcaaccagcccgtaacatatgaattcttacatttcgatcgtttttttaacattccgtgttttctgcagtgacacacgttgcacgctcatcctcctaagccccaaatattctatggccacgtattttgacccggaccgtcggtcgaacgtagactacgcaaatgtcaagaaggttcttgatgatgttctccccggctacgcccaatctggaggcaccttcaccaggcctattcgtaagtacgacaagcacg

SEQ ID NO: 816 - DNA, 453 bp, Triticum aestivum
  Clone ID: LIB103-019-Q1-E1-E6
cgcggccaggtaacggtcaggaattcccgggccgacgggacctacaagatctacatcttcaaggtgctcaagcaggtgcacccggacatcggcatctcctccaaggccatgtccatcatgaactccttcatcaacgacatcttcgagaagctcgccggcgaggcggccaagctggccaggtacaacaagaagcccaccatcacgtccagggaaatccagacctccgtccgcctcgtcctccccggcgagctcgccaagcacgccgtctccgagggcaccaaggccgtcaccaagttcaccagcaactagggttccgtcgcggtgtctctagggttccgtccccgtgttctcttctagtagcttttgtgtcgccgtcggtcgtgcccatgtgtatcgttataggtaggtagcgcgcctgctttgtaaatcgtgtcaggttgtgatggacggctt

SEQ ID NO: 817 - DNA, 381 bp, Triticum aestivum
  Clone ID: LIB103-019-Q1-E1-E7
gtaccggtctagaattcccgggccgacgggatgcgacaacggacagatccagctcgatggaggacgggagcctgagcaagcgcgagaaccaacggtaccgatgatgatgggaatggcacaacgacgacgatgctgccgaaccgccgggacatgatctgagtctgtgcggatcggactgccccttgctagataatgtacgtacgtacgggtaccattaaccaagcatgtcgtgattgcattattttttggcccctgattggatctcatagtacttatgatatacttataaccaactcaacccccctcctccttgctcttgattgtattatatgtgcgagcatcgttctatgacagttctttgatatactcacttgttgaacc

SEQ ID NO: 818 - DNA, 442 bp, Triticum aestivum
  Clone ID: LIB103-019-Q1-E1-E8
gtaccggtcaggaattcccgggccgacggggtccgtagagatcttcttctcccgcaacaacgcattgttcgccacccggcggatgaagctgctgcagcgcgtggcctacttcaacgtgggcatgtacccgttcacctccatgttcctcatcgtctactgcgtgctccccgccgtctccctcttcaccggcaagttcatcgtgcagcacctgagcgccacgttcctcgtcttcctgctcatcatcaccatcacgctgtgcctgctggcgctgctggagatcaagtggtccgggatcacgctgcacgagtggtggcgcaacgagcagttctgggtgatcgggggcaccagcgcgcacccggcggcagtgctgcagggcctcctcaaggtgatcgccggcgtggacatctccttcacgctcacgtctaagcccggcggcgcggac

SEQ ID NO: 819 - DNA, 427 bp, Triticum aestivum
  unsure at all n locations
  Clone ID: LIB103-019-Q1-E1-E9
tacggtcaacaattcncggatcgacgggctccgccatctgttccaaaatgtagtgcgtatagccttactgaaaattcaaacctaactaactttaactaattttccttaaacaaaattgcaaatataaattacccaatatatatatcatttcattcatcttcgagaggcaactataaatatggggaaagagtgtacaaagaaagaccgtcgtatgacctgcaacaatttcaaccatcctttggtgtggaggaatatcataggaactctacatgatatgatttttataggatttttttttctttagagcgaattggttcgtaggaatagattcatatactccatatttcaaaggaaaataaacatgatacatttttatagctttagagcccattagaaaataaacatgaatggattcccatactcccac

SEQ ID NO: 820 - DNA, 375 bp, Triticum aestivum
  Clone ID: LIB103-019-Q1-E1-F1
attcacgggtcgacggcgttgaatgaatccattgtgagaagagcccttgtgatcatgcaccagagggacgaagtggagtacaagagggagcgccatgtgattgtccgcaaggcttgagctgaaccgaaatgatggaactaccatggaaaccctctggccatctgatgtgtgtgtataagtagtgctgacactgcagcctgtttcctgaggaaatttgttgcgtcgttgaaattgagttgtagttgtactactttaagctgtagctgtagccctaaattatcttgtgtcgaactgaagatgtaccacagtaagttcattcatgattgcaacatttgggcgttctgcagctgagcagagttaatgcctaagaaaccg

SEQ ID NO: 821 - DNA, 430 bp, Triticum aestivum
  unsure at all n locations
  Clone ID: LIB103-019-Q1-E1-F10
attcncgagtcgacgggcctgacaatgctgcattcaaaatgcttgcccagatccactagccaatcgtcagcgtcggtagcctcaacacaaccgctgaacgtctttgggccattagcaaggaactggttcagagtagcaaagtggtgctgattgttgccttgattcccttgactgccttgattgcgctcttgaaggatttgcatgatcaactgtgtgtttgcattagtagcggccatcacagcttgccatgcttccggaggaggcggaggtggaggcggattaggattcggagtcgtgcgcgttggaggagccatcctgaacaggttgaccaccattagcacatagatagacaacaatatagaagctgaatccaacggaatgaaaattgcaacatatagtcttcacatccgaacaagatgaacgaatgcat

SEQ ID NO: 822 - DNA, 411 bp, Triticum aestivum
  unsure at all n locations
  Clone ID: LIB103-019-Q1-E1-F11
taccggtcaaaaattcncggatcgacggggacgttgagaagctgattggcaggatattgaattggctgaaccccggtggccaaatttccaccaggaaaccttgcttcaacaattctgggaattccaaaaggaaattgaacccaacgcactaccggaagccaaggttctacaccaaggtgtttaaggaatgccactcctatgaccaagaggggaattcctttgagctttctctggtaacttccaagtgcattggagcttatgtgaaaagcaagaagaaccagaaccagatatgttggctgtgggagaaggtcaagtgcacagaagacaaaggctttcagagattcctggacaatgtgcagtacaaatccactggaatcttgcgttatgagcgcgtgtttggggaaggttatg

SEQ ID NO: 823 - DNA, 429 bp, Triticum aestivum
  Clone ID: LIB103-019-Q1-E1-F12
attcccggagcgacggggacgaaaagtgggctaaggaaactcgcaaggaaggttccaaccgatcgtctacttaagttcgagagagttttcaaagcacaaaaacgtatccctatgtctgttttcaaagcacaaagagttcttgacgagattcgctggcgttactacgaggaaactgttatgatactgaacctcatgccctatcgagcatcttatcccatcttaaagttggtttattcggcagccgcaaatgctactcattatagggatttcgacaaagcgaatttatttattactaaagccgaagtcagtaggagtactattatgaagaaattcagacctcgagctcgaggacgtagtttccccataaaaaaaagcatgtgtcatataacaattgtactaaatatagtaaagaaatcttaagatttcgat

SEQ ID NO: 824 - DNA, 434 bp, Triticum aestivum
  Clone ID: LIB103-019-Q1-E1-F2
attcacgggtcgacggctaccaatctatccacctaggagcatgcgcataataccttgcttgatttttgcaataagtatatgtgttctttatgactaatgttgagtccatggattatacgcactctcacccttccacctttgctagcctctctaataccgcgcagctttcgccggtatcatacacccaccatataccttccccaaaacagccaccatacctacctattatggcatttccatagccattctgagatatattgccatgcaactttccaccgttccatttattatgacacactccatcattgtcatattgcttagcatgatcatgtagttgacatcgtatttgtggcaaagccaccactcataattctttcatacatgccactcatgagtcattgcttatcccggtacaccgccggaggcactcatat

SEQ ID NO: 825 - DNA, 415 bp, Triticum aestivum
  unsure at all n locations
  Clone ID: LIB103-019-Q1-E1-F3
tcaagaattcacgggtcgacggggcctcaaatgtgcagtggtcggtgtcccaaagaccatcgataatgatattgcggtgattgatanatcctttggatttgacactgctgtggaggaggctcagagagctatcaacgctgctcatgttaaacctgaaagtgcaaaaaatggcattgggttgtgaagcaaaggggccgcaacagtgggttcatcgcaatgtatgctactctagctagtcgtgacgtggattgttgcttaatcccagagtctccattctaccttgaagggaaaggaggcctccttgagttcgtcgagagacggctcaaggacagtggtcatatggtcattgtggtggccgagggtgctggccaagatctcatcgcccaaagcatgaactttgtggacactcaagatg

SEQ ID NO: 826 - DNA, 413 bp, Triticum aestivum
  Clone ID: LIB103-019-Q1-E1-F4
attcacgggtcgacgggctagtggattcttgggagcattgtacctccacacgctccaaacggagattagcacccgcaaggatgtgaacttcgggatacatcgttcctccgcgtgcctcggttatctcttacccgacccctttacttatgcactttactttatgatagccatagtgtttcatgttgtatatcttgcttagtataagttgttggtgcacataggtgaggctagttgttttaggttttctgcttgagaaattaaacgctaattctattccgcatttgttcaaccctaaaccataattattttaaagcgcctattcacccccctctaggcgacatccacgatctttcacccagctttctccaaactcccttgccctattgaagaggaataacatatgtttcatacct

SEQ ID NO: 827 - DNA, 410 bp, Triticum aestivum
  unsure at all n locations
  Clone ID: LIB103-019-Q1-E1-F5
ggtctagaattcccgggccgacggggaagccagcagcagccttcttacaggctttgaggtaagaagtttaaaatatgtaatgtagtaccgcatggatagtagcccctaatgcccagttcggtgttcggaaagaaaaagccggactgaggatctaaaaagatatacgcaggagttctaaaaatatgtcaatatcggattgcaggctgcgctgctgacctctgccgcattgactgcgaaggtcggtgctttgaagcaagacctcgagcggaccgagaacgagctcggccttgccaagaagcagctcgaggacaaagaaggtgggtaacaccgtaataaatttgtaccttacagaaaaggattttggttgcaatagaaataacaagcataacttgggcactgcanggggcacg

SEQ ID NO: 828 - DNA, 438 bp, Triticum aestivum
  Clone ID: LIB103-019-Q1-E1-F7
tacggtctagaattcccgggccgacggggaatttgatcagcattttcttgagcgccattttcttcagcattttcttcaggtgcattagctcgacgttcttcacgttctggaatgaattcttcagcagattcttcggtaggaatgacatcctcagtagccttgaacttgatagtttcctcaggtgctggttcatctatcacagaaggtaggtgctttctttgcgagccattagtttcatcgaatcgcacatctacagtttcaacaaccttgtgaagaacgttgttgaagactctgtaggtgtgcgagtcctttccgtaaccaagcataaaaccttcatgtgctttcagtgcaaattttgagttgtgatgaggatctctaatccagcatttagcactgaagactttaaaataactcacattgggtttcttgtcagtgagg

SEQ ID NO: 829 - DNA, 437 bp, Triticum aestivum
  Clone ID: LIB103-019-Q1-E1-F8
ggtcaggaattcccgggccgacgggcgatgcaggtaggaaagtggacgtcatggatgatgatgacctgattgagagggagctggaacatggcgtggagttggctgccgaggacgagaaaaaacacgacagaaggcagagctggccccaccccgcgcaccgggaggatcaccagaacacggctcgcaaggcggagaacaccgaagagggcgagctgtccctggatggccaggaataccgctctcctggccccgacaaccggaagaggaaggacgcgcacgagcacaggagcaatgaccgcagcgccgagagagacatcaagaggccgaggccatgagatgaagtattcattgtggggggtgatcagcggtgacggactgagaactggtgttttgagcgccagtgcgtgatacctagtttttgcatcgcgggaacatac

SEQ ID NO: 830 - DNA, 292 bp, Triticum aestivum
  Clone ID: LIB103-019-Q1-E1-F9
attcccggatcgacgggagataaaacggtggagctgtcagtccgtcaacgctccttccaaaattggggtccggtaaaataaccaaacttgaaggttgtaataactgttgccaacaatttccgccttactttaaatggaaaaaaacaaaattcatttccattgcctatgatggatttcgatttgcttttcacatgaagcatcaacataaatcgttgaccaaaaaaaaaaaaaaaaaaaaaaaaaaaaaaaaaaaaaaaaaaaaaaaaaaaaaagggagctcaaaagggatcaa

SEQ ID NO: 831 - DNA, 429 bp, Triticum aestivum
  Clone ID: LIB103-019-Q1-E1-G10
attcccgagccgacgtactcctttatggctgggagatggtcatggggacgattgtatggcgtcaagataggctctccaacaaagagccgcattgccttgaggtagttgtcacaatcaaatgtaaagcggtgatacattcttgcaggcaaaacaaccatgccacctttcttaactgctatacggatccactgttcgttttggtccctcacatcaaagtatccactgccctcgagacaatagcgtatctcttcatcagtatgcaagtgctcttcaaagaagttcttcagcttggcctcatagtttggcaacttctctggacatacgtcgcaaatgtccacataagagtatcccctggcctcacggattttcttgagattctcgtctttctcccagtcatcagcattcaggttccagcttacaacacccaat

SEQ ID NO: 832 - DNA, 415 bp, Triticum aestivum
  Clone ID: LIB103-019-Q1-E1-G12
attcccgggtcgacgggggcgagacaaaaccaaagctgcggcggcgcgcaggcgaatcagcagcggagccaagcaaccgacgccaccatgggtatctcgcgtgactccatgcacaagcgccgggccaccggtgggaagcagaaggcttggaggaagaaacgaaagtatgagctcggccgccagccagccaacactaagctttcgagcaacaagacagtgaggagggtccgtgttcgcggaggtaacgtgaagtggagggctctccgtcttgacactggtaacttctcatggggtagtgaggctgtggcccgcaagacccgtctcctggatgtggtttacaattcgtcgaacaatgagcttgtgaggactcagacccttgtcaagaatgccattgtgcaagttgatgcagcccctt

SEQ ID NO: 833 - DNA, 397 bp, Triticum aestivum
  unsure at all n locations
  Clone ID: LIB103-019-Q1-E1-G2
attcacgggtcgacggcgcaagatgaaaaatagaatttatggtaaattgggacgggttgcgaacgaaagataaagaacgtgtactggttcttggtgccacaaatagaccttttgacctggacgaagctgtgattangaggttcccccgcaggctaatggtaaatttacctgacgcatcaaatagagagaaaattttgaaagtaattttagcacaagaagagttgggacaagatactgatctggcgtcacttgctaatatgactgatggatattcaggaagtgacctgaagaatctatgtgtaactgcagcgcactaccccattcgagaaatcctagagaaggaaaagaacgagaagaatgttgcaaagtcagaaggtangcctgagcctgcattgca

SEQ ID NO: 834 - DNA, 435 bp, Triticum aestivum
  unsure at all n locations
  Clone ID: LIB103-019-Q1-E1-G3
tcaagaattcacgggtcgacggcgggtaaagtcaggccgccttcttcgagctggcctgggtgtcagccagcaaggggaaggcggccccacgtcttggattcctgagagccggacggcctcgtaattttttcagaagggccagnggaagccggctaggctacccatggctatttaccccgacagttgtcgagatacacgacgtgtacatggtggtaagtggcgagagagtgtgtgaagaagtacacccctgcggggttataaatgatctattcgaatagccgtgtctgcggtaaaggacttctgggttgcctataacagttcatagacaagtgaaagtggatactcttaaactcgcaaggtaagtgtgagtgctatggatggccttctcgtagggagatgagagcggatccatagtggtgtactgaatggtgaata

SEQ ID NO: 835 - DNA, 429 bp, Triticum aestivum
  unsure at all n locations
  Clone ID: LIB103-019-Q1-E1-G5
gtaacggtctagaattcccgggccgacgggttcttcatcttcttcttcttccttgacctcctccctagatgggagaagggtttcccctctggtccttggctcccatggcgcgggaggggagagagcccctccgagattggatctatctctatttctgcgttctcagatccttccccttcaccgtttcttttatatccggagatccataactccgattggggtgaatctttcgcccagattattctcgtaaaattagctttcttgcggcaaaagaagagcgtcaaccgccttacgggtggcccaagagagtgccangcgcgccccctatctcctggccacctcgggcaccgtttctacaagttggagcatganggtgtttttttgatgtcttccttatgagtggcggtcgggggacgagcgatggtcttt

SEQ ID NO: 836 - DNA, 428 bp, Triticum aestivum
  Clone ID: LIB103-019-Q1-E1-G7
tacggtccagaattcccgggccgacgggtgcataaatattcgactactcattgatcttcacttatatctttcggagtagtttgtcgtttgctctagtgcttcacttatatcttttagagcacgacggtggttttattttgaagaaatacatgaactctcatgcttcacttatattattttgagagtctttagaacagcatggtaatttgctttggttatgaatttagttataatatgatgggcatccaagagggacataataaaaactatcatataaagtgcattgaatactatgagaagtttgattctttatgattgttttgagatatgaagatggtgatattagagtcatgctagtggagtagttgtgaatttagaaatacttgtgttaaagtttgtgattcctgtagcatgcacgtatggtgaac

SEQ ID NO: 837 - DNA, 313 bp, Triticum aestivum
  unsure at all n locations
  Clone ID: LIB103-019-Q1-E1-G9
taccggtcgagaattcncggatcgacggggaggaggaagaggggacgggacgagggcgcggctgctgatggaaggggcggagcgacggaggaagacgcctcccgatggatcaaatcgggggtagtattgtaatttcacactatttcacctggtcggaaagatgcccccagcgacaattatttcggaacggagggagtaattttttacataacctagaatgttcttctgaactataattttgaatgagccattatctgagatttaaatctagccaaaaatgatcatggctgatataatgcattctcagaatgct

SEQ ID NO: 838 - DNA, 435 bp, Triticum aestivum
  unsure at all n locations
  Clone ID: LIB103-019-Q1-E1-H1
tctagaattcacgggtcgacgggtaggtgcatgtggattctggtcacttggccttggattggagtgagcagcgttgcgcagagacttgggagtagatggattggagtggtggggcgcctttattatatgagagtccaaactctgttgcgttcacatcatgctggctctattctgcttctccaattaattccctctgcatgtaattgaggatgcatcattgaccgttcaacgtctcgagaaccgctacccactccctccttggcattcaagcacctatggacccgtcgatgacgagggtgctatggtgacttcgtaaatttcaagatgatagtgccgtgcatatgtgcattcatangggtgagtgtatgcgcgtgcatataagcgcttgcgtctgtactgtgtanaaaaacgtaaatgcatgtcaaaaagagacta

SEQ ID NO: 839 - DNA, 428 bp, Triticum aestivum
  Clone ID: LIB103-019-Q1-E1-H5
acgccgtcaggtaccggtcaggaattcccgggccgacgggtttctgatgaagttttgtgtggatgaagtgttcgatgatcgagaaggtctcgatgtgagaagaaggaagagatgcaagagctcagtcttggggatgcccgaggcaccccaagtaaatatttaaggatactcaagcgtctaagcttgggtatgccccggaaggcatcccctctttcttcaacaagtatcagtatgttttcggattcgtttcgttcatgcgatatgtgcaatcttggagcgtcttttgcatttagttttcatttttattttatgcaccatgctggtatgggatagtccttggttgatttatagaattctctatgtacttcacttatatcttttgagtatggctttatagaatgcttcatgtgcttcacttatatcatttg

SEQ ID NO: 840 - DNA, 241 bp, Triticum aestivum
  Clone ID: LIB103-019-Q1-E1-H6
attcccgggccgacgggaggtgagaacggtgatgagggcgatgagtattaagcctgcctcctggtgctttcccaaggcttgctactgctatcctatgatctgcccgagtggctttatctgttatctgtctgtttgaacgtttgctttgtggtgtttgttttacaacctgttgtgttgtaagaaccttgtatctttgaacctgctttgcaccttggttaatatgcatgctatctggttatct

SEQ ID NO: 841 - DNA, 443 bp, Triticum aestivum
  unsure at all n locations
  Clone ID: LIB103-019-Q1-E1-H9
ccggtcgagaattcccggatcgacgggacactcaagcaacagttagctgctatcgctccaacacttgagcagttgaataagaaaaaaattaaaaaaaaaagggaaatttgtaagtgtacaatcacanatttatcaaataagtggtgagattgctggcaccacagaggtcggtgagcaggtggctacaccacaggtcaacgaggatgatttgacacttgagaggcttgaagattttcggtcccaactccaggagcttgagaaagagaagaacaataggttggagaaggttcttgagtatgtaagcatggtacatgatctatgtaccgtcttgggcatggattttctcagcaccgtgactgaagttcatcccagtctagatgactccattgctgataactgcaagagcatcagcgacgagacattatcaaaactttacaagacag

SEQ ID NO: 842 - DNA, 444 bp, Triticum aestivum
  Clone ID: LIB103-020-Q1-E1-A10
acgccgccaaagtacggtctagcattcccgggtcgacccgaaaacaaataataaacttcaacataacaaactttgggggccacattcatttgcaggaattttgcaggcaaggaaaatgggaaaaattcctacaaaacagagggccaatatgtcacttactcggcacatgatgagaaatttctgtgcacttcaaactactccctccgtctcaaaatataaaaacatttttgacactttgcaagtgtaaaaaacgttcttatattttgagacggagggagtacaatacaaatagtttggatttatctttccatgctttgttgccaacttcattaagaaaaagtactccccaattaaaaatgggtaagtaacgtttccttttgattttgtagggtattttctcctgtagttgaattctttttcttctctcgatacatactccatatg

SEQ ID NO: 843 - DNA, 408 bp, Triticum aestivum
  Clone ID: LIB103-020-Q1-E1-A11
ttcccgggtcgacgggggagagctttataagaaaagcactaccggagtccttcaaaggtgcatctccgaagaggaggggcggaacctcctggctgaaattcatgccggacttagcggtcatcacgctgcagcccggtcccttgtaagcaaagccttccctacaggcttttattggccgacggcccgggcaggcgcttaggacttagtccaactatgcaccggttgccagctctttgcaaaccaaagccatatgccacccaccgccctctaaactatccccattacttggcccttcacggtctgggggcttgacatggttggaccccttaaaggcggaacctacaaccaaaaatacatactggtcatgggggataagttcaccagatggatagaagccaagcctgttaa

SEQ ID NO: 844 - DNA, 448 bp, Triticum aestivum
  Clone ID: LIB103-020-Q1-E1-A2
attccagggtcgacgggacgcagtaccacactatgattatctcaagctcaagatgcccggtccacgcggcgtcataacagtcaatggaaatacggaacgctcccttcgtacagaagagcacacagctgccttagcagcggaagtagagagcggccttctcaagcaaaaccttaatttggctgccgagccacggacatcgttaagagggtccgaactactctacagcaggagagctcggctcgccaggagctcgactagcaatctggcctccgtcttagtcccgatcaagtggtggcattcgtgtcgcgcgtacataactacgcactcaaaatcccatgggcaacgacggagggataactagcttgtggtccaaagtacgggtcaaccgacatcggatacacacatactttcacttttacttgtttccttttcaggtctcaatcccaca

SEQ ID NO: 845 - DNA, 459 bp, Triticum aestivum
  unsure at all n locations
  Clone ID: LIB103-020-Q1-E1-A4
cgcctgcaggtacgcgtccagaattctagggtcgacgggatgcacgagttcttcgtccacttccacggacccaaagacagtatttaccagggtggtgtgtggaaggtcagggttgaactcaccgaagcttacccttacaaatccccttccattggcttcaccaacaagatctatcaccccaatgtcgatgagatgtctggttctgtctgcttggatgtgatcaatcagacatggagcccgatgtttgaccttgtgaatatctttgaggtgttcctgccccagcttctcctgtacccgaacccctcggaccccttgaacggcgaggcggcttcgctcatgatgcgcgacaagaatgcctatganaataaagtcaaagaatattgtgagagatatgccaagcctgaagatatatccccagaggaggaagaagaggagagtgatgaagagctgagcgacgcc

SEQ ID NO: 846 - DNA, 462 bp, Triticum aestivum
  Clone ID: LIB103-020-Q1-E1-A6
ccgccaggtaccggtctagaattcccgggtcgacggggaattgatcgagaagcactgcggaggtgtgagaggaggatgggacaacctgcttgcagttatccctggcggttcatctgttcctttgttgccaaagcacatatgtgatgacgtgttgatggactatgatgcactaaaggctgtacagtccggattaggcactgcagcagttatggtgatggacaaatccacagatgtagttgatgcgattgctagactgtcatacttctataagcatgagagctgtgggcagtgcacgccttgccgtgagggtacaggatggctctggatgatcatggagaggctcaaagtgggcaatgcaaagctagaagagatcgatatgcttcaggaggtgacgaagcagattgaaggccacacaatctgcgccctcggggatgctgcagcatggcccgtgcatggtcttaa

SEQ ID NO: 847 - DNA, 449 bp, Triticum aestivum
  Clone ID: LIB103-020-Q1-E1-A7
cggtcaagaattcccgggtcgacggggtactactagcgagactgaagtctctctgcaaaaacataaattaagcaacgtgagtacaaatgtacccagcaagacttacatcagatctaactacatatgcatcattatcaacaaaggggatggtggggtttaactgcagcaagccagctttgactcggtggcttcctgaactacgactgcaatgtaactctttgaggtggcgcacacgagtccacatattcaccatatcaatacaccactatgcatccgctcctgtctccctacgagaacgccatccatagaactcacgcttatcttgcgtatttaagagtatccactttcacttgtctatgtactgtacaggcaacccagaagtcctttaccgcggacacggctattcgagtagattatattaaccctgcaggggtgtacttcttcacaca

SEQ ID NO: 848 - DNA, 411 bp, Triticum aestivum
  Clone ID: LIB103-020-Q1-E1-A8
ccggtctagaattcccgggtcgacgggatgattgggatactaaaagccacaatgtatcgaggcttagtggagtcagtcaccagcctctccgttgtttgaacaactgaacaacaacatcaagcggcgccaaaacatattgctgatctgagagacatccgagacatgaatgaggaaaaaatgagaaggtcggccattgttggctcaagctcaggaggtggtcgaaagcctggctccacatggtcctagcactactgtcacacatggtgttcgggccacttccaccagtgctctgcgggttgtcgttccgcgagagcaatgacggggagaacaagatgatgcggtgctttgctcgcctgcattgcgctgcttgcgctcgggacgtgcatgtctacagaagagccatgacatact

SEQ ID NO: 849 - DNA, 442 bp, Triticum aestivum
  Clone ID: LIB103-020-Q1-E1-B10
accggtctagcattcccgggtcgacgggacagattcgcgagagctcgagagagtgcgaccaaaatggcgatgagatgcgcgctgacctcgctccccgcgcgcctccggtccccggcggtggtagccagcgggacgcggcgccttctgagtgacgggaaggggcgcgtgctcagcgaggaggagcgcgccaaggagaacgtctacatccagaagatggagagggagaggcaggagaagctcaagaaaaagctcgaacaggagaaggatgcggccgacaaggctaagtccggcgccgacggcaagaaggccgagggaactaactaggagcgatcttcgcctgcctgaaggtgaccccatcttggacgcatctgggggacatttgtgtttatagatgtccagagatggaagaataaattctgtaaagcgttgatagcgctatctt

SEQ ID NO: 850 - DNA, 437 bp, Triticum aestivum
  Clone ID: LIB103-020-Q1-E1-B11
accggtctagaattcccgggtcgaagggcgtgggcatatcttttgtagaaagaattaaaatctcttgcttaacttatatctatttagagagatggcaggaattggtcattcacatggttagtcataaaatcctacataaacttgtagatcgctgaatatgatatgtttgattccttgcaatagttttgcgatataaagatggtgatattagagtcatgctagtgggtggttgtggattgtagagacacttgcgttgaggtttgcaagtcccgtagcatgcacgtatggtaaccattgtgtgacaaatttgaagcatggggtgtttctttgattgtcttccttatgagtggcggtcggggacgagcgatggtcttttcctaccaatctatccccctaggagcatgcgtagtagtactttgcttcgagggctaataaac

SEQ ID NO: 851 - DNA, 437 bp, Triticum aestivum
  Clone ID: LIB103-020-Q1-E1-B12
accggtctagcattcccgggtcgacgggttcaaaaaaaaaaaaaaaaaaaaaaaaaaaaagcggccgctcgaatacctgcagcacgagaatttcatggaatgagcagtcagttagtcaaggcaatgccgagtcttatttttacaaaagtccaggaagacaattgtacttcgtcaacatgtgccatttgcttggaagactacagtgttggtgaaaagataagggtgctgccttgtcgtcacaagttccatgctgcttgcgtggacctgtggctcacatcatggaggacattctgccctgtatgcaagcgagatgcaaatgctggaatgtcaaatttccctccatcagagtctacccctttgctttcttctgctattcccttgccagctgaatcgacagctttgtcttcttttcgttcaatggtagcagcatctcctcc

SEQ ID NO: 852 - DNA, 438 bp, Triticum aestivum
  Clone ID: LIB103-020-Q1-E1-B2
attcaagggtcgacgggcactccaagcacaagaaggaattgcggccttgaggagcaatgttgatacactgatcgtaatcccaaatgataagttactgactgctgtttctccaaatactcctgtgacagaagcctttaatttggcagatgatattctccggcagggtgtccgtggaatctcagatatcatcactgtgccaggtttggttaatgttgactttgctgatgtacgatcagttatgtcagatgcaggttcatccttgatgggaattggaacagcaacaggtaagacacgagcaagagatgctgcgctcaatgccatacagtctcctctacttgatattggtattgaaagggcaacaggaattgtgtggaatatcaccggagggagtgacctaacattgacagaggtgaatgcagcagctgaagtgatatatga

SEQ ID NO: 853 - DNA, 424 bp, Triticum aestivum
  Clone ID: LIB103-020-Q1-E1-B4
attctagggtcgacggggatgatcttatcgggaggaaaaacacttgaaaagaaaagcatctttacacttattcaaggaatcaatacaatttttaggcaaagaagaaaaccaagttttagcacgattcccatagggagaacggaaatagcttcaatttaacaatatcattatccacatcttttttcttttgcatatcacacaactcaaggaaagtatttagatgggatgcaacatcttcattaggactaccagaaaattgttctttcataacaggattcaacaaagcggcattaatttcataagattccgtactagtggagagagcaatcggagtactaataaaatcattattattagtgttggaaaaatcacacaacttggtattctcttgagacatcatgacaaagcaagaaatctagcacac

SEQ ID NO: 854 - DNA, 449 bp, Triticum aestivum
  Clone ID: LIB103-020-Q1-E1-B5
ggtctagaattcccgggtcgacgggggatagctaatcctgtcgaagactatgctcctggccatctccatcttgcagcatgtagaagagagtagattgaagtcctccaagtagcatcgcatagcataaatcctacctggcgatcgcctcctcgtcgccctgttagagagcgatcatcgggttgtatctggcacttggaagggtgtattttattcagtatccggttctagttgtcataaggtcaaggtacaactccgggtcgtcctgttaccgaagatcacggctattcgaatagattaacttccctgcaggggtgcaccacataacccaacacgcttgatcccattcggccggacacactttcctgggtcatgcccggcctcggaagatcaacacgtcgcagccctacctaagcacaacagagcggtcagcacgccggtctaaccctaag

SEQ ID NO: 855 - DNA, 459 bp, Triticum aestivum
  unsure at all n locations
  Clone ID: LIB103-020-Q1-E1-B6
ccggcaggtaccggtctagaattcccgggtcgacgggggacaaacgacaaggtggtgctcgattactttcctgggaacaccggggatatctgacggttgccatgcaaacacatcgacattcgcccgcaggaaagcaacgagcgcgctttcctatttagggccgagcgtggcactgatggtgaaggtaccaccagtgccgtcccccttggcggacaccttcttggtctcaggtggagctgccattgctttcttgcgcttgccggtggagctcgatggtgcgtcctcgacggtagtgcagcacttcgaagaggtgcgcttgccggagtagacatcagagctcttgccggacttggtcttcttcttccccccgggagcttcagcggcaagtgtgttgtgatcagttgcggctgctgcttcccggtagatcntgtcggcacagataagagcatccttcttgtc

SEQ ID NO: 856 - DNA, 453 bp, Triticum aestivum
  Clone ID: LIB103-020-Q1-E1-B8
gccgccaggtaccggtctggaattcccgggtcgacgggtatgcgcgtagtactttgttttcaatggcttgtagatttttgcaataagtatatgagttctttatgactaatgttgagtccatggattatacgcactctcacccttccatcattgctagcctcttcggtactgtgcattgccctttctcacctcgagagttggtgcaaacttcgccggtgcacccaaaccctgtgatatgatacgctctgtcacacataagcctcattatatcttcctcaaaacagccaccatacctacctatcatggcatttccatagccatttcgagatatattgccatgcaactttgatcatcatcatatgcatgacttgagcatttattgtcatatttctttgcatgaccgtaagatagctagcatgatgttttcatggcttgtcggtttttttgatgtca

SEQ ID NO: 857 - DNA, 419 bp, Triticum aestivum
  Clone ID: LIB103-020-Q1-E1-B9
attcccgggtcgaaggggagaagaagaaatccagcgagaacatcaaggtcatctacgcccgcgccaagcagtacgccgaggagtacgatgcccaggacaaggagttggttcagcttaagcgtgaggcccggatgaagggtgggttttatgtcagtcctgaggccaagctgctgtttgttgtcagaatcagaggtatcaatgccatgcacccaaagaccaagaagatcttgcagctgttgcgtttgaggcagatattcaatggagtgttcctgaaggttaacaaggccaccatcaacatgctccgcagggtcgagccatatgttgcatatgggtacccgaacctgaagagtgtgagggagttgatctacaagagaggttatggcaagctcaacaagcaaaggattcctctgaccaacaac

SEQ ID NO: 858 - DNA, 286 bp, Triticum aestivum
  Clone ID: LIB103-020-Q1-E1-C1
attccgggtcgacggggacactagactccagtggcacaagaggatctatgcttatgtacgagtgggagcaacttcattacactacggaactgtaagtgaatgtcagctcagcgtgagtcgatttaaaacgtcggaactgggatggaactgtctggacatatgatatgcgtgttgcagtacagctgacattggagagcgtttcttgaagaaatttggtgggtagctatcactcatctgaacattgtgcgaattctgaactgtagactgtgaccctaaatgatactgt

SEQ ID NO: 859 - DNA, 453 bp, Triticum aestivum
  Clone ID: LIB103-020-Q1-E1-C10
acgccgccaagtaccggtctagcattcccgggtcgacggggacacacagaagattgttgagaagtactccaactccaacattgaaattcacactttcaaccagagccaataccctcgcattgttactgaagacttcttgccacttccaagcaaagggcagacagggaaggatggctggtaccccccaggccacggtgatgtgttcccctctttgaacaacagtggaaaactcgataccttgctgtcacagggaaaggagtatgtcttcgtggcgaactcagacaacttgggtgctatagttgacatcaagatactaaaccacctgatcactaaccagaatgagtactgcatggaagttactccaaaaacattggctgatgttaaaggtggtaccctcatctcatacgaaggaagagtccagctcttggagattgcccaagtccctgatgagca

SEQ ID NO: 860 - DNA, 430 bp, Triticum aestivum
  Clone ID: LIB103-020-Q1-E1-C11
accggtctagcattcccgggccgacggggagaagaagaaatccagcgagaacatcaaggtcatctacgcccgcgccaagcagtacgccgaggagtacgatgcccaggacaaggagttggttcagcttaagcgtgaggcccggatgaagggtgggttttatgtcagtcctgaggccaagctgctgtttgttgtcagaatcagaggtatcaatgccatgcacccaaagaccaagaagatcttgcagctgttgcgtttgaggcagatattcaatggagtgttcctgaaggttaacaaggccaccatcaacatgctccgcagggtcgagccatatgttgcatatgggtacccgaacctgaagagtgtgagggagttgatctacaagagaggttatggcaagctcaacaagcaaaggattcctctgaccaacaac

SEQ ID NO: 861 - DNA, 436 bp, Triticum aestivum
  Clone ID: LIB103-020-Q1-E1-C12
taccggtcaggcattcccgggccgacgggaagtttgtgaaggaccacggaggagatgagattcaagccggccccaccgtcaactagtatctttgtgaccttgaggttgcggatagttggtgagaccaacatcggcaagcacccgaccgcagttacgcgatcagggtgatcctcaatgttgaagatgataggcgtgctggaccatttcaggggcttgcgtgactctatggatggctctgctgcattcacttcccgcatccactatttgagctggcggtgcgaagtatgcagagaggcgccaccgtcaacgcacaggacctctgtggctttctgaaattcttgctcatcggtctcatcatcatccacgtcttcgtcatcgtcgtcatcttcatccttgtcacggccgtggggaggcctgtctccttgccgctgcttgg

SEQ ID NO: 862 - DNA, 441 bp, Triticum aestivum
  unsure at all n locations
  Clone ID: LIB103-020-Q1-E1-C4
attcnagggtcgacggggaggatgaaaatgatgaggaggacaacaaggaaaatgaaaacaatgatgatggtgataaaaaaaagggcggccaatttcctgcagggaaagggcaggggaaccaacccccggattgcaaccaacattgaggtgcttcaaacatgaagacaatttcccttggctgaaaaatgtttggttctgcttgatgcaatgtcgttgattttggttctgtggacccattgggggattgattgcgttggttttgtggaaaaaccggtggggggtttctttgtcagggacatggtattatatactggtagcatttcaattgttgtattgggttgaaatactttgtccgctgctgcgagtgatcatcgatgttgccattttggtagtcctacttgttttgcctggaaattttgatatactaagtatttgtgtgcg

SEQ ID NO: 863 - DNA, 447 bp, Triticum aestivum
  Clone ID: LIB103-020-Q1-E1-C5
ggtctagaattcccgggtcgacgggcaaacataagttcccgcttcaaaaaccggtatactacgtatccactgtcctcacaccatgcaagtcacggtacccacattatcaaaagatagcatacgcggtcttgatggcatctcggaaactatgacattactttcaagagtgtcactactttcaagagtgttcaatcacggtggcctccgaagtaccactcaatgatataataaataaccgtgatgccaaggggccaaatttgctaagtgggccatcgagctctcccgttcgacatcatatataaaccagggtgagccattaagtcgcaagtactggctgacttcgtcgccgaatggacagaagcatactccaattggatcatgcactttgacgactctaagatgttggccggtctgggagcgggtgttgtcctgaaatcccccaccgga

SEQ ID NO: 864 - DNA, 436 bp, Triticum aestivum
  Clone ID: LIB103-020-Q1-E1-C6
ggtaccggtctggaattcccgggtcgacggggggcaaaggcgccgtgcagaagggttccaagggcccaaagattggcggtggcggcgggaagcgttgaaagttgattacgccatagacatagagttgtgctgcctagccttatttcctatcctactatcatagacctttgtcaagttattaccccgccctcttgaatttgcaccttatctctgaggctgaatggtgttaacgttttggattgtcttgatgagtttatttataatgaatggttcttatgttggttcttaaaaaaaaaaaaaaaaaaaaaaaaaaaaaaaaaaaaaaaaaaaaacaaaaaaaaaaaaaaaaaaaaaaaaaaaaaagcggccgctctaaaggatccaggcttacttacgcgtgcatgcaacgtcatagcccttcaaaagtgtcacctaa

SEQ ID NO: 865 - DNA, 289 bp, Triticum aestivum
  Clone ID: LIB103-020-Q1-E1-C8
ttggaactcccaatagtgagtcgtattagaacgatgaggtcatcatattgacaatgtcggtcgacggccagatcataggatggtgtctcatggcaaacaatccaccaggtaccgtcaataatgcctctcagctgcagaacggagtggcgtgaatactactagtactatccatgcagtggacgaatctggcagctgcagccattcaactcaggatactttagagggtaatgtgagctttgagttaagtgtaacattcatgcacatgagagcgtctaacgagtttcaatat

SEQ ID NO: 866 - DNA, 247 bp, Triticum aestivum
  unsure at all n locations
  Clone ID: LIB103-020-Q1-E1-D1
attccagggtcgacggggaataaaagattagtaaagaaagcaggggcttttctgaaatttttgtaaatctcgtttttatctagtcctttcctgtcaaaccctcgccgtcgcagcatcagcaatagtactactactactactagtgccaaanaaaaaaaaaaaaaaaaaaaaaaagaaaccaaaaaaaaaaaaaaaaaaaaaaaaaaaaaacgggcggcccaaaaggttcaaacctaacttacccttg

SEQ ID NO: 867 - DNA, 420 bp, Triticum aestivum
  Clone ID: LIB103-020-Q1-E1-D10
accggtcaggcattcccgggtcgacgggaatgttactgtctacaaagctcgacttgtcgcaaaaggttttcaacaagttcaaggaattgactacgatgagaccttctcactcgtagcgatgcttaagtctgtccgaatcatgttagcaactgccgcattttatgattatgaaatttggcagatggatgtcaaaactgcattcctgaatggatttctggaagaagagttgtatatgatgcagccggaaggttttgtcgatccaaaaggagctaacaaagtgtgcaagctccaacgatccatttatggactggtgcaagcatctcggagttggaataaacgctttgatagtgtgatcaaagaatttggttttgtacagacttttggagaggcctgtatttacaagaaagtgaagtgggagct

SEQ ID NO: 868 - DNA, 445 bp, Triticum aestivum
  Clone ID: LIB103-020-Q1-E1-D11
cgccgccaaagtaccggtctagcattcccgggtcgacgggggggcgttaaatgatagcgctagttgggaggcaacccaattttatttgtgtttattgcttttgtttctgtttagtaataaaattttgcatctaacttctgtttagatgtgttttatgttttaattagtgtttgtgccaagtagaacctataggataacctatgatgatagttaatttgattctgctgaaaaacagaaactttgcgcgcacgaaagtagtttggtaaattacagaaacgtgcttttgtgttgattcttttttctgctgatcaatagacaaattgtccaggacttcctattttggtagtatttttagagttcaagaagtttgcgttacttacagattgctacagattgttctgtttttgacagattctgtttttcgtgtgttgtttgcttattttga

SEQ ID NO: 869 - DNA, 440 bp, Triticum aestivum
  Clone ID: LIB103-020-Q1-E1-D12
acgccgccaagtaccggtctagaattcccgggtcgacgggatgtttgtctatgtattcacacatgtatcatgtttccggttaatacaattctagcatgaataataaacatttatcatgatatgaggaaataaataataacttttattattgcctctagggcatatttccttcacccataacccacaggtctactggatcgaaaccagactcttctttacaacccggattctaatgtatcttttgcacctggcttcgtgtgtgattcacgagctaaatgctatactattattcatcctggaatcaaacaccatgttattctcgttgttcaaacccccattctagcttctgtctagtcactgaatgattgcctacccgtttggaactttggtaccatcgtgtattgcactcaacgaattcactgaaatacaactcatggggt

SEQ ID NO: 870 - DNA, 428 bp, Triticum aestivum
  Clone ID: LIB103-020-Q1-E1-D2
attccagggtcgacgggagaattaaggccaggcagattatgtctggtgataaacttataatgtctgcggaaggtccgacctttgtggatggtgcaatgaaggaaataaaacttgaggtgaaggaacaaaaaaggggcaaataatgacttcatgggttaaggacaggacacctcaatggacaaggaggagctcctttggacccccttgccaaggcgcaattacaagaagacccactccctctaaaaaggaaaaagaagaatgtgcacagtatgggcgatgagtccttcatgaatacctgttacctccaactcacaggataatcttggagcagccggccgtactgccattgacatagatgccgagcttggctcaagtgttcagaaaacatcagatgctaaggctggagctgaacttttctatgagccaga

SEQ ID NO: 871 - DNA, 419 bp, Triticum aestivum
  Clone ID: LIB103-020-Q1-E1-D3
attccagggtcgacggggagaagaagaaatccagcgagaacatcaaggtcatctacgcccgcgccaagcagtacgccgaggagtacgatgcccaggacaaggagttggttcagcttaagcgtgaggcccggatgaagggtgggttttatgtcagtcctgaggccaagctgctgtttgttgtcagaatcagaggtatcaatgccatgcacccaaagaccaagaagatcttgcagctgttgcgtttgaggcagatattcaatggagtgttcctgaaggttaacaaggccaccatcaacatgctccgcaaggtcgagccatatgttgcatatgggtacccgaacctgaagagtgtgagggggttgatctacaagagaggttatggcaagctcaacaagcaaaggattcctcctgacaacaac

SEQ ID NO: 872 - DNA, 448 bp, Triticum aestivum
  Clone ID: LIB103-020-Q1-E1-D5
ccggtctagaattcccgggccgacggggtggtaatgttagagtcatgctagttgggtaattatgaaattgagaaatacttgtgttgaagttggcaagttccgtagcatgcacatatggtaaaagttgtgtgacaaatttgtatcatggggtgctctttgattgccttccttatgtgtggaggtcgggctcacgcgatggttaactcctaccaacccttcccctacgagaatgcgtagtagtactttgctttgagggctaataaacttttgcagtaagtacatgacttcttgatgactagtgtgagtccatggattatacacactctcactcttccatcattgctatcctctacggtactgtgcattgccctttctcaccttgagagttggtgcagacttcaccggtgcatccaaaccccgtgatatacgctctatcacgcataaacct

SEQ ID NO: 873 - DNA, 454 bp, Triticum aestivum
  Clone ID: LIB103-020-Q1-E1-D6
ggaaccggtcaagaattcccgggtcgacgggtttgagccacagccaagcgcgccgcactatcctgaggggcatgatatagctctgcctccaaaaagtgccttggaggccgcacacgctccggcaccgatcctcgactcggagattgctgcgtcctttgaggatgaacggttggacgtcaccttgggggctgcgatcttaaaggcgatcgagccgaacgcaagccccgcactccgcatggcccatgactcctaggagccggattcttctctgaactccgggccttccgtgcccccgccgatcgaatctgattgggcgcctgtaatggagttcaccgctgcggacatctttcagtgctcacctttcggtgatatcctgaattctctcaagtctctctctttgtcaggagagcccaggccgaactatggtctgcgaggttgggatttggacgacgaa

SEQ ID NO: 874 - DNA, 454 bp, Triticum aestivum
  unsure at all n locations
  Clone ID: LIB103-020-Q1-E1-D7
cgccgccaggatacggtctagaattcccgggtcgacggggagtggctggtggagctgctgaccggcggcgggcccgcgctggaggtagagtaggagtagggtagggcgcagcactcgggtaggcaagccaaggcgtaagcgtacgcgcgtttcctttttcggacggttgtacagcgggcaagggaaaagccaggaaaaaaaagggcggtggttcgttttggcgcggcccggatcggtcgcatcgctttcttccgcggcatgggcgggcagcgatcggtccgttcatcaatgcggtcggtcttgtgtggtgcgttgaggggtgaggttgcgaagaaatggaaatggtgcttgctggcggcacgatccggctggctggcccttgtcgccttgcctgcttttgcgtccggtttctattaaaaaaaannnaanaaaaaaaaaaaaaagcggccgctct

SEQ ID NO: 875 - DNA, 384 bp, Triticum aestivum
  Clone ID: LIB103-020-Q1-E1-D8
ggtctagaattcccgggtcgacggggcaaaaaggatcattgagaagatgaaggagaaattcccggacagagatgaagggtggaaagaggtagaggaggcattacctcaatagaataaccactcgcagatgaaagactgcactggtcagtgattcaaattgaagtttgtcgctgaccatcccttcttaaaatgtttgttcttgcgtgctgaaaacgtggttagcagttgggaactgcaacaacatttgttggactgttctaagcacatggagctttgtttaagatgtaattttgctattagaatatgctagtcccagttgctgttataaattacctcctgtcaaagaattattgaggcggttgtcaaaaccatgatctttgaggt

SEQ ID NO: 876 - DNA, 440 bp, Triticum aestivum
  Clone ID: LIB103-020-Q1-E1-D9
accggtcaggcattcccgggtcgacggggggacgttactttcctctgcctcccttgatagtcgcacaggcaaagctccacccggctcctttgccctcctcctccggcggtgctgccgccgcgagcgagcttgggaaaggatgccaggtctcagttctgtatagtaggtctaggattaagtgtagggcaaggtctagacttccctccatggggtatggcatgatgccgagtagaagcactacatcagcgcttacgagcggcgcccgacgccgttcagcttcgcttaccggctgctctccgtggtggagagaaggtgcgggaggcggatctgactccagcttctccaataagctcgatctcgtccctgatttggaggatggccatcgcttagtcctattttctcgttgctgtcatggtgatgggaacggaaataggacgagg

SEQ ID NO: 877 - DNA, 469 bp, Triticum aestivum
  Clone ID: LIB103-020-Q1-E1-E1
acgccggcaggtacggctccagaattccagggtcgacgggcataatcttatcacccaatatgaatctagggttggagttactttgaaaaatcttaaagagaaagaacctatagttaatgaaaaaatagatcttgattccgctagaattggtaaacttgaggatataattaccaacttaggttcggcgttttctcccatgaaaaacactccaaaaccctctacaaaaatcaccaagtttatctatgttcctaaaaataaaggtcaaacttctagtaagggagacgcggacctcaaatccataagtgttcatcccaattgtctttctatcattaaggaaccttttgctacaaatgaatttcttgaattttttcccaaaggtttattcattgctaaaaagggagaaacccctaaagattattagtgctctacttatgaatcaagtgccaaagatggcactccttagatctat

SEQ ID NO: 878 - DNA, 439 bp, Triticum aestivum
  unsure at all n locations
  Clone ID: LIB103-020-Q1-E1-E11
accggtcaggaattcccgggtcgacggggatggtggcagttggggctctggcaggggaaacagaggccgtggtggtggttacagaaacaatggaaatgacaacaatgagggaagggcctccagtcaagaccgcggtggtggctggtctcactcttctgcttggaatgctgataaaaagggaagcgctgaagacgatcaatctttctcaaagggcaagtccagctgggggagtgacaacaacggtagctggggagctccaaaaccatctggtggtgatgatcaggcaggaaagaaggatggaaacaacacctggagtcaaaacaagccattttctggcgatggatcctctatcctgngccagtgggctcctgctggcggcgccaccgctggtactgcaggatctgcaggcggaggaggatcatggggaaagggcaatgaa

SEQ ID NO: 879 - DNA, 440 bp, Triticum aestivum
  Clone ID: LIB103-020-Q1-E1-E2
attccagggtcgacgggttaccgcgttgggcacctggacccaaagcacaatcttcctgagaaacttaccactgccgaatgggcaaagcttggtcctaccattgcaaaggttaaagctctactaagaaacgggttaactggcattgatttggtcaggtgctgggtttcttggtggatcatacccttgagtcgtcgcaccgtcttaatgtgcacttacactggtggtgtaaaggatccactgcaccacagctctgcaccattaactaacgaggaaattaacaaaatggttaagtcccttttaaatgaagatccagaagattgcattaaagtgggcctggaaaccttctgcaaacttaacccgccaccggatgtgattccccgaatttaattacctttaactcattactcaaatacttgttaacccaacctttgatgaccttt

SEQ ID NO: 880 - DNA, 436 bp, Triticum aestivum
  Clone ID: LIB103-020-Q1-E1-E5
ccggtctagaattcccgggtcgacggggcatatacagatacattatggcaatcttgcaccagaaggttcagtagcaaaaataactggcaaggagggactgtttttctcaggtcatgcactagtttttgacggtaaggaatcaatgattacagctatatcagaatacccagcaaatttcaagggaaaggttgtaatgatccgatgagaaggaccaaaacgaagtcccgggatgcctgacatgttgactccaacaagtgcaatattgggagctggtcttgggaatgagtgtgccctgctgacagatggtagattttctggggggtcgcatggatttgttgtgggccacatatgtcctgaagcacaggaacgatgcccaattggtcttgttgagaatggcgatacaatcacgatcgacgtcgggaagaaagtaattgat

SEQ ID NO: 881 - DNA, 425 bp, Triticum aestivum
  Clone ID: LIB103-020-Q1-E1-E6
ggtcaggaattcccgggtcgacggggaatcccactgtgttggctcgtcatactgcgaaacaagtgcattatgatatttcacattatgaccatctgaatgcgaatgatatattatccggctatctcagccatgtgcactcaagccgtgacttggagattgaaatggtcaagaagttgcagctgaagtatgaggtacgttcttccaacttatattctgccagtccccaagtcttcagattatgagaaaaccggaatgatctgtagactttatgatataggcttagactttacctttagatttttctggagttcaataaaatagaacaaagcttcacctgtagtccccaagggccggttcatttgaccgtaaatgagccggttctttgaattttcataaccgtctcgtaccgaactcaacaaatattg

SEQ ID NO: 882 - DNA, 444 bp, Triticum aestivum
  Clone ID: LIB103-020-Q1-E1-E7
ggtctagaattcccgggtcgacgacgactcctacggcattggaggagcctactactacgtgcagcccgctgacgacgaccaggagtagttaggaggatcccaggaaggaggcctgcgcctcgttcgatctgtatcccagtttgtgctagccttcttaaggcaaacttgtttaacttatgtctgtactcagatattgttgcttccgctaactcgtctatgatcgagcacttgtattcgagccctctggcttgtattatgatgcttgtatgacttatttatgttgtagagttgtgttgtgatatcttcccgtgagtccctgatcttgatcgtacacatttgcgtgcatgattagtgtacggtcaaatcgggggcgtcactgctgcacacggaagtttctagcatgaataatcttatgatccctttgagagtgggtggcattccata

SEQ ID NO: 883 - DNA, 466 bp, Triticum aestivum
  Clone ID: LIB103-020-Q1-E1-E8
cgccggcaggaaccggtcaggaattcccgggtcgacggggaggagcaatcggggtgctaataaaatcattgttgttggtattggtgaagtcacacaaattagtattatcttgagccatcgtgacaagcaagcaaactaacacacaagcaaacaaaaagcaagcgggcaaaagaggcaaatggcgaaagagagggaggatagaaagagagagagggcaaataaaacggccggggagaagtggcgcagcatgtcggatgaggagaaggcaaagtatggcggcaagaaggcagatgccccagcaagcaaggtggtgaacaagaaggagagcaccagctccaagaaggccaagactgacgctgacgaagaaggttctgacgttgaggatgatgccgaggaggacgaggagtaaatagtagatgagggaacagcagcggtgcaaatcagcgtttgctgcttaaggtttagc

SEQ ID NO: 884 - DNA, 449 bp, Triticum aestivum
  unsure at all n locations
  Clone ID: LIB103-020-Q1-E1-E9
cgccgccaagtaccggtctagcattcccgggtcgacgggtctggaaggactactacgcaaaggttgatgctgtagtatacttggtagatgcatatgacaaggagcggtttactgaatcaaaaaaggagcttgatgctctcctttctgatgattccttggcaaatgtcccatttctcatccttggcaataagattgacattccatatgcagcatctgaagaagagctgcggtatcacctaggccttagcaacttcacaactgggaagggcaaggtgaatcttgttgactccaatgtacggcctcttgaggtgttcatgtgcagcgttgtccgcaagatgggctatggcgatgggtttaagtgggtctcccagtacatcaagtanggctcacagacgtcaaattttcttgtcatcggttggttgtttgtcacgacagcaaatgatatcatg

SEQ ID NO: 885 - DNA, 465 bp, Triticum aestivum
  Clone ID: LIB103-020-Q1-E1-F1
cgccggcaggtaccgctctagaattcccgggtcgacgggtaatgatgaagatctaaaagttattgatgtgtcccctattaaatctttgttttgtaatatgaatcttgataatgatgggactggagatgactcaactttagttaaaaggcgtcctaacgattcagagtttttagatcttgatactaaatttggtaaaagtgggactggagaggtcaaaactttacatagcattgaacccactattatggatttcaaggaatttaattatgataattgttctttaatagattgtatttcatttttgcaatctgtgatgaattctcctcatgcttatagtcaaaataaagcttttaccaaacatactggtgatgccttgatgcaatcttatgaagaaaaacttgaatcgaaagtttctatacctagaaaactttatgatgagtgggaacctactatcaaaattaaaat

SEQ ID NO: 886 - DNA, 428 bp, Triticum aestivum
  Clone ID: LIB103-020-Q1-E1-F10
accggtctagaattcccgggtcgacgggtatttgatggcatgtagatcatcgccgcgtgccatgtggatgtgaaggagataatcctcgatccataccaccgggtctgttgtgccatcgtatgattcgatgtttacgggtttgaaaccctctgggattttatgatccattacttcattcgtgaagcatagcgggtgtgcggcgcctctgtactgggctatatcacgacgtagctcggaagcactatgtctgttgtgttcggcccggccgaatttgttgcatccggagtgaagatcattgtcacatgccgtagggcgcctgtgcgatccgtagatcgattttgtttgtcttgccttatcctccagtatgtctcgcaggtcgggcgcattttcccgtgccttagttgagcggcgtcggggcatggcttggg

SEQ ID NO: 887 - DNA, 451 bp, Triticum aestivum
  unsure at all n locations
  Clone ID: LIB103-020-Q1-E1-F11
cgccggcaagtaccggtctagcattcccgggtcgacggggcaggcaatgacgacacggggcaatacgaagagatgatcgataattgcggcggggaagaggccggacatggcggcggagaaggggccagacatggcggaggagaaggggccggacatggcggcggagagaaggacgtggactccacgcagcagagttcgtcggtactaagttcaatcgtgcgggaccctcatgttcaagcactgcttcgcaaggagatgagtaccgagagagttgcatctagagaggaggctaagctagagcaactggtgctagactcgaacactccactgtatgatggttgcaatcctgaggtgacccgcttgagtttcatgctccaactcctgaagacgaaggctaaaaacanatggaccgacactagcctcgatgagcatctcaggtacctaaaggatg

SEQ ID NO: 888 - DNA, 437 bp, Triticum aestivum
  Clone ID: LIB103-020-Q1-E1-F12
accggtctacaattcccgggccgaaaccttctacaagcgtgccaagatcttgggcagcgctggggaccggcaagtcgcgagttcttacctcgaaggcgtcattctggcaaaccaagataaggataacttcctcgtgccttactttcccgagtaagtcctcccctcaaccgccccgtaacatatgaattcttagatttcgatcgtttttcttttaacattccgtgttttctgcagtgacacacattgcacgctcatcctcctaagccccaaatattccatggccacgtatttcgactcggaccgtcagtcgaacgtagactacacaaatgtcaagaaggttcttgatgatgttctccccggctacgtcaaatctggaggcaccttcaccaggcctattcgtaagtacggcaagcacgtgttctcccacaatacgacgt

SEQ ID NO: 889 - DNA, 462 bp, Triticum aestivum
  Clone ID: LIB103-020-Q1-E1-F2
tacgggtccagaattcccgggtcgacgctagcttcgacacagatctggatgactctaagtcacaaaccggatacgtgtatattttgaaaggtggggcagtaagctggtgcagttgcaagcaaaccgtccgtggcgggaatcaacatgttaagccggataaagggcagcctcgggaggcacacataaagcaatatgggtgaaggagttcaaccaccgacctaggagtcaataccaatgcgtcgggcccgataaagctcttctgtgacaacactggagctaatgcacttgccaaagaacccaagtttcaaaagaagaccaaggacaacaagcctcccctcaactccaatcgtgaaaatgttcaagaatgagacgtagagaattgtaaagtacatacggacctgaatataacagattcgttgaacaaacctctccctagagcaaaacatgatcaacaccagaatg

SEQ ID NO: 890 - DNA, 467 bp, Triticum aestivum
  Clone ID: LIB103-020-Q1-E1-F3
cgcctgcaggtacggctccagaattccagggtcgacggggcaaacggtggagttgatcccttggtgcttgcccaacacagccaagaggcacaaccagtggaaaggcctgtatgggaggttggactgggaaggcaacttccccacatccgtgacagatccccagccaatgggcaaggtcggcatgtgcttccaccctgatcaggacaggatcatcactgttcgtgaatgcgcccgatcccagggcttccctgatggataccatttcgctggcaacatccagagcaagcacaggcagatcgggaacgctgtgccgcctcccctctcctatgcgctagggaggaagctcaagcaagccatcgacgccaagcctcgactggcttaagttcactgcactgcatgatacaagtcccgtcattttttggttggtccgagtgggacttaattcatcattggcccctatatgtatg

SEQ ID NO: 891 - DNA, 423 bp, Triticum aestivum
  Clone ID: LIB103-020-Q1-E1-F4
attccagggtcgacggggaagaagaaatcagcgagacgtcaagtcaaccaagcccgccccaagcaatacgccgaagaattacaagccccggacaaagaattggttcaacttaaaccttaaggcccggttaaaggttggttccaagtcaatcctgaaggcaaactgccggttggtttcaaaaaccaaaggaacaaatgcaatgaaccaaagaacaaggaaattcttgcacctgttgcttttgaaacagatattcattggattgtccctgaaggttaacaaggcaacaatcaacatgctccgcagggtcaagccatatgttgcatatgggtacccgaacctgaatagtgtgagggagttgatctacaaaagaggttatggcaagctcaacaagcaaaggattcctttgaccaacaacaaagtcat

SEQ ID NO: 892 - DNA, 461 bp, Triticum aestivum
  Clone ID: LIB103-020-Q1-E1-F5
cgccgtcaggtaccggtctagaattcccgggccgacgggtttgttaactttcactaacggagcttatgagatttcctgttgagttttgtgttgtgaagttttcaagttttgggtaaagatttgatggactatggaataaggagtgccaaaagcttaagcttggggatgcccaaggcaccccaatatattcaagaatagccaaaagcctaagcttggggatgcccccggaaggcatcccctctttcgtctttgttcattggtaactttacctggagctatatttttattcgccacatgatatgtgttttgcttggagcgtcgtgtatgatattagtctttgctttttagtttacctaatcatccttgctgtaacacaccttttgggaggatcctacttggttgaaatttattagaatactctatgtgcttcacttatatcttttgagctagatagtttttgc

SEQ ID NO: 893 - DNA, 447 bp, Triticum aestivum
  Clone ID: LIB103-020-Q1-E1-F6
cggtcaggaattcccgggccgacgggcagtaaaactctgggacacggagaagtggcaacctattgccagccttcctgttccgcgtccagagggagctcaccccgataaaacaggcagcggcaagtttgttctttcagtggcctggagtccagatggcaagctcttagcatgtggatccatggatggcacgattgcggtgtatgatgcggtccgcatgaagttcctccaccacctggaggggcaccacatgccagtgaggtccatggtgttctcgccggtggacccccacgtgctcttgaccggatgtgacgactcccacatccacatctacgatgccaaggagaagggcctgatcggggccatgtcgggtcatgcgagctgggtgctgagcatcgacatgagcccggatggcatggcggtggcgacaggctccagcgaccgcaccgt

SEQ ID NO: 894 - DNA, 452 bp, Triticum aestivum
  unsure at all n locations
  Clone ID: LIB103-020-Q1-E1-F7
ggaaccggtctagaattcccgggtcgacgggctatatgaagaacatggtgctactttgaagcacaagtgtggtaaaaggatagtaacattgccccttctctctttttctctcatttttttgggccttctccttttttggcctttctctttttttcgtccggagtctcatcccgacttgtgggggaatcatagtatccatcatcctttcctcactgggacaatgctctaataatgaggatcatcacacttttatttacttacaactccatattacaactcgatgctagaacaaagatatgactctatatgaatgcctccagcggtgtactgggatgtgcaatgatctagcgtangaatggcataaaaacggacaagccatganaacatcatgctagctatcttacgattatgcaaagcaatatgacaatgaatgcccaagtcatatatatatg

SEQ ID NO: 895 - DNA, 116 bp, Triticum aestivum
  Clone ID: LIB103-020-Q1-E1-F9
taccggtcaggaattcccgggtcgactgggatcaagagaccgcgtgggaggccgagaaaggagagaccgccagaagaaatgtctacagaaactggagatgcaatgcctgctcctga

SEQ ID NO: 896 - DNA, 438 bp, Triticum aestivum
  unsure at all n locations
  Clone ID: LIB103-020-Q1-E1-G2
attccagggtcgacggggtataataaaaactttcatatagagtgcattttgttttgagaaataaagggggaaaaattaaagtcaggcaatttgggtaattgtggaaacttgtgttggatgtttgcaagtcccgtagcattaacatatggtaaactttgtgtgacaaatttgaaccatgaggtgttctttgattgccttcattaggtgtggaggtcgggatcgcgcgatggttaactcctaccaacccttcncctaagagcatgcgcgtagtgcttaattttgatggcttttagaattttgccataagtaagtgagttctttatgactaacgttgagtccaaggattatacacactctcacctttccatcattgctagcctcttcggtaacgtgcattgcctttctcaccttgagaattggcgcaaaaattgccggtgc

SEQ ID NO: 897 - DNA, 450 bp, Triticum aestivum
  Clone ID: LIB103-020-Q1-E1-G5
ccggtctagaattcccgggtcgacgggaaaatatatgtccatgcattggaagatttacaggctcaagcagaagttgctctatgcttctgctgtgtcaagcattagctgtaagcaacttgtccttttccccacgtgttccggagttggaactcgatgcaccattcagcttgcactgttaacaccatttttgaagatggatgtaactgacaaacacccctccagtagttgcagccttgctggaaggatggattcaggtgtgcatcctgacagtcactatcacttttgaagattgatgatgtacctgcaaacggcttcgttaattttaggaaggatggagtcgtgcatggactggatcctaaccgactgacatgaaaacttgaggctattacacggattcagcgttgaaacacggctttgaagtccgacgtgtgccttatgattttttgtggg

SEQ ID NO: 898 - DNA, 437 bp, Triticum aestivum
  Clone ID: LIB103-020-Q1-E1-G7
ccggtctagaattcccgggtcgacggggacaacatcaacaacaagctgcagcttgtcatgaagagcggcaagtacacgctcggctacaagaccgtcctcaggaccctcaggaactccaaggcaaagcttgtgatccttgctaacaactgccctccactccgcaagtctgagattgagtactatgctatgttggcgaagatcactgtccaccactaccatggaaacaatgttgatttgggaactgcgtgtggtaaatacttccgagtctgctgcctgagtatcatcgaccctggcgattccgacatcatcaacgcaacaccagctggccagtaaacctgtgcatgccattttcagtgtctcgtctgatgccattttcttgctggacttgatttggtcttgtgtacatcatttatcagtcaatcaagtttgatgggact

SEQ ID NO: 899 - DNA, 445 bp, Triticum aestivum
  Clone ID: LIB103-020-Q1-E1-G8
ggtcaggaattcccgggtcgacgggatgtgcttcacttatatcttttgagctagataatttttgctctagtgcttcacttatatcttttagagcacggcggtggcttaattttgtagaaattattaatctatcatgcttcacttatattattttgagagtctcttagaacaacatggtatttgctatggttataaaattggtcctagaatgatgggcatccaagttaggtataataaaaactatcagaggaagtgaattggatgctatgatcaatttgatacttgataattgttttgagatatggaggcagtgatattagagtcatgatagttgggtgattatgaatttaaagaatgcttgtgttgaagttggcaagtcatgtagcatacacgtatggtaaaagttgtgtaacaaatttgaaacatgaggtgttcttagattgtc

SEQ ID NO: 900 - DNA, 421 bp, Triticum aestivum
  Clone ID: LIB103-020-Q1-E1-G9
taccggtctagcattcccgggtcgacgggattcagttcccggtgggacgtatacacaggcagctcaagcagagggtctcggctaatggccgtgtgggtgccactgctgctgtgtactctgcagcaatccttgagtaccttactgccgaggtccttgagctggccggcaacgctagcaaggatctcaaggtgaagcgtatcacccctcgccacctgcagcttgcgatccgtggagatgaggagctggacaccctcatcaagggcaccatcgctggtggtggtgtcatccctcacatccacaagtcactcatcaacaagacctccaaggagtgaatgaaatgcaataacgggtagttgttgtgtgttgtatcttcgtgatcccttgttatgttgtgctatctgttacgtgttgctattatcac

SEQ ID NO: 901 - DNA, 393 bp, Triticum aestivum
  unsure at all n locations
  Clone ID: LIB103-020-Q1-E1-H2
attccagggtcgacgggggcggtttgttattcagaacatagtgctgtcaaatgtatcggtatgacaattgagacgagacctgattattgcctgnggcctcatttgcggcagatgctatcttatggatgtacccgcttagaaattggtgttcagagtacatatgaggatgttgcacgtgacacaaacagaggccacactgtagctgctgttgctgattgtttttcattagcaaaagatgctggttttaaggtggttgcgcacatgatgccagatttacctaatgttggagttgagagagatatggaaagtttcagagaattttttgaaaatccaacattccgagcagatggtctaaagatctatccaactcttgtgattcgtggaactggtcct

SEQ ID NO: 902 - DNA, 448 bp, Triticum aestivum
  Clone ID: LIB103-020-Q1-E1-H3
attccagggtcgacgggctagctacaagctatggacccgaaggttgaagtaaactactcacacttcatcggaagggctatggtgttgatgtagaagccctccgtgatggatgccctcgccaacagagctccggaacaagccccaagatgggatctcgtggatacaggaagttgcggcggtggaattaggttttttggctccctctttggtctaatgggggtacgtaggtatatataggaggaaggagaacgtcggtggagctccgaggggcccacgaggcatggggcgcgcccaggggggcgccctccaacctcgtgacctccctggaaacttcttggagtaaggtccaagtctcctggatcacgttcagtgagaagatcacgttcccgaacgtttcattccgtttggactccgtttcatattctgtttcctcgaaatactgaaatag

SEQ ID NO: 903 - DNA, 324 bp, Triticum aestivum
  Clone ID: LIB103-020-Q1-E1-H5
ggtctagaattcccgggccgacgggggccgccacctcgatccagctagcggttagggttcccgaaaccggcgaccatggcgaacgagcagccggcggagacctacacggtggaggagctcgtggcggtgaacccctacaaccccgacatcctcaacgacctcgaggtctttgtcaacgaccaggtttcttctaaaacatataacctggatgcaaatctcagccttcgacgcctttaccagtttgagccagaaaggttgagcgtgcaaattgtagcccgcatattgattaaagctctcatggcaatgccggcccccgacttcagc

SEQ ID NO: 904 - DNA, 444 bp, Triticum aestivum
  Clone ID: LIB103-020-Q1-E1-H6
cccgggtcgacggtggcgtcaggctcctggactccaacatctggttgagacaaccagatagaaaggaaagggggaaaaagagggagagaagcaaccgtgagtactcatccaaagtactcgcaagcaaggaactacactacatatgcatgggtatatgagtaaagaggcatatcagtggactgaactgcagaatgccggaataagaggggggataactagtcctgtcgaagactaagcttctggacatctccatcttgcagcatgtacaagagagtagattggagtcctccaagtagcatcgcatagcataaacctacccggcaatcccctcctcgtcgccctgttagagagcgatcaccgggttgtatctggcacttggaacggtgtattttattcagtatccagttctagttgtcataaactcacggtacaactccgggtcgt

SEQ ID NO: 905 - DNA, 432 bp, Triticum aestivum
  Clone ID: LIB103-020-Q1-E1-H7
aaccggtctagaattcccgggccgacgggagaaagtatgtagtagattgagtaagtagatcacaaataaaataaagtgcagcaatatattttggggtttctgaattaatagatctgaaaataaaagcaaaggaaaaatagatcataaaggcaaatatatgagaaagaagaccagagggccgtaggtttcactagtggcttctctcgagaaaaatagcaaacggtgggtaaacaaattactgttgggtaattgatagaactccaaatactcgtgacaatatccaagcaataatcattatataggcatcacgtccaagattagtagaccgactcctgcctgcatctactactatcactccacacatcgaccgctatccaacatgcaccaattgtataaagttcatggagaaatggattaatgcaataagaacga

SEQ ID NO: 906 - DNA, 503 bp, Triticum aestivum
  unsure at all n locations
  Clone ID: LIB103-021-Q1-E1-A11
ggtccggtactcncgggtcgaccggccatgccccgatagcagccacagggctttggaaggcgcgaatcccgcctaagattaaggtcttcctatggcaactatgccaagatcgccttcctacctctatcaatatagccaagcgcaatggccctgcttccggtccttgcgctttgtgtgatgatgcggaagatgctgaccacgtgttcttccggtgtcctttggtgcgctttgcttggagcgcggtccgtgaggccgctggggtggattaggatccacgctcacgctctgagcttgtgtcatacctatcgtcgatccagggccctctgcgccgggtcatgtggacgtctgcttcggccatgttatgggccttatggcatattcgtaacaagtttactattgagggagtgtttccccctcactccgctgatgtaatcttcaaatgcatcttattcttgcagcagtgggcaacgctgggaaggcaacaggagtctgatcttcatcac

SEQ ID NO: 907 - DNA, 497 bp, Triticum aestivum
  unsure at all n locations
  Clone ID: LIB103-021-Q1-E1-A12
cctggacgtaccggtccggaattcncgggtcgacggggggagggactccgagatcgccatgggcgcattccagccgcaccacctgaacaccaaaggccaggttgccagagggcaggtccatggcttccggatgtcgctgtggtatgagcacctcggcatgctgcacaatgacttcctcaacccgggaagccgggagtgcgtccagagggtgaacaagatggctgacaagtactgggacctctatgccagtgatgagctgaacgacgacctccccgggcaccttctcacctacccggttgccgtgacgaaggacggcacggtgacagagctgcccggcgcgaggtgcttccccgacacggctgctccggtgctcggaatcaaatccaaacacctgccccctattctcaccacatanggtgcatttgcagagttgcaatctatacaatgctagatgctgcttctggatataggatgcattttcagcagtgtaagcttgt

SEQ ID NO: 908 - DNA, 452 bp, Triticum aestivum
  unsure at all n locations
  Clone ID: LIB103-021-Q1-E1-A4
cggtccagaatatcccgggtcgacgggcggcggcttcatccacgctccggtcccatgagtcgagtcgaaagtagtgatgctatgtgtagttctgaaacattgattagctcatgttgtaattatactttaatgaacttgtatgtctctttggtttggacagtcgttcaatttagatgtaatcgatgctatttattagtaggaccatgaatcgtgctattaatttcttgcttttctcttccgatccttttgttgcatacttatatattgcttatgtattgtctgttgttcggctagtgcatagagatgccgtcgtatgtcgtgtacaagggtaaggttcccggagtctacgacgactgggaggagtgtcggagacaggttcaccgtttcagcggtaacagttacaaagggtacaccactanggcggaggcagaatctagatacacgcgctatct

SEQ ID NO: 909 - DNA, 448 bp, Triticum aestivum
  Clone ID: LIB103-021-Q1-E1-A6
gtaccggtccagaattcccgggtcgaccggcgcaaggaggcgccgagttagtcatgggcgcagtggtgttgaagtagtggtgcatcgagaagaaggcgttgtttatgaaggcatgtgtcagtgtttccagcatcgagcatgcatagacggatgatgacaaagttgacgaagcgccgcactagccttgccaggcacggggatacgtcatggacgaagggaaacatcggtattgctagcatcaagcatgtgtagatgtgggacttgcacgagctgtacgccttgttgaggagtcggagggccagtagagaagaagactcaataatggttgcggtgccaatcagcatggggccgatgtcgccattaatagtcggactagacgaagtggtcagggtagatgatggcgacgctggtgacaggctggtgctcgatgaagatgaaggggggttga

SEQ ID NO: 910 - DNA, 449 bp, Triticum aestivum
  Clone ID: LIB103-021-Q1-E1-A8
gtaccggtccagaattcccgggtcgacttcttctcccccggctgcggtggctgccgcgctctccaccccaagattgcgcagttcgctgagcggaatccggacgtgctgttcctgcaagtcaactacgagaagcacaagtccatgtgctacagcctccatgtccatgtcctccctttcttcaggttctacaggggagcccagggcagggtcagcagcttcagctgcacaaatgcaaccatcaagaagttcaaggacgccctcgcaaagcactcgccggacaggtgcagcctcggcccggcgcgggggctcgaggaggcggagctcttggctctggcggcaaacagggacctggaattcacctacaacgagaagccgacgctggtgccgatcgccgaggctatccagatggaagctgcctccattggcggcccatggatgccattggccgc

SEQ ID NO: 911 - DNA, 497 bp, Triticum aestivum
  unsure at all n locations
  Clone ID: LIB103-021-Q1-E1-B10
cctgggccgtacggtccggaattcncgggtcgaccggtataaggacaatgacagtggataataattgtcttatatatttaggaacataattgaaaaaagccacatgatgtaacgcccgaattacgcaagggcaaaagaagcgggaagacaatgatatggctcgctggtctctagtttcttgatgcgttgttgcaggccgcgggagctagtctctggggtgagcggcgatgagctctttcctgtcctcaatatgctacttgagagcgtccacggattcctccaccagccttttgcgcttcatgtgcagcacgacattctcgtccaaaagtttctcgacgatgacgttggtcctcttcaacaaggtagtggtctcctcctcctactccgcacttccgacgatcttcgccctcagcaggtcgcgctcggactggagcttctcattgctctcccttagttgccagatggcgccaatagcctgttcaaacgaggctttcatg

SEQ ID NO: 912 - DNA, 424 bp, Triticum aestivum
  Clone ID: LIB103-021-Q1-E1-B2
cggtccagaattcccgggtcgacggggtggtcgaacatgtttagcccactgggcggcttggacgcgcatgcacgaaggtacgcatcacgcacccgccacacgtgcatggcatgatgggccatcaagtggatgaggtgatcctgcacctcgtcacgatcgacgcactcgtgctctaaccagctcgcctgaccgcccatgtctctcacgcttcgacagaaacactatcgacacctcgaacatcattgtggaggacactataccgcttatgaagctccgtggactcacgctcatacacgccgagcattgtactccgctcatcctttagctcacggatctccacatcgttggcctcgagcttcatatccatgcgcagggattcctgtgtcaggcgcctcaactcagggaccgtggtctaatgggccaa

SEQ ID NO: 913 - DNA, 404 bp, Triticum aestivum
  Clone ID: LIB103-021-Q1-E1-B3
gggtcgacgggagggtgaacatttatttacagcaaaataaaaagttttattttattttcttattagttttgttttaggtataacaggagttctataatagatattggtttgattctttttgcacctagtttgtatgttgttttcctttatgttagttagtaaaaccattgttttggatctgtaaagaaaagtgttagtaggttaaaactacttctttgttgttgcttgatgtgatggaaaccttgattttgttttcctcgagttttctttgattttggtttgagtgcttgtgtgttttccttcagtttgctgatatgtcattagtgaaatacttatttgtgctattgtttgacttgatagaatttccggagtgcgaagcttgctatctcgagtcactagcgttt

SEQ ID NO: 914 - DNA, 434 bp, Triticum aestivum
  Clone ID: LIB103-021-Q1-E1-B4
ggtccagaatacccgggtcgacgggagattttcccgcccacctcaaaattttgtgacactggactccccgtgtggcgtgttgagtgattcggctaagcaactagcgagtagtagtagtaaactctgcatattaggtttgaccgaagtcaaacttcctaaagtttgaccaagtttatagaaaaatataaacatttaccataacaaatatgtatgatgtgaaagtacattcaataatgaatctaatggtatttatttgttattgtatatgttaatattttttgttataagctttctgagagtttacaaaacttgactttgaccaatgctaatacgcggacttaaataaaaacggagggagtacacatttgttttcttagtttttagtgaactaatcatttgttgaaattgtgaaataaatatattaggctattgac

SEQ ID NO: 915 - DNA, 454 bp, Triticum aestivum
  Clone ID: LIB103-021-Q1-E1-B5
taccagtccagaattcccgggtcgacttcttctcccccggctgcggtggctgccgcgctctccaccccaagattgcgcagttcgctgagcggaatccggacgtgctgttcctgcaagtcaactacgagaagcacaagtccatgtgctacagcctccatgtccatgtcctccctttcttcaggttctacaggggagcccagggcagggtcagcagcttcagctgcacaaatgcaaccatcaagaagttcaaggacgccctcgcaaagcactcgccggacaggtgcagcctcggcccggcgcgggggctcgaggaggcggagctcttggctctggcggcaaacagggacctggaattcacctacaacgagaagccgacgctggtgccgatcgccgaggctatccagatggaagctgcctccattggcggcccatggatgccattgcccgcgggcgc

SEQ ID NO: 916 - DNA, 455 bp, Triticum aestivum
  Clone ID: LIB103-021-Q1-E1-B7
gtaccggtccagaattcccgggtcgacgggcgagttttggatttactagaacttaaaaaccagacatctcaatgtattacgggcaatcaatggtgccccggtgtttgaaattcattcccgtttattgcatgggacctaagcatgcacccaaggacacaaatttgatttttcgaccaatttatatgcactggagcatgtgcatgtagttcaattttgaattatgcacataaaatgcattgaaaactcaattaatgcataaaaatgtccaaacgaaccccgaaaaatcacaaaaaatcacacaacactcctgttgttctatgttgacacgattaaaaatatttgaaagcaataagaggccatggatattgtctcatccacaaaggtggggcgttccgtaccgaaaaccatcatgcttgtcgtgagaagctccggtttgtgagaagtatatactcaaa

SEQ ID NO: 917 - DNA, 502 bp, Triticum aestivum
  Clone ID: LIB103-021-Q1-E1-B9
ggtccggaaatccgggtcgacggggatccatgcgcgccgaggacgtgggatgcatgggagggagttacttgccatcccggtaacaaagggcttgtgatcactcagctggatcttgcaagtcaaggactgaaaggcttcattgctgatgaaataagttatctgacagacttggtaagcttgaacttgagctctaattccttgaccggaagcttgccaccaggtttaggccaaccttcacttgcgacactggatctgtcctcgaaccagtttactgggagtattcctggcaccataggctcgtctaaattacagactgttctactaaacggcaatcaacttgatgggcaagttccagaaagactttattcagttggcgtgcatggtggcgtgatagatctgtcaggtaataaaggcctatgtggggtgcctaccctacctgcgtgtgcattattctgggagaaaggaggcttgaataaaaccggcaaaattgcacttggagcct

SEQ ID NO: 918 - DNA, 445 bp, Triticum aestivum
  Clone ID: LIB103-021-Q1-E1-C1
ggtccgagaatacccgggtcgacggggaagtcggccgccaaggagggcggcgacaagaagggcaagaagaaggccaagaagagcgtggagacgtacaagatctacatcttcaaggtgctgaagcaggtgcaccccgacatcggcatctcctccaaggccatgtccatcatgaactccttcatcaacgacatcttcgagaagctcgccggcgaggccgccaagctggcgcggtacaacaagaagccaaccatcacgtcccgggagatccagacctccgtccgcctcgtcctccccggcgagctcgccaagcacgccgtctccgagggcaccaaggctgtcaccaagttcacctcctcttaggctgttcgtcttcctgtgtctcgtagttagctgttcgggtgtgtttgtggccgtgttatcctgtaagaatcgcaccgcgatgttt

SEQ ID NO: 919 - DNA, 504 bp, Triticum aestivum
  unsure at all n locations
  Clone ID: LIB103-021-Q1-E1-C10
ggttgcctgggccgtacggtccggaattcncgggtcgacgggcggtcaagagaagccgaagtccatggcagccctcacggcactcatgacccccttttgcatgggcgaagacaacttgctagcctgtagcagtaatactacaagcgatcctggcacttctgaagctaagaataacaacggcaggccctgacgcaacaaacacaagcgccgcatcaataatgacaataccgaagacatggcggtcaacgccagatttagcggcactaggaccggtcagcggaagaagccattcaaaagaaatagagagggctcatccagcctggaccgaatactcgatcgaccctgccagattcatggcccctccgctaacctgtctatcatactaaccgaagttgttgggtctttaaacaggccgataagttaaatactgagcataacgagaaagggtcgccgagcgaggacgacgacgaggagcctcgtcaaccacacactgggggacagaag

SEQ ID NO: 920 - DNA, 497 bp, Triticum aestivum
  Clone ID: LIB103-021-Q1-E1-C11
cctgggcgtacggtccggaagtccgggtcgacgggacatcaaatcaccaaacattttactggatcagtccatgcatgctagggttgccgactttggattgtcaagagaagaaatgcttactagaaacggggccaacatacgtggaacttacggatatcttgatccggagtacgtgtcctcacgatcattcacaaagaagagtgatgtgtacagctacggtgttctgctatttgaacttattgctggcagaaaccctcaacaaggtctaatggaatatgttgagcttgctgcaatcaacgctgatggcaagactgggtgggaggaaattgccgactctcggctagaaggcgcatttgatgtggaggagctcaatgacatggctgccgcggcttacaaatgtgtaagccgtgtctcccgaaagcgaccgtcgatgcgagatgttgtccaggcactgatccgggtggtgaaacacagccacagcagcaggaatcatcatg

SEQ ID NO: 921 - DNA, 499 bp, Triticum aestivum
  Clone ID: LIB103-021-Q1-E1-C12
cggtccggaattccgggtcgacgggtggcgatggacacgtgcaggaggacgacgttggcgtcgcggtggtgtcgatggcagagaggcctggcaacgtgcgcatgtggtgcccattgaaagtgcgccagaccggtgtgtaacccagttcaagtattgtggcttggatggggcatccggcattagttgtgaggtgttggtgcaatgtctgtttggtattaggcttggacattcgtcaccccttcatcacgggtctaggagtagcaacatgtattgtcaagatggtggcttcaggcttactgatgtattaccttataacgactttatgaataattaataaaatggctgcatgcatcgcccagatgcagatgcagaggcaggggccagggggtatatcctccttttcaaaaataaaataaaattaaaacctttggtcaactcatttgcttagttatgtttgtctcatgggagggaaccgcgcgtgcaactggcggttcactcg

SEQ ID NO: 922 - DNA, 439 bp, Triticum aestivum
  Clone ID: LIB103-021-Q1-E1-C2
tcacggtccagaattcccgggtcgacgggaaggccgcgcatggagagagccgagacaagatggccaagatggccatagaattaaaagccgccgctgatcattgccgggttcttgaaaaggaaaaccaagtgaaggcatcagaccttgagaaggctgctacgacgagaaaggacctccgctctgctatgagggcaaaggaggagctgcgggaagccggggatattgtagctgggaaatcctttatgttgtggaggatgttcggagatccacggtatgcccctctagatcgactatggagttcgtaggatgtatatatggatttggcggtgagcgctgccgatgcggccaagtatttccagggtcagacggaccgtgaagtagaccatctgttttggagacaatatcattcgcccgagcgtccgctttcattgactgacca

SEQ ID NO: 923 - DNA, 445 bp, Triticum aestivum
  Clone ID: LIB103-021-Q1-E1-C6
gtaccgatccagaattcccgggtcgactacattacacttcaccatatttgggcctaagggaacgcattgtggagtagcaattagatgatgggttgcgagagtgacagaagcttaaaccccagtttatgcgctattccgtaagggaccgattgaatccaaaagtttaatgctatggttagaatttattcttaatacttttctcgtagttgcggatgcttgtgggagggttaatcataagtaggaggcttgttcaagtaagaacaacacctaagcaccggtccacccacatatcaaattatcaaagtagcgaacaaaatcaaaccaacatggtgaaagtgactagatgaaaatcgcatgtaccctcaagaacactttgcttatcataagacaccattttggcctgtcctttgcctcaaaaggattgggataccttgctgcacatttg

SEQ ID NO: 924 - DNA, 451 bp, Triticum aestivum
  Clone ID: LIB103-021-Q1-E1-C7
gtaccggtccagaattcccgggtcgacggggtcattttattttcttttgttttgcttgctgtttgaataaaataccaagagctgaaattattaaatgttagagagtcttcacatagttgcataattattcgactattcattgatcttcacttatatcttttggagtagtttgtcatttgctctagtgcttcacttgtatctttttagagcgcgatggtagttttattttgaagaaatagatgaattctcatgcttcacttatattattttgagagtcataaacatcatggtaatttgctttggttatgaatttagtcctaatatgatgggcatcgaagagggatataataaaaactttcatataaagtgaattgaatactatgagaagtttgatacttcataattgttttgagatataaaggtggtaatattagagttgtgttagttgagt

SEQ ID NO: 925 - DNA, 444 bp, Triticum aestivum
  Clone ID: LIB103-021-Q1-E1-C8
gtacggtcaacaattcccgggtcgacggggggcaagagcgccgtgtagaagggttccaagggcccaaagattggcggtggcggcgggaagcgttgaaagttgattacgccatagacatagagttgtgctgcctagccttgtttcctatcctactatcatagacctttgtcaagttattaccccgccctcttgaatttgcaccttatctctgaggctgaatggtgttaacgttttggattgtcttgatgagtttatttataatgaatggttcttatgttggttcttaaaaaaaaaaaaaaaaaaaaaaaaaaaaaaaaaaaaaaaaaaaaaaaaaaaaaaaaaaaaaaaaaaaaaaaaaaaaaaaaaaaaaaaaaaaaaaaaaaaacaaaaggataaaaaaaaaaaaaaaaaataaataaaaaaaaaaggggcgcccccaagggg

SEQ ID NO: 926 - DNA, 521 bp, Triticum aestivum
  unsure at all n locations
  Clone ID: LIB103-021-Q1-E1-C9
cctggacgtaccggtccggtatntccgggtcgacgggccgcaacaagattgcactcaaaaacagatctgacgagaaaacagcgaacgaaaaagagggcgaataaaacagcaaatttttgtgaagtggggagaggaaaatgagtggcaaatggaaaataatgtgaattgcaaggagatgagatttgtgattaggaacctggtagatgttgatgatgtctccccggcaacggcaccagaaattccttttgatgtttgcttgaactacgtcggtatttccccaaagaggaagggatgatgcatcacaacaacggtaggtatttccctcagtgatgagaccaaggttatcgaaccagtagaagaaccacacaacaccacataaacagctcctgcatacaaagaacaaatacttgcaacccgacgtaagagaggggttgtcaatccctcacgggtaaaaagatagataaaattgtagtagattggataaatagatctcgcgggaacgtgagataaaataaataaca

SEQ ID NO: 927 - DNA, 449 bp, Triticum aestivum
  Clone ID: LIB103-021-Q1-E1-D1
ggtccagaatacccgggtcgacgggaatgttactgtctacaaagctcgacttgtcgcaaagggttttcgacaagttcaagggattgactatgatgagaccttctcacccgtagcgatgcttaagtctgtccaaatcatgttagcaattgccgcattttatgattatgaaatttggcaaatggatgttaaaactgcattcctgaatgggtttctggaagaagagttgtatatgatgcaaccagaaggttttatcgatccaaagggagctaacaaagtatgcaagctccagcgatccatttatggactggtgcaagcatctcggagttggaataaacgttttgatagtgtgatcaaagcatttgggtttatacagacttttggagaagcctgtatttacaagaaagtgagtgggagctctgtagcatttctgagattatatgtggatgaca

SEQ ID NO: 928 - DNA, 508 bp, Triticum aestivum
  unsure at all n locations
  Clone ID: LIB103-021-Q1-E1-D10
taccggtccggaattcncgggtcgacggggaggaggtggcggctgcgaggagatgaggaaggaggagtgcgatgggaggagttagggtttggttggtcgggctgcgggtgggggtgggggttaccctttttcttttcttttttcttttttctgaagatagatggatggatggacgtgggatggagagatggatggatggatggggccatgtcatcgatccgtgtgacagctaattccaccaatgagaatagagcacgtgtaaatatgtttttcctttagtttttttctaatttttcatatgaaaaattcaaaaaatgatctcatattatacacaggggtgcattttgtaatggcaaacagtgttgcctaaggaagtttttattttctatccacgaaaaattcatttcccatttttcgagtgcccaaagtgagtttttttgtgaaggggactacatacatttgttgcaaatttgtaccaaatctattttccaatatactaggacatatt

SEQ ID NO: 929 - DNA, 438 bp, Triticum aestivum
  Clone ID: LIB103-021-Q1-E1-D4
cgggtcgaccggggtaaagccaatgattagaggcatcggggacgcaaccattatgtgcatgtgcagatatctgagtggaacttcattttttttccagttcaacttttgaatgtgtttcagttcgtctacttcccggtcgtcctgagctggagaattgctgctactgtttatgtgtttgcaaatttttgaaaacaagcttcagtacaagaaaaatgggtggtcagtccagctcctgcaaccaacacaggtcgttgccccttttgccacaacggtagcagcacaaacattagtgtggtcatcctcaaccagtttctcacgcggcctccccgcaagccctgctcatgatcaggataacctcgataggttacacatgttgctcacgaagctgataggttccacatgttgcccaggagtatacccgtatggagcggagatgac

SEQ ID NO: 930 - DNA, 376 bp, Triticum aestivum
  Clone ID: LIB103-021-Q1-E1-D7
gtaccggtccagaattcccgggtcgacgaggattcaaagctgagccacgaaatcggtttggagttgagcaagatgagtgcttccgccggattaagaccaattggagcagtggtctttatgcaacgtggactgctgaagatttgcttgaggactacagacaatacaaccaacacagcagagatcgccaaggcatatggcggaggtggaaaggcgagctcaagttctttcgcactaaggatggacgagttcaacgcctggattagggagaacacatgaaccggcctggaatgctggatggcaatctggtgtatcatatcgtaacatgcgtgcatgcctagttgcgaggaagatgtgaaaaatgagcagctgatgttgg

SEQ ID NO: 931 - DNA, 457 bp, Triticum aestivum
  Clone ID: LIB103-021-Q1-E1-D8
gtaccgatccagaattcccgggtcgacgggtttcaattgacagcttattttcattcaagcaaacatgtccgacgcttggtagacatgaccgtgcattgtcccggggctgaactaaactgcgaggagattggtcattatgattcatggcttgaggatcttcatactgtcaagacaaattattttcctggacttaaaaatcttagtactcaaaacgtgcgaccgatagtgttcgtattgaactatggtcacatctatttaggaaagatggtaaaatgtttaatatttgtccgcagtgcatcttttgcatacattattttttaagctaaacttcattgctaagtatgttaatatacgatgttcttcaacagggactcccgatgaatgttgtgcctcattggatcgagactaaaggtcgcatgagaatggttaacttacgaccaagatatcctacaatgca

SEQ ID NO: 932 - DNA, 505 bp, Triticum aestivum
  unsure at all n locations
  Clone ID: LIB103-021-Q1-E1-D9
cggtccggtactcncgggtcgaccgggattgtgtccttacggacagcccaggacagcaacggggtgcttaactcgtgggcgtcgaacctggagaagctgctggacctggtggagaagagctgccaccaaatacacaaggagacgatgatccacaaggcggtgctgaaagcctgaagtgaaccattttgaattgaatgtggccttgtttaggttgtgtgcgtagtagactttctctatggatctgaattcactttcactgtatgggtaaaactattctctctgctcaggtgggcatcgcctgtttgctttgggaactcgtgtgcgaaccggtctcgaaatactgtaaccacagggaatgacgaatgctatttgctgtatttttctgaacattagttgtattctttggcatcaactcttgctgaacctggatgtatctgctcatcagagcgtagagccagtttctgaatgatttgctgggagacgcgcttgttccgttttgagtggt

SEQ ID NO: 933 - DNA, 457 bp, Triticum aestivum
  Clone ID: LIB103-021-Q1-E1-E1
ggtccagaatatccgggtcgacaccgtcatcgccgtcatcaaagagtctgtgaagacattcacatatgagacattgaacaacattgcgagattgataaatggaatatcagcactcttgttgacactgttacctggaaaagccaacattttggaaggggtcagtggctgggaacttaggccagcatttcgcgggccacgtcttcctcgttggatggaaagtggggtctcttcatttaacgagttcattcacgaactttctgccgattcggagtctgaatcaattgctggctctgtccctggggatgatgacaatgaagagtttgtctgccctccttctccgttgtcccaaagttcacgattgtcacacacaagcagctttggtagacatgaccgtcgattgagaaggcctatcaaatatgcagtttcctggattaattgggctgtgaaaaatttccct

SEQ ID NO: 934 - DNA, 506 bp, Triticum aestivum
  unsure at all n locations
  Clone ID: LIB103-021-Q1-E1-E10
ccggtccggaattcncgggtcgacgggaagggggttgacaagaaggggtggctgcgtggcaacgcaaagctaccaaagcaggttcctgctactgaggagcagaagtggctcattgagcccacgggaaaagagtaagtggttcattattttgcttgtcacatgcttattccggttgttatttattttgcttgtcacatgctaatagttcattcttttgcagcaactggatatattctaaaggggtccgtattcccaacggcctcatcaccgtcttgctgaagttatattggccggggttgtactgtcctgatccagtcaggcagccggaccgtcaggttttggtcacgagctgggaccactgggaagcggcccgccacgcggaccatgagacccatgccaaggccgtgatcactactttctgggtgagttctcttcagaagcacaagttcattctagtttcatgaatgagttaactcatggcttcttccattcctgtttcatgcatg

SEQ ID NO: 935 - DNA, 505 bp, Triticum aestivum
  Clone ID: LIB103-021-Q1-E1-E11
cggtccggaaattccgggtcgacgggtatttcataacttaataatcgtagctccaaatttaataaactttatatgtaaatggggtagaaaatgcctagtttaacatggtgcactttattttcttgtttaacaacaataaaatgtggtttagggcagaacattaccaaattgataatatgcatatggggattttccggaattgttgtttgtccccggcctcatttaaacttgactagatagttagtttacttatgcttcacctcttgccatgtttaataacattgaatattgttgagtgcataaacaggagaggactaaataagtcatgtggtgtttcgtcaatatgcaactcgttgcatattgagctccacttaacttgtagttttgtttgtgcactttgccatgccatgtttcattaaatcaggcatggatcatacttggttgtgcatcatgccatgtttatgtgatggttgtttactatgttgcttgcttcctttcgggttgc

SEQ ID NO: 936 - DNA, 486 bp, Triticum aestivum
  unsure at all n locations
  Clone ID: LIB103-021-Q1-E1-E12
ggttgcctgggccgtacggtccggtattcncgggtcgacggggcttgatagagggtcagtgctcgaagaatattatgttcgagtaaagtgtatcataattgtaacaacaatattatgatatgtttaaggctatgtttttatacttctccccgaaaagtttcggtcgtcggcttcagccccctcgcgtataacacgggggtgtttggaaaagcacttgatcacacttgacccaacgtcttggtccgttaaggaggtgttagtgcggcaaactaggcaatcgaactatagagctttaacactttcacttagccatatgagtttgacagtggggctactatatagcccctggtatgtccgtggttattcaaatacggtgcgtatacatacgtgaccagaaggacggtccttcgcttaacacgaagggaatcgcgaagattctgatgagtcatcgagtggttgactagctctcaccgcatcatgacagtc

SEQ ID NO: 937 - DNA, 446 bp, Triticum aestivum
  Clone ID: LIB103-021-Q1-E1-E2
ggtccagaaatcccgggtcgacgggatgtgtcccctattaaatctttgttttgcaatattaatattgatgaaactgaatatgatcttcctttacctagaaggcgttctaaaaattcggagtatttagatcttaatgatgaaattgatgaaagtggaattgaaagaaataaaaatctagatgttgctaaacccactatattggatttcaaggaatttaattatgaaagttgctctttaattgattgtatttccttgttgcaatccatgctaaattttccacatgcttatagtcaaaataaagccttcaccgaacatattgttgatgccctgatgtaatcttatgaagaaaaacttgagttgaaagtttctatccctagaaaactctatgatgagtgggaaccaactattaaaattaaaattaaagatcatgagttttatgctttgtg

SEQ ID NO: 938 - DNA, 437 bp, Triticum aestivum
  Clone ID: LIB103-021-Q1-E1-E5
gtaccggtctagaattcccgggtcgacggggaagaatttggaggccatggcgcgctgcttcaggaggggatgtttgcatctttcacccttttcctgctttcatggattcttgtgtacagtttggctcacttttgatgagaagctcctttgttgaacataccgtgatatgggatcggattggcggaaaaaaattcaccagaactctgtagattattgaagagccctagaacagcattgtatggaatcggttcaggcagtcatgttgtctctgaatcccagtgtaattttgatagaacatcttagcataccagttgttggcagaacatgttcagtatgcttgacatgtaactattggatatcattctcttatgtcgattcaataaaatgttttaacatgaaaaaaaaaaaaaaaaaaaaaaaaaaaaagcggccgctct

SEQ ID NO: 939 - DNA, 204 bp, Triticum aestivum
  Clone ID: LIB103-021-Q1-E1-E6
gtaccgatccagaattcccgggtcgacggggaaaaaaaaaaaaacaaaaaaaaaaaaaaaaaaaaaaaaaaaaaaaaaaaaaaaaaaaaaaccaaaaaaaaaaaaaaaaaaaaaaaaaaaaaagcggccgccctaaaggttcaaagcttacttacccgtgcatgcaacgtcataccccttcaatagtgtcaccaaaattcaatt

SEQ ID NO: 940 - DNA, 427 bp, Triticum aestivum
  Clone ID: LIB103-021-Q1-E1-E7
gtaccgatctagaattcccgggtcgacggggtttgtaatagatgcaacgatggtgctgagcatacttattgtatgcgggtaatgatggaaaaggttccggatggtgattggttttgtgaagagtgccaaactgaagtagaatttgaaaaggagaagttagaaaaacctcaggtgaagcttgtcacttcaaaggaagaatctgttcaagggaaaattagtaaacctttcaatgatgcaaacagcagaagtccttgtgagaatgaagtggaggatgaaactgttggcagaaaagaacggaatgaagcaaatcaaggcattgatatggttgaagatgcaaagattccgcctgtggctaaacaaaatattcctgaacccggtggtttatcaatggagtcttactccagaaaaggaatacctctgctatgcg

SEQ ID NO: 941 - DNA, 454 bp, Triticum aestivum
  Clone ID: LIB103-021-Q1-E1-E8
gtaccgagtccagaattcccgggtcgactacatggcacttcaccttattagggcctaagggaatgcattgtggagtagttattagatgattgattgcgagagtgacagaagcttaaaccctagtttatgggctacttcgtaagggattgatttggatccaaaagtttaatgctatggttagattttatcttaatacttttgtcgtagttgaagatgcttgtgagggggttaatcataagtaggaggtttcttcaagtaagaacaacacctaagcatcggtccacccacctatcatattattaaagtagcaaacccgaatcaaaccaacatgatgaaagtgactagatgaaattcccgtgtaccctcaagaacgttttccttatcataagagaccgttttggcctgtcctttgcctcaaaaggattgggccaccttgctacacttttgttaccgt

SEQ ID NO: 942 - DNA, 424 bp, Triticum aestivum
  Clone ID: LIB103-021-Q1-E1-F1
gggtcgacgggggcgttaaacgatagcgctagttgggaggcaacccaattttctttatgttttttttgtttttgctcctgtttagtaataaatcttgcatctaccttctgtttatatgtgtttttatcttttaattactgtttgtgccaagtagaacctataggataagctacgatgatagttgatttgattctgctaaaaaacagaaactttgcacgcacgaatataatttttttaaatcacaggaacgtgattttgcattgattctttttgctgctgttcaataaacaaattgtccaggacctcctatttttctaggatttttagagtttcaaaagtttgcgttagttacagattgctacagactgttctgtttttgacagattctgtttttcgtgtgttgtttgcttatttcaatgcattt

SEQ ID NO: 943 - DNA, 407 bp, Triticum aestivum
  Clone ID: LIB103-021-Q1-E1-F2
ccgggtcgaccggggcgccgctgcccaggggatcgacggcatcatgggcaaactcagtatggaaagcggcagcgatgcctcttccattaaccgcgtgctctccagctccggcatagacccctacatcagaaacctcatggtgctcggactcggcttccggcgctcccggtccaacatcaagcaggcgctcaagcggcacgacgatgacagcgaatggtggatgtgccctgccattccattgaaggacattatgccggtgcctcccccatcgatggaaccaccgccaccggtggagaagaagaatatggatacgaacatgaatgcgctgacggatatcgccgctgggccatgcattacatgtgttaatgatgaacttcctgaccctgcttatggcgatgatggaattt

SEQ ID NO: 944 - DNA, 452 bp, Triticum aestivum
  Clone ID: LIB103-021-Q1-E1-F6
aattcccgggtcgacggggatcccaatgatatgcctttgtcttctttgattgagaataataatgaatctatggacgtgaattttgttggtaggaatagttttggaaacaatgcttatagaggaaactttaatgctagaccgttccctagtaattcctctaataattatggaaattcctacaataattcttatggtaattttaataagatgccctctgattttgataatagtgtgaaacaatttatgatttctcaaaagaattttaatgccttgcttgaagaaaaattgctcaaagttgatgatttggctaggaacgttgatagaatttcgcttgattttgattatcttaaacttagaacttctcctcctaagcatgatatcaatgagtctctcaaagcaatgagaatttccattgatgagtgcatagaaagaaccgctagattgcgtgctaa

SEQ ID NO: 945 - DNA, 433 bp, Triticum aestivum
  Clone ID: LIB103-021-Q1-E1-F7
gtaccgatccagaattcccgggtcgacggggatgaggatggtgacttcgcggagggcgaagaggaaatctcggaaggagaggagtatgacaaccccaaggccagtgacgccaagaagaaacaaataggcgagggtgaggagaatggcgaggatgatgaggaagaacaagaggagcaggagggtggaggaggtgacgacgatgatgatgacgacgacaacgacgatgacaatgaggacgacgacgatgatgacgatgatgtcgctgctgaagacgatggagatggagtagaagaggaggatgatgacgatgaggaggaggacgatgaggacttgctccagcccccgaagaagaggaagaagtgaagcccttcgacgcggctgctttagtcaccatgcgacgagatgtgcctgtccttcactgtgttctggaaac

SEQ ID NO: 946 - DNA, 397 bp, Triticum aestivum
  Clone ID: LIB103-021-Q1-E1-F8
gggtcgacgggaggttcaaaggagagaagcgacggagttagaagttgtaaatatgcattgttgtatcgcgacctgaatgaatgaaataaacgaaataacgctcttgttcaaaaaaaaaaaaaaaaaaaaaaaaaaaaaaaaaaaaaaaaaaaaaaaaaaaaaaaaaaaaaaaaaaaaaaaaaaaaaaaaaaaaaaaaaaaaagcggccgcccaaaaggatcaaacctaacgtacccttgaatgaaacttcaaacccctccaaaagtgtcaccaaaattaaattaacgggccgtcgtttaaaaatatcctaactggaaaaaccctgcctttacccaactaaaccactttgaaaaaaatccccatttctcaacctggctaaaaatcaaaaaggcccaaa

SEQ ID NO: 947 - DNA, 497 bp, Triticum aestivum
  unsure at all n locations
  Clone ID: LIB103-021-Q1-E1-F9
cggtccggcactcncgggtcgaccggagaattagggccaagcagatgatgtctggtgatgaacttatgatgtctgcggaaggtcggagctttgtggatggtggcatgaaggagatagaagctggaggtggaggatacagaagaggggcaaatgatgacttcatggtttatggacaggacaactcaatggacaggaggagctccttggacccccttgccgaggcgcattacaagagacccactcctctagaggaaaagaagaatgtgcacagtatgggcgatgagtccttcatgatacctgttacctccaactcacaggataatcttggagcagccggccgtactgccattgacatagatgccgagcttggctcaagtgttcagaaaacatcagatgctaacgctggagctgaacttttctatgagccagatgagttgattccagagcgtggatttgaaaatgtttcatttggatatgacccatcaatggactatgac

SEQ ID NO: 948 - DNA, 445 bp, Triticum aestivum
  Clone ID: LIB103-021-Q1-E1-G5
gtaccgatccagaattcccgggtcgacgggctctaacatttccatcattgctagcctcttcagtatcgtgcattgtgctttcgcaccttgggatttggtgcaaacttcgcaggtgcatccatctcccgtgataatcatagattctatcacagatttacctcgttatatcttcctcatgacagccatcatacctacctagtatggcatttccatagtcattccgagatatattgccatgcaactttccactgttccgtctgctatcatgacacgcatcattattgtcttattgccttgcatgatcatgtcattgagatcatatttgtggcaaagccaccatgcataatttttcgtacatgtcactcatgattcattgcccatctcggtataccgtcagaagcattcatatagaatcatatcgtgttcaagttttgggttgtaattc

SEQ ID NO: 949 - DNA, 409 bp, Triticum aestivum
  unsure at all n locations
  Clone ID: LIB103-021-Q1-E1-G6
attgncgggtcgacgggtgctcaacgatgttgataagctcatcaggaggaaccgcaggaacgacctcttggtcgctggtgctggcttaagttttggagggattgtcatgtcatatttggctcgactcaccagtcgaagtgatgactggctcaccaagtgaaatgatgaatgtaaatctatcctgcactgcaagtttaactgtctatcctgcactgcatctttaactggccagttgtatgattcctggcttgtcttgtgtgagagcactctatatatgatgagggttctatgttcggtggaatctacttgtgatgagaatctaagttctgtgatggcatgtgagatgtaagagcactcatataattatgtggatcctatatataaccgggtgatttatctattgtgttct

SEQ ID NO: 950 - DNA, 420 bp, Triticum aestivum
  unsure at all n locations
  Clone ID: LIB103-021-Q1-E1-G8
attgncgggtcgacgggttgattattttgatgaatctatggctagtaaaatagtttataaaccatagagaagttggaatacagtaagtttaacaccaatataaataaataatgagttcaatacagtaccttgaagtggtgttttgttttctttcgctaacggagctcacgagattttctgttgagttttgtgttgtgaagttttcaagttttgggtaaagatttgatggattatagaacaaggagtggcaagatcctaagcttgaggatgcccatggcaccccaagataatctaaggacaccaaaaatccaaagcttggggatgccccggaaggcatcccctctttcgtcttcgtccatcggtaactttatttggagctatatttttattcaccacatggtatgtgttttgcttggagag

SEQ ID NO: 951 - DNA, 473 bp, Triticum aestivum
  unsure at all n locations
  Clone ID: LIB103-021-Q1-E1-G9
ccggtccggaactcncgggtcgacctcttctcccccggcagcggtggctgccgcgctctccaccccaagattgcgcagttcgctgagcggaatccggacgtgctgttcctgcaagtcaactacgagaagcacaagtccatgtgctacagcctccatgtccatgtcctccctttcttcaggttctacaggggagcccagggcagggtcagcagcttcagctgcacaaatgcaaccatcaagaagttcaaggacgccctcgcaaagcacccgccggacaggtgcagcctcggcccggcgcgggggctcgaagatgcggagctcttggctctggcggcaaacagggacctggaattcacctacaacgagaagccgacgctggtgccgatcgccgaggctatccagatggaagctgcctccattggcggcccatggatgccattgcccgcggccgcgacgcagccgctcactctggg

SEQ ID NO: 952 - DNA, 484 bp, Triticum aestivum
  Clone ID: LIB103-021-Q1-E1-H10
accggtccggtactccgggtcgacgggagaagggtctaaggtacctagggtttatggcgtctcgttgtttttgcaagctagcatgtgactccgggatgcctgttttaagattaagatttcgcttgtgttgagagatattattatttactgcttgtagcctacctgggataccatcatattttgctgattatggaacagcttttatcctgcttaaaaaaaaaaaaaaaaaaaaaaaaaaaaaagacagaaagcaaaaagaataaaaaaaaaaaaaaaaaatacaaaaaaaatcaaaacccccaaaacaaaaacaacgaaaaacaaaaaaaaaagggggcgccccaaaggtttcaaactttatttcccctggagggaaatttaaaccccctccaagggggcccccaaatttaattcaagggggctttttttaaaaaatgcggacggggaaaaccctgtgtttacccaatttaacccccttggaaaa

SEQ ID NO: 953 - DNA, 482 bp, Triticum aestivum
  unsure at all n locations
  Clone ID: LIB103-021-Q1-E1-H12
cggtccggtagtcncgggtcgacggggaaaggaaatcaaacatgttggatgatccatgacaatataactttttagatataagaaaacataactcattacgttgtcttccttgtccaacatcaaccttttagcacgtcatattttaatgagtgctcacaattaaaaaaggtttccaagatagtatatttatatgtgaaaacctctctttctttcttacttcctactaattgcaacaatgaccaaaactatgttagtcaactctcaacaacttttattcatcatactgtttatatgtgaagtcattactctccataagatcaatatgatctttttatttctttttattctctctttaataccctcaagatcatagcaagatagcaaagccctcaactcaaaactactctttattatataactcacggactcgattacatagatagagataaaacaaaactcaaagctagatcatactaaaactt

SEQ ID NO: 954 - DNA, 428 bp, Triticum aestivum
  Clone ID: LIB103-021-Q1-E1-H5
attcgcgggtcgacgggaggtccaaagaattttgcagaccaaaactttattcaagaacctgtatagagttttcccctcagacccccggcatgtaaaatggcattggtgattatggtaccctctgtaagattacgtgttgatgtatcaatcaaattggattgaatacaattttttattcggtatcgcctttattcatagactatgttctgtcttttcagttgtctcatgcaaacacctcggcacaaattgctaggggctctatatggcaacataggtattgccaaacaaaagtccgaacaacttttcagcacaattcggcatcccgagcttggcactatatgcaccacctctgaatcatgtctttggtcaatagttgggttgcccggctcctgtgtttgctaccttacgttccgtctgtcggctatggt

SEQ ID NO: 955 - DNA, 371 bp, Triticum aestivum
  Clone ID: LIB103-021-Q1-E1-H6
cctgcctgtctacttagtttaacagctgtagctttgttgccagataaaatggtgaactttgcgtaaaaaaaaaaaaaaaaaaaaaaaaaaaaaaaaaaaaaaaaaaaaaaaaaaaaaaaaaccaaaaaaaaaaaaaaaaaaaaaaaaaaaaaaggggccgcccaaaaggatcaaagctaacttacccttgaaggcaacgtaaaaccccttcaaaagggtcaccaaaattcaattaacgggccgtcgtttaaaaacgtcttaacgggaaaaaccctggggtaaccaaattaaaccgccttgaaaaaaatccccctttcgcaagcaggggtaaaagcaaaaaggcccaaaccgttggcccttccaaaaatttg

SEQ ID NO: 956 - DNA, 448 bp, Triticum aestivum
  Clone ID: LIB103-021-Q1-E1-H7
gtaccgagtctagaattcccgggtcgacggggacgacgacgtggatgtggacgagtcggatagaaagctcttagatgatgaaaagaaacccgatatcacgaaacgaccacacactcctattggagatgaggtggaatgcaagaagccaaagatagcagaaggctcaaggtgccaaggagaagaacctgaggctggagggataaagaattcctcctgggtctgatgacaggggaatgcagtaaacaccagaagcatcaaaactatgatctggaacagtatcctgaataaactattttctggattatgaatgaattctgaagcatggggctataagtgaattatgtaacatggatttgtaactatggtggatgttaagttaacgttctatcagtgcatcgtgaatgcgtgctgaatatgcttctgttatggtttcgtaacttcgagactg

SEQ ID NO: 957 - DNA, 410 bp, Triticum aestivum
  unsure at all n locations
  Clone ID: LIB103-021-Q1-E1-H8
gacggggtccactatgggtgagccactcttaggcacatcttcacaagtccattgacaccacaatggatggcaagattcaagcatgtgatctcttcgtgatgctccatgtcggtgtcaaaaccggcggatctcgggtagggggtcccgaactgtgcgtctaggcggatggtaacaggagacaagggacacgatgttttacccaggttcgggccctcttgatggaggtaaaaccctacatcctgcttgattgatattgatgatgtggatgttacaagagttgatctaccacgagatcggagaggctaaaccctagaagctagcctatggtatgattgtatgttgtcctatggacgaaaaccctccggtttatatagacaccggaggggagaaaaattnntcatntttttaag

SEQ ID NO: 958 - DNA, 414 bp, Triticum aestivum
  Clone ID: LIB103-022-Q1-E1-A1
taccggtctagaattcacgggccgacggggaccgaagccaacgaccgagcgaaccctagactccgagcgcacgaggagagagagatggagatctccatgtcgcggtcatggcgatgcgcgcgctgtacaacgagatccgcgcgaggaatgtgcgcgatgtgccggcgtacctcaaaccgcgcctcacctgggagaacgtgatagaagagcaccgaccatgcggtggaccgctacatcgagaagtacatcgagaccagctcggttgacccgctcttccacgtctgcttcggcggcatgggcttcgcctacctcgtgggcctgccccaggagcgccgccacctcgagcacctcgagaagcacggcggccactagatccggattcgcctcgcgcaggagagcttatctacggttgat

SEQ ID NO: 959 - DNA, 433 bp, Triticum aestivum
  Clone ID: LIB103-022-Q1-E1-A10
ttcgcgggtcgacggggagctgaaactgctggtcttttacttcgagaattggaactgcaacctccttctgaaaaatggcatagacgcaacatgtttggaggaccctggtcagaaccagatgatctcggtcgcattggataatatgccacatctgaaaataggtggtcatatcaaccctcacttgtctgacatggaagaggagggtaaaactaactttgggattcaaagtctttggccaagaaagcgccggttgtctgaaagagatgcagcatttggtctgaaaacatctgtaggtcatggagcttatcttggcgtgatggggtctcgacgagatgtcatcacagccgtgtggaaaacaagacttgatggtgaatggtataagtgcatacgatgtctgcggcaaacttgtgcatttgcacagcctggtgcccca

SEQ ID NO: 960 - DNA, 440 bp, Triticum aestivum
  Clone ID: LIB103-022-Q1-E1-A12
gtacggtccagaattcccgggtcgacgccaccacggaaggccgggtggccgactggatctatgccatctccatgggcctcgccacgggcatctttgtctacgtctccatcaaccacctcctcgccaaggggtacatgctacagaggcccgtcgccgccgacacgcccgtcggccggtggctctccgtcgtgcttggcgtcggtgtcatcgcagtcgtcatgatatggaacgcctgatcctgaattcgtgattcatgagaactagaagcatttagctatggatgtaagcctattgtgctgctataagtttctgctagttggacaccagatttgcagtaccagctgatcaaatgaagcagctaatgacagataaacataagcactaaatccctggttgtttcaatacgcatttagtgtgtgtgtatatatatatatatcaac

SEQ ID NO: 961 - DNA, 277 bp, Triticum aestivum
  Clone ID: LIB103-022-Q1-E1-A2
gtcaagaattcacgggccgacgggttggatagcatgcaaccactgacatcgcataagtttggcgaacgctttaaaaatatatttaaatacgctgtagtgcaaaactgccaactgaaccagatttgaaaatcaggtgtaaaactcaaaatatgcattgaatgaaatatgttttgcataacagtgatttagaaacctcacatgacatctccagattttggttgaaatttgtagataaatttatcaaatgctggtacttcataaagagctccaaaactaa

SEQ ID NO: 962 - DNA, 414 bp, Triticum aestivum
  Clone ID: LIB103-022-Q1-E1-A6
attcccgggccgacggggatactattttcttttgtttcaggtattgccggaacaagtttattcaattcagttagtttaatggcctataatgtcttctacacaagcattcctgttttaactactgttctggacaaggatttatctgaaaagacagtgacacaaaacccagaaattttactatactgccaggctggaaggcttttgaatccaagtacttttgctggttggtttggtcgatcgttatatcatgcaattgttgttttcttaatcaccattcatgcttatgccaatgaaaaaagtgagatggaggagttgtcaatggttgctctctcatgaagtatttggttgcaggcttttgtcgtgacactggagatgagttctttcacttttctgcagtttctggcaatatgggga

SEQ ID NO: 963 - DNA, 425 bp, Triticum aestivum
  Clone ID: LIB103-022-Q1-E1-A8
gtaacggtcaggaattcccgggccgacgggacgaccagggactgtgttcatgtggatttcagttgcttgtttgacaagggtttgcagcttgagaagcctgaggtggtgccattcaggcttacacaaaacatgatcgatgggttgggcatcgctgggtacgaaggcgtctttctgaaggtctgcgagatcactctgtcggtcctcaggggccacaaggaggcgctcatgacggtcctcgagaccttcatccacgacccactagtggagtggaccaaagcccacaagtccagcggaggggaggtccgaaatccgcaagcgcagagagccatcgccaacatcacggcgaggctccagggcgtcgtggtgggcgtcaacgccgctccctccctgccgctctccgttgaaaggcatgcgcggcggctgat

SEQ ID NO: 964 - DNA, 415 bp, Triticum aestivum
  Clone ID: LIB103-022-Q1-E1-A9
attcccgggtcgacgggctgacgcacacagtactcgaggatttataccagaggtagatcacatgtaaaagtaacgtaaatactagtaccgcaaatccaaagtagcggaagcaacaaggttgtggattcccatcaacaccaacggcaaagtttagtgtacaatcgtaaccctaatgtatcacttactcgttgtaagaaacctgcaacatgagacgttgcatcccgaaacgggtcagttcattgaatgtactggcaaattcacaccactagagaaaatgatgaacaaaggctatcactacatgcatatatggctggtggaaaagctctatggtcataatgtttttgcgaaaagccaatttttcccgactgcataggaataaattttatttaactatcatggtggttgttaaacattg

SEQ ID NO: 965 - DNA, 442 bp, Triticum aestivum
  Clone ID: LIB103-022-Q1-E1-B11
taccggtccagaattcccgggtcgacgggcaagctcacaccaatgaggttagcaagggcaaaccactagattgggtttcaggacaaccagtcacagatgagcatggacgccttcagattataaagaatgatgacctcgaagagctccaagaactcggttctggaacttttggaactgtatatcatggtaaatggaggggctctgatgttgcaataaaaagaatcaatgacagatgttttgctgggaagccatctgagcaagaaaaaatgcggaatgacttctggaatgaagcatctaaccttgctgatctgcaccaccccaatgttgtggccttttatggtgttgttctagatgggcctgggaggtccattgcaacggttacagaatacatggttaatggctcacttaggacggctttgctgaagaattccaagagcctgga

SEQ ID NO: 966 - DNA, 355 bp, Triticum aestivum
  Clone ID: LIB103-022-Q1-E1-B12
cgggctctagatggatggcgaggaaggatttgaggaggccgcctgccttccaggatttattagttgtctctcattatgatgttcccctttttgtgatcagaaacttgacaagttagttactgtgtgtagaagaacaacatcaccgtgggatccttggaacgcctttggaatccaatttttaacggaaaggaactttaaaatcgttaaacgagcaaaaaattaaaaaaaaaaaaaaaaaaaaaaaaaaaaaaaaaaaaaaaaaaaagaaacaaaaaattaaaaaaaaaaaaaaaaaggggccgctcaaggggttcaaatcttacttaccacttaaaggcgacctcaaaactcttca

SEQ ID NO: 967 - DNA, 458 bp, Triticum aestivum
  unsure at all n locations
  Clone ID: LIB103-022-Q1-E1-B2
cgctgcaggtgacggtcaagaattaccgggtcgacgggatacaggcggggaaggtaccggtgccgatgccgctactgaaaagaagaagcagaagaagtagaggatacgaaaacctaactaactcggcattggacgactggtgatcacaaagatgacacctggcaagtttgagccatttgagccggaacaacctcgcaagtgctatgggaaccaagtaggatgcatcctacaggaatgcacgagcatcaacgatgatgacttaaggagtcaagaacatttgaggcagttgctcctgacgaagttgtacaagagattcaagttccccgacagggatgataacatagaacaaccatgggatgatccgaagatgaaaaagattaacaatcacgccatgggcatgttcagcaatgatttggcctcctggaaagagagggtanacaagctattgaggccgaaga

SEQ ID NO: 968 - DNA, 427 bp, Triticum aestivum
  Clone ID: LIB103-022-Q1-E1-B6
gtcaggaattcccgggtcgacgggggtgcacacactggttaaggagtctccaccagagaagcaagccaccacagctgaatccatcaacaactctgtcagaccttcacctcaaatgcatcccggtgtaagtaatggtgaaggctccggtgcgagcacgcagctgaaccgacacgaccaagccgcagtcattggagcgctgctcgagcagatgcagcttgacgagcagatcggtagtctagcaacatagacgaacaaccaaccgagcccggtggctggtgcgagaagaagttaccatttgttagctaaagaagaattgcaagtatttttttgattttctgttcattgaggtggtcagtcaacaagccaaaaggatggatgaatagctgaaggcggtgattcagggattggttttcgttaaatttttggg

SEQ ID NO: 969 - DNA, 445 bp, Triticum aestivum
  Clone ID: LIB103-022-Q1-E1-B7
ggtcaggaattcccggctcgacgtagctccttgagaaagatgccgaaactcatgtatagatcaacactccaatcatcaatgctccaagcatcataccggagattgactagtaggatcacaaaagtgatgcatctgtacatgaatttgactacatttcctgaaaaaatacccagaagaggttgagttaacaatatgtgagtttgaaaatgttgttcatattttactagtactatttgggtagggtatagactagacaagcataagtggaggtgaattagatgtctgaataaaaattgtcgataacatgtagatgaactgcacagacatcaaaaatcttattgctcccatcaatatccggcagattagactatagttattaagctataaatttgtattttctactccagctgccatagaaaacccaagttgaatcaacattgcaatt

SEQ ID NO: 970 - DNA, 439 bp, Triticum aestivum
  Clone ID: LIB103-022-Q1-E1-C11
tacggtccagaattcccgggtcgacgggggccgccgacaccagcttctcttcctcctcccgcagcgcctcctcgaatccaagagatcaagtcgctgttgttgtgccactccccctccagccgccgtcatgcagaacgaggtgggtgacatggtggacctctacgtccccaggaagtgctcggccaccaacaggatcatcacggccaaggaccacgcctctgtccagatcaacattggtcacgttgatgagaatggcctctatgatggccgcttcaccacctttgctctctctgggttcgtccgtgctcagggtgatgctgatggctccctggacaggctgtggcagaagaggaaggctgagatcaagcagctctagatgttgctagtagttttacctggaacttgtgtccttcccatgtctacctagctcttggatgtc

SEQ ID NO: 971 - DNA, 421 bp, Triticum aestivum
  Clone ID: LIB103-022-Q1-E1-C12
taccggtccagaattcccgggtcgacggggatgatgatccaggtctccaagaagagcaaggaggagtttctcagttaggcctgacagcggtagctgttggttgccgtgacctggagtacatagctgcctatgtatctgatatcaccaacggcgctctcgaatccatcgggaccttctgcaaaaatctctacgacttccggcttgtcctgctcgacagacaaaagcaggtaaccgatctgccgctcgacaacggtgttcgagctctgttaaggagctgcaccaagctccggagatttgctctctacctgagacctggagggctctcagacacaggcctcgactacatcgggcattacagcggcaacatccagtacatgctactgggcaatgtcggcgattcggaccacgggttgatccgctt

SEQ ID NO: 972 - DNA, 448 bp, Triticum aestivum
  Clone ID: LIB103-022-Q1-E1-C3
cggtcaggaattcacgggtcgacgggtttgatcttgttgttgcaaatatgtagatctagcattcaggattttaacatagattatcaactaaccataatcatgataacatttatgtctcaaattcactcatatcaatggcataattaactagcgagcaataataatgaatctcagatgacaacatttttttcaaaataatcatgatacaatatgatataatggtatctcgctagccctttctgataccgcaaaacatacatacatagcacccgtgaagatcaaggactgactagacattataattcatggtatatgagatccagtcacactcatactcaatatcaattaataacaatgcatacagatgatagtagtgctctctaatcggtgctttttataagagcatgatgacttagcaatacacgtaaatagatacgcccttcgcaga

SEQ ID NO: 973 - DNA, 414 bp, Triticum aestivum
  Clone ID: LIB103-022-Q1-E1-C4
ggtctagaattaccgggtcgacgggtttgatagtgttagtgcagatatgtagatctagcattcaggattttaacatggattatcaactaaccatattcaaaataccatttaggtctcacattcactcatatcaatggcataattaactagcgagcaataataatgaatctcagatgacaacatttttttcaaaagaatcatgatacagtatgatataatggtatctcgctagccctttctgagaccgcaaaacataaatacatagcacccgtgaagatcaaggactgactagacattataattcatggtataagagatccagtcacactcatactcaatatcaattaatagcagtgcatacaaatgatagtagtgctctctaaccggtgctttttataagagcatgatgactta

SEQ ID NO: 974 - DNA, 441 bp, Triticum aestivum
  Clone ID: LIB103-022-Q1-E1-C5
ggtcaggaattcccgggtcgacggggaggaggagcatgattggtgatgtcgtggagtattgctaccaccgtcatgtttaggtgtcctctctactcttttggtgtcccgatgccaaaggaggagagagtgtacggatttgcggtgtgttgtgagttgagtgtgtttctctttttgcagttgctttcctcgctcgaactcgtttgctttggtttgtgtttgagaccatatggggtgagacatatgagctaagctatccatttctatctatgtcaagtactttatgttaagtaatcgtttgtgagatatatcttgtgtatgctctcattcatatgctcacatagtttctcttgcatgctttcatcttactatctatgcaagtacggtttggtctataaaatatagggggggtggatcctatatgtgtgcattttgcattccaaa

SEQ ID NO: 975 - DNA, 445 bp, Triticum aestivum
  Clone ID: LIB103-022-Q1-E1-C6
ggtaacggtcaggaattcccgggtcgacgggtctgatggtatcctaagtatgcatcaagaaatgaaagcaagtcacatccatccgtggagtcaacaatctggtcgatgcgcggcaagggaaatgggtctttgggacaagctttattgacatcggtaaagtctatacatagcctccatttcgcgtttgccttgcgcacgactacacggttggccaaccacgtatgatggagcactcctctgacaaagcctgctgcttccaatttcttgatttcttctgcgatgaattcttggtgctccactgcctgcttccaaactttctgcttgacgggccgcgcatgaggacagatggcaacatggtgctcgattactttcatgagaacaccggggatgtcagacagttgccacgcaaatacatcgacgatcgcccgcatgaaagcaacgagcg

SEQ ID NO: 976 - DNA, 457 bp, Triticum aestivum
  unsure at all n locations
  Clone ID: LIB103-022-Q1-E1-C7
tgcacgcggctaggtaccggtcaggaattcccgggtcgacgggatctggtagatagtcaggcttctcagcctttttcatttgtagatgtctgtactcagacatgttaagcttccgcttgtgctttgacttgtatgctctgaatgttgggttgtgagacccttgtttgtaatatctcgctcctcggagcctaatgaataaatacttgagttgtagagtcatgttgtgatgccatgttgtatttgcacatatcgagcatattgtgtgtatgttattgaaatgcttggtatgtgtgggatctgactatctagttgtttatccttagtagcctctcttaccgggaaatgtctcctaatgcttccactgagccatggtagcttgctactgctccggaacacttaagctggccggcatgtgtccttcttcgttcatgtgtatgtcnctttggggaaatgtcac

SEQ ID NO: 977 - DNA, 435 bp, Triticum aestivum
  Clone ID: LIB103-022-Q1-E1-C8
gtcaggaattcccgggccgacggggactggacctctagggcgaatcccctggcaatatagttagtgtccgcattcctgaatgatttataacttctccttgtgccacgtggtgtccttccaatgccgcatacaacctgtagtccggccacggatgatcttcccgcttcatcgagcgggtccttggctccgtcggatatggattcccttccgaccgcctcgacccctcatgacgctaatgacgcctatgtgggatcctaagatgggacccaccgggaggatgaggctccggaggtgccgcaaggcaacctcccagacttcgcaccggactccgcaccggaatccgcagtggttccggagtccggcaagcggccccttcgtaagaagggcaagactgtgacaccggcggccaccgtccaaccggtggcgccggataac

SEQ ID NO: 978 - DNA, 446 bp, Triticum aestivum
  Clone ID: LIB103-022-Q1-E1-C9
gtaccggaccagaattcccgggtcgacgggtagatttcatgctctttccaaccctattggattcaccttcaaattcgtccggagcgttgagttacggacgaaacaatctgacgttgcagcagaatccgagtcaaactacaagcccaaaggtgttgcatcacctccacttgggcccatgagacttgtacgacctagggttagttttaggctgccttgggtcttcctcccacctccttggccaccaccccttgctcctatataagtagatccatctagtagcttttccttgggatttgtttagttaaaagttagccattgcaacttcgtgtacttcgtttgtgtccaacgaccagaccaagaccgcttccggatccccaccattatcaatacttcatatatatttgcaatattcagattgctttatcatattcttgctcgttcttcga

SEQ ID NO: 979 - DNA, 450 bp, Triticum aestivum
  Clone ID: LIB103-022-Q1-E1-D1
ccggtcaggaattaccgggtcgacgggatatattaggctactgacttcgaatgtaatggtttatagaattcaatagttaaaatcattgttgaattccaagatgtatacgaggtctatagtacttcacaatatgctcaaactcacataatcccagtcaaatgaaaatctaaatgcgtttcatagttattactttataggatgcaacaaaaccaactataactctacatgatccattataaaagcaatattttgaacacatcacaatgtgtgaatgaaatgtggagagagagcttgcaaagatggagcagatagggcgagaaagattgcatgtatgcgggcgagagagtaggagacaaacctaataagagagagagggggggagaagttaggtctatgagaaagatggagacatgtaatatacgtgagatgcatgtgcattcggattttgta

SEQ ID NO: 980 - DNA, 393 bp, Triticum aestivum
  Clone ID: LIB103-022-Q1-E1-D10
attcccgggtcgacgggatcttcggacccatcaacgaatcatcaagatgttcgagggagtcattgcaacatcttacaatgaaggtgacaagttcttcattgaccccatgaagctgctgcccctctcacgcttcctgccacagccaaagggctcgactccaagaggtggtggtcgcagtggaagaggtggtggtcgtggtggatttggtggccgtggtggattccgtggaagaggtgcaccaaggggtcgcggacctcccaggggtggagggcgtggtttcagaggacgaggcagattctaggatgtagttttaagtttgctctttgttgaaacgtgatgctctacattatctgttcagctggaaacattatgctaagtcagctgtgagcgcac

SEQ ID NO: 981 - DNA, 406 bp, Triticum aestivum
  Clone ID: LIB103-022-Q1-E1-D2
gggtcgacgggaatcaagggaccgctcgagtctccaagatcatactatgcattatctgccggaactggaaaagccgtgtcaacgggaacgctggagagcccaaggacggcggagaagccgtcggcaggcgacatcgtgtcgatggtgatgaggagaaggcgtgcgatgcccaggagcgagcagccctctgaagctgggcgcgtgaaatcctctggcgggatttttggatacgtgcgagaatccagtggtaaacaagagaaagagggcctggcatcacctggtgagggggagaaaacaccacagaccaaggaaggtgtggtggctgctttggggggcggtgaggaaactgggcttactgcagatgcgccggtttctgcagagaaggcaatagcgggtgatgccgctg

SEQ ID NO: 982 - DNA, 415 bp, Triticum aestivum
  unsure at all n locations
  Clone ID: LIB103-022-Q1-E1-D4
gtcagaattancgggtcgacgggggagggggtctctggaacgtggccgttgctgctcattgctggtgtcactgatcgatgatggatgttcgctgctagtttagctccatggtagtccctccctctctttcaggttgctgctgctgatggcgatgatagaaatggtagctctagtcccatctagtcgttgtcctggatccgagtggtgaagttgctagtctggtttccttcctgtagggtcctgtgctcggaccaccctctgttccttcgtttttagcatgttttaattcagtctctgtcggatgtacctagtgtcgtgcctgtggttgttttaagaatcctacccagatctcaatatatatggtgttgaaagcaaaaaanannaannaaaaaaaaaaaaaaaaagcggccgctct

SEQ ID NO: 983 - DNA, 451 bp, Triticum aestivum
  unsure at all n locations
  Clone ID: LIB103-022-Q1-E1-D5
ggtaccggtcaggaattcccgggtcgacgggaagccaaaggtatctgtaccgaacggtgtcagtggagagaaacagcaggatgctgtcaatgggaagccaaagtcgcctgtagcgaatggtgttaacggggatgcgaaggttccggcagagaaagccgctgccaccgctgctcctccagccgttacctacgcggcgaaggtggcccaaacagcagcggccgagaagaagcctgcggcgaccgagaagaagcctgtcgttgccaacggtgctgtcaagaccggtgtagctgcttgatcgcatacccgatcctcccagctagccatgaagaacaaacggacggtgctggcgaaccaggcgagacatgcggggtcccaaggtactgatcaccaaaggtggctgctggaaagcgggtcggatagttaagtttcnctagctctctcctttttcttc

SEQ ID NO: 984 - DNA, 429 bp, Triticum aestivum
  Clone ID: LIB103-022-Q1-E1-D6
aggtaacggtcaggaattcccgggtcgacggggcaacggcgtctttctggttctgctcatggccaggtggatgacaactttgccaagccttccccgcccttttcgcaagatcaaccaggaagaaccgttcggtcaaggacgcactgcacgctgacagatggatcctggacttgaggcgaggtgaccccgatgccattgcactgcaggtggtgcagcttgcgagggaaatcaggcaggcagccctcgccatcatcccaggaaccgaagattctattacctggaagctcagcgcctcgggatgctacacaacaagttcagcgtacaatgcccaattcagcaatagacagattacctccttcaaatccatcatctggaaagtctgggcgccgggcaagatcaagatgttcctttggttgctgcaccttgaca

SEQ ID NO: 985 - DNA, 449 bp, Triticum aestivum
  Clone ID: LIB103-022-Q1-E1-D7
ggtaccggtcaggaattcccgggtcgacgggcctcaagctctactgatgctattatggctgaagcagaacttaccttaaatgctcctgctgatgttgacgcagatctactgaaggatgatgatgatgctcagctactacagcaagcactcgctatgtcaatggatgagggtgcttcaggagctgcagccgtggctgatgctgctatggcagaagctgctgcagatgaccaggatttggcattggctcttcaaatgtctgtccaggatgcagaggcggctggtcaatctgatatgagcaaagtgtttgaagacagatcatttgtgacatccatccttaattcgctccctggtgttgaccccaatgacccatctgtgaaagatctactggcatctttgcatggccaaggagagcaggaggagaagaaagatacggaggacaagccagacaa

SEQ ID NO: 986 - DNA, 446 bp, Triticum aestivum
  unsure at all n locations
  Clone ID: LIB103-022-Q1-E1-D8
aggtaccggtcaggaattcccgggtcgacggggccggcgacggcgaccggagggacggcgagggcgacgacgagtatgcgctgctcactaggataactgacacatcagcagctgaagcaagggcaggaaaggatatacaaggtataccatgggagaggttacaaatcaccaggcaggattacagaaaagctaggttggaacagtacaagaactatgagaacttccctcagtccggagagctcatggataagttgtgcaagcaagtggagagcagcagcaagtactatgaatttcaatacaacactcggatagtgaaaccctcaattctccattttcagcttcggaatttgttatgggcaacttcaaagcatgatgtttatttcatgtcgaattccacagtanggcactggtcgtcattgtctcacanaatgacagatgttcttgat

SEQ ID NO: 987 - DNA, 430 bp, Triticum aestivum
  Clone ID: LIB103-022-Q1-E1-E10
taccggaccagaattcgcgggtcgacgggggtctgacgaaagctggagttgccttggtcggggacctggcggatgcgctaggaccttccatcaaactgctgctcaagaattccaacttccactcggagctccttgggcgctgttcccagtctgatgacgaacagctgagggagactgcatcctgggtccagggtgtgatctcacgtgtgctggtttcatgagggaaagcttctccagcaaagctgccagcgttgttgatggttctctgggcaaactatttctcttgccagatgaaatatttttgagaaatatgctgcatatatgtcctgatatcatgttgcaaaagtggaacaaggttgcatgagatcatttacggtcgtcaagttcgtagtagtggcagcggcttgccattgtctaaagtgggttgggt

SEQ ID NO: 988 - DNA, 415 bp, Triticum aestivum
  Clone ID: LIB103-022-Q1-E1-E12
attcccgggtcgacgggcgattgaagagattaatgttttgagtggaaagatggacgagcttatgaaattgtttgctagcaagagtgcttctatttatcctaatgatattcctttgttcactttgattgataataataatgaatctatggatgtgaattttgttggtatgaacaattttggtaataacgcgtatagaggtcattttaatcctaggccgtttcctagtaattcctctaataattatggtaattcctacaacaaatcttatgtaaattataacaagatgcccactgattttcaaaatagtgttaaagaatttatgagttcgcaaaagaatttcaatgctttggttgtagaaaattgcttaagattgatgatttggctaagaacgtggatagaatttctcttgacgttg

SEQ ID NO: 989 - DNA, 442 bp, Triticum aestivum
  Clone ID: LIB103-022-Q1-E1-E2
cccggtcagaattcacgggtcgacgggcgggaaggggctgaacgcgacgggcgagtttttccggcgccgtgacgagtggaggaggcaccccatggtggggaaccagctgcgccacgccactccggggctaggcatcgccatcgtcgcctttggtatctaccttgtcggcgaggccgcctacaaccgcctctaccgccgcgccggcgacaaccaccactagatctcccccagaggtgaagtagatggagcaaaccaatgttgatcttttccggtttgatctcataaggtctgcatgaccaccttgtaattcgcgatcaggagatgtgctgttggtccaactagtgttcctggaacgcgtgtcctttaaatctgatactccctccgtccgcaaatacttgtcggacaaatggatgtatctagacatattttagtctagatacat

SEQ ID NO: 990 - DNA, 436 bp, Triticum aestivum
  unsure at all n locations
  Clone ID: LIB103-022-Q1-E1-E3
ggtcaggaatacncgggtcgacgggtacacgccggagacgacgggagggagctctgaaccttgtcgaaattctgaccgtgaaggaagtggaagtagaggagggagacgacgtggccaatggcgtgaaggcgatatggtgttcgatccgtgacgtagaggaagcaggggaagaagaccgcgacggggcgctggacttggcgatccggctcgtggaggtcgctccaaaggaagaagaaggccaccacgacatggacgacaccgggctcgagctcggcttggctcgaccggccatggcgacggcgacggcagggaggcgcgttagggaggctcccgcccaactaactggggggatcggtcgaggagggtgacggggtgcaggacgacacgtcgaagacgagcttgaggccctccggccgcgagaacgacgacgggcatc

SEQ ID NO: 991 - DNA, 438 bp, Triticum aestivum
  Clone ID: LIB103-022-Q1-E1-E6
ggtaccggtcaggaattcccgggtcgacgggtggtcaaggagtcaaactgttgaacatattgggaaaatattgtgaagctttttcttcgatggtggaggggaaaaataaagtgtcaacagatcagctttctggtggagcaagaattcactacatttttcagtcaatttttgtcaaaagcttggaggaaattgacccttgcaagaatataagcgatgaagatatccgcacgagcatacagaactctgacggtccaaagggggctatgtttctgccagaggtgccttttgagattcttgtgcgaaagcagataggccgtttgcttgatccaagtcttcagtgtgccaaatttatctatgacgagttagtcaaaattagccatggttgcttaactagtgagctgcagaaataccaaatcttaaaagacgggtgggtgaatc

SEQ ID NO: 992 - DNA, 445 bp, Triticum aestivum
  unsure at all n locations
  Clone ID: LIB103-022-Q1-E1-E7
ggtaacggtcaggaattcccgggtcgacgggcaccatccaagacgtgttcatatcgacccagtacataccgttaatgtagttgaggctgatggggatcggatcgcagtgaagggggttgatgctcaccaccctatgatcgttatgctgcgtgacacaccgtttctgaagattaggcggcatcagcaagcaaggaggtggcttaaaaagctccggcctgagggctttgagtaaacgatacagccccgacgagcacgcggcgagtggcatcgtactgagattgtccacacgcgaaacaatgagcttgattacctctgtggggagcaaattccagccactctttcggcggacgctgctcggttctgccattgttagtgcttgggtttcggacgaggggggaggcgccttagcanggatggaagcttggacgagattatgtgcggacaa

SEQ ID NO: 993 - DNA, 420 bp, Triticum aestivum
  Clone ID: LIB103-022-Q1-E1-E8
ggtaccggtcaggaattcccgggtcgacggggattctggggggctccaaggacgggatgcccaccatcatttctccagaccagtacaagaagaggttcaggaaggccatgtcaaagtacttcctgactgtccccgaccaatggtcaccttgaatcgtcgtcacttgatgcctactattatttgcctattcgagtgcaagatggggtgatagcaactgggaagcggcccattgttttctttctattttttctttggttttgttagaatagtcatcgatctgcgccttatgtatgttatttttgctcgcatcaggctggactgggatcgctggagagggcgtacggtaaaggttgcccccatccaggcagagcccaaggatcgatatgtgtatattatatataacaatgctacactgtaaca

SEQ ID NO: 994 - DNA, 473 bp, Triticum aestivum
  Clone ID: LIB103-022-Q1-E1-E9
cgccggcaggtaccggaccagaattcccgggtcgacgggacggtggcatgaagcagttgagtaggtgtgcgtggatacacactattcatcgcatttgtcatcgagcgattgcaccactatcttcagaagctcatcaccctgaggaaatcagtcaacacctcccagagaggagcttgaaattttccaaatggagttcaaacgtgaatttgagaaaatgattccttggctaagttccaaaaatgtcattctatgaagttcggctattcagccatggactagtcaatggtggagttgcaattttgtttcttttgtacatacatgaattgaatgtaatcaacggaaagaaacatatgttgattctccaagttagagttcatttttattttctacaagtagcaaaacttcctgtgtagattaatacatgttctgtgcgatcttgtgttacaaatcttgtagtactgtttttacaggga

SEQ ID NO: 995 - DNA, 432 bp, Triticum aestivum
  unsure at all n locations
  Clone ID: LIB103-022-Q1-E1-F1
gtcagaattaccgggtcgacgggatggcgaaggggtggcctgagaagctgaagcatgagctgcacgagcacgagctcttgctgatccgccgccccaggccgtacggctgcgacgggtgcgaagagatgggcacctcctggtcctacaactgcgcggagtgtgacttcgatctgcacaccaagtgcgcgctgggtgaggagaagaagggagaggaggtgaaggggcaggaggatgctgctgccccagctgggtacgtgtgcgagggagacgtctgcaggaaggcctaggtagcgttgtgttgtgtgtgttcctttccagctgaagcgtgtctgaatcatgtgctgtgtggtgtgatgataaataaatcttgcatccgatggtttggcttgcgaaaaaaaaannnnnnnnaaaaaaaaaaaaagcggccgctct

SEQ ID NO: 996 - DNA, 426 bp, Triticum aestivum
  Clone ID: LIB103-022-Q1-E1-F10
attcgcgggtcgacgggtactagcgtatgaatagaagcactaaagagggacaaaattacaaagtttgaatgtgatcacggtatttttttggttgctaatgatacatcgacacgttagtacaggtgctttggatggattgaagatcatggttagctaggctgacatgtgaatggcttctcaagcatattgttcaaccggataaactccttctcgtgtccttcttcctttccgcaaatgaatttcccctttttgggatgaatgatctcaaagctacgggggcaaagtatacacacactcctgcgaggtttcttttctgttaaaagaaaaagagataagttagtattcatgttatgaaatcacccacatgcagtattcaaataactgtacaaggatatatagccgctccaaaagaatgtacacacatac

SEQ ID NO: 997 - DNA, 432 bp, Triticum aestivum
  Clone ID: LIB103-022-Q1-E1-F11
taccggaccagaattcccgggtcgacggggaggcgaacggcgtccagccgaacgtgaccctctacatcaataacctcaacgagaagatcaaactcgaagcacttaagaagtccctcaatgccgttttctcccagtttgggaaaatcattgaggtgcttgctttcaagactttgaggcataaagggcaggcatgggttgtgttcgaagatgttgcatcagcaactgaggctttgaagaggatgcaagattttcccttctatgacaaacccatgaaaattcaatatgccaagaccaagtcagatgttgtagcaaaagctgatggcactttcgtacctcgagaaaaaaggaagaggaatgatgagaaacctgagaagaagcagaagcgtgagcagcaccatgatgttaaccaggctggcgtgggcatgcatgcct

SEQ ID NO: 998 - DNA, 405 bp, Triticum aestivum
  Clone ID: LIB103-022-Q1-E1-F12
attcgcgggtcgacctttgatgaaactggcatgtaggacgccttcatgcaagattacgtcggcctggacctggacagcttcccgctcgaccactagtttccagaggactacgggctcgaggaagaggatgagttggacatcgacggggagcctttgttcgaggacgaggtcgccaaccaagccgtcgggttgtagccgaagcgcaagagcaggcggacgaaggcatacatgatggccgacgacaagctcctttgtgagtgttggagggacatcgggcaagaccccaagactggcggcgaacaaaaggcatcaacattttggactcgtgtccatcgcgagttccatgaacgcaagaagtctccatcgtagcaaatccaagcacgcacggggtgggtgtccattttg

SEQ ID NO: 999 - DNA, 392 bp, Triticum aestivum
  Clone ID: LIB103-022-Q1-E1-F2
cggtccagaattcacgggtcgacgggtttagagcacggtggtgtcttaatttttgtagaaattgctagtctctcttgcttcacttatattattttgagagtcttttagaacagcatggtatttgctatggttataaaattggtcctataatggtaggcatccaagtttggtataataaaaactatcataggaagtgaattggatgctatgatcaatttgatgcttgataattgttttgagatagggaggtagtgatactaaagtaatgctagttgggtgattatgaatttaaagaatgcttgtgttaaagttagcaagtcacgtagcatgcacgtatggttaaagttgtgtaacaaatttgaaacatgaagtgtacctggcttgtgcatcct

SEQ ID NO: 1000 - DNA, 444 bp, Triticum aestivum
  unsure at all n locations
  Clone ID: LIB103-022-Q1-E1-F3
ggtctagaattaccgggtcgacggggacgacgtcgtaaggatttggaatccgcgtggaggatctcaggaagcccagctacgagagggcagacccgaactacgtgatgatgtcgacgaacaaggagcacctggcgccggccgccctgcgtgagttcgggcagcggcccatgttccaggcggacgtggactcgggcaacttcgaccacctgcccacggagctcaggcccatgagcaagatcatctaggatctccagaggtcgcaggaccttgagcgagtagagtagctgtgaaaagacttgtagatttcagtttcaggccggtttcaggttcagttggcgagagcttgctagttcttttgcgcagctattccacttatatagacatgtaatangaggttgtagacagtcaagttgtantgatggttgagccgagcgtgctgaagta

SEQ ID NO: 1001 - DNA, 446 bp, Triticum aestivum
  Clone ID: LIB103-022-Q1-E1-F5
ggtaacggtcaggaattcccgggccgacgggagtactatggggcagtgaggcctgcacggcagcacagcccgccacggggaggagggagcaggcagtcccaccggtgctttcttgagcggctggagcaggaagagcagagattgaagaagcacgacggacgttggatggaaatccaacattcattgcgtgtgcgtcaacctttttttaggaaagcctcaaatctgtggaaaacaacatacaacccatctgccattatttctaaaaatttacagcccatttgctaattcttaaggtttttttggagcccatattctttttgttagcattacagcccatattgaggccactgttaaaaaattatacgaaattttgaataatttggtgcagtccgaactatttttaatcgcgagatttcgagtcacattcagacatgattttaaaaata

SEQ ID NO: 1002 - DNA, 407 bp, Triticum aestivum
  Clone ID: LIB103-022-Q1-E1-F6
ggtaacggtcaggaattcccgggtcgacgggaggaagagcccgaggaggagctaggaactgaatatctagtgcagccgcttggccgtgctgaagatgaagagcattccagtgactttgagccggaagaaaatggtgatggtgctgaggatgaggagattgaggatgatgatgctgaggatggtgaggattctgtcaagccgcaatcctcatcgaagaggaagaggtctggtggggaggatgaagatgatgatgacggtgatgatgatggtgatgatgatgagaagcctccatcaaagcgatagtcaatttgttcttgctgatctggtatcttttctgctcgggccaagaaggaaaataatcctctgggagaggattgttggtaaatgctgtagctttaggacatctg

SEQ ID NO: 1003 - DNA, 445 bp, Triticum aestivum
  Clone ID: LIB103-022-Q1-E1-F8
ggtaccggtcaggaattcccgggtcgacgggtgtggtaaagaaattggcatgtttgatgaaagtttggacacacacccctaacaaaccggagcaactcgctagtgggttcgtggttccgagagggaacaatgcatgtttcatgacgaacgggagatagcttcctcttacggccttcaaattttttcctccgtttaacgtgcactaatgcaactgtcatgtgaaattttggaaaattttaggggtcatctgaccatttaaatacatttaagtgattttctaaccatttaatgaccgtaattcaaatttgaactacatctacatgcaacacctaaccataacggttttgaaaatcatagttttgtgtacttgtgagcgagttaattccatgtgaagtaaattagaaggaatttgcaaacatattggtctcaggccatgggcacatgc

SEQ ID NO: 1004 - DNA, 425 bp, Triticum aestivum
  Clone ID: LIB103-022-Q1-E1-F9
taccggacctagaattcccgggtcgacgggaggatagtacctctctgcaccaggacggctaaggctctacaatccaattacgaagactttcactgatttcgagatgagaaattccacatttgttggtacttacactggaagtctgttgtctacagagagcactttcacttctgaggctgaacgttgcactatctgcggctgctatggcacccttgaagccatcgaaccttatgcactctgtgaagactgtatgtcgcatcaagccttgcttttattgcagcgtctggaaggctgcgctgaactgggcacgctttcaagaattaccaattgccaatagacaatttcaaccatggtccagcaaaaatagttttcaaatgtcagcctagttattttttagagaatattgctgctaacctgttcctttt

SEQ ID NO: 1005 - DNA, 455 bp, Triticum aestivum
  Clone ID: LIB103-022-Q1-E1-G1
aggtgccggtcaggaattcccgggtcgacgggcttgccggagaggaggtcggcgccctcaccgacgccacagcaaggagcagcagcaatgagactgccatggaggacttgctcgcgctcgcccgccggcggggcctcctctagccacccaccaggcaggagccacccagcagccaggagcagcaatgaggatggctgccgccaggtccgtcagtcaggtacacaagacaagaatgaacacctgctctgctggtgcttggccatggcattcagtcatgcctaggaagagaaagatcttaatgaattgtagatctttcaacaacaacaacttgattagattggattagattagattacagcaactcagatgctctcttgtcttccatgtctcttttcttcctaaaatccagtgcctggctgatgctccatggaatgtactctctctgtcctccctcg

SEQ ID NO: 1006 - DNA, 445 bp, Triticum aestivum
  Clone ID: LIB103-022-Q1-E1-G10
attcgcgggtcgacggggctcccaaaccctagcgccggcgcctccacttctctgctccctcgtctcctctcgcgcagggcccggcgaaagggaagcaagatgtacaccgccaggaagaagatccagaaggacaagggcgtcgagccctccgagttcgaggacaccgtcgcgcaggctttctttgacctggagaacggcaaccaggagctcaagagcgacctcaaggacctgcacatcaacactgcaatccagatggatgttgttgggaacaggaaggccgtggtgatccatgtgccataccgtctgcgcaagcccttcaggaagatccatgtcaggctcgtcagggagctcgagaagaagtttagcggcaaggatgttgtctttgttgcaacaagaaggatcgtgaggccacccaagaagggttctgctgttcaacgccctcgca

SEQ ID NO: 1007 - DNA, 393 bp, Triticum aestivum
  Clone ID: LIB103-022-Q1-E1-G11
taccggacccaaattcgcgggtcgacggggagtcggacaagctcgcccgctacaacaagaagcccaccatcacgtcccgggagatccagacctccgtccgcctcgtcctccccggggagctcgccaagcacgccgtctccgagggcaccaaggccgtcaccaagttcacctcctcctagactgacgacgcgccgcttgttgtgacagatgtggccgtctgctgtatctgtagtcgctgttgactctgcttatctccatctgcaagtagtggtagctgtagtgcgcgtgctgggtgatgattgccaacgctttgttggctggttggatgtaagaactgaacgtgttgcttttgcaaactgatgaaatctatctagaaaatgtcgcagttgtggc

SEQ ID NO: 1008 - DNA, 423 bp, Triticum aestivum
  Clone ID: LIB103-022-Q1-E1-G12
attcgcgggtcgacgggtgtgtttccgttgactataataactccgcgaggtcctggcatcttgagcttgaggtatgcataatgtggcaccgcattgaatctagcgaatgcggttcgtccgagcagcgtgtggtaaccactgcggaacgggactatatcgaagattaactcttcgcttcggaagttatccggggatccgaagaccacttccagtgtaattgagcatgtgcagtgggcctctacgcctggaatgacgcctttaaaggtcgtctttgtgggtttgatccttgaggggtctatacccattttgcgcattgtgtcctgataaagcaggttcaggctgctgccaccgtccataaggactcgagtgaggtgaaatccgtcgatgattgggtctaagactagtgcggcgaatccgtcgtga

SEQ ID NO: 1009 - DNA, 408 bp, Triticum aestivum
  Clone ID: LIB103-022-Q1-E1-G2
ccggtccagaattcacgggtcgacggggttgtcgatgcggtcgttcattgcttgttgctcttggtgcaacgctcgttgtgcaccaaagaggtggctctcggtgacgtatgatgacatgtcatcgtcttgctcgatgaagagtgggttggtagaagtagtcggcctatccatcattctaagcaaaatgtgagtggtagaaagagaagaacttataccaatgtaccttgaccgatgttgacaatgaatcaagttcactcaaatgcgaccaatgaaatagcactatcggtaccaattcttgtcggttctcacacctacacaattaaaagcttatggtggagcttggttaggatggtggcacaaaatttgatgcaattgtaagtgagcttcaataatgttggaaaagattca

SEQ ID NO: 1010 - DNA, 410 bp, Triticum aestivum
  unsure at all n locations
  Clone ID: LIB103-022-Q1-E1-G3
cggtccagaattaccgggtcgacgggttatagtgaaaatcttaggaagagagttccctattctgaaatatctcaatctttgtacgttgaggattttgaggagtttgattggattactagaggaatttatgtaggattcagcagggattggttgagtaaaatgatgaaggaacccgctaggaatgagctacgcattttatatgatgatatatacggtgatgatcccgactatgggtttatgaatgttaaaattacaaatcaaagccctttccatgatttaagttcttcttctaaaagggaaataagggaaaggatagattttctaagacgagttttggaggatttgataaggaaagaattgcatgccgaagatggcaatacctagatctattcgtgtntttatgcctggct

SEQ ID NO: 1011 - DNA, 385 bp, Triticum aestivum
  Clone ID: LIB103-022-Q1-E1-G4
ggtcaagaattcacgggtcgacggggaggaagagcccgacgaggagctaggaactgaatatctagtgcagccgcttggccgtgctgaagatgaagagcattccagtgactttgagccggaagaaaatggtgatggtgctgaggatgaggagattgaggatgatgatgctgaggatggtgaggattctgtcaagccgcaatcctcatcgaagaggaagaggtctggtggggaggatgaagatgatgatgacggtgatgatgatggtgatgatgatgagaagcctccatcaaagcgatagtcaatttgttcttgctgatctggtatcttttctgcttgggccaagaacgaaaataatcctctgggagaggattgttggtaaatgctg

SEQ ID NO: 1012 - DNA, 404 bp, Triticum aestivum
  Clone ID: LIB103-022-Q1-E1-G5
ggtaacggtcaggaattcccgggccgacgggggaagaagaacggatggcttgtaccctctttcggcgttgctgcttcgacttgaaccgatgaccgagcgagcaggaagcatcaagctggaccgcgaaggcgcaggctgccgtagtgtggtgcagcccacctaagttggtgtgcatttgcgtttgcgtttctgatgcacgtccctggacttgcgtcgtaggtaggtcacgagcccctcttgcttgtggtggtggctcatgtctagatctttgcatctctggacataccctttgctgttcttgctgtgttccgtttcaacttcttcatagacatttttcttgttacatcaagtagaacagaggagaaaaaataacttcatgtaaaagtttttactatgcctctgcg

SEQ ID NO: 1013 - DNA, 379 bp, Triticum aestivum
  Clone ID: LIB103-022-Q1-E1-G7
aggtaacggtcaggaattcccgggtcgacgggctcggcatctcgtcgatgaaaaggaagagccctcctgtgccttggtagagcatgagtaacagtgtctccaattttctaatatggatgcattgccacgagaagcgagaacttgttaatttgaatggttccatttttgcgggaaatgcagtaccttgcaatcactttggcgttattagtaggtgtcgtggttctaagtctgacagtagaatgaggggtaggtatgaggaggcaagatcctagctacgatgaggttgtgcacgcaagatttatttacgagttcaggcccttcacggaggaagtaatagccctacgtctcagtgcccggggcctcggtcgattggattatg

SEQ ID NO: 1014 - DNA, 417 bp, Triticum aestivum
  Clone ID: LIB103-022-Q1-E1-G9
taccggaccagaattcgccggtcgacggggcaaaggatggaaagggatctgcaaccttgtccatggcgtatgctggtgcagtttttggagatgcatgcttgaagggtctgaacggagttcctgacattgttgaatgctcgtacgtgcaatcaactgtgaccgagctgccattctttgcttccaaggtgaggcttgggaagaatggagtcgaggaagtgctcgggttgggtcagctgacgcagtttgagaaggatgggttggaagctctcaagggcgagctcaaatcttcaattgagaagggtgtcgcgttcgcaaatgcaagttagttaggtcattttgcagattatagcaaacccaggtctcgttgaggggtctgttggtttggtccagtgctttttctgcccatcatgtgggcat

SEQ ID NO: 1015 - DNA, 392 bp, Triticum aestivum
  Clone ID: LIB103-022-Q1-E1-H10
taccgatccagaattcgcgggtcgacggggatgaggatggtgacttcgcggagggcgaagaggaaatctcggaaggagaggagtatgacaaccccaaggccagtgacgccaagaagaaacaaataggcgagggtgaggagaatggcgaggatgatgaggaagaacaagaggagcaggacggtggaggaggtgacgacgatgatgatgatgacgacgatgatgacaatgaggacgacgacgatgatgacgacgatgtcgctgctgaagacgatgaggatggagtagaagaggaggatgacgaccaggacaacgacgatgatgaggaggacgatgacgaggactcgctccagcccccgaagaagaagaagaagtgaagcccttcgacgcggctg

SEQ ID NO: 1016 - DNA, 441 bp, Triticum aestivum
  Clone ID: LIB103-022-Q1-E1-H11
gtacggaccagaattcccgggtcgacgtgcatgcgccaggggaaccaggcgacttgccgtacgcggtaggttgccctgcgttcactcgtgagctgcggcaagtccagtggcccagcaagaagaatttcaagccagatgtaccggagaagtacgacggcaagtcgcatccgtcggagttccttagcatctacaccattgcggtgcaagctgccggggggcgagacgacaagatccttgccaactacttcccgctggtgctcaagcccaacgtcaaatcctggctcatgcacttgccggacaactctatatcctcttgggcagatctatgccatcagtttgtcagcgcctttacaggcggccacaagcctcatggccaagaaagcgatcttcatctgctcgcccagaaggaaggagagcccctgcgcaagtatattcagagat

SEQ ID NO: 1017 - DNA, 406 bp, Triticum aestivum
  unsure at all n locations
  Clone ID: LIB103-022-Q1-E1-H12
attcncgggtcgacggggaccaaaaaaatacttaggatttcttattgtactgattgaactcgacaaattcttgccctgcataagcaaaggaaaagaactaggcctgtcgatactggattttaccatagttctagttctaaaaaggactgtcaatttcttcttaaaaataaggctctggcagggttctgggtagtggcccaaaccgataccaatagggatgagggatatatacttatgaatttcataattgattctattccgcaattcataactacgaaagtaagaggtcggaaatctttttatccaaaggtcnctaaaggacattcctttttttgctcctaagattgaagaagagattatacgaaagactatcaagacttcctaattatctgacactacctacact

SEQ ID NO: 1018 - DNA, 416 bp, Triticum aestivum
  Clone ID: LIB103-022-Q1-E1-H6
gacgggctccacagatatctacgacgtagttcaagctcccaaatctgacctgatggctaggggtgtaggtatggatctgctccagatggccaagcgagttggcccgcagtgcgaagctgccgaatacgaagatctgtctggggaggaagatttccccttggacatcatcgttgtagatgattgaaggagccatcaaaccttttggggacggcacagtggaactctcaatggaagcaccaatgtcgatgtcaaaactggcggatctcgggtagggggtaccgaactatgcgtctaaggtcaatggtaacaggagacaagggacacaatgtttacccatgttcgggccctctctatggaggtaataccctacttcctgcttgattgatcttgatgaatatgaatgttacaagatttga

SEQ ID NO: 1019 - DNA, 443 bp, Triticum aestivum
  unsure at all n locations
  Clone ID: LIB103-022-Q1-E1-H9
gtaccggaccagaattcccgggtcgacgggtctgtcatattcagagccgtatgtatttcgcaaatattctatgtccacaatgctctgcacggagctactctagctaattgctcccactttcaatatgtatccagattgagacttagagtcatctggattggtgtaaaagcttgcatcgttgtaacttttatgacaggctcttttatcacctccataatcgagaaacgtctccttagtcatcactaaggatattcttgacccatgtctagtgatctacttattagattaaaattgtattcctttgccaaacacagagcaaggtatacaataggtctggttcacagcatagcatactttatagaacctatgactgaggcatanggaatgacttttcattctctttctattttctgcaatggtcgggtcttgagtcttactcaact

SEQ ID NO: 1020 - DNA, 352 bp, Triticum aestivum
  Clone ID: LIB103-023-Q1-E1-A1
ccggtctagaattcccgggccgacggggatgagagcatctacatgcgcggcatccacggcatcctcgagcgtgatggtggctagtcgctcgatgtggacgcacacgaggtcttccaccacgatcgcgacctacacagcaagatggtacgctacccgcgcgaagtgcttgccagtcttcgacatcgtccttatggccctggaggcgcgtacggggccgctgtttgcgaagcatattcagagcaagatcgacaacatcacgtcatccatttgctggacgaatctgaatccgtgagctactgagaggatggtgtcaatcagaggtatgataattcgatgcagctcagtcatacca

SEQ ID NO: 1021 - DNA, 417 bp, Triticum aestivum
  unsure at all n locations
  Clone ID: LIB103-023-Q1-E1-A10
cggtcctaaattcncgggtcgaccggaataatacaagatgctattctcaacacgagcaacctaccgcccttaggcgcctggtgaagacttcttcgctcactctaccaatcattggtggctttatgccccgcagctacttctaagcctcggaggaagggcctggcatccattgcactcatcccttgatgatgcggaatcacaggagcggctgcacctttaactgtgagcagccaagcctcaaccgcctacttgagcaaatcaaggatgaagctattgcctggggtcgcgcaggagctacagagtgtctcccctgtacttgggctgtccactagcttggtgttgcgtcgtaaccagcatttttaggctttaaaatagttctttctattcattcgacccagttggtgtggcacctcagtt

SEQ ID NO: 1022 - DNA, 385 bp, Triticum aestivum
  unsure at all n locations
  Clone ID: LIB103-023-Q1-E1-A2
cggtctagaaatcccgggtcgacgggtcattgacgaatcccaagatgtatacaaggtctatagtacttcacaacatgctcaaactcacataatcccagtcaaatgaggatctaagtgcatttcatagttattactttgtaggatgcaacanaaacaaccatagctctacatcagccattatagaagcatcattttgccatatcccaatgtgtgaatgaaacgtgcagagatagcttttgaagatggagtagatanggcgggaaatattgtatgtatgtggacgagagagtangagacanacctaacgagacagagagagagatagatagagaaagagagaggaagaagttangtgtgtgagaaagatggagacatgtaatatacg

SEQ ID NO: 1023 - DNA, 442 bp, Triticum aestivum
  Clone ID: LIB103-023-Q1-E1-A6
ggtaccggtctagaattcccgggccgacggggaagacgataacgataatgaggatgcccgggctcttgtgaccggagccaggttctcatgtaatgatctcgaatgcagtttgtcaatatcacctgaaacggaccgtctgacatctcctaagctgaagatggcctttggtcttagcggcaacctgcaaagtataatgctttgaagaatcaggggatgaattagatagcggtagtacatcataccacctgatggagaaaaggagcctagagaaaagcattctgcttgagctggaacgcgatcatcatctcaaaattcaagaggaagttagaagtaagttatcttcgttggaggtatgccaccaaaatgaaatccagagaacaatctctgcatttgctcgacttcagaaatatgcagaatcacgaaaagagatagatagaaggct

SEQ ID NO: 1024 - DNA, 308 bp, Triticum aestivum
  Clone ID: LIB103-023-Q1-E1-A7
cgacctgagctgtgtgcggtggtgtcataaggagcctgtccatctccactagagttatcccaagtttcacttcacatcgtgatgttgttttaccttttttttcttgtcgtcgtcccgctgcctgctataacgggcagcgctccctgttggcgccgccgccggcgggggtggtgccctggcggcggagggtgtatgtcctctgccgccgggtgctcccctgcttgtacctagatggttggttactctttccgtccaccattgtcaccggctaacattgtgataatatcagtctgggtaatgtttagaca

SEQ ID NO: 1025 - DNA, 443 bp, Triticum aestivum
  Clone ID: LIB103-023-Q1-E1-A8
ggtaccgatctagaattcccgggccgacgggatgtggagagtaataaaatttctatgcttgtagatcatgaaaagaatactttatgttatagttatattgttgaattaattcatgatgctactgaaaattattatgagggaggagtatatgcttgtagtaattgcaataatatcaagtttcctccctatgtgttgaaaatcttgaagttatgcttgttttaccttcctatgctagttgattcttgttcccataagttgtttgctcaataaatccctatgcataggaagtgggttaggcttaaatgtgttagtcatattcttcatgattctctatttatgtttcaattcatatcttttatgtgagcatcattgagatcatcatgcctagctaaaaatgcattaaagaaaagcgcttgtttggagacaacccaatatttacccct

SEQ ID NO: 1026 - DNA, 353 bp, Triticum aestivum
  Clone ID: LIB103-023-Q1-E1-A9
taccggtcctagaatccccgggccaacgggaattactcaaaggcaaccaagaaggaaggaaccaaggcaaccgggtcctccccaacaaccggaacccaactgcaacaagaagaattacaagtaatgttccaagaatgtaataaccggttaacaataaccaaaggttgtgcctttgccaaaggtaaaggtggttaatttccaatgaacctggaagttgtaattgcctctgcattcaggctcgcttgttttggatgcgcatggcaagttctcgattaatcctaatcaagatgtagtggcgatggtttgtgaacactccctatgtagtgctgaatgatcatggtgttttcttcttc

SEQ ID NO: 1027 - DNA, 390 bp, Triticum aestivum
  unsure at all n locations
  Clone ID: LIB103-023-Q1-E1-B1
cgggtcgacggggttcatgatgattaggcatgatgcaaagaagcctgctggagcagctaaggaaatagagagttattttgactgctcagcttcagatcttgtgctggttggtgacagatactttactgatgttatctatggaaataggaatggttttcttactgtatttacagaaccattgagttttgtcggtgaatcttacattgtcagaaaggttanaaagctggaagcgtacattatcaattattggtacaagaaaggacacagaccaattaagcaccctttgctccctgatgcgagaacgattgtgaagtttgatccgtgtgacggcccagtctcacctanagcatagcacagtgatatgtatatgttgttaccaactgatacgct

SEQ ID NO: 1028 - DNA, 442 bp, Triticum aestivum
  Clone ID: LIB103-023-Q1-E1-B11
cggtccagatatccgggtcgacgggttggcaggccgaaagagaaaccagctgatccgcgcatcacaattaaaagggcagtgcgctgcagcagatgtaaaggctatggtcacaacaaagcaacttgcaaaattcctatcagcggcgaagccttgcccgccttgccaccagctgagctctccgatgtacacaataaggtggagagttgctcttgatgttccctgtaagcaaacgctgctatttttctttgggaacctgcggcatagtagttgattctagctccaagttgctctgtattattcactgttttgcttaggctagcgacgtttgtttagtaaattaaacattgtgatgtgcaccattagagaaacaggggaaattctgccatgttccgatgcccagtctattgctgttgtatttaccttcctcctgccgtgcgtctgt

SEQ ID NO: 1029 - DNA, 342 bp, Triticum aestivum
  Clone ID: LIB103-023-Q1-E1-B2
ttcccgggccgacggggatccgaaactagagtcccaagccatctacccacgccgccgccgttcccctccggcaaccatggctgggatggcatcacgctgcgaaggcaagacaaccggcgacaaaggctactgtagtgtgatttattcaccctatcgacagtcgtcgcctcttcatcctcgcctggcctacctgttccaacactttggtctggacaagatccgcgcgattatgaacagttctgatggtaagacgttcgatcaaacgatcgacacgttacgagaggaaatgactgctttcaaacgtgctcatgatgtactctacatcgtctaaggcgacgatcg

SEQ ID NO: 1030 - DNA, 425 bp, Triticum aestivum
  Clone ID: LIB103-023-Q1-E1-B5
ggtactagtcaggaattcccgggtcgacggggattccaaaatctttctcccctctcgctctctccaccaaccaagaataccaggaactcgacctcggagcagcaacgaatccgccgccgcccggcaaaagggatccaaagctccaatggctggcaagtacatcgtcgccggcctcgtcggctcctgtgtcatctcgtatgcctgtgactaaatcgtttctcaaaagaagatcttcggtggcaccatcccaaggactgtgtccgacaacgagtgggttaaggcgactgagcatatgttccaggcctggccccaggtcgctgggccgccggtcatcatgaaccccatcagccgccagaacttcatcgtcaaggacctcaagccctgatgctcaagatcctaacgtttgccgtcggttggaaccttta

SEQ ID NO: 1031 - DNA, 440 bp, Triticum aestivum
  unsure at all n locations
  Clone ID: LIB103-023-Q1-E1-B8
ggtaccagtctagaattcccgggtcgacgggggaggcgattctgcaggcggtagggcaagagcccggtcaagaattggagggcgaggcggaggagagcgcagatcgagaggggaacggcgacgacgctgggaaggaagatagtgggtgtaaagatctggtcctggtagaggaccctgtcctggtcgaggatccagaggaagcatttcaggaagaaatgagagcgcttttggcgtctgtccctgaaggtgccggggcatcatttactgcgatgcagctgcaggagctagagcagcagtctcgggtataccagtatatggctgcccgtgtgcctgtgcctacccatctcgtcttcnccatctggaagagtgttaccggtgcatcctctgaaggcgcgcagaattaccctacattgatgggattggcaacactctgcttggac

SEQ ID NO: 1032 - DNA, 399 bp, Triticum aestivum
  unsure at all n locations
  Clone ID: LIB103-023-Q1-E1-C12
gggtcgacttgaagaccatgtaggcagcataggttgtgtcttgggagaggatcttgctatttatcttcccgcggatctctaaccagcaaacatccctgagttgagcaccttcggagaacctgtcgtagacatanggtcagaacttgcaaaagaaagaaaaaaccaatcaacagcgtaagttgttaaaggaataatgcccaaaaggcattattaaattggtaatttaanattccctaanaccatgataaaggttaataatccatgctagaattgtattaaccggaaacatgatacatgtgtggatacattgacaaaacaccatgtccctagtaaccctctactacactagctatttactcaaatatggtaaagtttccaacccatacacatgtgttgaca

SEQ ID NO: 1033 - DNA, 430 bp, Triticum aestivum
  Clone ID: LIB103-023-Q1-E1-C4
cggtctagaattcccgggccgacgcaccacggagcccaacgacacctcttccctgcgcgcaaacagctgagcacgtcgcggtcgccactgatacacctcagcgccatgctgcaaagtaccaccagccgacacagcttgaagtccttggaagatatgtcgtgcgtagcacctgccgaccaggcatgacaaagcgtagcacctgtcggtcaggcatgacaaagcagttcgataacgggcacgcatgcgtcttaataaccattctaaaattctttcatacagcagcaagcagcaacagtggcgtgcaaaatttacatcccgatatttttgccacggcgcaaactcgaccagtagtccagtagtagtccgccgtaccaagtttatcaacacccgacggctaatcctagccactagctaagctgatgcttctccc

SEQ ID NO: 1034 - DNA, 222 bp, Triticum aestivum
  Clone ID: LIB103-023-Q1-E1-C6
ggtaccgtatctagaattcccgggccgacggggaaacgcaagtggctataatggctgaaggcaagcaacacgcattggcgattggattcacaaagatgtcagcgaaagacataagcaacatcaacaaagggattggagttgacaacatgcactaattaaatgatgggctgttgaaaatggaaccggttgagtaataagatcgccgttggaaacaaaatccgc

SEQ ID NO: 1035 - DNA, 436 bp, Triticum aestivum
  Clone ID: LIB103-023-Q1-E1-C7
ggtaccagtcaggaattcccgggtcgacgggtaacttaacttgaggctatatttttattcaccacatgatatgtgttttgcttggagcgtcttgtatgatttgagtccttgatttttagtttaacgcaatcatccttgctgtacacaccttttgggagagacatgcatgaatcatgatttattagaataatctatgtgcttcacttatatcttttgagctagagaatattgctctagtgcttcacttatatctttttagagcacgacggtggttttattttatataaattgttgatctctcatgcttcacttataatattttgagagtcttttagaactacatggtaatttgctttggttataaaattagtcctaatatggtgggcatccaagatgggtataataaaaactttcatataaatgcattggatactat

SEQ ID NO: 1036 - DNA, 202 bp, Triticum aestivum
  Clone ID: LIB103-023-Q1-E1-C9
cgggtcgacggcttttaacataagctcattcaggcacattggccaccccgccaaattcggcttcaacgatgacttacaggccttagtggcaggccatgcagcaggctccgcggcagaaaagcgggcgctcgagaggatccaagctgacagttgcgctgcatgcgacgtcaaagatcttcgataatgtcaccgaaattcaatt

SEQ ID NO: 1037 - DNA, 403 bp, Triticum aestivum
  Clone ID: LIB103-023-Q1-E1-D1
cggtctggaattcccgggtcgacgggccattaatttcgcttgcttatcctctatatgcttctgtgagagcaattgaaacaaaatctcaagtagatgatcagcaatggcttacttactgggtgctgtactcgtttatcactttgtttgagctcacttttgctccgatacttgaatggcttccattctggccctatggaaaactgttcttcaactgctggctagtctttccttgcttcaatggtgctgcctatgtttacgagcattttgcgcgaccaatgtttgtgaatcgccaaatagtcaacatctggtacgtcccaaggaaggagaagttgagtaaatctgatgacgtactctcagccgctgagaaatatattgaactaaatggaccggaagcatttgagaa

SEQ ID NO: 1038 - DNA, 395 bp, Triticum aestivum
  Clone ID: LIB103-023-Q1-E1-D10
gggtcgacggggagcacacagcaacaacacacacagatggggttagtgtccctctagagatctcgttcaagacgtccaagtgtgtcgagatctagagatctctgttggtttttttcatcaaaaatgccaaagcggaagaaagcctggtttcgtgatgcagatagttttgaaactcgcattacacttgaggcagaccgaggattccttaacctcttggaccggacgcaagacagtctcaggaatgcacgaaacaatgcgccaaacatgacgacgaaagtcttgggtgggtttgttagaaccttctactttgatgaagaatctaatgctgatgtcattgatggcgaaatgcaaattgagtatgatctagaacagatcaaagtataccctatcacagt

SEQ ID NO: 1039 - DNA, 440 bp, Triticum aestivum
  Clone ID: LIB103-023-Q1-E1-D11
ccggtccagaaatcccgggtcgaccagctgcttgcctatgctggcgagtgcaagcagctcgctggcataggaggtgggctgggccagtaggtgggcctgctaggtgggcttccaggtaagtcctctgttcctttttgttttctcttttttatatgctctgctctgtgtattgaaatgattaaaataccattccatttctaaaaatcctggaaataatcagaggcacatttgaaaatattctcaactgcctaaaagtacttccaagagtatttgagcactttaaaatatttatagtattgaaaatgcccaaattcaaatacttatggcttgttcaaaaatccagaatggctccataatttgcaagaccatttttggcaggggtttaaaccagagccaaaaatggtgggcttttatgaagggcattttggtttcattgaaat

SEQ ID NO: 1040 - DNA, 395 bp, Triticum aestivum
  Clone ID: LIB103-023-Q1-E1-D4
tcccgggccgacggggaagataaaaatagccaacaggcagagcagccggcttgtgtgggagacatgcctcagcgagttcaagtcgcttggcaaattggcggtcaggctcatcttcctccatgcaaccgccaaggggttcaaatgcacgccgccgatgacgcggtggctcaccgcgccaggcagctcagccggcagcattggccgggcgcaccggctggtgttcatcgcggcgaactcgaagctggagaggagggatttctcaaacgacgacgacaaggacgtggagctgctgacggaaggagacgacgacatgctaacagagactggcaatgtggatccctcctcctcctcagtgtagcattccattcctgctgctgctgctgctgcttaatttc

SEQ ID NO: 1041 - DNA, 399 bp, Triticum aestivum
  Clone ID: LIB103-023-Q1-E1-D6
gtaccagtctagaattcccgggccgacgaggagatcaaccgcgctcgccctctctggtttgctactgctggtgctcatcggactccccgacgccgccgtcgccgccaacatgaccgatgtctgcgtcaaggccgccgtcggccaccccgacacgctcggcgactgtcccttctcccagagggtgctgctcacgctggaggagaagaatgtgccctaccagatgaagctcatcgacgtcagcaacatgcccgactggttcctgaagatcaatccggagggcaaagtgcctgtgtataacggtggtgatggcaaatggattgctgattctgatgtgatcactcaagtcattgacgacaagtacccatctccatcacttgtcacccctcctgagtatgcatc

SEQ ID NO: 1042 - DNA, 439 bp, Triticum aestivum
  unsure at all n locations
  Clone ID: LIB103-023-Q1-E1-D7
ggtactagtctagaattcccgggtcgacggggcgtcgacgctcccgcaccaaacgccagcgagtccacctccacctcagccttctcggcagcgagccggcagcctcgtagctgcacgtccctctccgctcctcacctcgcgccgcgcccacactcccgagggagttcgtgctgagctccatggacgagcggtcctccggatcggtcgacgccgatgggttcccctcctcgcgtcgggaaggattcgggcatagtaaatccacaactgcaacttctagtcgttttagagggcaagatcacgcttttgtaagatcatactccgataggttgcttaagtgtgacctcacgttggatatgctatcagaaaatgagaagatgaagataattgagaaattggtaaagatccagaaagatggcacactggaggtanatgtgacccg

SEQ ID NO: 1043 - DNA, 403 bp, Triticum aestivum
  Clone ID: LIB103-023-Q1-E1-D8
attcccgggccgacctgtcatcaaaagttcagcatgtgggtgccatggagagcatcagcgtgacgatggcggaggacggagctttgcacgagcctgaccacgacctctccgacgtgtcgatgagcagggttttctctcagctgatcaaagctgaggggaggtgaaaacgcgccggatgatctgttagggtaccggtagaggtgtgggcaagccttggatttttattttcttgttgaagtttacctgagatgtgtcacgtgtaattggttgtttcatcccttgtaattgtactgaactacggtttggatttctgatggccttaccttacccacttctgcgggcacatgatttagcggatataggtatcttcttgtatggaatctattcggctctaaccatattc

SEQ ID NO: 1044 - DNA, 392 bp, Triticum aestivum
  Clone ID: LIB103-023-Q1-E1-E1
cgggtcgacgggaacagcgatgtccgagattccggtgcggggcgacgacgtgcaggtcgagcagatgaggagggagctcaagatgagtgagaaggggatgatttacgtgaaggggatattcgagacatgaccgatagctttgatgtctggagtatagtgaccaagcaagcagttcaaagcaggctttcctgtgatgcggtgcaaaatgaaggtgggagaggaggtgagggtgggttttggtaatccacgggcaaatctgtgtcttggcttcgagaaatagagatggtttttgtcgggaattcggtatggctcctaggtccaaatgatcccagtatctgtaccctgtttgtatatcaactacgtacataagagtttaacatgcattccgcaaa

SEQ ID NO: 1045 - DNA, 447 bp, Triticum aestivum
  Clone ID: LIB103-023-Q1-E1-E11
cggtccagatatcccgggtcgacgggtaaggtgcctttaggtcatggttctatactcagtgatgctgttggagttgatggactcgcttatcttccaagccttccgttgttaccgttgtaagatggccttaagccatatttattgcaataagttctcttttgagacattcgatgtaataagtgtgtgattgctattctgttataaatccttcgggtactatgagtgtcagcattattgatctagggatgacacttatgcacagagatcagactggttgaggtctggtcgctacaagatggtatcagagcacacgctgactgtaggacacgaccactaagctaaagccctagatcactactcactcttctcatgtctgacttctcatcttttctactcttttaggatggcggatgcaaggaacaagttcacgcaaccggatgaagatac

SEQ ID NO: 1046 - DNA, 406 bp, Triticum aestivum
  Clone ID: LIB103-023-Q1-E1-E5
ggtaccggtcaggaattcccgggtcgacgggtcaggtatttactcgacaaacatagaaaccagagtactctagaaaccagctctggtccacatggttgggatttcatgaatcaaactggttggagttttcaacatgaaccaagttcctgaaatcagcatgattcggatcttggatttccgaaatgaatcaagtttcagaaaccggcaatatccaaattttagaaaccaacgtgatggaaagaataaatgatttggtgaccagagtcagattctagtatgttgcaattctgcagagacactaaaaggtggtgcaccattaccgagtctttgtgctcactgatttcacacctttgtaatgctaattgaattgaaaatgagatgagaggtgataacagacatgctttta

SEQ ID NO: 1047 - DNA, 372 bp, Triticum aestivum
  Clone ID: LIB103-023-Q1-E1-E6
attcccgggccgacaggacacgtaaacatcttttcggcagcgcctccacaaatctcgtcgttccaccacctgttggaacagatgatagtccatacatggaaactgctacaacctcagcgattgacatactgatcgtggggggaacgggaacattcatcgggcattttacagactgcgtcttcgcccattcctagtttaatatcactgaaatgtacattgtgttttggttactgtaccaactcgatatcaggtcatacagcatcatcacccggccgaaatcggccggcaatgtggttggtttttgttgcctagattgctatgtccgcatatgagtggatccgcctgtccatgtctcagcaacaacttcccgtc

SEQ ID NO: 1048 - DNA, 343 bp, Triticum aestivum
  Clone ID: LIB103-023-Q1-E1-E8
attcccgggccgacggggaagagattcgtcagcacgacggcgtggtgacgatcttgatgttctaccgtcgcagggcttcgcctaagcaccgctacaatattatcgaggattatggtggaggggggcaccgcacacggctaagagaacgatcacgaagatcaacttgtgtgtctagaggtgcccccctgcccccgtatataaaggagcaagggggaggaggccggccctaggaggggcgcgccagggagtatgattcctactcctacttggagtatgtttcctcctttcctagtccaactatgagaaggggggaaaaggggggaagaggggaaggaagggagac

SEQ ID NO: 1049 - DNA, 402 bp, Triticum aestivum
  Clone ID: LIB103-023-Q1-E1-E9
gggtcgacgggggagaagatctggcatcacactttctacaacgagctccgtgttgcacctgaggagcacccagtacttctgactgaggcacccctgaaccccaaggctaacagggagaagatgacacaaatcatgtttgagaccttcaatgttccagccatgtatgtggccatccaggctgtgctttccctatatgccagtggacgcacaacaggtatcgtgttggattctggtgatggtgtcagccatactgtgccaatctatgaaggatatgcccttccacatgccatccttcgtcttgacctcgctgggcgcgacctaactgactgtttgatgaagattcttacggagagaggttactccttcaccaccaccgccgaacgggaaattgtaagggacatc

SEQ ID NO: 1050 - DNA, 417 bp, Triticum aestivum
  Clone ID: LIB103-023-Q1-E1-F11
cggtccagaaatcccgggtcgacgggaagagggcgccagctcagaccaaaggcatgaggcagaaagtgatggaagaaatattcaagcctactgatgacagcaccctcagcgctccttctcctgagaagaaggtgcgaaggatcagagactcccccttcaacaagaagagcggctcggttctgcacagaatggcgagctcttcaacagggacagaagatgctgaggctcctccctccggcagctctgctgagccagttgtaccgagaaggacaacaagggagaggaaggcagcagtagtctacgttgcttctgagagcgaagatgatgagtctgaggatgaagatgtgtcggaaccaagcgacgatgacgacttctccgaagatgactagactccttggctcaaacgcccatacattg

SEQ ID NO: 1051 - DNA, 409 bp, Triticum aestivum
  Clone ID: LIB103-023-Q1-E1-F2
ccggtctagaattcccgggtcgacggggttctttatgactaatgtgagtccatggattatacgcactcttacctttccacaatttgctagcctctacggtaccgtgcattgcactttctcacaccaagacgtggtgcaaacttcgcaggtgcatccaaaccccgtgatatgatacgctctatcacacataagccttattatatcttcctcaaaacagccaccatacctacctattatggcttttctatggccattccgagatatattgccatgcaacttccaccgcttccgtttgatgacttgagcattcattgtcatattgctttgcatcatcatatagctgacatagtagttgtggctcagccaccgttcatcatttttcatacgtgttacgctagatcattgcaca

SEQ ID NO: 1052 - DNA, 446 bp, Triticum aestivum
  Clone ID: LIB103-023-Q1-E1-F6
gtaccagtctagaattcccgggccgacgggactccggaactgaagaggtgatcagattgggaggcgccaggtggaggtgaccgccagaagccgagaaccatggggattctattcttgttgtactaacatgctatacgccgcgggcgttgcgcagcagctaatgggtttcgtctcccctgcgctcctctgccttcccttgggaaaaatgtctccgactagcgtgtacaatgcaaaatctgttgggaggctaagccgtttagtggcgacgacagataaattatttgttcactttgaatagccaaattctgtatctgatatatgctttatgcgttgtgagctcaaaacagacatttgcttctttgcttgtgttgtcagtggtgatatgcggcgcctgctcgtttcacatgtattaagaccgtatgcagtgcaaagtgcttgataaaaag

SEQ ID NO: 1053 - DNA, 373 bp, Triticum aestivum
  Clone ID: LIB103-023-Q1-E1-F7
ggtactagtctggaattcccgggtcgacgggagaagcgcaagaccatcaacggcgacgacctgctctgggcgatggccacgctgggcttcgaggagtacatcgagcccctcaaggtttatctgcagaagcacagagagacggagggtgatagtaagctacctgggaagtctggtgatgtctctgttaaaaaggatgcactgggtcctcatggaggagcaagtggcacaagtgcgcaagggatgggccaacaagtagcatacaatccaggaatggtttatatgcaacctcagtaccataatggggacatctcaaactgaagatatggaccatctccgagactgctgctactctgctaagcgggttttcgtcatg

SEQ ID NO: 1054 - DNA, 345 bp, Triticum aestivum
  Clone ID: LIB103-023-Q1-E1-F8
gtcgacgggggaacgattggagactaaacgaattggtataccaatctatacctcaccaacatctatttccgaagtttgtcgcaccacataatcaatcaatgagatggttaactacagtaactctagtactactgcaagtactatcatcacttcaagcccttgcgtgaacaagtccggttcaacatattgcatgctaccgtttctgatcaacgcctgcatgtgccgattcttcatcttcaaaggtatgggcaggtggcataactgagactccaacgacatgatgatgccatctcaactgttgcatacatcaccaccacaacatctgaatttgatgtattggtttga

SEQ ID NO: 1055 - DNA, 278 bp, Triticum aestivum
  Clone ID: LIB103-023-Q1-E1-G1
ggtctagaattcccgggccgacggggctatgatattagcaggaaaatatgacccgcattgccatcttatgcaggctaacaccggtaaccatccatcgcacacttggcgagcaattattattgggcgaactgtcctaaacatgggtctcatcaaaagggtgggaacgggcacagagatcaatatttgggaagataaatggatcccgtctaatccgtcactacgccccttgtggaaacctaataatactcaccttactctagtgtgtgacctcattcgca

SEQ ID NO: 1056 - DNA, 404 bp, Triticum aestivum
  unsure at all n locations
  Clone ID: LIB103-023-Q1-E1-G12
gggtcgaccgggtcgtactgggacgtggcagctactgcctaaaggtctgcaacatggaggcaagtggcctccacctctctctcatactcgtttgcctcctctctagttataaaatatctcctttttacctgaaagttaaagaaggcaagagaangangggtaatatggacagcatgctgtctgtcaaagattattcggtacaggagggactgctcgttccttacaagaaactggtagcataccagagcattataatcaagaaaagtangtgctaattcaatgtcattcccctttatgggcaccctgagataattagctagacgagtggcataaattccaccaaagaaaactccatccttagcattaagatgtaacctcctcgcagtaatacccccaagttatat

SEQ ID NO: 1057 - DNA, 363 bp, Triticum aestivum
  unsure at all n locations
  Clone ID: LIB103-023-Q1-E1-G3
ggtcaagaaatcccgggtcgacgggaanaagaaaggcaagaagaacgtggagaacttcaagatttacatcttcaaaggtgctaagcaggtgacccgacatcgaatccctccaagcatgtcatcatgaactccttcatcaacgacatcttcgagaagctcgccggcgaggcggccaagcttgcccgctacaacaagaagccaccatcacgtcacgggagatccagacctccgtccgcctcgtcctccccggcgagctcgccaagcacgccgtctccgagggcaccaaggccgtcnacaagttcacctcctcttaggctctttgtcaaatctcttctggcgtgtgatggattcatgtttgactgt

SEQ ID NO: 1058 - DNA, 387 bp, Triticum aestivum
  Clone ID: LIB103-023-Q1-E1-G6
agtaccgagtctagaattcccgggccgacggggcagcggctgaagctagcccggacatccggaccgccgtccggatcatccagacccagccagatcatccgggtccccctccggatcatctggataaccgcgctgaggatacccgaaggtttctcctgaagccagatcatccgggccacctcccggatcatccggacgacggccggatcatccggacccccatccggatcatccgggctttgcctgcgtgcaacgcttcgggccaaggcccatgtacccattcgccccctcacttaccccttcgcccactagactataaatagacctcctccacctcctttctagggttagcaaatatgatagctcattcttaggtgagctttgctc

SEQ ID NO: 1059 - DNA, 432 bp, Triticum aestivum
  Clone ID: LIB103-023-Q1-E1-G8
aattcccgggtcgacgggactcgaaaaaacctctcgaacagcgaccggctctcaccctatcatgacggtcagttttagctttctccattgaggtgctcaacctagctcaactggggcacaatcgcagtggttctcccagcgctaccttagccgatataatggaacgtaatgtaccaaaacatgggagccgggcaaacccaactattgacccaagacatgattccgagctgatacatataatgctataagttcggggtgccgcacttgtgaaagtgttcggacttatcacaccataatttgggttacttaagctcctggtgtacttagccgtaccaaagcgtatgggtgcaacatgtcataagtgaacatgtataaatagaaaaaggaatgcaataataggcaaaaagcgatgcatcgtttattcaaaaaata

SEQ ID NO: 1060 - DNA, 374 bp, Triticum aestivum
  Clone ID: LIB103-023-Q1-E1-H7
gtaccgagtctagaattcccgggccgacgggagctgaatgaagaccctcttctgccagttatttttgttaattcagacagattcgattgagatggcccaagatagataaattccgagcggaatttgtactagataatatcgactcattttcccatgtggaattttgagtgtttgtgctggccgatcgcttgtttgttgaatccagatagatttaagcatttcccagctgacaaaaaaaaaagaaaaaaaaaaaaaaaaaaaagaaagaaaaaaaaaaaaaaacataacagagaaaaaaactaaaataaaaaaaaataaacaaaaaaaaaaaaggggcccctcaaagggttcaagcctaacttccccgtgaatgg

SEQ ID NO: 1061 - DNA, 384 bp, Triticum aestivum
  Clone ID: LIB103-024-Q1-E1-A1
taccggtccagaattcacgggtcgacgggggagcaagtggccatcaaaaagatcgccaacgccttcgacaacaagatcaacgccaaccgcacgctgcgggaaatcaagctgctccgccacatggaccacgagaatattgttgcaataagggatattatacctcctgcacaaaggactgcattcaatgatgtctatattgcatatgaattgatggacaccgatctgcatcaaattattcgctcaaatcaagctttatcggaggagcactgccagtatttcctttatcagatccttcgtggcttgaagtacatacattcagcaaatgttctccaccgagacttgaagcctagcaatcttcttttgaatgcaaactgtgacctaaaa

SEQ ID NO: 1062 - DNA, 358 bp, Triticum aestivum
  Clone ID: LIB103-024-Q1-E1-A11
gactgctacccccagataaaaaaactacagtaacacacccaatccacgacatgcttcccacatgataccatatattacggtgggtgaacaaattactgccgagcaattgatagaaaagtgcatagttatgatagtatctatgcatgaccatgaacatatgcatcacgtccgtgtcaagtataccgaaacgattctgcatctactactattactccacacatcgaccgctatccagcatgcatctagagttctaagttcataagaacagagtaatgcattaggcaagatgatatgatgtagacaaaaaaaaaagaaaaaaaaaaaaaaaaaaagcggccgctctaaaggatccaagctt

SEQ ID NO: 1063 - DNA, 402 bp, Triticum aestivum
  Clone ID: LIB103-024-Q1-E1-A8
gtacaggtcaagaattcccgggtcgacgggcagatcaccgacatcttccgcgcattgcaaaatgggttccagaagctcgacaagatcaaggatgccaaccgccggagcatgcagctcgaagagctcactgacaagatgcgagattgcaaaaggcttatcaaagacttcgaccgagttgtcaaagatgaggcatgcagtgttgatcccaacactgctaaatttctgaacgagagaaagcagtcgctgatcaaggaattgaactcttgtgttgctctgaagaaacaacatgcaagtgaaaataagcgagttgatctttttgatgccccaagtggtgaagatgcctttggtgaagaaaatgtcctgttagcatcaaatatgtcaaaccagcagctaatgcagcat

SEQ ID NO: 1064 - DNA, 374 bp, Triticum aestivum
  unsure at all n locations
  Clone ID: LIB103-024-Q1-E1-B10
cggtcaagaaatcncgggtcgacggggcggtggtttcaggggctgaggcagatggcggctcttgagcagaggcctccggttcagtcaggaccggctcttcgaccggtttagtcttctttgccctcttactgagctttgcttgagcactgataggacaaaaggttagtacaaaagcatgagtaaagataagcacaacataagatgatcatcattacccgggtgcggtcttgaaagccggcaggttcgattgcatagaatcaccagtggaaggtgaagtgtcctgataatttgaatcagaagaattgagcggttgacgagtaacgcccgccaaaggatgaaaagggtataagttggagataacctcggtccggcgc

SEQ ID NO: 1065 - DNA, 368 bp, Triticum aestivum
  Clone ID: LIB103-024-Q1-E1-B2
gtctagaattaccgggtcgacggggattcccatagcatgcacgtatggtgaaccgctttgtgatgaagttggagcacaattttatttattgattgtcatcgttatgagtggcagtcggcgacgatcgatggtcttttcctaccaatctatccgcctaagatcatgcgtctagtgctttgtggttaatggcttgtagatttctgcaataattatacgagttctgtattgacaatgttgagtctatgcattatacgcactctcatccttcgatcattgctagcctcttcggtaccctgcattactctttatcagcttgacagttcgttccagcttcgcctgtgcatcgaaaccccgtgatacgatatgct

SEQ ID NO: 1066 - DNA, 412 bp, Triticum aestivum
  Clone ID: LIB103-024-Q1-E1-B4
gtcaagaattaccgggtcgacggggacggtggccccgtcagccggtcatcctcccatctgcctcgccgatgcttcacggctagcgggatcccgagacatgctgcggccgcgtctggtgctcttcggcgactccatcatcgagcagtccttccgccctggcggttggggagcggcccttgcggatacctaggcccgctatgcctatactgttgtcacaggctacggtggatacaactcaagatgggcgctgttcctgatcgaccgcatcttctccctggctggcttgccagccgttgctacgaccatattcattggcgctaacgaggcagcgcttctaagaccatcaacccagcagcaacatgttccggttcaggagtcaatacagaatctcaaaccaattgttaatcacctg

SEQ ID NO: 1067 - DNA, 406 bp, Triticum aestivum
  Clone ID: LIB103-024-Q1-E1-B6
tacaggtctggaattcccgggtcgacgggcagatcgccgacatcttccgcgcattgcagaatgggttccacaagctcgagaagatcgaggatgccaagcgccggagcatgcagctcgaagagcttactgacaagatgctggactgcggaaggcttatcaaggactttgaacgagttgtcatggatgaggcgggcagtgttgatctcaacactgcgaaatttctgaacgagagaaagcagtcactgatcaaggaattgaactcttatgttgctctgaacaatgaacatgcaagtgataataagcgagttgatctttttgatgctccaagtggtgaagatgcctttggtgaataaaatgtcgtgttagcatcagatatgtcaaaccagcagctaatgcagcatggata

SEQ ID NO: 1068 - DNA, 404 bp, Triticum aestivum
  Clone ID: LIB103-024-Q1-E1-B7
tcaagaattcccgggtcgacggggaatggctacatcaggatagattgctacggcggcctcaaccagctgcggcgcgatctgtgcgatggaattgcggttgcacgtcttctgaacgcgacaatggttctgcccaagtttgaggttgctgcatactggaacgagtctagacgtgtttgatgttgatcacttcattgagcaaactagaggttatgtggaggtggtcaaggatatgcccgaggagatatcgttgaaagagccatttaaggtcgattgccgaaaacagaaaggacattttgattatgtagaaacagttcttccagctcttttacaacatcgatatatttctctgacacctgccatgagccaaagaaaagatagatatccatcacatgcgaaagcttgtt

SEQ ID NO: 1069 - DNA, 412 bp, Triticum aestivum
  Clone ID: LIB103-024-Q1-E1-B8
gtacaggtctggaattcccgggtcgacggggagggcctcgcgggccccatggatggtatgatacagcgcccgctgctcattcaggaagccaggatcatcggacacctatgagcaccttcgagagactgagactgcatgaaacggtaaggccgcgcttgggctctctggtttatttcacacttgtattaagatacaagtgtaatttactcgtcatcggaaacaacgcgtaaaatacaggcgtaatgaaaccgacggcccgaggtctgtaagtaagaccggcgggttacgcgtgtaatttgagagaccggtgtatattttactagtcgaaatcgaccaaccaagcgcttcgcctgagaccatctgcttttatttacaagcgtcagttttacaagcggttttggttggcaaacga

SEQ ID NO: 1070 - DNA, 396 bp, Triticum aestivum
  unsure at all n locations
  Clone ID: LIB103-024-Q1-E1-C10
ccggtcaagaaatcncgggtcgacgggaagggaggcaatgggctgctcgcggcgaagacgacggcggccgatggcgccgccgacaaggacaatgacaagaagaatgcgcctgtgtctcgctcctctcgcgccgggattcagttcccggtgggccgtatacacaggcagctcaagcagagggtctcggctaatggccgtgtgggtgccactgccgctgtgtactctgcaacaatccttgaataccttactgctgaggtccttgagctggccggcaacgccagcaaggatctcaaggtgaagcgtgtcacccctcgccacctgcagcttgcgatccgtggagatgaggagctggacaccctcatcaagggcaccatcgctggtggtggtgtcatccct

SEQ ID NO: 1071 - DNA, 369 bp, Triticum aestivum
  unsure at all n locations
  Clone ID: LIB103-024-Q1-E1-C12
gacgggtgtatgactatggtaatgagtctctcccctttctggactaattcctccggtttatataggcaccgggaggatctagggttacacaaggtcngttacaaaggaaaagaatctacatagttggttgccaagcttgccttccgtgctaacgagagtcccatccggacacgggtgcagtcttcggtcttcgtatcttcacagcccatcagtatggcccatggctaacacgctggacgcccgaggaccccttagtccacgactccctcagtagcccctgaacctggcttcaatgacgatgagtccggcgcgcagatttgtcttcggcattgcaaggcgggttcccttctccaagatagtctccggata

SEQ ID NO: 1072 - DNA, 171 bp, Triticum aestivum
  Clone ID: LIB103-024-Q1-E1-C7
aattcccgggtcgacgggctctcggaggtactactctggttttttcagatttatttttccttcaagtactttgttttttcatggcattggggtttttctggaaaattacatgaccaccaattcaaaatggccttccaatttaaaaggtataaccaaaaatttcctgcaacc

SEQ ID NO: 1073 - DNA, 399 bp, Triticum aestivum
  Clone ID: LIB103-024-Q1-E1-C8
attcccgggtcgacgggcactccgatgtcaaatccagggtttttcaaagggaattttcgtacattcactcggtttcatcagggcagtgaagtttctcatgtataatatattcgcatcagttgcatataagtcatgctacttgcacagattaaccaaatattatcatgccacatgaatggtagattatatctccgaatcatttacatcaggaagggatgaggaactccaacacatgtactggcccagccataatgtttgcgtacatgtaggattgtaaggatctagcataaattttcttgttggatggtggttttagaatctgattcattttctgattccaattgacagaagacgtaacccaatagtatagctaaatcagagattcgttaactgaatcca

SEQ ID NO: 1074 - DNA, 405 bp, Triticum aestivum
  Clone ID: LIB103-024-Q1-E1-C9
cggtcaagaaatcccgggtcgactcccacttctccaatgcatatcctttcatttacttctcgcgttcgatgaagttgtagtgttgaaattttatatggcaaaataccagaagagtatgactcgtgaaaactttcgagttcacacatattaaggaaggcataggttcaagccatcggggcttcttagaacatataccacgaacttcagaagtaaataacacaagctcaaaagtagagcatggttgataaagcagaggatacaatttaccaaaggctttatatattcatggaaaagctcacaaggttatttgaatatgaggatattgtgagataaactccaacaaaggatccggtggtcttcaagggatctgatgtgagcatcggtactcaaccagaggaaaaaaga

SEQ ID NO: 1075 - DNA, 124 bp, Triticum aestivum
  Clone ID: LIB103-024-Q1-E1-D1
ccacaccctatagtgagtcgtattaagtgcattcggcttgtgtgggagacatgccgcagcgagttcaagtcgcgtcagcacagtggcggccagggtcatcttcctctatgcttccgctaagggg

SEQ ID NO: 1076 - DNA, 271 bp, Triticum aestivum
  Clone ID: LIB103-024-Q1-E1-D5
gggacacccgtatagtgagtcgtattatggagtcagtgagaacatgatacatatttctgcaaacgtctgtgagaccagttacactgcacgtgtggcaacacgcctcagtcacagccgcgcacaatcaggcaatggcttattcactgatctacgtgtgcgcgaggtagacctgctaggggcataaccatggaagcaccccctctatcaggttactgttaagcaatgattcagagttgaagttcatctcttcatagcttacgtggcttcatca

SEQ ID NO: 1077 - DNA, 463 bp, Triticum aestivum
  Clone ID: LIB103-024-Q1-E1-D7
gtaaggtctacaattcccgggtcgacgggagctttacggctttgctctagagaagatcggcagcaccaaggctgaataccgaagggttcaaactttggagctggtggactgcatattgaaatcctgggtcggcgacgatgtctcgagcgcatcaaaggttttgaagaagcatatggctctgctgtgcgagctgatgcaggaaatcctcacaaagatgcccgaaaacaagtcgcgtcgccaggaggtgcgtaggttctgcacgcgggctctgcaaaccgtgacgaggctcaacctgaaagagaagtttcagaagaagctaagctcggaagcgtacaccctgtgtgaggcacagctgggagctgcatttgttcccttccgacagtgatgcatgtgaattgtttcccgaaaacattgaaaggggccccaaatttaatttggggcaaatttaaaaaaaaaaaacaaa

SEQ ID NO: 1078 - DNA, 420 bp, Triticum aestivum
  Clone ID: LIB103-024-Q1-E1-D8
gtacaggtcaagaattcccgggtcgacgggacggcgtcggagtcggcggcgcgcatcttccggtcgatccagatggagaggcagcagaacggcccgtgaccgagcgacctcatgcggtggttggccggcagaaagaaagaaatgaaggaagaaagcttagccaattagcgcttgggagtatgttgttatttttgagcaggcaatagcattcctatatatttgtccctcggcgtcggtaaaagcgaatttttggcgactgtaaatatgcaaagcaaagcaggacttgtatctatctatctatctatctgtctatctatgccacaatgaaaactgttaactgttagtgttagggtgtatgtctcaggcaaaaagaagtgaaacctgggagtgatgtctctgctgtattatctatgtatgtgc

SEQ ID NO: 1079 - DNA, 431 bp, Triticum aestivum
  Clone ID: LIB103-024-Q1-E1-E11
ggtcaagaaatcccgggtcgactgcccggacgccaaagccttagcagcattcaaacagaacgtgtgagacgaatggctcgacacctcggccaagaaaagccaagaacaatggccgcattgacaagcctcatgacccgcttttgcgcgggagaggatagctggctggcaagatgcagtaccaatgacccaagtacatccgaagtcagggatggaaatgggaaaccgcaacacagcaaggaccagcacaggaccaagggaaatagcccgaagagcacagcagtcaacgccggattcaaaagctctcggcagaatcataaaaaactgccccttaaggataacagggacgagctatctaacttagacaaaatcttggacaagatatgccaaatccacaatataccccgggaaaccttgaaacccatacccacaga

SEQ ID NO: 1080 - DNA, 367 bp, Triticum aestivum
  Clone ID: LIB103-024-Q1-E1-E2
ataccgggtcgacggggatgaatgaatccattgtgagaagagcccttgtgatcatgcaccagagggacgaagtggagtacaagagggagcgccatgtgattgtccgcaaggcttgagctgaactgaaccgatggagctaccatggaaccctctggccatctgatgtgtgtgtataagtagtgctgacactgcagcccgtttcctgaggaaatttgttgggtcgttgaaattgagttgtagttgtactactttgagctgtagctgtagccctaaatcatattgtgtcgaactgaagatgtaccccagtaagttcattcatgaatgcaacattttggcgttctgcagctgagcagagtcaatgcctaag

SEQ ID NO: 1081 - DNA, 275 bp, Triticum aestivum
  Clone ID: LIB103-024-Q1-E1-E5
tacaacacccaatagtgagtcgtattaggtggtgcggatcatgaaggtgtaccgtcccatggattctcatagacacaccggtcatgggtatcgacgattactttctgcagtaggaacagcatatggctagcagtagcatcacgaacctcatcttgtgtgatctacaacttcacgactgccagcttacgtagacgaccattgtggacgagcctgcgacttctacacgtgcgccaggtactaggattcatactcctacggatcatacgtttcctcct

SEQ ID NO: 1082 - DNA, 371 bp, Triticum aestivum
  Clone ID: LIB103-024-Q1-E1-E7
caggtacaggtcaggaattcccgggtcgacgggaagaacccctgcgtcgccacctgcgataagcgctgccccaacgagtgcatcgttatgtgcccaggttgcaagacctactgctgtaagcatatatacatacatcatgcgtatcacctatacatatattcacacatactagctatgtccatacaaattaagaagtcgagatgcctaaattaattacttaacatttttgtacgagtgtgcgacttctaccccggcatgtcgtgcggggacccacgcttcactggtgccgacggcaacaacttctacttccacggcaagaaggatcaggacttctgtgtcctctccgatgccgacctccacatcaacgctca

SEQ ID NO: 1083 - DNA, 394 bp, Triticum aestivum
  Clone ID: LIB103-024-Q1-E1-E8
taccggtcaagaattcccgggtcgacggggagcggcatactttcattgtcaacataacaaccaagagatggcgatatcttccatgctacacacattataagcggttccgaaacagactggtatagtttagactccccctccaccaacaagcatcaatccatgacttgctcgaaacaatgagtgcctccaactaacaatagtcctgtgggagttttgttagcaattaatttgatttggattgcataatgcatgtgactgggcatcacggtgaccagccattttctcatgagtgaggagccgagtccaatcgtcttgagaataacgcgcctagcatggacgatacagacaaccctaattagtacatgcactatacgagcatgcacaacataatttc

SEQ ID NO: 1084 - DNA, 404 bp, Triticum aestivum
  Clone ID: LIB103-024-Q1-E1-E9
ccggtctagaattcccgggtcgacgggcggctcatcgcatcatgcatgcttttcccatcccctttctctcgggctagctggctcagggtgttgccttgtgaagacaagattgtagttagtatgcatacatgagtatgacagaccatagttggagcacaacaatggcttccatatcgatgctggccacaagaacgagcacagagcataggccatggtgctggcctgctgggagccttgcgagggccaggcacgatgccacaccacacgcccaagctgcagcggtagtgacacaggtgcacagtgaggcgaaggcgatgccgaccggcatggtgatgccgagcacaggcaaagaaaccctatgtttcaacacaaggcatacatcatgtaaatgtttcgctcgaaca

SEQ ID NO: 1085 - DNA, 326 bp, Triticum aestivum
  Clone ID: LIB103-024-Q1-E1-F1
gggtcgacgggaaggccgagtaggccagtaggagaggacagatctacgctcccgagactggtaataataaaggcggtggattttgcctccactcggtgatgtattcttccttgctactgatagtgatttagtgcactgatatgttcttcaaaaaaaaaaaaaaaaaaaaaaaaaaaaaaaaaaaaaaaaaaaaaaaaaaaaaaaaaaaaaaaaaaaaaagaaaaaaaaaaaaaaaaaaaaaaaaaaaaaggggccgcccaaaaggttcaaacctaacttacccttgaatgcaacttaaaacctcttcaaaagggtcaccaaaatta

SEQ ID NO: 1086 - DNA, 375 bp, Triticum aestivum
  Clone ID: LIB103-024-Q1-E1-F10
gagagtaaaaggatcggccggacaagccttgttcaaatctgtgtattcaacacacatgtgccaagtgccgtttttcttaagaacgagcaccagattagccaaccactcagggtgaaatacttcgacgataaacccagcagccaacagtcgggctacctcctccccaatggccttgcgtctttctttgttaaagcgacggagaaactgcttgaccggtttaaacttgggatcaatattgagagtgtgctcagcaagttccctcggtacacctggcatgtcagaaggcttccatgcaaaaatgtcctggttctcacggatgaactcgatgagcgcgctttcctattttggatccaaattggtgttgatgctaaactg

SEQ ID NO: 1087 - DNA, 364 bp, Triticum aestivum
  Clone ID: LIB103-024-Q1-E1-F3
cgggtcgacggggacgctgacaagctcgcccgctacaacaagaagcccaccatcacctccagggagatccagacctccgtacgcctcgtcctccctggggagctcgccaagcacgccgtctccgagggcaccaaggccgtcaccaagtttacctcctcttagatcgcgtcgcctgtatctagtagcaaatgtagttccttgctgttggcttagtgcttgtctgtggactctggttatctgcaagtaatattagtcctactgttggaaaaaaaaataaaaatatatggtaaaacatcaatcaagacacaacaaggaaagcaataacaagacatcaatatatggaactgcccaaacaatcaagaac

SEQ ID NO: 1088 - DNA, 428 bp, Triticum aestivum
  unsure at all n locations
  Clone ID: LIB103-024-Q1-E1-F4
gccggtctagattaccgggtcgacgggcggtaactttacttggagctatatttttattcaccacatgatatgtgttttgcttggagcgtcttgtattatttgagtctttgcttgttagtataccacaatcatccttgttgtacacaccttttgagagagccatacatgatttagaatttgttagaatactctatgtgcttcgcttatatcttttgagttatataattttctctagtacttcacttatatcttttagagcatggtggtggatttgttttatagaaactattgatctctcatgcttcacttagattatttttgagtcttaaatagcatggtaaattgcttaaataatcctaatatgctaggtattcaagattagtaaaaactttcttatgagtgtgttngatactaagagaagtttgatg

SEQ ID NO: 1089 - DNA, 390 bp, Triticum aestivum
  Clone ID: LIB103-024-Q1-E1-F7
gtacaggtctggaattcccgggtcgacgccgatctggtgctcatcctggaagaagcagaccctgttaggttggtgagatggatgagctgttggcagctcacacaggacgatgacaagaacctactgaccgcgaaggcgagaaggtcagagaaggagcccagcagagcaacaatcgaatgaagcaggacatctggtaggtcttcccaatctttatgtccagacatggcgaggacgcaacacacaacagccctttcttgcgttctgcaggttgcagcttcccttgaggagtgaatatatatggtatatcttccctcatgaccctacagggacagcatcagaagacatgaacaaataactctgagcaaaatgtgatgacacaagaatcatgac

SEQ ID NO: 1090 - DNA, 460 bp, Triticum aestivum
  Clone ID: LIB103-024-Q1-E1-F8
taaaggtcaagaattcccgggtcgacgggcagcagctgggcctccgcatccacgccaagcagaagctgcccctcgcctacaacgcactcctccaggctcacgcggagatcgacaccgccacccggaagcccagcctactcgccgtcctcgcaaggcacttcttcccacagctgtcggccaatgttggagccggagtcgagctggagaggggcaacatcttcaggtacaccctccgggggaagaaagccgtctccttcaccgacgacggcctcctcggcctcaacatcaagggccgcctcctcgccgacaagaacttcaagccgaggaggaagagcggcgccatcgagctcgcctggaccatactcgacttcagaaagggccaggacgtcaggatgaaggccggctacgagctataccgcaagatgccttatttccagctgatggagaacaactggacgct

SEQ ID NO: 1091 - DNA, 415 bp, Triticum aestivum
  Clone ID: LIB103-024-Q1-E1-F9
ggtcaagaattcccgggtcgacgggattgaggaggaatacagtcagtagatttgacaatgtattttaaaatgacatgtgaaatgccttctagccggattgtagatcgtttgtctttgccgaccttttcgcttcaacctcgggaccctagagttcggagtgtgtccgaataccttctcggttaagaaacaacctgggtatgcatggagaccaggcgtaggggtcattagtgctttatcagacaagtgcccaactagttatgttatattacatggttagtaagaaacatcttccagggagaatagttccgttaagggttcctttccctgggaggcatgccctaaagtgcatgtccggactgcgaaaagagcagaaaaacatctgggggcagataaataagtatggaaaaatcaacct

SEQ ID NO: 1092 - DNA, 399 bp, Triticum aestivum
  Clone ID: LIB103-024-Q1-E1-G1
ggtccagaattaacgggtcgacggggatcttgtactactgctcaacagggaggagattggtgacaatggagttgtctgggaggttgaggtaaagtaggacttacatcctggggagtttgagggtaaaaggatcaagatttactacagttgcttcacaactgcatacttggtccagaaatgaagatcaggatgatgcactctcatgaagcatcaacttgagctcaaattgggcagggcttagtcattaggtcatatgatgatgctgtaaaaagatcatgctaaatggaaaaaccaaaatagcacttgcttcacaaacatcatttctgtccagaaacttggaataattatggtggtcaaatggatcaatgaaatgatgccaaaatgggtggagagatgttt

SEQ ID NO: 1093 - DNA, 391 bp, Triticum aestivum
  unsure at all n locations
  Clone ID: LIB103-024-Q1-E1-G2
gggtcgacgggtcatcaatatgggcgtgggtaacccaaccgcttctaagactcttagatcataggcaagtccaaacggacacggataggacgttcgatatccaccctctttataaagggacgaggccttttatttttccctcccgtgctcaatcgaatccttcccccacctcaagctcaaatgcccaaagttcaggtcaggtgctccgaaccttcagtcatgtccggatctagccttcaaggccgatgggtgccttcttccgtcacggaagaagtcgtcaaaacgttgagggaggccagatatctgaccgccgagattctgcatcgactgcctccccgggggcatgccatcncctcctccgaacccaacgagagcgtcgtgttcgtctccc

SEQ ID NO: 1094 - DNA, 301 bp, Triticum aestivum
  unsure at all n locations
  Clone ID: LIB103-024-Q1-E1-G3
ggtccagaattaacgggtcgacgggcggtggcacgagcttggagctgctggaaggcaagcncctcccaggtgttcttgcncttgacgaggcgtaggttgattcggtttcacctatcagcttgctgcgtgcccttttgtttgggatctcatctcggtgtaacgctgcaacgttatatgtcccaagtaaactttgagataggcttgtcgccaatttttgctattaggtgagtcgtgaataattatgaacttcctctgtgcgagtgaagtgaggtgactggaatttaacgtacccctgtggatg

SEQ ID NO: 1095 - DNA, 387 bp, Triticum aestivum
  Clone ID: LIB103-024-Q1-E1-G5
gtacaggtcaggaattcccgggtcgacgggaggaggaccccgactcggatgacggctgctgaaagatcacgcacttcttcggcccacagagcggctccgcttatggcttatccaaggttggagcttcaccggcgccatggttgtgctcggaggaggactgccgatgctcgccgctgctgtcgtccacatgctcctcctcacgaccacgggtggacgttggctgaggtctagcctcccatccacgcgcagattatgcaagaatctgcttggtctgcatattagtaccgactagcgagcacaggaaggacgacttggacctgacgacttggacgttggctgaggtctagcctcccatatgcatatttgaccagtactacgcgcggcccg

SEQ ID NO: 1096 - DNA, 383 bp, Triticum aestivum
  Clone ID: LIB103-024-Q1-E1-G6
ttcccgggtcgacggggacaacatcaacaacaagctgcagcttgtcatgaagagcggcaagtacacgctcggctacaagaccgtcctcaggaccctcaggaactccaaggcaaagcttgtgatccttgctaacaactgccctccgctccgcaagtctgagattgagtactatgctatgttggcgaagatcactgtccaccactaccatggaaacaatgttgatttgggaactgcgtgtggtaaatacttccgagtctgctgcctgagtatcatcgaccctggcgattccgacatcatcaacgcaacaccagctggccagtaaacctgtgtatgccattttcagtgtctcgtctgatgcgtcatctaaggtggttctagagtgt

SEQ ID NO: 1097 - DNA, 190 bp, Triticum aestivum
  Clone ID: LIB103-024-Q1-E1-G7
cccgggtcgacgggggacgcgatgtttacccaggtttgggccctctctatggaggtaataccccacgtccttcttgattgatattgatgaatatgagtattacaagagtggatctaccacgagatcataatggctaatccctagaagtctagcctatgtgggtatggtaatgagtacatgtggtgtcctt

SEQ ID NO: 1098 - DNA, 371 bp, Triticum aestivum
  Clone ID: LIB103-024-Q1-E1-G8
tcccgggtcgacgggcgatagaggaaaagctgaggaggtttaggttgacggagatcagtcagcagctgcgtaggatggacctgatgaaggagacggtgaggatggtgctcgatgcccttgagagtgctgactgaataatggctgatcgatagtgattggtaaactgttggaagggggaaatcagtctttttgtttctagatagactatatgtggttaattacttacttccctggacaaggttgcagttgcctccatcaaaattaggcatagaacatggagtgatggtcttctccttgttattgttcatggatcattgtattttgggattcttaggtgctaacttgtggtttatatgctatttggttgtgtc

SEQ ID NO: 1099 - DNA, 324 bp, Triticum aestivum
  unsure at all n locations
  Clone ID: LIB103-024-Q1-E1-H1
gggtcgacgggctggaagatggaactgaagcaaacttggccgcagctattcaggttgctcagctggcgctaaagcatcgccagaataagatgcaacagcagagaattattgttttcattggaagccctgtgacatacgacaagaaggtcttggagacaatagggaagaagctgaagaagaataatgttgcccttgacgttgttgattttggtgaaactgatgatgaaaagcctgagaaactggaagcgctgatcgctgctgtgaacagcagtgatagcagcccacatcgtcatgtcnctccggggtgacatgccctttctgatg

SEQ ID NO: 1100 - DNA, 390 bp, Triticum aestivum
  Clone ID: LIB103-024-Q1-E1-H11
gggccgacgggaagccccgtagcatgcacgtatggtaaacgttatgtaacaaatttgaaacatgaggtgttctttgattgtcctccttatgagtggcggtcggggacgagcgatggtcttttcctaccaatctatccccctaggatcatgcacgtagtgcttggtttttgatggcttgtagatttttgcaataagtatgtgagttctttatgactaatgttgagtccatggattatacgcactctcacctttccatcaccgctagcctcttcggtaccgtgcattgccctttctcacattgagagttggtgcaaacttcaccggtgcatccaaaccccgtgatatgatacgctctttcacacataaacctccttatatcttcctcaaaac

SEQ ID NO: 1101 - DNA, 137 bp, Triticum aestivum
  Clone ID: LIB103-024-Q1-E1-H5
ttcccgggtcgacggggaccaccactcccagcaacggaaccaacaaatcccaagctaatctcgtctccgatcgactcgaggcttgtcgaatcctccttcaccaccgcctcaagatgcagatctttgtgaagacactg

SEQ ID NO: 1102 - DNA, 344 bp, Triticum aestivum
  Clone ID: LIB103-025-Q1-E1-A2
ctgtaaatgttgttgttgttgttgttgttgttgttgtcattgctgttgctgttgctggtgctattgctggtgttgttgttgttgttgttgctgctgctgctgctgttgttgttgttgttgttgctgttgatgttgctgttgccgttgttgttgttgttgttgctgttgttgttgctgttgttgttgttgatgttgttgttgatgtcgttgttgcagtagttgttgttgttgttgttgttgttgttgttgatgttgatgttattgttgttgctgctgcagttagctgctgatgttgctgactgatgttgctgttgttgctgtagaagttgttattgctgtttggt

SEQ ID NO: 1103 - DNA, 396 bp, Triticum aestivum
  Clone ID: LIB103-025-Q1-E1-A4
ggtccagaaatcccgggtcgacttcttctcccccggctgcggtggctgccgcgctctccaccccaagattgcgcagttcgctgagcggaatccggacgtgctgttcctgcaagtcaactacgagaagcacaagtccatgtgctacagcctccatgtccatgtcctccctttcttcaggttctacaggggagcccagggcagggtcagcagcttcagctgcacaaatgcaaccatcaagaagttcaaggacgccctcgcaaagcactcgccggacaggtgcagcctcggcccggcgcgggggctcgaggaggcggagctcttggccctggcggcaaacagggacctggaattcacctacaacgagaagccgacgctggtgccgatcgccgaggctat

SEQ ID NO: 1104 - DNA, 370 bp, Triticum aestivum
  Clone ID: LIB103-025-Q1-E1-A5
ttcccgggccgacgggattatggttgtagaaatttttatcttattaaattacctctcgtcatgttgagattgctatcgtctctttcttcttccttgcatatgcttgtttttgcttgccttgcaaatttgtttgattataatatgcctatgcataggaagtatgttagaattagatgtgtttgtcctgtgtttcatgatgctctctttgtgcttcaatttttgtccttcatgtgagcatcattaaaattatcaatgcctagctaggggcgttaaacgatagcgcttgttgggacgcaacccaatattttcccttgctgttatttaataaatcttgcgtctaccttatgtttaaatgtttttttatctttta

SEQ ID NO: 1105 - DNA, 435 bp, Triticum aestivum
  unsure at all n locations
  Clone ID: LIB103-025-Q1-E1-A8
gtaccagtcaggaattcccgggccgacggggcttgcaagaccaaaccaaagctgcggcggcgcgcgcataggaggcgaatcagcagcggaaccaagccgccgacgccaccatgggtatctcgcgtgactccatgcacaagcgccgggccaccggtgggaagcagaaggcttggaggaagaagcgaaagtatgagctcggccgccagccagccaacactaagctttcaagcaacaagacagtgaggagggtccgtgttcgcggaggtaacgtgaagtggagggctctccgtcttgacactggtaacttctcatggggtagtgaggctgtgacccgcaagacccgtctcctggatgtggtttacaattcgtcaaacaatgagcttgtgaggactcnagaccttgtcaagaatgcattgtgcaggttgatgctgcccc

SEQ ID NO: 1106 - DNA, 412 bp, Triticum aestivum
  Clone ID: LIB103-025-Q1-E1-B4
aggcaccggtccagaaatcccgggtcgacggggtctatccacccgtccatggatggtgcaattggctctgaattgagggtcggagcggttgtcggtgcggtctcctggacactgtccgatggtagagctaaatcatgctcatcgtgaccgtgcggcgcactcggcaggggctcgaatccgtcgaagatgaagtctccgcggatgtccgacgtgtagtttaagcttccaaacctaacctggtggccaggggcgtaactctcgatctgctccagatggccaagcgagttggcccgcagtgcgaagccgccgaatacaaagatctgtccagggagaaaagtctcaccctggactgcatcgctatcgatgatcaaaggagccatcaagcctaatggtgacgacacagaggaactct

SEQ ID NO: 1107 - DNA, 358 bp, Triticum aestivum
  Clone ID: LIB103-025-Q1-E1-B5
aattcccgggtcgacgggttctgaaacctgggatgcgcaaggaagctgacgagcgggaggccctcacgggccgcaccgctggccgaccctgatcttctgtgaagggttcgagttggagcacgcctgtcgggacccgaaagatggcctccgcctcctccgggatgctgcacgacgtggctcccctccctcgtctgctgctgccgccgaccttgtcacgtcctttgtggccatcggcaacttcgcaaaggtgtctgagacgctccacctcatgatctctgcgggatgtcctccagctacgtttgtctaccagcgagatcaagctgcgtggttatgccatagatgtagtcacttacagcac

SEQ ID NO: 1108 - DNA, 390 bp, Triticum aestivum
  Clone ID: LIB103-025-Q1-E1-B6
aattcccgggccgacggggaagaaacccaaggcggagaagcgggcgccggcgaccaaggaggccggcggcgaggggaagacgaggggcaggaagaagggcagcaaggccaagaagggcgtggagacgtacaagatctacatcttcaaggtgctcaagcaggtgcacccggacatcggcatctcctccaaggccatgtccatcatgaactccttcatcaacgacatcttcgagaagctcgccggggagtccgccaagctcgcccgctacaacaagaagcccaccatcacgtcccgggagatccagacctccgtccgcctcgtcctccccggcgagctcgccaagcacgccgtctctgagggcaccaaggccgtcaccaagttcacctcatc

SEQ ID NO: 1109 - DNA, 431 bp, Triticum aestivum
  Clone ID: LIB103-025-Q1-E1-B8
ggtaccgagtcaggaattcccgggccgacggggtacgtagggaagcaccgcctctccgccgccatccagcgcctcgaccaggagctccagtcactccaggatgaattgaatgagcttgaaaccatggaacctgcatctgcggcatgccgggaggtgatcacaagtactgaaggaaagcctgacccgcttcttccaatcacaagtagcccggagaactcttcctgggacaggtggttccagcgcgtgcgaagctcccgcagcaacaaatggtggcaatccaaaggctccgattttgcctagctttcgccgaagctgagacaagctgtgtgcagattgaatctcccctgatccgtatggtccatccatggatggcttggcaacagaatacaacccagtttttcctgagaattgttgtgtatgtaatccctaac

SEQ ID NO: 1110 - DNA, 446 bp, Triticum aestivum
  Clone ID: LIB103-025-Q1-E1-C2
cggtccagaaatcccgggccgacgggtgattcaatacacacatcaccaatcgaggaggagaacgatggtcgcggcggcctctgtgagtcatggtcggcaacgggagtcagttcattgtccacgacggtggtacttctgcgcttggcatcggctttcgagaagcagatcgaagaccgtggaagacgatgccggggaagaggctctgtgtacgacgacgatggtggaccggctccagtgcggcgtacgaggtcgtcgatgaggcagatgcgctgcggtggacgagtgcgccgatgtaaaggggaggagcacgaaggctgcggtgccgtggagaagtctattttgcggtggggatagaaaatggggagtattcaggtgtactactctgggtgccgggggtggggttggttgggtagggtgaaacctgaagttacgaaaacagcccccta

SEQ ID NO: 1111 - DNA, 402 bp, Triticum aestivum
  Clone ID: LIB103-025-Q1-E1-C5
ggtaccagtcaggaattcccgggccgacgggtgacatcagcaagcgccggccagcctcggcacagctgcgggtggttatatggtgggcggagtacacgagtgggttccgatgtcaggataaccaccgtccatagctctcatgtgaatgtggcaaggccacaaaacaagttttccatcgccagatatccaacagatcaactggtgttatggatgcgtcttaaagatatttttttgtcatttcaaacatcaaacaccaactattcacaatggagacacagccgcttcacttctcccaggtaaaggaaaggttcgcccatggctccgtcgcagcccaagtcgggcctcttcgtgggcatcaacaagggccacgtcgtcaccaagcgcgagctgccgccgcgcccg

SEQ ID NO: 1112 - DNA, 391 bp, Triticum aestivum
  Clone ID: LIB103-025-Q1-E1-C6
ccaggtaccagtcaggaattcccgggccgacgtgttaattgtcgtgatttgccgattggtactctatatgtttgccaaataagctgtgcaccgtgtgcacctttggaacagtgaagtagtaattattttgtgaaaaaaaaaaaaaaagaaaaaaaaaaaaaaaaaaaaaaaaaaaaaaccggccgcccaaaaggatcaaacctaacttacccttgaaggcaactccaaacccctccaaaagggccaccaaaatccaatccacgggccgccgtttaaaaacgccgtaacgggaaaaacccggccgtaaccaaactaaaccgcctggaacaaaaccccccttccgcaaccgggcgtaaaaccaaaaaggcccgaaccgattgcccttccaaaa

SEQ ID NO: 1113 - DNA, 447 bp, Triticum aestivum
  unsure at all n locations
  Clone ID: LIB103-025-Q1-E1-D4
ccggtctagnaatcccgggccgacgggatggcgaaggggtggcctgagaagctgaagcatgagctgcacgagcacgagctcttgctgatccgccgccccaggccgtacggctgcgacgggtgcgaagagatgggcacctcctggtcctacaactgcgcggagtgtgacttcgatctgcacaccaagtgcgcgctgggtgaggagaagaagggagaggaggtgaaggggcaggaggatgctgctgccccagctgggtacgtgtgcgagggagacgtctgcaggaaggcctaggtagcgttgtgttgtgtgtgttcctttccagctgaagcgtgtctgaatcatgtgctgtgtggtgtgatgataaataaatcttgcatccgatggtttggcttgggaagtagtatttgtcgtggtgacattcatgtgcaaagtcgtctgagtatatgg

SEQ ID NO: 1114 - DNA, 383 bp, Triticum aestivum
  Clone ID: LIB103-025-Q1-E1-D5
ggtaccagtcaggaattcccgggtcgacggggggtagggtgtgcgtgcgtgcgttcatagggatgagtgtatgcgcgtgtatatgagcgcttgtgtctgtactgatgcttaaaaaaatcatttgcctggccagtcgttgatttcaaacaccacaatctgattagagccgcatgatcgcgtcctaacatgttcagagtccccctcacccaaaaaaaaaacatgttcagagtcccccgtagcaattccaaccagcaggaatgcttgccaacttgcaccagccatgcagcacctcgtcgctggtcagctcagattaaaaatccgacgagcacgccacacatcggccacggctgcagggccgaagagctcagagtttcaacaccggg

SEQ ID NO: 1115 - DNA, 431 bp, Triticum aestivum
  Clone ID: LIB103-025-Q1-E1-D6
aggtaccagtcaggaattcccgggccgacgggccgctaactgtccggcttgacggatttcctcgcgtgctgtgcaggattcggaccgtgcctccttggcgtcttgaagggccttggcgagttcggtccctttcgccttatgttcttcttctaaggactcacacttgcgggtggtgtccttgagcttctgctccacctcggtcacccgttcctcaaaacggcgccgagcggcctgttcggccgttatgtccgcagccgctttatcagtgacggccttgcttaccctcgcttgctccttggcttgtgtaagctcacccctgagggtctcaaccacggcggcaccatctgtacaaacacacatattgcggctcttgaaatttcgcagcacacggacataaacatgcattaaataagatgtgtcttgtaccttgc

SEQ ID NO: 1116 - DNA, 391 bp, Triticum aestivum
  Clone ID: LIB103-025-Q1-E1-D7
aattcccgggccgacggggaagaaacaggaggccctcgagaggctaggcgccgacggcttcgttgtcagcaagaacgccgacgagatgaaggctgcgatgagcaccatggatggcatcataaacacggtgtctgcaaacatccccatggcccctctcttcgggctactcaagcccaacggcaagatggtcatggtcggcctcccagagaagcctatcgaggtccctccctttgctctggttgccaagaacaagaccctggccgggagcttcatcggcggcatgagggacacccaggagatgctggacctcgcggcggagcatggtgtgacggtagacatcgaggtgatcggcgccgagtacgtgaacacgggcatggagcgccttgccaaa

SEQ ID NO: 1117 - DNA, 384 bp, Triticum aestivum
  Clone ID: LIB103-025-Q1-E1-D8
aattcccgggccgacgaggccttcatcgctaagtatgatgtcaagccgaacaatgccattctcgccgaggacaagcacttgcccatgtacgatgagttgtccagcaaggaaaatgttgaatacattgctggaggagccacgcagaactctatcagggttgcccaatggatgcttcaaactcctggtgcaacaagttacatgggttgcattggaaaggacaagtatggtgaggagatgaagagcgccgctaaagctgcaggagttactgctcattactatgaggatgaggctgctcctacaggcacatgtgctgtatgtgttgttggtggcgaaaggtcattgattgcaaacttatctgctgcgaactgctacaaatctgagcat

SEQ ID NO: 1118 - DNA, 407 bp, Triticum aestivum
  Clone ID: LIB103-025-Q1-E1-E10
gggtccacgggggaacgataagatcatggctaggggaacttttgccaacgttcgtattgtgaacaagttcttgaagggagaggttggcccccaaaccatccatgtaccatcaggggagaagcttgctgtttttgatgctgctatgaaatacaagaacgaagggcatgacactatcatcctggctggtgctgagtatggcagtggaagctcaagggattgggctgcgaagggtccaatgcttcagggagtgaaggctgtgatagccaagagttttgagaggattcaccgtagcaatctcgctggaatgggcatcgtccctctatgcttcaaggctggggaggatgccgacactcttggcttaacaagccatgagcgctacaccatccagcttccgactgatgtgaatg

SEQ ID NO: 1119 - DNA, 409 bp, Triticum aestivum
  Clone ID: LIB103-025-Q1-E1-E3
cggtccagaaatcccgggccgacgggggccgccaggtaatagggacgacggagcggttcactagccaaatgccgtgggctagaagtaatttccccccgaagatcgatcaaatccggagcagaaatagcagttcggcttccgttgcccatctcatatactcgttaaaactataccacacatatataactacgcacttaagataccatgggcattggcggaagcgtaatacggacaagtctgcaagcactccggtaacatttttttctactttcctttttctttcttcattacctcttaaaaacaggtggcgcaaaggagaaacatctaaaaccgactctatcggagttcagatctgtacactcacctacggggctacttccttcaatgattccccttgccgaaggacggc

SEQ ID NO: 1120 - DNA, 370 bp, Triticum aestivum
  Clone ID: LIB103-025-Q1-E1-E5
aattcccgggccgacgggcaaagcaataacacatagtgaatacatgaactcctcaaactatggtcatcaccgggagtggtcctgattattgtcacttcggggttgccggatcataacacatagtaggtgactatagacttgcaagataggatcaagaactcacatatattcatgaaaacataataggttcagatctgaaatcatgtcactctggccctagtgataagcattaagcatagcaaagtcatagcaacatcaatctcagaacatagtggatactagggatcaaaccctaacaaaactaactcgattacatgataaatctcatccaacccatcactgtccagcaagcctacgatggaattactca

SEQ ID NO: 1121 - DNA, 404 bp, Triticum aestivum
  Clone ID: LIB103-025-Q1-E1-E7
gggtcgacggggcatcgtaaacggtgccctgttatgtagcgactgactacaatggtaggttgcgtacgtccttaatacatcactactaggtgcttatgttacttcgttctgtccggttattagcactcatgtttactttcgcactgagaactgaaaaactgaatgtaaatttagtatggatgccgtgtatgtggaccttgtgttgtaattccgtttaaagcactaggcgaaaaaccaaaaaaatatatattatgcatgtaatcctcgagcattgactattaatgtcttctgttagctataaaaaaaaaaaaagaaagaaaaaaaaaagcggccgctcgagaagatccaaggcttagttaggcgttcaagggaagttaaaagttcgtcaatagtgttaacaaaaa

SEQ ID NO: 1122 - DNA, 323 bp, Triticum aestivum
  Clone ID: LIB103-025-Q1-E1-F10
ggtccacgggacatgatcagagtttgtccggatggactgcctcttgctagatatgtacgtacgtatggtaccattaattaaccaagcatgtggtgattgcattattttttggcccctgattggatctcatagtacttatgatacataaaaaaaaaaaaaaaaaaaaaaaaaaaaaaaaaaaaaaaaaaaaaaaaaaaaaaaaaaaaaaattaaaaaaaaaaaaaaaaaaaaaaaaaaaaaaagcggccgcccaaaaggttcaaagcttacttacccgtgaatgcaacttcaaagcccttcaaaagggtcaccaaaattcaatt

SEQ ID NO: 1123 - DNA, 426 bp, Triticum aestivum
  Clone ID: LIB103-025-Q1-E1-F2
cggtctagatatcccgggtcgacgggacagggctcgaatacctgcagcacgagaatttcatggaatgagcagtcagttagtcaaggcaatgccgagtcttatttttacaaaagtccaggaagacaattgtacttcgtcaacatgtgccatttgcttggaagactacagtgttggtgaaaagataagggtgctgccttgtcgtcacaagttccatgctgcttgcgtggacctgtggctcacatcatggaggacattctgccctgtatgcaagcgagatgcaaatgctggaatgtcaaatttccctccatcagagtctacccctttgctttcttctgctattcccttgccagctgaatcgacagctttgtcttcttttcgttcaatggtagcagcatctcctccaaggacaataacccggcatccttc

SEQ ID NO: 1124 - DNA, 351 bp, Triticum aestivum
  Clone ID: LIB103-025-Q1-E1-F3
cggtcctgaaatcccgggtcgacggggatggaagacagcaaacatatggagcatgcggtaatggttatcactaaggccgtgattctggtgcactacaaatctgcgtccggatacctgatcatctaatttgtgagttcagaatgctcatggagaagttcctcgatgtgtactactcgtactgcctcacgcatacaactcgcatcctcgtaacgcctctaaatgccctggtgctccataagtagcatcctctgtggggcctcaccatctgactggacgtgttcgtcgtcctaaagaacacactggacgacgggttggcaatgtcaccgtgcacggagctggtcaacgacaccg

SEQ ID NO: 1125 - DNA, 356 bp, Triticum aestivum
  Clone ID: LIB103-025-Q1-E1-F5
ggtaccagtcaggaattgccgggccgacgggaggcacacccctggtaccttcaccaaccagatgcagacctccttcagcgagccccgcctgctcatcctcaccgacccaaggaccgaccaccagcccatcaaggagtctgctctggggaacatccctaccattgccttctgtgacactgactctcccatgagatacgtcgatatcggcatcccagcaaacaacaaggggaggaacagcattggctgtctgtactggctcttggccaggatggttctgcagatgaggggcactatcctgccagggcacaagtgggatgtcatggttgatctgttcttctacagggaccctgaggaag

SEQ ID NO: 1126 - DNA, 440 bp, Triticum aestivum
  Clone ID: LIB103-025-Q1-E1-F6
ggtaccagtcaggaattcccgggccgacggggactcgcagaaaccctagcagatcggtcgagccctccgccgccgccccgccttcagctctctccttccttctccgatccaagatgaagttcattgctgcctatctgcttgcttacctctctggcaacgccagcccctctgcagaggacctgacatccattcttgagtctgttggttgtgaaatcgacaatgagaagatggaactcatgctgtcccaagtgaagggcaaggacatcaccgagctcttggctgctggtagggagaagtttgctgcggttccatctggtggtggtggtgtggccgtttcagctgctgcccctgctgctggaggtgctgctgcccctgcagctgagtcaaagaaagaagagaaggtcgtggagaaagaaaagagtgatgatgacatgggcttc

SEQ ID NO: 1127 - DNA, 422 bp, Triticum aestivum
  Clone ID: LIB103-025-Q1-E1-F7
ggtaccagtcaggaattcccgggtcgacgggaaatattttttgggttttctttttaattattactacagcaagaaaagtaaactaactaaaagctacactaattttttttggttttcttaaggtttattaaacacagaagaagaaagcaagaaaaagaaactaaactagcatggatattacagtgaaagagtatgagcaccgacatctaacaatgagtgtgtgaacataaatgtaatgtcggtgggaaatacgtactcccccaagcttaggcttgaggcctaaggatgtttattgccacggatggcctggcggatatccatagttgtagttggggtcgtactgagatgcagtggtcattgcatcgtgtgctgcagcttggaggcgagctctctcagccctcctcctatactctgcctcctct

SEQ ID NO: 1128 - DNA, 441 bp, Triticum aestivum
  Clone ID: LIB103-025-Q1-E1-G1
ccggtctagaattcccgggccgacggggacgaaaggctttgtcaacacagtcaatatgaacgattctagctccagtgaccgtatgatgtccatccaacggccatagtgcttcttcaacctcttgtcttcttgctccagccgcccaaagtagcgccggtcgtgccgcatgctcctgcctcccgtggccggctgtgctgccgcggaggcctcaccgcccctactattcccactgctggctaggccctgcggcgacgacagcctcaaaccgtagccgaaccaatgaaccctcgtactcctctccacgcgggcttccactgccgggccttccccggctccgcgtcggtcccttcctaggcctcgccgtcgtccaccgccgtgggtgctctccgcgtgggctggccaaaatggtcaaggaacaacttcaaccggaaaagtactaca

SEQ ID NO: 1129 - DNA, 404 bp, Triticum aestivum
  Clone ID: LIB103-025-Q1-E1-G3
aggcaccggtccagaaatcccgggtcgacgggagaacaccaaaactgccacaacttttgcaaacggactccgaatttgatgaaaccaagtttgttggaaagctagcgacaagggctaacaaaatattgaaagaaatatcaataagaagcaaaatataaaagtcccataagaaaaaggtgagaacccttcctcggaaaagaccggtaaaacctgcaacaccgaaaacatcatagaagacgcatgcgaactccgttttcgatgaactcaagcttgtcatcaagatgaccataagctctaagactcacaaagataaccaaacaagaaccaagaaacatgatgcaaggatgcaatggtttgagctctctactaccgacacgatcgagctaacaaacttagagcccccc

SEQ ID NO: 1130 - DNA, 443 bp, Triticum aestivum
  Clone ID: LIB103-025-Q1-E1-G4
cggtccagatatcccgggtcgacgggagatgatgaaccgggcaatgcacgccgcggcgaggggcgacgacctgaagatcctcaaggagctcctgcagggttgctccattgctggtgcgtaccaggacgcccagggcgccaccatctttcatgttgctgcttcaagggggccaagttgaggattgctgctataagttggtcttatgaacattcaacatgccatccaggttgtaattctgcttgtaccctccccttcttcctacatctcaattccctctcccatgcttcttttctctaagagctctctctttcttcaattttttctgcagagagatggccatggttgcccgatgcccgagcgtcgccggccaaggacccgtcggcgtctagacccctccacgccatcccatctcgccaaagacctgcaccaagtcccgtccagag

SEQ ID NO: 1131 - DNA, 437 bp, Triticum aestivum
  Clone ID: LIB103-025-Q1-E1-G6
gaattcccgggccgacctcaggtatatattcgtaatggtaggcctgcaccaccacctcaggtacgcgatgatgtccatattcctaaactgaaattgaatattccaccatttgagggtagatatgttcctgatatatatgttacttgggagttagaaactgaacaacgatttacatgtttacaatatcctgaggagagacgagttgctgctgctgtttgtgctttcactagttttgcttgtgtatggtggtctgaacattgtagattatatcctattccaactacttgggctgctttgaaaactgctatgcgtacgcgttgggttccaccatattatcaacgtgaattgcttcaaaaattgtagcgtttaagacaagggaaaaattttgtaggaagaatattatcaggaattacagactggcatgattagatgtggta

SEQ ID NO: 1132 - DNA, 431 bp, Triticum aestivum
  Clone ID: LIB103-025-Q1-E1-G9
ggtcgacgggaccttcatactgagcaggcattcaaagaagatttctttctcttctttcgtaagagcgtagctggcaggaccttcatactgcttcggaggcatgccgtctttttcgtgcaaacgttgcaggtcctcccgtgcctcaggtgtatcttttgtcttcccatacacgcccaagaagcctagcaggttcacgcaaaggttcttcgtcacgtgcatcatgtcgattgaagagcggacatctaggtctttccagtagggtaggtcccaaaataaagatttcttcttccacatgggtgcgtgtccctcagcgtcattcggaacaggtagtccgccgggaccctttccaaagattacgtgtaaatcattgaccatagcaagtacgtgatcaccggtacccatggcgggattcctccggtgatctgcctcgc

SEQ ID NO: 1133 - DNA, 372 bp, Triticum aestivum
  Clone ID: LIB103-025-Q1-E1-H2
actttcaatccatctttggtaccaggatggattggcctttgtgtactcggtgattgtgatgctgctgatgttgttgttgttattgttgttgttgttgttgttgttgttgttgttgttgttgttgttgttgttgttgttgttgttgttgttgttgttgttgttgttgttgttgttgttgttgttgttgttgttgttgttgttgttgttgttgttgttgttgttgttgttgttgttgttgttgttgttgttgttgttgctgttgttgctgttgttgttgttgttgctgttgttgctgttgttgctgtagttgttgttgtagttgttgttgttgttgttgttgttgttgttgttgttgttgatgttgttggttgt

SEQ ID NO: 1134 - DNA, 411 bp, Triticum aestivum
  Clone ID: LIB103-025-Q1-E1-H5
aggtacctatcaggaattcccgggtcgacgggtaccaccccctcttccaagatgtcgaagcgagggcgcggaggttctgctggtaacaagttccggatgtcgctgggtctgccggtggcagccactgtcaactgtgctgacaacactggtgccaagaacctgtacatcatctccgtgaagggaatcaaggggcgcctcaacaggcttccttctgcctgcgttggtgacatggttatggccactgtcaagaagggaaagcctgacctcaggaagaaggtcatgccggctgtcatcgtcaggcagcgcaagccgtggcgccgaaaggacggtgtcttcatgtactttgaagacaatgctggagtcattgtgaacccaaaaggagagatgaaaggttctgccatcactggaccg

SEQ ID NO: 1135 - DNA, 374 bp, Triticum aestivum
  Clone ID: LIB103-025-Q1-E1-H7
aattcccgggccgacggggggagtcatgttcatccaacctcagtctgctcgatggatcagagtcatgtacatcaaggaggtaatcatcatctgggttccctggttcattccactcccgcatctgggtaagtatgtccagtccacgtcccacctgactaactcatcacatgttcatccataggcatcatcaattggtttcagttaccagcagtagtgaaggaattgctcgatcgggttcagttaacagccattgatcgatcgctcgggttcagtaacgcgtagcctgcagtgcaatcgcttgggttcagttacagcccaatgcctcgctcgggttcagttagagccaactcctcgcacacacgcgcgtatgtgta

SEQ ID NO: 1136 - DNA, 430 bp, Triticum aestivum
  unsure at all n locations
  Clone ID: LIB103-026-Q1-E1-A1
taccggtctagaattcacgggtcgacgggtaattccaacagtcgaacgtatattttgtgtatgttggatataaagatcgtttgggtaagaagtataacggaaagaaactatatgcttgtttgtttaagaagtgttgcatacttgtgtgagttgacgcgacacatcaaagtagtactgtactactactagtagtactccctccgatcctaatttctctgcgcataagtcgaggtgcagataccaaggaggtcttgcttgtgtctatacttggacaactcatccaactgcgcactangcagacgaagctcgtgtcgtgttggtgccgtgtgtctccatcttagcctccgtgttttagacttctcaatctcaaggccaaggagcaacatgaaacctatgatagagcaaatcggatggtttagaacactacaat

SEQ ID NO: 1137 - DNA, 374 bp, Triticum aestivum
  Clone ID: LIB103-026-Q1-E1-A10
gtaccgatctagaattcgcgggtcgacgggcatagaaagtaccaagacggaagatgtcatggcgggcatagaaggtaccaagacggaagatgtcatggcgggcatagaaggtaccaagacgggagatgtcatggcgggcatagaaggtaccaagacggcacatgtcatggcgggcatagaaggtaccaagacggaagatgtcatggcgggcatagaaggtaccaagacggaagatgtcatggcgggcatagaaggtaccaagacggaagatgacatggcggacatagaaggtaccaagacggagaatccaagcgacgaataaatcagtgcatgaacggagagtagatatggcgccacttctttggtggccctga

SEQ ID NO: 1138 - DNA, 406 bp, Triticum aestivum
  Clone ID: LIB103-026-Q1-E1-A11
tcccgggccgacgggggtttgatgattggagtgcgtccaccagcgccttcacgtcccttgctgtgcagagcactccttccacagctactgccaatgcataccattacagcctatctccttgctatgcttcctggacccattacatgcttaacaagaatgcatatagctactatcctgcacctaatcaggagcacacccaccctttcagccttgataacaaccaggctaaagatccaggttctatacccagctttgggattgagtcatttaatacaacatccctggcaccaaacatgtctgctcatatgcctcccatggaaggacccctacctacaaaggaacctgaggctccagaggacatgcctgctagagtagctacaattaatgattaaatggatgccaaaaa

SEQ ID NO: 1139 - DNA, 294 bp, Triticum aestivum
  Clone ID: LIB103-026-Q1-E1-A12
gaattcccggctcgacgggtggcagggtcatatcgactccctggccggcgccgcagctaggccgggtggccctgtcagttgatggctcattcctgaaggaggatggctctgcagctgtcggtatggtgcttataaacgacaaaggagatgttcaaatggaagcctaccgcttcatcttctactgcaatgacccgctggaagcagaattacatgcgatcatgcagtgtttggccctatcaatacaacactctgatttacgggtggtggttcaatcggactcggctgaagctttgt

SEQ ID NO: 1140 - DNA, 388 bp, Triticum aestivum
  unsure at all n locations
  Clone ID: LIB103-026-Q1-E1-A2
aattcacgggtcgacgggcagtacatacagcatctgtcggagcagccgtggcgcgcctgatgcgttttacatctagcactttttggtgatgtattttacatcatctattgcagttgatattanggtcccacttcagattaacgttgtctgtcttgtcatgcttcagcctcgtcgccgtacaccttagcggagctgctccaacgacggaaccgtccatcacagcggagcagtaccctcggcgccgtttccagaggcctcggatcttcttccccgcctccgacagtcacaccagcatcatcaccatcctccacgtccaacccaatgatgctgaggtgcacaaggctatgccaaagaggttgtacactcgtcgcatcactttgtttctcca

SEQ ID NO: 1141 - DNA, 425 bp, Triticum aestivum
  Clone ID: LIB103-026-Q1-E1-A4
gtgcggtcaagaattcacgggtcgacggggcggcggacggcggcggcggggaggcgaacggcgtccagccgaacgtgaccatctacatcaataacctcaacgagaagatcaaactcgaagcacttatgaagtccctcaatgccgttttctcccagtttgggaaaatcattgaggtgcttgctttcaagactttgaagcataaagggcaggcatgggttgtgttcgaagatgttgcatcagcaactgaggctttgaagaggatgcaagattttcccttctatgacaaacccatgaaaattcaatatgccaagaccaagtcagatgttgtagcaaaagctgatggcactttcgtacctcgagaaaaaaggaagaggaatgatgagaaacctgagaagaagcagaagcgtgagcagcaccatgatgtt

SEQ ID NO: 1142 - DNA, 446 bp, Triticum aestivum
  Clone ID: LIB103-026-Q1-E1-A6
ggtatcggtcaggaattcccgggccgacgggaagtggtatgaaccatagagaacttgaaatacagtatgtttaacaccaatataaataaagaatgagttcattatagtactttatgtgtttatttttctttctttcactaacggagcttatgagatttcctattgagttttgtgttgtgaagttttcaagttttgggtaaagatttgatggactatggaataaggagtggcaagagcctaagcttggggatgcccatggcaccccaagatattcaataatggccaaaagcctacgcttggggatgcctcgggaaggcatcccctctttcgtcttcgttcattggtaactttacttggagctatatttttattcgccacatgatatgtgtttcgcttggagcatcttgcatgatattagtatttgctttttagtttaacacaatcat

SEQ ID NO: 1143 - DNA, 403 bp, Triticum aestivum
  Clone ID: LIB103-026-Q1-E1-A7
tcccgggtcgacgggaccgatacagggatgacactgaagcacagagacttgaccgtttgaggtcgggtcgctacaagatggtatcagagcacacactgagtgtaggacacgaccactaagctacaaccatcgatcactattctcttctcatttttgactcctctccattttctactctttaggaaggtggatgcaaggaacaagtttacacaaccggaggaagaatcaccttttggacgacacctgaaagaagtcactaggtacctgaacattggaatgccaagcttcaccgggacttacaatgccacattaccaaaagaggagcgatggatgattcaagttcaagttccaggaaggaccttcacggcagtcactaaacccatagagttttccttcgatgcac

SEQ ID NO: 1144 - DNA, 418 bp, Triticum aestivum
  Clone ID: LIB103-026-Q1-E1-A8
ggtcaggaattcccgggtcgacggggaagacacggggcaggaagaagggcagcaaggcgaagaagggcgtggagacgtacaagatctacatcttcaaggtgctgaagcaggtgcacccggacatcggcatctcctccaaggccatgtccatcatgaactccttcatcaacgacatctttgagaagctcgccggcgagtcggccaagctcgcgaggtacaacaagaagcccaccatcacctctagggagatccagacctccgtccgcctcgtcctccccggcgagctcgccaagcacgctgtctccgagggcaccaaggccgtcaccaagttcacatcctcctagactgacgacgcgccgcttgttgtgacagatgtagttggctgctgttagtcgctgactctgcttatgtatctgca

SEQ ID NO: 1145 - DNA, 380 bp, Triticum aestivum
  Clone ID: LIB103-026-Q1-E1-B10
aggtaccgatctagaattcgcgggccgacttcttcacccacggctgcggtggctgccgcgctctccaccccaagattgcgcagttcgctgagcggaatccggacgtgctgttcctgcaagtcaactacgagaagcacaagtccatgtgctacagcctccatgtcgatgtcctccctttcttcaggttctacaggggagcccagggcagggtcagcagcttcagctgcacaaatgcaaccatcaagaagttcaaggacgccctcgcaaagcactcgccggacacgtgcagcctcggcccggcgcgggggctcgaggaggcggagctcttggctctggcggcaaacagggacctggaattcacctacaacgagaagccgacg

SEQ ID NO: 1146 - DNA, 377 bp, Triticum aestivum
  Clone ID: LIB103-026-Q1-E1-B11
aattcccgggccgacggggggacgagcgatggtcttttcctaccaatctatacccctaggagcatgcgcgtagttcttggtttttgatgacttgtagatttttgcaataagtatgtgagttctttatgactaatgttgagtccatggattatacgcactctcacccttccatcattgctagcctcttcggtaccgtgcattgcccttactcacattgagagttggtgcaaacttcgccggtgcatccaaaccccgtgatatgatacgctctttcacacataaacctccttatatcttcctcaaaacagccaccataccaacctattatggcatttccatagccattccgagatatattgccatgcaactttccaaca

SEQ ID NO: 1147 - DNA, 417 bp, Triticum aestivum
  Clone ID: LIB103-026-Q1-E1-B2
cgcctccaggtgacggtccagaattaccgggtcgacgggtgatggcgatgacgccgataaggtaaaggagaagatgggggaaggggaaggaaggcctcccctcctctggctctggcctgtgggaggaactctccgcccgcgggctgctgctgcggccgcgtgtctaccgcctgatcggaactggatggctggataccggtcttcatatgctaccatgatacggacgtctgaaccgttggatctcagatccgacggcatataaggagttgttgtacctgcacgcaatttcaagattcttcgatgatttttttgtaaaatgtttaatagctcataggagccgtttgatctgatatccaacgttaccaagagcccgtatcacggtatcacctaaacgttggtagcacatgatatttcccc

SEQ ID NO: 1148 - DNA, 423 bp, Triticum aestivum
  Clone ID: LIB103-026-Q1-E1-B6
aggtaacggtcaggaattcccgggtcgacggggagcagtacacggtgccgtcgctggcggcgctggagcacaacctggaggcggccatgcacaaggtgcgctccgagaaggaccgcaagatcgggggcgagatgagctacctcgagaacgtgatcagggggaaacaagctgagcgctacggcctatgtgacaagctcgctcatgctcagagcctgaaggtcgtggaaggcggatccacctcgctgaacaacggtctggacctcaaacttggattcaactaggaacgggtgaaagcttctggccgtggggttctgctctagtgttgctgttgagctcgagtgttatgtcaggttcaaatattctgcaatttccttcgaagggattgtatgaacttgtaagagaccactgtcttatgagatgttt

SEQ ID NO: 1149 - DNA, 427 bp, Triticum aestivum
  Clone ID: LIB103-026-Q1-E1-B8
aggtaccggtcaggaattcccgggtcgacgggacttctagcgcattcattcataagcaaaacatggtgaactggaatctagaactcatcgacatagggagacttgatccacatccaacaaatagacacgagctagatttgagaaagtcagtcaaacgaatctgtaaaattaagaattcatgcttgctggatttgtaagcaattagttgatccaccaaacgagaaagagcattgacagcattaaattgcagaagaaaaactaacagcaacccaaaatcacccaaatcactggttgattagcaacaaacaagacgcgcgtgtgtggtaattcaaagaagaaacggccctgcagacgacggcgccgcccatgacaaggagctgcccgaggagccgtacatccccttccttcacaaaaccacatcagacct

SEQ ID NO: 1150 - DNA, 366 bp, Triticum aestivum
  Clone ID: LIB103-026-Q1-E1-B9
aattcccgggccgacgggaggaggatcagcgcggagttccagctcgtcttccgtctgatcaaggggctgatattcataacattcatctccatcatcataatcttaacagcaatcgcccacatgacagtccttgacatcttcgtctgcatcctcgccttcatgccaactggatggggcttgcttctgattgcccaagcgatcaagcctgtggtcgagatggtcgggctgtgggggtctgtgaaggctctcgcccgtggctacgagattctcatggggctcctgctgttcacgcccatcgcgtttctcgcgtggttccccttcgtgtccgagttccagaccaggatgctcttcaaccaggcgttcagc

SEQ ID NO: 1151 - DNA, 402 bp, Triticum aestivum
  Clone ID: LIB103-026-Q1-E1-C11
aattcccgggtcgacggggctcccaccagcctccgcatctcttatcttcctccgtccgcggcctcgctaatcctcgaatctcctctccccgtttcagatctacgcgcgcgaggttcggttcggtcttcggagctcgagacatggcggaggagaatgccccagttgaggttgctgctccggttgcggcccctaccccagttcttggagagcccatggacttgatgactgctctgcagcttgtgatgaagaagtcaagcgctcatgatggccttgtcaagggactccgtgaagctgcgaaagcgattgagaagcatgctgctcagatctgtgtgcttgctgaggactgcgaccagcctgattacgtgaagctggtgaaggcactgtgtgctgagcacaatgttc

SEQ ID NO: 1152 - DNA, 412 bp, Triticum aestivum
  Clone ID: LIB103-026-Q1-E1-C5
ggtcagggactcccgggtcgacggaatcctgtagagttttgtgttgtgaagttttcaagttttgggtaaagcttttatggactatggaataaggagtggcaagagcctaagcttggggatgcttatggcaccccaagatattcaaggatagccaaaagcctaagcttggggatgcctcgggaaggcatcccctctttcgtcttcgttcattggtaactttacttggagctatatttttattccccacatgatatgtgtttttcttggagcgtcctgtattatattagtctttgctttttagtttaccacaatcatccttgttgtacacaccttttgggagaaacctatttgattagaatttgctagaatactctatgtgcttcacttatatcttttgagtttgatagttttg

SEQ ID NO: 1153 - DNA, 431 bp, Triticum aestivum
  Clone ID: LIB103-026-Q1-E1-C7
ccgggtcgacgggcggcgaattatcaacaagatcttcgtcactatcacagtcgccgggtcagaaccagaacttttcaagaaggagatttggtgcttcggctcatccaagatcagacggatatgcacaagttatccctaccttgggagggacctttcgtggtcagcaagaatctgcacaatgggtcgtactatctgattgatattcaagagcataaagactcacgcacatcagaggaggagaccaacaggccgtggaatatagctcatcttcggccttactacacttgagccatcggctctatctatgtacatactatggtagtgtatatattatcattgatataataaaaccggagcctcagctaaagcggggtctctgttctttcatatcatgtgtggttacatggagtggttccgttttaaagcgggct

SEQ ID NO: 1154 - DNA, 405 bp, Triticum aestivum
  Clone ID: LIB103-026-Q1-E1-C9
ggtaccagtctagaattcccgggtcgacgggtagggtaagttcatcatatccgaaccaatctgagcctttgcataatctttttagggtttttgctttgttgaatttgcggttgcatcgtcgtgtcaagttgctggtcttagagtctagtcttttagagtttcgagttctggtcataagttgtcacgctgccgccgcaccatcatcatcgccttgccatctaccaccattgcttatccgccaccgctttgaatccgtatccatataccaccaccaatccgtatccatataccaccaccgatccgtatccatataccactaccgctaccatataccaccaccgctgccatatcctaccgccatatatccaccaccaatccgagttcctttcatattcggttggtttt

SEQ ID NO: 1155 - DNA, 384 bp, Triticum aestivum
  Clone ID: LIB103-026-Q1-E1-D2
gggccgacggctgtttgaactgtaaaaaattcttgtgttcctccatatacggagccaccaaggcggaattctgtagaactgtgtagtgtgcttcagtgagagaatgcccgtccatacatattatttgatgccctcctagcgtgccttttccttccagtctgcccttatgccgcgattcaggaacaccaatcggcttaaggttaggaataaagtcaatacaaaactcaatgacttcctcgttttcatggcccttcaagatgcttccttctggcctagcacggttatgaacatatttcttcaagactcccatgaacctttcaaaggggaacatattgtgtagaaatacaggacccaaaacgttaatctcttcgcaaaagtgaacta

SEQ ID NO: 1156 - DNA, 377 bp, Triticum aestivum
  Clone ID: LIB103-026-Q1-E1-D9
aattcccgggccgaccgtgcaggtacacgaggtcatgcacgtattctacgtcgccctgctgtgcaccgaggagcacagcgtgcagcgcccgacgatgcgggaggtcgtgcagatcctgagcgagctcccaaagccagctgccaaccaagatggagaagaagagcttcctctctcctgcgaaggacctgaatccaaccctcctgcctcaaccagttacaccgaggcaccagccggcgacgcgaaagatcagcagccgcagcagcagcacacaagctcggagtcgtcgcctcctcctgatctcatcagcatctgatcatccaagtacccggaagcatcgccgtccgtcgcaaatatgttggggcttcctttgatcgtgc

SEQ ID NO: 1157 - DNA, 379 bp, Triticum aestivum
  Clone ID: LIB103-026-Q1-E1-E1
aattcacgggccgacggcgctagaacggaagggcaaggtggtcacggagatcaaagacgcgattgagcgccacagcagcgcctatgtcttcacctacaacaacatgaggaaccagaagctcaaggacctcagggaccaactcaagtcctctagccggatattccttgctggaaagaaggtcatgcagatagcattggggcggtcacctgctgatgaagctaagacaggcctgcataaactctccaagttccttcaaggtgcttctggattgttatttacaaatctcccaagggatgatgtcgagagattattccgagaatttgaggcgaatgattttgcgaggacaggaagtattgcgactcaaacggttgagctaaag

SEQ ID NO: 1158 - DNA, 403 bp, Triticum aestivum
  Clone ID: LIB103-026-Q1-E1-E5
attcccgggccgacggggagtcgaccaagctcgcccgctacaacaagaagcccaccatcacgtcccgggagatccagacctctgtgcgcctcgtcctccccggggagctcgccaagcacgccgtctccgagggcaccaaggccgtcaccaagttcacctcctcttagattgcgtcgcctgtatctagtagcaaatgcagttccttcctgttggtttagtgcttgtctgtggactctggttatctgcaagtaatattagtcctactgttggatgaaaattgccgaatcattgccaatgcttttttggctcgtcggaaacaatgttgcgttgttggttctatttatactgatttccgcggtgatttaaaaaaaaaaaagtaaaaaaaaaaaaaaaagcggccgct

SEQ ID NO: 1159 - DNA, 418 bp, Triticum aestivum
  Clone ID: LIB103-026-Q1-E1-E7
ggtcagggactcccgggccgacgggcccttcatcatttacttgaccatagtatgtggtagttgatttgctttatttgttgatttcggactttgttattttaggcccacctgtgtcatcgacgaggacaacgtggtggcgtcctcaacgttgaggattgcggctattgaagcccctaagtttggtctactagggcggggttggcagatagagtacactgccggaggttgccgctttggagatcgttaggtacaacatctttaggtccttgttcattgagtccttagggattttcgccaccgtatagtgtgaatcttttcattcttatggtttgcaagtgtcatgcctccggttagcaatcttgaggccacgaaggcaataaaccctaagccgcaagttccggatcggtctgctgttggc

SEQ ID NO: 1160 - DNA, 343 bp, Triticum aestivum
  Clone ID: LIB103-026-Q1-E1-E8
agcgccagtacggtctaggactcccgggccgacggagttggaaaagtcggcacaatcgtccctccagcataactgagacaacctcgggattatcacgctaagcagttcagaattccatgagaaatcaccacaagttagttggccgtgtgccgtgcataggcagttcaaaaataaagatcacacagtcatgtcccggtttctctccgttttcctttcctcgttggacaccgacattactgcagcaggcccttgaatgtgcaagtgctaaacaatgcgacgtccaatgtaaggtcaaccaagaatggcgaatgggacgcgccctgaaagcggccactcaacagga

SEQ ID NO: 1161 - DNA, 379 bp, Triticum aestivum
  Clone ID: LIB103-026-Q1-E1-E9
aattcccgggccgacggggaggaggagcctgaggaggagctaggaactgaatatctggtgcagccgcttggccgtgctgaagacgaagagcattccagtgactttgagccagaagaaaatggtgatggtgctgaggacgaggagattgaggatgatgatgctgatgatggtgaggattctgtcaaggcgcaatcctcttcgaagaggaagaggtctggcgcggaggatgaagatgatgatgacggtgatgatgatggtgatgatgatgagaagcctccatcaaagcgatagtcaatttgttcttgctgatctggtatcttttctgcttgggccaataacgaaaataatcctcacggagagggttgttggtaaatgccgt

SEQ ID NO: 1162 - DNA, 429 bp, Triticum aestivum
  Clone ID: LIB103-026-Q1-E1-F2
attcacgggccgacgggcttctaaaattgatcattttgttctgtacatatcaatgcgcattagaatgtgcagcttagaaatggtgaaatggccggagcgatgatgtggagatctttgtaaagaagacaagacaatggaatagtaagaaatagaaaatagggctactggtgaaatacatgagctgagaagccgcaaaatagcgctttgctggttaaccgggttaaaatatgttcccattgcctgtgggatggggctgaatgcggagactggttgtacttcatagggagtagtgtaagtttcactggtagcacctagctagctgagatttcacaattactaatattgagttttgaacatgttgactggattatattgatttcgtatcttgctaaaagcctaagatgctaaggggcaaactttttgagggcc

SEQ ID NO: 1163 - DNA, 446 bp, Triticum aestivum
  Clone ID: LIB103-026-Q1-E1-F3
acgccgtcaggtagcggtctagaattcacgggccgacggccttggaactgggaaactcacttgcccagcttctcagcaacgccagaatcctgattcactcactatcaccaacttgcgtaatgcactgaattttctgtccatagttgaagagcttcagagtttgttcgtacgatatggtgagctataacctgcagtcgaggacagttggatgcatgggctgcgtgacaaggtagagctaatggtgcctagcaattattcatcacgagcatatttgtaccaaatcatgtcagtcttgaacaagttttgtttttgcagtgctattcctgtgattttccaatcctatgaaccaaagaaggcctaaacttgctacaaaatctgtactttccctttgcgagcgaaggaatacgaactcctgttttgcaccctatctgcgttgttagcccaaa

SEQ ID NO: 1164 - DNA, 408 bp, Triticum aestivum
  Clone ID: LIB103-026-Q1-E1-F9
taccgatctagaattcgcgggccgacgggtccgccaacggccagccgaatcgacggagaaggaatggcttcaaccaggggagacgtaggatgggagttcggccaaggcgaactgatagggaggatagtgtacggcgaactgtctatgtctcagacattgatcaacatgtcactgaacagaagcttgctgaggttttctcaaactgtggtcaagtggtagattgccgtatctgtggtgatccaaactcagtgatgcgctttgcttttatcgagttcgccgatgatgtcggtgcaagagcagctctaacgcttggtggaaccattcttggtttttatcctgtcagagttctgccatctaagactgcaattttgcccgtgaaccccaaatttcctcctccaactgagggcc

SEQ ID NO: 1165 - DNA, 440 bp, Triticum aestivum
  Clone ID: LIB103-026-Q1-E1-G1
caggtagcggtccagaattcacgggtcgacgggaatgccagtatgtagagaagtgatggaaagggttgtgctctttcatttgagaaacttccaaccaaaattggaatgttagaacagaatatttagatacaggtcccttatgaatactgtactgagtaagattcattgaagaaatgcttctccgaagcaataagtttgtggcacaagcatagtcttctgctaacctagcctttcccatctttctattaaaacgaatgtagctaacgtgaactaaaagcaagctcttgttcgaggaagtagaaattgttagttgttgctagcttgaactgagttgttcctgttggtgctagggttgccaagggagttgtagcgagatgctgctaatgcagctatttctgatgtccggacgatgcagcggaagtgaaaagaaaaaggtatga

SEQ ID NO: 1166 - DNA, 429 bp, Triticum aestivum
  Clone ID: LIB103-026-Q1-E1-G7
cggtctagggttcccgggccgacgggccaagcacctcgagtcatgctggtgatcttggagtgagagcacggctctcaacgctgcactgctacgcgtcaccaccgacggaccaagcacctcgagtcatgctggtgatcttggagtgagagcgcggctctcaaggctgcactgctacgcgtcaccaccgaccgacagggcacctcaagtcatgctggtgatcttggagtgagagcgcggctctcaaggctgcactgctacgcgtcaccaccgaccgacagggcacctcaaaccattctggtgatcctggagtgagagcgcggctctcaaggctgcactgctacgcgtcaccaccgaccgacagggcgcctcaaaccattctggtgatcctggagtgagagcgcggctctcaaggctgcactgctacgcgtc

SEQ ID NO: 1167 - DNA, 395 bp, Triticum aestivum
  unsure at all n locations
  Clone ID: LIB103-026-Q1-E1-G9
gggccgacgggttcaagcagtaccgctgccacaccatcaagaactgcacgcatgcctgccccaaggggctcaacccggcgaagcagatcgacacaataaagaagctgcagctcggagcctgagtgaggtctactaccccgtggagatgtcgaaagttgtaatcagctgtcatttggtttgttttggctccgtggtgacgaataatgggtggaaacgcaggatattccccgcttgacgattccgtgtagggaatgaataattgctaccagattttattcttttcgtgctatatctagtttggtggttcatcgttgatcaaaananagaaaaaaaaaaaaaaagcaaaaaaaaaaaaacaaaaaaaaaaaaaaaagcggccgctctaaaggattcaa

SEQ ID NO: 1168 - DNA, 386 bp, Triticum aestivum
  Clone ID: LIB103-026-Q1-E1-H1
attcacgggccgacgggcgtcgtaaagtggacctaggagctggagcagaggtacaaggaggcactcaatgcccaggctctggttcatgccggcaaggtgaaagagctagaggtggagcgggacgggctgaaggatcaggccctgaagctggccaaggagaatgacacgctcaacggtgccctggtggaggcgcagggtgcagtcctcggcaaggctgagcagttctccaaggccaacgaccccatcaaagacctgaagctgaagctggagggtcttgaggagatgctctcggaggccaatgcccgggaggagaccctggccaaggatctggaggtcgagaagcaactgcggaagaacgaagccgccaaccacaaagattttgtgga

SEQ ID NO: 1169 - DNA, 374 bp, Triticum aestivum
  unsure at all n locations
  Clone ID: LIB103-026-Q1-E1-H11
aattcncgggtcgacgggctaaagagcgacaacagtcatgaacatgcattaaaattaatgaacattgagtgcaagcatgagtaggatataatccaccatggacataaatatcgtgaaggctatgttgattttgtttcaactacatgtgtgaacatgtgccaagttcagtgacttgaatcattcaaaggaggataccaccctatcataccacatcacaaccattttaatagcatgttggcacgcaagataaaccattataaactcctagctaattaagcatggcataagcaactataatctctaattgtcattgcgaacaggtttattcataataggctgaatcgggaatgataaactaatcatatttacaaaaa

SEQ ID NO: 1170 - DNA, 441 bp, Triticum aestivum
  Clone ID: LIB103-026-Q1-E1-H3
cgcctgcaggtagcggtcaagaattcacgggccgacggggctgctaaaccggattctcactactgcgccccctacttggcgcaccaaagatgtcggtggaaacgacacctatgggatcacaagaatccctactacggttgcggggcgcggggtcatgagaagagcaggatcaacagtcaacacaagcactcgggtcgtttacccaggttcaggccgagaggatgcgtaacaccctagtcctgctttggtatgtatatctgtgttcttggagttcttgagctagctacaatgagtgtaacttgtccaagggtctgaatccttctcttggatgccttgggcctccttttgtagtcaaggggatcgccacagtggcacacatgaggtggcatcggtgtacggtggctaagcttatcgtttggcattacgggacaagacacattt

SEQ ID NO: 1171 - DNA, 356 bp, Triticum aestivum
  Clone ID: LIB103-026-Q1-E1-H4
ggtcagggattcacgggtcgacggggtccagacagcgttacctgccgctacacgaaacttcgcggtagatgggttcgtgccaaagccacactgaagacatccatcacttttgtaccttagcatcatcacgtaacttcgctactgtaacgtctctgaaagcccccgtgttctcggacttggatctgtcctcagcttatgatctccttggtcagtgcaagatcatcagtagttactagaactggcagtgcgtgaatactgaatattcactacatgttcggtaccatgcattgccctttctcaccctgaaagttggtgcaaccttctctggtgcatcctaagcccatgatatgattcgc

SEQ ID NO: 1172 - DNA, 347 bp, Triticum aestivum
  Clone ID: LIB103-026-Q1-E1-H6
gacggggtccggatagcgttacctgccgctacacgaaacttcgcggtagatgggttcgtgccaaagccacactgaagacagccatcagttttgtaccttagcatcatcatgtaacttcgctactgtatcgtctctgagagcccccgtgccctcggacgtggatctgtcctcagtttatgatctccttggtcagttgcaagatcatcagtgtgtagtacatctggcactgggtgaactactgatcaatactaaacgtttcgtaacagtacattgtcctttcgcacccagagagttggtgcaaacttcggtggtgcatcttgaccccacgatactattcgctcaatcag

SEQ ID NO: 1173 - DNA, 418 bp, Triticum aestivum
  Clone ID: LIB103-026-Q1-E1-H9
aattcgcgggtcgacgggcaaattgatcttcggcattgcaaggcgggttcctcctccaagtacttcatagaagattttgaacacaaaggtagtgtccggctctgcaaaataagtttccagatattgccatatagagaataatatttacacagatctaatctgctgatgtattccatagcgtgacatcacactacggccaagtctttattcgaatcaccacctcagcgcgtttatcgaggcggtttccttggcacgtcatgttaaagtagatatcatgtcaccttattccgggattctcatcaatacgggtgtgggtaacccaaccgtacctgttggtatgttttctcgatcaaaggcgagtcccaaacggtcacggggagggcccttggtattcaacctcttataaagagaccaaggg

SEQ ID NO: 1174 - DNA, 422 bp, Triticum aestivum
  Clone ID: LIB103-027-Q1-E1-A1
gcctgcccgtaccggtccgaaattcacgggtcgacggcgtggatcgggaggggattcacgtgcgtctgcgtgcagaggagggacagcgacacgcgcatttccgtcgatctgacccccattcaggaagagtgcctacaaagattacagaaccggattgaggtgccgtatgatagtcaagatagagaacatcaggaagcactcaaagccctttggcatgcttcttttcctgggactgaacttctaggactagtatcagatcaatggaacgatatgggatggcaatggaaagatccatccacagatttcaagggtggtggctttatctctttggagaatttactttacatcgcgaagaactatccaaaatccatcgatgagctcctttgttagcaaaattgtgacagagcattatgggaatatcc

SEQ ID NO: 1175 - DNA, 452 bp, Triticum aestivum
  Clone ID: LIB103-027-Q1-E1-A12
attcgcgggtcgacgaggaggaagagcccgaggaggagctaggaactgaatatctggtgcagccgcttggccgtgctgaagacgaagagcattccagtgacttcgagccagaagaaaatggtgatggtgctgaggacgaggagattgaggatgacgatgctgaggatggtgaggatcctgtcaaggcgcaatcctcatcaaagaggaagaggtctggtggggaggatgaagatgatgacgacggtgatgatgatggtgatgatgatgagaagcctccatcaaagcgatagtcaatttgttcgtgctgatctgtgatcttctctgcttgggccaagaaggaaaataatcctcatggagaggattgttggtaaatgctgtagctttaggacatctgtggtaggtgtagcagctcaaacttgagtctacccatgttagttgttagtgcatactgc

SEQ ID NO: 1176 - DNA, 437 bp, Triticum aestivum
  unsure at all n locations
  Clone ID: LIB103-027-Q1-E1-A2
ggtccgaaattcacgggtcgacgggtctatgtgcttcacttatatcttttgagctatatagtttttgctctattgcttcacttatatcttttagagcacggtggtggatttgttttatagaaactatttttttctcatgcttcacttatattattttgagagtcctacaaaacagcatggtaattttctttaattatgataggcatccaagattagtaaaaaaaaatcttatgagtgtgttgaatactatgagaagtttgatgcttgataattgttttgagatatgaagatggtgatattagaatcatgctagttgagtagttctgaatttgagaaatacttgtgttaaagtttgtgattcncgtagcatgcacgtatggtgaaccgttatgtgatgaagtcggagcatgatttaattattgattgtcttccttctg

SEQ ID NO: 1177 - DNA, 428 bp, Triticum aestivum
  Clone ID: LIB103-027-Q1-E1-A4
ggtccgaaattcacgggtcgacgggacatggttagtcataaaatcctacataaacttgtagattgctgaatatgatatgtttgattccttcgaatagttttgcgatataaagatggtgatattagagtcatgctagtgggtggttgtggattgtagagacacttgtgttgaggtttgcaagtcccgtagcatgcacgtatggtaacggttgtgtgacaaatttgaagcatggggtgtttctttgattgtcttccttatgagtggcggtcggggacgagcgatggtcttttcctaccaatctatccccctacgggcatgcgtagtattactttgcttcgagggataataaacttttgcaataagtatatgagttctttatgactaatgtgagtccatggattatacacacttttatgttttcatcattc

SEQ ID NO: 1178 - DNA, 429 bp, Triticum aestivum
  Clone ID: LIB103-027-Q1-E1-B1
gtccgaaattcacgggtcgacgggaggggaggctccgcggggaacaagttccggatgtcgctggggctgcctgtggcggcgacggtgaactgcgccgacaacacgggcgccaagaacctctacatcatctccgtcaagggcatcaagggccgcctcaaccgcctcccgtccgcctgcgtcggcgacatggtcatggccaccgtcaagaagggcaagcccgacctccggaagaaggtcatgcccgccgtcatcatccgccaacgcaagccctggcgccgcaaggacggcgtcttcatgtacttcgaagacaatgctggagtgatcgtgaaccccaagggtgagatgaaaggatctgccatcaccggacctgtgggaaaggagtgtgctgacctttggcccaggatcgccagcaacgccaatgccatcgtt

SEQ ID NO: 1179 - DNA, 454 bp, Triticum aestivum
  Clone ID: LIB103-027-Q1-E1-B11
gtaccgatcgagaattcccgggtccacgggaaggcgtgagtgagagaggagaatccctatctctttataaaggcggtagaaattgtgcgcctccccactcgcctgttaaaatcgcttattccccaagagccatgattgatggcgcggttgggttacccatgcccgtattgatgagaatcccgcgataaggggacacgatctctgcttcgacaagacgtgtcaaggaaaccgcctcgcactacgtgcagtagctggttgtgagaaacgtttcgaataatgaccagaccgtggcgtgatgtcatgctataaaaagctgctagcatattagatttgtggaatattttgctctctacggtggtatgcggaatttgtttttgcagagccagacacgattcctgtgttcaaaatcttctatgaagtattcggagaaggaacctgccttgcaatcccgaag

SEQ ID NO: 1180 - DNA, 436 bp, Triticum aestivum
  Clone ID: LIB103-027-Q1-E1-B2
cggtccaaaattaccgggtcgacgggattatcttcccttgcatgttatagttcatcaagaaactctagtagcttcgtgatagcgactggagaacttttgtcaatcactctcttatctggaagattaactcccacttgattaaagtgattgaagtacccagacattctgagcacatgctcactggctgagctattcttctccatcttgaggcaaaggtcttgtcagaggtctcaacctctcaacacgggcatgagcctgaaataccaatttcatctcttcgaacatctcatatgttctatggcgttcaaaacgcttttggagccccgactctaagccgtaaagcatggcgcactaaactatcatgtagtcatcagaacgtatcttccagatggtcacaacatccacagacaacgccagaggggttggcacactgagc

SEQ ID NO: 1181 - DNA, 448 bp, Triticum aestivum
  Clone ID: LIB103-027-Q1-E1-B3
cggtccgaaattcacgggtcgacgggaaagattgtatgtatgtggacgagagagttggagacaaacctaacaagacagagagagagagagatagagagagaaagagagaggaagaagttaggtttgtgagaaatacggatacatgtaatatacatgagatgtgtgtgcatctggattctgtatacgtggaaggagaagagacaacatgtttgatgagagagctggaaaaacatggacgagaggggaaggatctcgtgggttgagcgattgaaaattttgtgcgggggagagagggattggtaattttgtgcaagagagagagggtggggggaggagtcagtcagccgtcgtcacatcaccctgcttccaaatgaccccgcattctctagcacggtgtggtcgccgtcttcgatttgatcaatgccctctttaaagattgaggtgttgt

SEQ ID NO: 1182 - DNA, 452 bp, Triticum aestivum
  Clone ID: LIB103-027-Q1-E1-B4
ggtccgaaattaccgggtcgacgggaatacaaatcactcaatcgagcaaaattggacgtgtgacattattaggttgatctacacgaaccactcgtaggggaaaactgtattgtggagtacaccataaggtcacagtggcacaatctgaagtagatcatcctgtatacatagaagtgcaatagaaccgattagatgccattaagcgtgcatgcaacaacagccaccagaaagcagcaccgaccttaactatatagtaatgtgcgcaatatagtatcagtcctcatgcggtcgaactgatcataatttacattgcaaatattatagcatcatcactcgttagccacatggctttatttaggcagaggcattacgtcatatgtcaagcggcatcaggaccaggtatttgcctataaggacattttggtgtaaggactaaaaaaactccgtgtcac

SEQ ID NO: 1183 - DNA, 471 bp, Triticum aestivum
  Clone ID: LIB103-027-Q1-E1-B5
gtaccagtccagaattcccgggtcgacggggaagcccatgatgccgccaggtccaagaacaaggctgcacaaacctcggcgactgtacatgttccatgccactctcaggaggcgcaagatcaacagcgtcacggcgctagcagtgccatacgcatgatagcccaagaccaagttggtggatctcgggccgctcaagaccagcatgcacgccagcattctggcacgagcggggcacggtcgcctggacaagatactgctccttctaacatagttagaagttcgagcacgtcccgctcctcgcgccgtccgccactgccacccgccactccagcagaagctttggcgcgagctcaacttctcctagattaccctccaacgccggagaagatcgacgaatggagagccaccattcagagtctcatcggctacgccaacggcgacactccacggtgaacgaattcgtccccgccg

SEQ ID NO: 1184 - DNA, 452 bp, Triticum aestivum
  Clone ID: LIB103-027-Q1-E1-B8
ttcccgggtccacggggagaagggaattggagatggaacggtcagctatggaatggatgatgctgatgacatatacatgcggtcatggactggcaccattattggccctcacaatactgtccatgagggtcgcatctaccagctgaagctgttctgtgacaaggactaccctgagaaggcaccatctgttagattccattcaagaatcaacatggcttgtgttaatcacgagactggggcggttgacccaaagaagttcagtttgctagcaaactggcagcgggagtacactatggaacatgtcttgacccagctgaagaaagatatggcggcgacgcataaccgcaagctagtgcagcctccagaagggacattcttctagcggggtgtttgctggcccatctccagttccagcagcagctatctatgtcactcccatgggatttgaaatg

SEQ ID NO: 1185 - DNA, 435 bp, Triticum aestivum
  Clone ID: LIB103-027-Q1-E1-C1
ccggtccggaattcacgggtcgacgggagcatgcatctagagtattaagttcataaagaatggagtaacgcattaagcaagatgacatgatgtagaggaattaactcgagcaatatgatgaaaaccccatcattttatcctcgatggcaacaatacaatacgtgccttgctgcccctactgtcattgggaaaggacaccacaagattgaacccaaagctaagcacttctcccattgcaagaaaaacaaatctagttggccaaaccaaaccgatagttcaaaaagaattacaaagatatcaaatcatgcataaaagaattcaaagaatgtaacagcctcgtttttggcccttttctttttctttttgatttattggtttttgctctgtttttcttttctgagcggttctatggccttgctacctgggaaatcatcc

SEQ ID NO: 1186 - DNA, 463 bp, Triticum aestivum
  Clone ID: LIB103-027-Q1-E1-C12
gtaccggaccgagaattcgcgggtcgacgggtccttgctgagctgcttagtggaccgttggaggccagagacccacacgtttcacttctgatgggggagagatggctcctactctggaggatgtgtcacttttgctcggactaccgttggcaggtcatgccataggaccgttggacgcaccggctggttgggagcgagcccttacacaacgttttcatggtgtttttttcggatgctccggatctggtatgggagcatcacggacctaagtatgagtggttgctcaatttccgggtaatttccccaacttcttatcttcaagttatcgtgcatatggttttacagaaaataattgcggctaactaaaactttctctttgcttaatgcagatccaaaacttccgggcgccgttgactgcggaacagatcactcggagcctagaggcctacttgatgtggttttt

SEQ ID NO: 1187 - DNA, 397 bp, Triticum aestivum
  Clone ID: LIB103-027-Q1-E1-C2
ggtccgaaattaccgggtcgacgggcacgcctacgtccaggtcgacgtcttctacgacgacgacccaacggccaacctcaccgacgaccagtacgaagtcatccaccacgacagtgacgaagaagcttgatctacttagctgagcaagatctatctacctatctatcgagctaatgtgcgccatggattagagtgtgattccttcgagtgatctactgcgtcctaaatttatgtttgcaagtgatgatcttgtagcgtagctatatgtagtgtgtcctctggcttttgcaacctggcaagctactatctaactaacgtgttactgaaaatccccgttatgttgtccttccaatcaccgattaaatcagtcggtaatgcacagtttttcttttctgaa

SEQ ID NO: 1188 - DNA, 470 bp, Triticum aestivum
  Clone ID: LIB103-027-Q1-E1-C3
cgcttgcccgtgccggtccgaaattcacgggtcgacgggggcggccaaggagggcggcaaggcgaagaagaaggccaagaagagcgtggagacgtacaagatctacatcttcaaggtgctgaagcaggtgcaccccgacatcggcatctcctccaaggccatgtccatcatgaactccttcatcaacgacatcttcgagaagctcgccggcgatgccgctaagctggcgaggtacaacaagaagcccaccatcacgtcccgggagatccagacctccgtccgcctcgtcctccccggcgagctcgccaagcacgccgtctccgagggcaccaatgctgtcaccaagttcagctcctcctgagtctcgtagttagctgtttgggtgtgtttgtggccgtgttatcgtgtaagaatcgcatcgctatgtttctggatctcgagaaatagtaacggtgccctcctcaatgttc

SEQ ID NO: 1189 - DNA, 446 bp, Triticum aestivum
  Clone ID: LIB103-027-Q1-E1-C6
taccgagtccaaaattcccgggtccacggggctgctggaggggtggtagcggaccgggagaaatccctggctggattcccggccacgacgacggcgacacctcctggtgtcgtcttcctccttggaggcgccgtcgaggtgcgtttacccccttccctcccactctcatgcccgggtgaaaactctagtctcttcaggctgggcggcagcggcgtttcatgcgtcgtcatcttcttgaaggtgccgccttgggtgagttgggggtgtgcaggggcgatgggtgtggtgtcaagtgtgtggcggctttgcaggaggagttggcgccatggtcttcttgttggggcaatgctctgctatttggttgttcgttgcctgtcttgtggctgtttgttcgctggctctcagtgccatggcatggacagggtgaagatagggttctttccccg

SEQ ID NO: 1190 - DNA, 447 bp, Triticum aestivum
  Clone ID: LIB103-027-Q1-E1-C7
gtaccggtccagaattcccgggtcgaccttggcttttcttaggtgattttaacgagatcttatcactagatgagaaggttggggggggggatcgaccacaatgattactggataatttcagggaggccctggagtcatgcgagctcagtgacattggctattacggtgataagtttacctggagaaaccatagtaaggagctcagtacatacatatgtgaacgcctcgatagagccacggtgaatgcaccctgttgtgattggtttcctaacttcagtgtcctcaacggggctcctcgtcactcggaccacaggcccgttattgtatgcactcagggatgaaatagaacggagcgatgtggggatcacgggttctgttttgaggcgtggtggctacaggacgaagggagtagtgaagatgtgcaatgggcacagggggaatgatgct

SEQ ID NO: 1191 - DNA, 140 bp, Triticum aestivum
  Clone ID: LIB103-027-Q1-E1-C9
tacaactcactaaagtgagtcgtattaacgggaactttacattccgatttccgtcatacaccggcactgtccactttccacgcaacatcttcgtgttactttacttcctctatcgcctctggggccacggcccttcctgg

SEQ ID NO: 1192 - DNA, 436 bp, Triticum aestivum
  Clone ID: LIB103-027-Q1-E1-D1
acgctggccgtgccggtccggaattaccgggtcgacgaacccaaattcctccttcagattgcaggatccacgtggcattcaaggtctcgaaggtagattatgcgtccgcacccagtttgcgggatcgacgcgcgcgcgaccggcttccgccatgatagccaccatgagtgcctcctccgcgtgggtggagacgacaatgacacgctagttcctcctcgccggcgtgctggagcacgtgctcgtccttctcttcatacgctgcgtgcatagacgcggctccaccagctgctcccgtgcttggcagcgcggcggcctgtcgaggagggactgaagacgacgtgagcgggcgatccttcggcttcatggcacagggatggcggcgacacgctggtgatgggcgagaaattgttggccagagcaggcgggcgccgccatg

SEQ ID NO: 1193 - DNA, 454 bp, Triticum aestivum
  Clone ID: LIB103-027-Q1-E1-D11
gtaccgatccagaattcccgggtcgacggggacgccatctatgctgccatccactggctggacacgaaccatctcgctgaggcggtcgacttcgaggacaagatgaatgagctggtggccctgtgcagccccatcatcgccatcatgtaccagggtgctggcgccgacatggacggctgcatggatgacgacacgccggttgcattctgcggcgctggcctcatgattgacgacgtcgactaagctagtctatgttctgtggcagagacctgctgcttagttattattatgtcgtgccctatcgttatctgagactgggttgtggtggttattgttttggtccgagtggtcagggttattccgtggagtaaacattcgtggaacatcagtggattatgggtcacgtcacgtctaagtaatatattaatctaaatcatccagtggattatgctgc

SEQ ID NO: 1194 - DNA, 451 bp, Triticum aestivum
  Clone ID: LIB103-027-Q1-E1-D2
ggtccgagaattaccgggtcgacggctatatataatgttagttcaatttttggtcgtactaatctatagtagtaaggtgcccgtgcgttgcaccgaagagtgaaatgcattgatcggggagttgtttattttgacaaaggatgtgggggtcatctcatgtgtaacgggtatcgataggtttcttgggatattatctcatctctagagctcacaaacatccgggtgaaatagataaaaaggtatcttttgcaaacaaaaccgttcaactgttcaacctgcatccaaaacttgtgaagaaataacacttattgtgctttgcaagaaatgatctttaagaattagtttttgagtatcgattgttatacatgttggctacagatgacatggcactttcttatagtcaacaattggctatactattaagtaatattaaccaatgccttatacacct

SEQ ID NO: 1195 - DNA, 447 bp, Triticum aestivum
  Clone ID: LIB103-027-Q1-E1-D3
ccggtccgaaattaccgggtcgacggggataggagtagactgagagatgggatagaactccatggcatccgagggttccagcggcgtcggcgtcggcggccggaaaccatcggtgtcacacatacctagacatcgcggagtggtgaaattcctcaccggcttgccagcgcgaggaaacctctcgtcatgttccaactcttccaatctgggaagcctcatggtttaagtcagcgagcacgacatacatcctccagagggatcagtgatcgacatggatacgacaaagatcgtaatcatacatctgcaactaaataacacagacagtgaggccaaagacacacgttctatgactccacaggaaactcgcgagggtataagatgtaccgcagaattttgggtgtgcataaatcatcccaaaagcccaacttgggcagtttcttcggattg

SEQ ID NO: 1196 - DNA, 478 bp, Triticum aestivum
  Clone ID: LIB103-027-Q1-E1-D5
gtaccagtccaaaattcccgggtccacggggttagaagttgtaaatatgcattgttgtatcgcgacctgaatgaatgaaataaacgaaataacgctcttgtgcaaaaaaaaaaaaaaaaaaaaaaaaaaaaaaaaaaaaaaaaaaaaaaaaaaaaaaaaaaaaaaaaaaaaaaaaaaaaaaaaaaaaaaaaaaaaaaaaaaaaaaaaaaaaaaaaaaaaaaaaaaaaaaaaaaaagggggccccaaaaaaatttaaaaataaaataacctttaaaaaaaattaaaaacccttaaaaaggggcccaaaaattaaaataaagggccgttttttaaaaaaatttaaaagggaaaaaacctgggttaaacaaattaaaaccccttaaaaaaaaaccccttttccaaaaggggggaaaagacaaaaaagcccaaaaaaaatgcctttcaaaaaaattgccaaaccaaaaggggaaaaggaaac

SEQ ID NO: 1197 - DNA, 475 bp, Triticum aestivum
  Clone ID: LIB103-027-Q1-E1-D6
taccgatccagaattcccgggtcgacggggagaagacggaggaggaggaatccatggggaacatcctgaagtgcttcaggggagacgacgaagaacaagaagaccactacccctactaccgtccaggctccaggccccactacccccagcagcagcagcaagctgatggccatggcgtcgcctccctggcgcacgacctcctcaactttgagagcgcgtccatggttcctgaagggctcaggcagcatgttacggcgtccaagaaagcacagattaaatggtaccagaatatgttggaggcatataagaatgcgagaaccccaccgagaacaccggaagaggctgcacaactagttgtatcagccctaaactggatccagagtgctgatttggagggtatcctcgaattctacaacttccccatcccatcactacctgcagcatcctcaaaccaccgtccatcctcgctgccaga

SEQ ID NO: 1198 - DNA, 456 bp, Triticum aestivum
  Clone ID: LIB103-027-Q1-E1-E11
gtaccgatccagaattcccgggtcgacgggcatacaagaataggaatcgagatatgggatcaccttgccaaagacaatgaatggtttgaatgaatccaagcatgctctatttaatttcataaattatctagctgaggtaacacatgttgatacgtctccaacagatctataattttttatttttccatgctattatattatctattttggatgttttatatgcattaatatgccattttatatgatttttgggactaacctattaacctagagcccagtgccagtttctgtttttccttgttttagagtttcacacaaaaggaataccaaacggagtccaaacggaatgaaactttcgcgatgatttttcttggactagaagacatccagaggtctttagtacatgtcagaaaagccacgaagcggccacaaggttcggaggcgtacccaatgggg

SEQ ID NO: 1199 - DNA, 404 bp, Triticum aestivum
  Clone ID: LIB103-027-Q1-E1-E2
gggtccagacgaatcgtcgatgtcactggatctggatttggccaggttcctggcacatggcacttcaggtgcacgatccttccgcaggaggagaagatcccggcaatcatctcccgcttcacggtgttccatgagaggttcatggcaaattaccgtgacaaaacgggtgtaacatgtgtgggattacatgcaagcctcatggattttcccaaggcgtttttgcccgcgttgacaacaataccgtgtagatgagacaaaataacgcaactacatggcgtgtgtgtgtgagactatctcatattaccactcagacgcctttgatggcaatttggcaactgagaatttttatttgagaaaaagaaacaagagaaaaaaaaaggcggccgcccaagaggatccaagct

SEQ ID NO: 1200 - DNA, 449 bp, Triticum aestivum
  Clone ID: LIB103-027-Q1-E1-E8
attcgcgggtccacgggtaggctgcaagaagacgaagaagtcgggggacaacatcaacaacaagctgcagcttgtcatgaagagcggcaagtacacgctcggctacaagaccgtcctcaggaccctcaggaactccaaggcaaagcttgtgatccttgctaacaactgccctccgctccgcaagtctgagattgagtactatgctatgttggcgaagatcactgtccaccactaccatggaaacaatgttgatttgggaactgcgtgtggtaaatacttccgagtctgctgcctgagtatcatcgaccctggcgattccgacatcatcaacgcaacaccagctggccagtaaacctgtgtatgccattttcagtgtctcgtctgatgcgtcatctaaggtggttctagagtgtagttcttgctggacttgatttggtcttgtgtacatc

SEQ ID NO: 1201 - DNA, 477 bp, Triticum aestivum
  unsure at all n locations
  Clone ID: LIB103-027-Q1-E1-F1
cgcttgcccgtgccggtccganattagcgggtcgacaggcgccataggagttgactttatttattgtatgacctgcgtgtcactgaataacgccatgtaattactttacttcattgctaaaccgttagccatggtagtagaagtaatagttggcgagataacttcatggagacacgatgatggagatcatgatgatggagatcatggtgtcatgccggtgaagatgatgatcatggagccccgaagatggagatcaaaaggagcaaaatgatattggccatatcatgtcactttttgattgcatgtgatgtttatcatgtttatgcatcttatttgcttagaacgacggtagtaaataagatgatccctcataataatttcaagaaagtgttccccctaactgtgcaccattgcaaaagttcgttgtttcgaagcaccacgtgatgatcgggtgtgatagattctaacattcacata

SEQ ID NO: 1202 - DNA, 463 bp, Triticum aestivum
  Clone ID: LIB103-027-Q1-E1-F6
taccgagtccagaattcccgggtccacggggctaactatgtatccaagggagtaatagggaagctctaccgggaaattaagaagcagaaccctcacattggacacttcacaaaggatgtggcaaggcggtcctatgacactgatttgatagttgatggctaccaagactacattaccgaagctgtgtggttcaaggaacagtatgacttcaagctgggtaatctgatggagcactacggaataaatagcgaggctgagataataagtggatgcattcttaagatggcaaataattttaccaagaagaacgacgccgatgctatcaggctggcggtgaaatctttgcggaaggaagcaaggtcatggttcagcgagatgggttcagatgagggcggaggtggtcacgaagcctcggacgccaaggcatccgcttggtatcatgttacctatcaccctgagtact

SEQ ID NO: 1203 - DNA, 457 bp, Triticum aestivum
  Clone ID: LIB103-027-Q1-E1-F7
taccagtcctaaattcccgggtccacggggacatcaaaacaaatcacgtcatcacatcaaatcacaggggaccaaatggatatctctacctcccctcgccggaccgcacgtataaaatcgccctttctacacaaccgcaattccttgcttcctcaatctcgactcatctctccattgtagtggtaatttcttgcgatcagttcgagctcgatcaaagcgagaagccacccacacacatacttagccgtagcagtggtattacttgctgccgatcaatcagcagactcagggcatatcggttgctactacatacattcataatgtcgtcgtcctcctcctcgtcggctgtcttcaacctgtaccagctcacgccgtctcccatcgagcagctctgctacgtccactgcaactgctgcgacaccatcattgcggtcggtgtgccgtgcaacaacctgtt

SEQ ID NO: 1204 - DNA, 468 bp, Triticum aestivum
  unsure at all n locations
  Clone ID: LIB103-027-Q1-E1-F9
taccgatcgtaaattcccgggtccacccctgcatgcgttacatcttcggcgagcagaacaagccggagcaggtcggggagcaagagcttcatcggccggtgcaggcaccatggcccatcggcagcgatatcagcgtgacagtccctgggcgcacaatcgacatattgcagaggaggtgtgatgagcagtttgccatccaccatgcaaaagatccagagctgctcggcggcatgatcgacggcccacccgaagagccgctgtcaccaatgctcatcgagagcctgatgccccgcaaggaatgggcagaggatctctacgattcagtcaagacacgggcagcctgcggcttcatcattgcctgcggcggccatgtcaaccttgatcccaatgatatggtggccaggatcgagcgcatccttggcggagttgacgtccccgacanagtagaacatcaccaacgtgatatct

SEQ ID NO: 1205 - DNA, 453 bp, Triticum aestivum
  Clone ID: LIB103-027-Q1-E1-G1
cgcctgccggtaccggtccgaaattcacgggtcgacggggagttccaggacgagccccggtaccgcgacgacccgcgatacctccgcgtctggatccagatggtggactatgtgaaggacgcaaagccattgctgaagaagttggagaggaacagaataggcctcaagagagctgcgttttatatggcttatgcgatatattatgagaagcgtaggaggtttcaggaggcagagcagatgtaccgcgtgggaatccagaaccttgcagagcctatcgaggagttacacaaatcacatgatcaatttatctatcgcatggagttataccggaagaggaaagataaagaaggaatgcccagcagagttaaaccacttcctagatgtgcaaaccaagttgatggtcaaagcagaaattatacagaacttaagtccaatcctgtgcaaaaattggga

SEQ ID NO: 1206 - DNA, 441 bp, Triticum aestivum
  Clone ID: LIB103-027-Q1-E1-G8
gtaccgagtccagaattcccgggtcgacgggctatggccaccgggtctattctccatcatattattttcctattaatttaatattccttccgtcttttattttgcaatctttactttccaatctatatcataaaaataccaaaaatatctatcttattatctctatcagatctcacttttggaagtggccgtgaagggattgacaacccctttatcgcgttggttgcaaggttcttatttgtttgtgtaggtacgaggtgacttgtgcgtaacctcctactagattgataccttggttctcaaaactgagggaaatacttacgctactttgctgcatcaccctttcctcttcaagggaaaaccaacgcatactcaagaggtagcaagaaagatttctggcgccgttgccggggaagcttaagttaagtcaagacattacaa

SEQ ID NO: 1207 - DNA, 435 bp, Triticum aestivum
  Clone ID: LIB103-027-Q1-E1-G9
attcgccggtcgacggggctagaagacccctgcctcctgcgcctccacttccatcgcctccccaagatcgcagatccgctccggtgagaatccgtcgccatgtcttccagcgaggtcgcctgcacccttgccgccctcatcctccacgatgacgggatccccatcacttctgagaagatcgcgacggtggtgaaggctgccggaatcaaggttgaggcctactggcccgcgctcttcgccaagctcctggagaagaggagcgtcgatgacctcatcctttccgtcggatctggtggaggtggtgctccagctgctgctgctgctgccccggctgctggtggtgctgctgccgctgaagagaagaaagaagagaaaaaggaggaggccaaggaagagagcgatgatgacatggacttcagcttgtttgactaagca

SEQ ID NO: 1208 - DNA, 151 bp, Triticum aestivum
  Clone ID: LIB103-027-Q1-E1-H1
gggtcgacgggtaccgccccctcttccaagatgtccaagcgaagacgtggaagttccgctggaaacaagttccggatgtccctgggtctgccggtggcaaccactgtcaactgcgctgacaacactggtgccaagaacctgtacatcatct

SEQ ID NO: 1209 - DNA, 463 bp, Triticum aestivum
  unsure at all n locations
  Clone ID: LIB103-027-Q1-E1-H3
taccggtccgaaattcacgggtcgacgggctcaccgccgacaaccgggtctaccacaaggcctgcttcaggtgccaccactgcaagggcaccctcaagctcgcgaattacaactccttcgaaggagtgctctactgcaggcctcactttgaccagctcttcaagaggaccggcagcctggacaagagcttcgaaagcactccaaaggttgtcaagccagaaaggaatgttgggaatgagaatgctactaaagtctcgagcgcatttgctggcaccagagagaaatgttttggatgcaccaagacggtctatccaattgagagggttactgtgaacaacaccatgtaccacaagagctgcttcaaatgctgccatggagggtgcaccatcagcccttcgaattacatcgcgcacgagggaaagctcctctgcaagcancaacacacccagctgatcaaagagaa

SEQ ID NO: 1210 - DNA, 363 bp, Triticum aestivum
  Clone ID: LIB103-027-Q1-E1-H4
gtaccagtccagaattcccgggtcgacgggttccattattaggaatcctatcaggcaactcaagcagagggtcacggctaagggccgtttgggtgccactgctgctgtgtactctgcagcaacccttgattaccttactgccgaggtcattgagctggccggcaacgctaccaaggatctcaaggtgaagcgtatcaaccctcgccacctgcagcttgcgatccgtggagatgaagagctggacaccctcatcaagggcaccatcgctggtggtggtgtcatccctcacatccacaaatcactcatcaacatgacctccatagagtgaatgacatgcaataacaggtaattgttgtgtgttgt

SEQ ID NO: 1211 - DNA, 452 bp, Triticum aestivum
  Clone ID: LIB103-027-Q1-E1-H6
attcccgggtccactgaattgcaaaaaaccaccacatttgaagttcagttctggaattgccaccacattctttgggcgtcccaaaaacccacaattttctttgctaattttctcaataaacacttatgaccaatttaggcagaattaatctaatctctgacatgtcaacacgttggtcagatccacgtgacactgcaaatcaacttgtggttgagttggttaggtgaatagtggtatccccaacccaccagggttcaaatcctggtgcttgcattattcctgggtttatttcagaatttccaagatgatatgccggctcagtctctcggaggtgctcatagggatatggtgttcgtgtgtgcgttcataggggtgagtgtatgcgcgtgtatatgagcgcttgtgtctgtactgatgctcaaaaaaaaaagatccatgtgacactaattcac

SEQ ID NO: 1212 - DNA, 450 bp, Triticum aestivum
  Clone ID: LIB103-027-Q1-E1-H7
attcccgggtccacgggaagttcccaaaggcaacataacgtaggaatgcaattttgaagtgtgaaactgcatgtaagtttggtatgcattcatcttgtgtaccatttaccgtacaagatttcatgtggttcgtgtatgttcttttggtattcatttaataattgtgaaaataaattgcaataaagaggtaagaaatgttttttagggaaagaggtaagaaatgttatttgtacatgttgttagttatggagcaatatgtttgatgaaacacgttaatccacatacccctagtcagatttcaatctccactcattacctttggtaaatctgtattgatggagtgaccatgatttcatctaaacatttccaggaaaagattaacgactttcttcacaaaaatgatggatgattgcaagtttttcacatgagaagaggaaagaacagagaggt

SEQ ID NO: 1213 - DNA, 392 bp, Triticum aestivum
  Clone ID: LIB103-027-Q1-E1-H8
attcccgggtccacgggttccattattaagaaacctatgggaagaattaatgatgttcttatttttgcaaatatgaactatgtgcccgtaaatttcaatgttcttgatatagattgcaatccttcatgtcctattattcttagtagacctttccttagaacgattggtgcaattattgatatgaaggaagggaatattagattccaatttccgttaaggacagacatggaaaacttccctagaaaaaaattaaattaccttataaatctactatgagtgccacttatggattacctaccaaagatggcaatacctagatccatcttcgcttttatgcctagctaagggcgttaaacgatagcgctttttgggaagcaacccaattttaattt

SEQ ID NO: 1214 - DNA, 421 bp, Triticum aestivum
  Clone ID: LIB103-028-Q1-E1-A10
attaccgggtcgacggggtcaaatatgttagaggagttgctgtgccgttaggaaaaactaagtctcttgttgagagatttgaaaagagagagagctctagcattgattgttcatcgccaactggctcttgtggtgatcatacagtgaaagctgatagccctcccaccagttcggcagaagcaagtcgcacatatgaaagggacttgccaacagtggacgagatgacgactccaatcgatttggtgcggaaccatgatgaatttataaatgttgtaaaatctcggttgacaaagctagagatgatgcggcatgtctttaacctaaatggcatcaaaggagcaattgctgcggtcgcaaagttgcctgatatcgctgttcaagctgatgtggttagtactctcaagggaaaacttggtctttt

SEQ ID NO: 1215 - DNA, 403 bp, Triticum aestivum
  Clone ID: LIB103-028-Q1-E1-A12
ggtccagaattcacgggtcgactggctggctttcattcaacaaagatctccagttattacggggatgatggtttcgtttgccaaaaatgttgctaatttcatcagtagcattgggaaggaccatgttgttattctttcaagtttagattctggcaagagaagagtaattgatgcatccagtgatatgctgtattacctttcaagctgcaatgaggatggttctgatccagaatgtgagaaactagggtggaagaaacttgaggaatatgatccatctcaacgactgtggaaatgtcttgctagtctaattgagggtggtgttctttcagaagatatggctgatgatcctgaagagatgaccgcaagtgattactacgcgaccttgccacttgcagctctattc

SEQ ID NO: 1216 - DNA, 383 bp, Triticum aestivum
  Clone ID: LIB103-028-Q1-E1-A4
ccgggtcgacgggggcgacaaacaccaaagccgagaagcggccgccggcgtccaaggacggcggctagaagacagggaagacgagatcgaacaagagcgtggagacgtacagaatctacatcctcatggtgctcaaccacgtgcatctcgacatcggcatctcctccaaggccatgtccatcatgaacgccttcatcagcgacatcgtcgataagctcgccagcgagtctgccaagctcgcctgctatcacgagatgcccaccaacacctcacgggggatgcagagcaccgtcggccacatcatcgtcggcgagctcgccgcgcacaccgtctgagaaggcagcacagccgtcaccaagttcaacggcgcttagaaaatctgt

SEQ ID NO: 1217 - DNA, 381 bp, Triticum aestivum
  Clone ID: LIB103-028-Q1-E1-A6
aattcccgggtcgacgggaaactgaacctgcaacacttcccgagcatctacaccatcgctgttcaggctgccggtggaatatacgagaaggtgatctgcaattacttccttttggccctcacacccaacgataaggtttggctcatgcatttaccggaggactcgatttcgtcacgcgaagacctgtgccacgaattcatcggtgccatcaccggtgggcaccacgaactcggcaagcccatcgacctacaacttctccagcataaagaaggacaaaccctccgtaaatacttacaacgatttaatacacttcaaacgaatattccaaatatctatccagcagctgttataacagccttctaatctaatgtgcgcacatgt

SEQ ID NO: 1218 - DNA, 436 bp, Triticum aestivum
  Clone ID: LIB103-028-Q1-E1-A8
gtacaggtcaggaattcccgggtcgacggggaggacagcagtggcgtgcccgtgttcgcggagtacaccctcgacgagctacacgcctccaccgatggcttcgcaacggaccacatcatcttcgagcactgcgagaaggagcctaatgccgtctaccacggaccctcttcagctctggcaccaccgtcgccatcaagcgcttcgaccgctccgcctggcctgacgcacgccagttcgtggaggaggctagggcagttgggctgttgcagagcggtcgcttgtccaacctcatgggatgatgctacgagggtggcgagcggctgctcgttgctgagttcatgacgcatgataccttggcagctgtgattcgtagtgtggttagggtttgttaagtttactagctccttcattgatgatgggtggcccgtggtgcttt

SEQ ID NO: 1219 - DNA, 397 bp, Triticum aestivum
  Clone ID: LIB103-028-Q1-E1-A9
taccggtccagaattcccgggtcgacgggaacagggatcggtgcagattctgccagaaggttagcaatggcggaataagcaggttcaagtttcatctgtcgcaaattccgagcaaaggcgtcaacccttgcgtcagggtgacggatgatgtcagggaaaaggtgatcgctctcatagaagccatggaatcacacagggagctcgagcttctcaagagaaaacgtgttgctgaactgtcggtgcttccgaaaagaacacgggaacttccatctcagccttcctccccagggttgcctacttcgcctgctattaatcctgcattcgatccgagtcagctccttggcctggaagtgcctgctccggtacttagactatctggtgctgccaccaagccccg

SEQ ID NO: 1220 - DNA, 424 bp, Triticum aestivum
  unsure at all n locations
  Clone ID: LIB103-028-Q1-E1-B1
gtcaagaattcacgggtcgacgggcttgcgctagttacagattactacagactgttctgtttttgacagattctgtttttcgtgtgttgttttcttattttgatgaatctatggctagtaaaatagtttttaaaccatagagaagttggaatacagtagttataacaccaatataaataaataatgagttcattacagtaccttgaagtggtcttttgttttctttcgctaacggagctcacgagattttctactttaagttttgtgttgtgaagttttcaagttttgggtaaagatttgatggattatggaacaaggagtggcaagagactaagcttgggattcccatggcacccccaagataatataagtacacctaaaagccgaaacttggggatgcccangaaggcatcccctctttcgt

SEQ ID NO: 1221 - DNA, 399 bp, Triticum aestivum
  Clone ID: LIB103-028-Q1-E1-B11
ggtccagaattcacgggtcgacatgcaacacacacatgcggaccttctgcaacatgtaggagcggctcgggtcttgcgtgcagcggcggcagcaacatcagcttccattgaggccaaagtgttcgccagaattgtccttaggaatctggaacaccatcaggcacggacttcaccctgaaaacacaatggcgagcacaagcgcgactaattctccaacatggtatgacttctaacctttggccccagaatggatgcaaactcgcggttaagttgtcgccggcatttgaagctgccgcgcaagctgtgaccttggcacttccaccttgaggagaactgtcagaagagatgaatgaacgttcaaccggcagctgttgagtgtgcaattttcctgttgtttgt

SEQ ID NO: 1222 - DNA, 420 bp, Triticum aestivum
  Clone ID: LIB103-028-Q1-E1-B12
ggtccagaattcacgggtcgacgggatatcttttgagctagatagttttgctctagtgcttcacttatatcttttagagcacggcggtggctttattttgtagaaattgttgatctctcatgcttcacttatattattttgagagtcttttagaacagtatggtattttctatggttataaaattggtcctaatgatgggcatccaagttgggtataatagaaactatcataggaagtgaattggatgctatgatcaatttgatacttgataattgttttgagatatagaggtggtgatattagagtcatgctaattgggtaattgtgaatttaaagaatacttgtgttgaagttggcaagtcccgtagcatgcacgtatggtaaaagttgtgtaacaaatttgttgcatgggatgctcc

SEQ ID NO: 1223 - DNA, 408 bp, Triticum aestivum
  unsure at all n locations
  Clone ID: LIB103-028-Q1-E1-B2
ggtctagaatacncgggtcgacggggacagccccactacccaaccgccgctctccgagtctcctgaaagttgcaacctctccctctcggcgaatttggggtttctgaggcgcgcgaggtaaaccaaggttttgctcatggctcgtactaagcagaccgctcgtaagtccactggaggaaaggctccaaggaagcagctagccaccaaggctgcccgtaagtctgctcccactactggaggagtgaagaagcctcaccgttaccgccctggaactgttgctcttcgtgagatccgcaagtaccagaagagcacggagctgctcatcaggaagcttccattccagaggcttgttatggagattgcccaggacttcaagactgacctccgcttccagagccatgcggtgct

SEQ ID NO: 1224 - DNA, 414 bp, Triticum aestivum
  Clone ID: LIB103-028-Q1-E1-B4
ggtctagaattaccgggtcgacggggtacttcaaggccggcgatgccgatgaggcacgggcgatgtttgacagggtcccggtgcggaacctggtgagctggaacgcgctcattgccgggtacgcgcaaatcgggcgctccgaggaggcgttgcatgcctttcactcgatgttggaggacagggtcaagccggacgagttcaccatggccagcgtgctgtctgcctgcgcgcagctcgggtcgctaaaggaagggaggaaggttcatgacttcatggaccggatgcgtatacggaagaaccacttcgttctgaatggcctggttgatatgtacgccaagtgcggcgacctcgagcacgcccgcaaggtgttcgacagcatccaacggaggaatactgaatgctggaactcgatga

SEQ ID NO: 1225 - DNA, 423 bp, Triticum aestivum
  Clone ID: LIB103-028-Q1-E1-B6
ggtacaggtcaggaattcccgggtcgacggggttgaatgaatccattgtgagaagagcccttgtgatcatgcaccagagggacgaagtggagtacaagagggagcgccatgtgattgtccgcaaggcttgagctgaaccgaaatgatggaactaccatggaaaccctctggccatctgatgtgtgtgtataagtagtgctgacactgcagcctgtttcctgaggaaatttgttgcgtcgttgaaattgagttgtagttgtactactttaagctgtagctgtagccctaaattatcttgtgtcgaactgaagatgtaccacagtaagttcattcatgattgcaacatttgggcgttctgcagctgagcagagttaatgcctagaaaaaaaaaaaaaaaaaaaaaaaaaaaaaagcggccgctct

SEQ ID NO: 1226 - DNA, 432 bp, Triticum aestivum
  Clone ID: LIB103-028-Q1-E1-B7
aagtcccgggtcgacgggcaatcctactaggagcatccgcatagtgcttggtttttgatgacttgtagatttttgcaataagtatgtgggttctttatgactaatgttgagtccatggattatacgcactctcacccttccatcattgctagcctcttcgatgccgtgcattggcctttcccaccttgagagtcggtgcaaacttcgccggtgcatccaaagctcgtgatatgatatgctctgtcacacattaacctccgtatatcttcctcaaaacagccaccatacctacctattatggcatttccatagccattccgagatatattgccatgcaactttccaccgtttcatttatgacacgtttcatcgttgtcatattgctttgcatgatcatgtagttgacatcatatttgtggcaaagccaccatg

SEQ ID NO: 1227 - DNA, 437 bp, Triticum aestivum
  Clone ID: LIB103-028-Q1-E1-B8
aattcccgggtcgacgggctatcctcctaggagcatccgcgtagtgcttggtttttgatgacttgtagatttttgcaataagtatgtgggttctttatgactaatgttgagtccatggattatacgcactctcacccttccatcattgctagcctcttcgatgccgtgcattggcctttcccaccttgagagtcggtgcaaacttcgccggtgcatccaaacctcgtgatatgatatgctctgtcacacattaacctccttatatcttcctcaaaacagccaccatacctacctattatggcatttccatagccattccgagatatattgccatgcaactttccaccgtttcatttatgacacgtttcatcgttgtcatattgctttgcatgatcatgtagttgacatcatatttgtggcaaagccaccatgcataa

SEQ ID NO: 1228 - DNA, 411 bp, Triticum aestivum
  unsure at all n locations
  Clone ID: LIB103-028-Q1-E1-C1
ggtcaagaattaccgggtcgacgggcgacggcggaggcgcccacatcaacctcaaggtcaaggggcaggatggcaatgaggttttcttccgcatcaagagatccacacagctgaagaagctgatgaacgcctactgcgaccgtcagtctgtggatctcaactccattgctttcctttttgatggtcgtaggctccgtggtgagcagacccctgatgagcttgagatggaggaaggcgacgagattgacgccatgcttcaccagaccggagggggctttcctcgcccttagaaggagcttgctgcagcctggctgttctatgtcgtatgctacctttagaactagagtaaaatgtaagaagtgaaagaacttgcgaggctatgattctgtgccatagcctganggggggtct

SEQ ID NO: 1229 - DNA, 426 bp, Triticum aestivum
  Clone ID: LIB103-028-Q1-E1-C10
ggtccagaattcaccgggtcgacgggccagtttagatgacggtctagcgataggatgcataagcctggcatgtaaactctattgcagttgctctggtctttaaagaaaattgttgtgctttttgtatgattgatactttgcaataacatggttgcatgcatcaatcgatgcaaaggccccagggctccctcttttattgaaaaaggttaccatatacaagagcatgtcataatataatgagacaacacaataaagcaaccggagaatgtacccaatgaaaatgatttgtaatggacaacaaaaatgagaaaagaaaattgaacttacaatgataattttaagggtaacatcaaggccttgtttctttaacctaagaaccatttcatcctccaaagcacgaacttggtccaatatataaacaatctg

SEQ ID NO: 1230 - DNA, 139 bp, Triticum aestivum
  Clone ID: LIB103-028-Q1-E1-C11
ttcacgggtcgacggggaagaagcccaaggcggagaagcgggcggcggcgaccaacgaggccggcggcgacgggaagacgacgggccggaagaatggcagcaaggccaagaagggcgtggagacgtacaagatctacat

SEQ ID NO: 1231 - DNA, 427 bp, Triticum aestivum
  Clone ID: LIB103-028-Q1-E1-C12
cgctgcaggtgacggtccagaattaccgggtcgacggggaagtccgccgccaaggagggcggcgacaagaagggcaagaagaaggccaagaagagcgtggagacgtacaagatctacatcttcaaggtgctgaagcaggttcaccccgacatcggcatctcctccaaggccatgtccatcatgaactccttcatcaacgacatcttcgagaagctcgccggcgaggccgccaagctggcgcggtacaacaagaagcccaccatcacgtcccgggagatccagacctccgtccgcctcgtcctccccggcgagctcgccaagcacgccgtctccgagggcaccaaggccgtcaccaagttcacctcctcgtaaagtgctcctgctcctgtgtctcgtagttagctgtccgggtgtgtttgtggccgtg

SEQ ID NO: 1232 - DNA, 414 bp, Triticum aestivum
  Clone ID: LIB103-028-Q1-E1-C2
ggtcaagaatacccgggtcgacgggcggcgctaatttcggcccaggccggcgaaaatcgggctcctaggggcgcgactcggccaatttttctgcgccggcgcgaaaaaatcggctggggaggcctttctgggggcgcggctgaagatgctctaaaattcaaggacaaccaaaagcctaagcttggggatgccccggaaggcatcccctctttcgtcttcatccatcaataactttacttgaggctatatttttatttaccacatgatatgtgttttgcttggagcatcttgtatgatttgagtctttgctttttagtttaccacaatcatccttgttgtacacactttttggagagacacacatgaatcggaatttattagaatactctatgtgcttcacttatatcctttgag

SEQ ID NO: 1233 - DNA, 402 bp, Triticum aestivum
  unsure at all n locations
  Clone ID: LIB103-028-Q1-E1-C4
ggtcaagaatacncgggtcgacggggaggaagagcccgaggaggggctaggaactgaatatctagtgcagccgcttggccgtgctgaagatgaagagcattccagtgactttgagccggaagaaaatggtgatggtgctgaggatgaggagattgaggatgatgatgctgaggatggtgaggattctgtcaagccgcaatcctcatcgaagaggaagaggtctggtggggaggatgaagatgatgatgacggtgatgatgatggtgatgatgatgagaagcctccatcaaagcgatagtcaatttgttcttgctgatctggtatcttttctgcttgggccaagaaggaaaataatcctctgggagaggattgttggtaaatgctgtagctttaggacatctg

SEQ ID NO: 1234 - DNA, 414 bp, Triticum aestivum
  Clone ID: LIB103-028-Q1-E1-C5
aattcccgggtcgacgggtacggcagcgaaaaaacaacaaaattccaggggtgaagaacacacatcgtgtcagcgctgctccggcagacatctcgagatctgctgtgcgaaaacagacctgatctgtgtgctgtggtctcatagagaccatatatatctacactaaatatatcacatgtcacatctcacatcgagatgttgttacacctttctcgtgacagtctcgcgctataacagatagcgctctctgttcgccccgccgcccgcggagatgctatagtggtagagtgtatatctcctcctccgcggtgtgcctctgcgtgtacatatatggatactctctctgtacagtgacaccggctaacattgagattataacactctgtgtaatgttataatactctgttgccctcc

SEQ ID NO: 1235 - DNA, 446 bp, Triticum aestivum
  Clone ID: LIB103-028-Q1-E1-C7
aattcccgggtcgacgggtacatgatctcatctggtcagcccgttaacgagtacattgatgctgcagttaggcacgttcttctcagacagggcgttcttggtatcaaggtgaagattatgcttgactgggaccccaagggcaagcttggccctaccaccccgctgcctgaccttgtcaccatccaccccccgaaggaggaggacgagctgcgcccaccggctttggttgaggtctaaagtcccaatagagcaagcagaccatgaaacggcacatcattttggtcctagctacttttctatccctgtgataagcgagggctatgcaacgcttggttacctaccttaccttttaatggacaaaagtttctgtgtaatgcttctatgttaatttcgtttaaactaagttttgccgagacaagttacttatgtatgccacaaacctttgt

SEQ ID NO: 1236 - DNA, 396 bp, Triticum aestivum
  Clone ID: LIB103-028-Q1-E1-C8
aattcccgggccgacgctaacttcaacacagatctggatgactctaagtcacaaaccggatacgtgtatattttgaatggtggggcagtaagctggtgcagttgcaagcaaagcgtcgtgacgggtactcgaccgagacggtggtgaccgccaccggcaacgagggggagtacgagcggatcaccaaggaggagaagcaccacaagcacaaggagcacctcggcgagatgggcgccgccgccgccggagccttcgccctctacgagaagcacgaggcgaagaaggacccggagcacgcgcacaagcacaagatcgaggaggaggtggccgccgctgcagccgtcggcgccggcggcttcgtcttccacgagcaccacgagaagaagcaggaccaca

SEQ ID NO: 1237 - DNA, 377 bp, Triticum aestivum
  Clone ID: LIB103-028-Q1-E1-C9
gtcgacatcggcaggaacgtcaaccatggaaacgactcagttgagagtgccaggaatgagatcgccctgtggttccctgagggcattgcagagtggaggagcagccagcacaactggatctatgaggcctaagatgtgtcatgagtggtttgagtgcaggtttcattaagcatctaccaaactagtctttggttgtttacagttttgagatttgtatcttgggaaccttgtttgtgtgaactgaactgatctccttgtgcttgagcactcaagcgttatctgctgctctatatttgatatatggtattgagttgcattccacaccataaaagccatcgttcgaaaacaaagcgggcgctctataggatccaagctta

SEQ ID NO: 1238 - DNA, 425 bp, Triticum aestivum
  Clone ID: LIB103-028-Q1-E1-D12
ggtccagaattaccgggtcgacgggcaatggaggatgtaggtgtgatatgtcaagtagtggacagataagccaaccactggatgtggttttcagggatttttgcagtgggatttgtagggtactatgctgcgctgtgtttgggatttgaaataaaacgatgggagatgtgccacgctcccaaaaaaaaaaaaaaaaaaaaaaaaaaaaaaaaaaaaaaaaaaaaaaaaaaaaaaaaaaaaaaaaaaaaaaaaaaaaaaaaaaaaaaaaaaaaaaaaaagcggccacccaacaggattaaaggttacatacccatgcatgcgagttcataacccttcaatagtgtcacctaatttcaattcactggccctcgttttacaatttcgtaacatgggaaaacccgaaatgttacccaattttaaaaccc

SEQ ID NO: 1239 - DNA, 450 bp, Triticum aestivum
  unsure at all n locations
  Clone ID: LIB103-028-Q1-E1-D2
ggtcaagaatacncgggtcgacgggagaccttaccttagaacgattggcgcgattattgatatgaaggaagggaatatcagattccaatttccattaagaaaaggcatggagcacttcccaaaaaataaaattaaattaccttatgaatctatcatgcggtctacttatgaattaagtgccaaagatggcactacttagatctatcctcgcttttatgcctagctaggggcgttaaacgatagcgctagttgggaggcaacccaattttatttgtgttctttgtttttgcttctgtttattaataaattttgcatctacattctgtttagatgtgtttttatgttttaattagtgtttgtgccaagtaaaacctataggataacctatggtgatagttaatttgattctgctgaaaaaacagaaattttgcgcgcatgaaattagttttg

SEQ ID NO: 1240 - DNA, 393 bp, Triticum aestivum
  Clone ID: LIB103-028-Q1-E1-D5
cccgggtcgacggggaggacaatgtccagatcgcggagagggctgtccctgaagccgtgtttggcgagctcggcaagagagccgcggagagcagggaggaaagctccagtgctcaagagaacaacgagcagcagctgggcgctctcgagagaattaagcgaaggcgtcaatagggtcaaagattgtgatccaagcacgccattacctgtcgttgagcctaatgatgttgtagctgttacgtgtaaacatgttctttgctagcgtttgctcttcttgtacaaggattttgcaggagttaatccggtgttgatccgcagcgtttttctgtgtacaaactgtaaactcttgggacacgtgtccatcattttcagtgaaattttgtcgattccaagg

SEQ ID NO: 1241 - DNA, 420 bp, Triticum aestivum
  Clone ID: LIB103-028-Q1-E1-D6
cccgggccgacggggaagacaccgcgggcaagaagcccaaggccgagaagcggctgccggcgggcaagacggcgtccaaggaggccggcggcgagggcaagacccggggccgcaagaagggcagcaaggcgaagaagggcgtggagacgtacaagatctacatcttcaaggtgctgaagcaggtgcaccctgacatcggcatctcctccaaggccatgtccatcatgaactccttcatcaacgacatcttcgagaagctcgccggggagtccgccaagctggcccgctacaacaagaagcccaccatcacctccagggagatccagacctccgtccgcctcgtcctccccggggagctcgccaagcacgccgtctccgaaggcaccaaggccgtcaccaagttcacatcctcctaaactg

SEQ ID NO: 1242 - DNA, 420 bp, Triticum aestivum
  Clone ID: LIB103-028-Q1-E1-D8
aattcccgggccgacggggagtatgaggcccaggacaaggagctggtgcaacttaagcgtgaggcccggatgaagggtgggttctatgtcagtcctgaggcaaagctgctgtttgtcgtccgtatccgtggtatcaatgcaatgcacccaaagaccaagaagatcttgcagcttttgcgtttgaggcagatttttaatggtgtgttccttaaggtcaacaaggccaccattaacatgctgcgtcgggttgagccatatgttgcctacgggtaccctaacctcaagagtgtcagggagctgatctacaagagaggttacggaaagctcaacaagcaaaggatccctctggccaacaacaaagtcatcgaggagggtttggggaagcacaacatcatctgcattgaggaccttgtgcacgag

SEQ ID NO: 1243 - DNA, 418 bp, Triticum aestivum
  Clone ID: LIB103-028-Q1-E1-E12
ggtccagaattcacgggtcgacggggaactagaaaggttaatgccggtcagtacatttctgtccatttgctctagcttcacttttatgcttcgtgcgatcttccccacttcatcgatgtctttctccatgcgtcccttgattgctggaagatgcatcatttaaacgctccgcgtatatcttaccacattaccactcagaaatgcaatcagtacatatatacaagtaaaggatggagttcaagcctttcattgcagaggccttagtggctgattttgactcctcgttggcttcctgcaggtggaaagaaagaattaattttccttgtcaatagtacaagttagagactaaggtgatggcaagatgtaactaaatattgttttaaaaagggaaagagctcatgtctgaaacgtctgaaac

SEQ ID NO: 1244 - DNA, 441 bp, Triticum aestivum
  Clone ID: LIB103-028-Q1-E1-E7
ggtacaggtcaagaattcccgggtcgacgggggctacatctcattggacatgaccccatggtaatgacatctcagatggagaaacttgatctaacagagacataacatgcgcgaaatttggcaaggcaaacctgttagttggcagacgagcacaacatcagtaagaatgtatgcaagacatatatggtataattttgagataaacaacaaataataatactcacatcggtacggttaaacattctcggatgttgtatgagcgtcggtcgcagcgcttgtgttaataataagatcctttgagtagtagagcatgaagagggcaacgatggtcatgagctcaccaccgtcatttaggtgcttggcatggaaattctcgttgcagcggtaagccgcgtagcacaacatctccacccacacatcgcggatcatatgaagtgttgt

SEQ ID NO: 1245 - DNA, 427 bp, Triticum aestivum
  Clone ID: LIB103-028-Q1-E1-E8
aattcccgggccgacggggctctccatggcgtccaccttcgttggcaactcgacctccatccaggagatgttccggagggtgagcgagcagttcactgccatgttcaggaggaaggctttcttgcattggtacactggtgaaggcatggacgagatggagttcaccgaggcggagagcaacatgaacgacctcgtctcggagtaccagcagtaccaggatgccactgctgacgaggagggcgagtacgaggatgaggatcaggagcctgaggaggacatgtaaggtgggatgtccatgtcgtgctttgctgggtgggggttctgggggcagagtttgatctgtttggtgctttgttataaatctgtttatcatcgcaactaccgcttgtacgccaccgccattcttcctgcctttcctaagctctgt

SEQ ID NO: 1246 - DNA, 400 bp, Triticum aestivum
  Clone ID: LIB103-028-Q1-E1-F1
cgggtcgacggggatacgcatacggggatacgggatacggcattttccaaaaacagccattcggggatacagcggggtatataagtatttagaaaaataaatatgaaagtatatagaaaaataaatttgaattaagatctaatgagaattttttagtactggatatatattgtctcctttctattcatgaaagactgagagcagtccactcacagcccatgtagctgtccgtccacttagagcccatgtagctgtccatccacttagagcccatgtaaggcccaattccagaaaaccctagactagtagcactccagctgctccagccgaccccaacctcccattctcgtactccctttctccagccgccagtgaagaaaggaaacgacagcgccgccaa

SEQ ID NO: 1247 - DNA, 424 bp, Triticum aestivum
  Clone ID: LIB103-028-Q1-E1-F11
ggtccagaattccgggtcgacgggagcggacccatagtggtgtattgatatggtgaatatgtggactcgtgtgcgccacctcaaaagagtcgcttgcagtcgtagtttaggatagccaccgagtcaaagctggcttgctgcagttaaaccccaccatccctttgttgataatgatgcatatgtagttagttctgatgtaagtcttgctgggtacatttgtactcacgtttgcctattttatgtttttgcagagagacttcagtctcattagtagttccgcttggacttcgacgtttagcttgttacctcagctacgatcttgtgccccgacaggatctggtagatagtcagacttctcagcctttttcatttctagatgtctgtactcagacatgatagcttccgcttgtgcctttgacttgta

SEQ ID NO: 1248 - DNA, 405 bp, Triticum aestivum
  Clone ID: LIB103-028-Q1-E1-F12
cgctgccagtgccggtccagaattcacgggtcgacgggaatccggcttcgataagctcggccagctcctcccccatggcttgttgcttgggttcggaaaagtgccgcagtgtttgcttgaccggtttaaatccctttaatatattgaggctatgttcggccaacttgcgtgggatccctggcatatctgacgggtgccaggcaaatatgtccaagttttcgcagaggaatactcatagtgcggcgtcaactgttgggttcagctacgctccgatagatgttgtcttcttggggtccgttgggtggacctggaatttgactatttcttctgctggtttgaaggaggtggatttggggcgtttatcgaggattatgtcgtccctgtccaccatggagcacagtgcag

SEQ ID NO: 1249 - DNA, 443 bp, Triticum aestivum
  Clone ID: LIB103-028-Q1-E1-F2
ggtcaagaattaccgggtcgacgggccactgtatttcacgaaaaaacgtttgccccctgactgctaggacccacgggaagggccaccgtattgcgcgaaaaaaaacattcccccgctgtcagctcggacccaccagaagtgcctccttattacgcacaaaaaaatgaatactccccctgctggttgggacccaccttggtgggaggatgacttgtgggcctactaagttgaaggggatggagtgctttgtcaacttagtcaatatgaacgattctagctccagtgaccgtacgatgtccatccaatggctgcagtgcttcttcaacctctggtcttgttgctccagccgcccaaagcagtgccggtcgtgccgcatgctcctgcctcccatggccggttgtgctgccgcggaagcctcaacgccccgtactattcccaacaat

SEQ ID NO: 1250 - DNA, 426 bp, Triticum aestivum
  Clone ID: LIB103-028-Q1-E1-F5
attcccgggtcgacgggagtgatactcaaccaaatcctatgtcttcgagcaaagacaatgagagcaaaccttatccagagctggatgagtcagctttgtttgtagcccaagccaagctgtcgcgtgtgtttgaaatctcaccgttgggcacgtatcagttccttagtgacccaaggtcatttcggacatatcatgtcgggttgcctcctggctataaatagcccactccctacaccataaatttgtggctgctcagagttagtgcacggcttttttcgtttgagaacaaccctcctccgaagcatttgagagagagagagatcattgcgaggactaatgtcacatccctagttctggtatgctcaaggctagctagtcatgtgtgcatcatgtttcaattccatttaaatttgaaatgaggatttg

SEQ ID NO: 1251 - DNA, 431 bp, Triticum aestivum
  Clone ID: LIB103-028-Q1-E1-F6
aattcccgggccgacgggggggttaaatggattctatcccggctatatgaataagcttgttgctgcactacggcagtttgaagaagatctctcgcccgccgtgtctcaactgtctctattgaatctccttccattggaatggctgccaagcgtgaggccgcagcaatcatgttatccagggggctcgaaaagtgacccgatggtgtaggcacatactgtggcaggttaactgtccgtcgaggtggctccgttgctcgtggctgatccaaggcgatcctaggcgcttcggctcggtttgcggctgtcggattactcggcccggcgcctggcgtttgaaagagatttattccttcgtaaaccggtggcaggcgcgaccgatacttcgttcataacacctcctctgacgcggtccggtctagcatgagccgata

SEQ ID NO: 1252 - DNA, 397 bp, Triticum aestivum
  Clone ID: LIB103-028-Q1-E1-F7
gtacaggtcaagaattcccgggtcgacgggatagcatcattgcccagacattgtcatctgcaaagtataaaccataagttgctgttctcagtgattcaaagtgcatatagtgactcacatctccaacaaggtacattgctgatatgagactttgataatgcagtgtccggaagcgacaagcaaaatgttaattctgtgagcatcactgcaccgatgtaatgcatgtagacatgttaacatgtgcttagctatactgtagaaattggtaaccctttgcaatttggttgcatggttgcttgagagagaccatcttcatcctatgccacatactgcatgcttacatcttacgtcatccaatttcaggacacttgcaactgctctacaaacctcagcacat

SEQ ID NO: 1253 - DNA, 359 bp, Triticum aestivum
  Clone ID: LIB103-028-Q1-E1-F9
cggcgaagaaaataccagctccgacatgccattaaaatcgcatactcccgttctgcacatccctgctcttcctgagggcaccgtcgtggtctcaacatagcaagaagagcggcacggctggatcggcgaaagagatggcattttcctctgaccacactcacccttgacattctcccattgaaagatctgcggtttacttcagctctggcaccattgagggtgtgcgctaattttctttggcaaaggctgtagcttccagagtgctaatgcgaaagcctgagacttgaaagtgttattgcttcccttgtgataccctaataataaatgcatttggcgacttaagcacttctgcgccgctg

SEQ ID NO: 1254 - DNA, 390 bp, Triticum aestivum
  Clone ID: LIB103-028-Q1-E1-G10
attcacgggtcgacgggctgcgaagcaattcaaaattgttctagattttcttggattggtagagaaattttactacctttctggaacatatgacctcgagctttcagttggtgatgcttcaatggaaaattcgttcctacgagtccttggccaactggagttggacttgccggaggcccctgaaaaggccccacgtcctccggcacaagctgttgaccccttagcaaagtttaggccacagaaggagatagaacacatattccgtgtgccagagaagaggccaccgcaggaagtgtcgcttgcatttactggcctcatactcctgcctttcattgggttcttgattgggcttatgcgtctgggagtcaacttgaagaacttcccttccct

SEQ ID NO: 1255 - DNA, 404 bp, Triticum aestivum
  Clone ID: LIB103-028-Q1-E1-G11
gggtcgacggctattcgaaagcaccagatttctacagactgttctgtttttgacagattctgttttctatgtgttctttgcttattttgatgaatctatgagtagtatcggaggataagaaccatagagaagtttgaatacagtagatattacaccaatatgaatttagaatgagttcacaacagtaccaaaagtggtgatttattttcttatactaacggagcttacgagttttctgttgagttttgtgttgtgaagttttcaagttttgggtaaagattcgatggagtggaaagagcctaagcttggggatgcccaaggcaccccaaggtaatattcaaggaaaaacaagagcctaagcttggggattgcccgaaaaggcatcccctctttcgtattcgttc

SEQ ID NO: 1256 - DNA, 436 bp, Triticum aestivum
  Clone ID: LIB103-028-Q1-E1-G5
attcccgggccgacggggagaatgaggagaggacggctaggctattggaggaggagaggaaccggaacgactcggctgaccgggccatgtacgatctcttcgtgtccatgtgcgagaagaacggccagacccctccgccgatgccagtcattgctccggcgggcacggtgagtttcatttgaatggtcattagttactagtcttcacatttgagttgcatcatgctaacgatacattggaaataatctttggtgcaacataactcccaacaagcatcgaccgatccttctccgtctgccactggcgcgaccggtcctacacctacacctccgtgatgacgatttgcttaagatcatggaagcttgggttgatggagtgcttgtatttagtttttgttttgaccttatgaaacttgctacctatggatgaaactgtg

SEQ ID NO: 1257 - DNA, 427 bp, Triticum aestivum
  Clone ID: LIB103-028-Q1-E1-G6
aattcccgggccgacggggaggttaagaagctgattggcaggatagtgaagtggctgaagcccggtgggcatattttcatcagggaatcgtgcttccaccagtctggggattccaagaggaaagtgaacccgacgcactaccgggagccgaggttctacaccaaggtgtttaaggaatgccactcctatgaccaagaggggaattcctttgagctttctctggtaacttccaagtgcattggagcttatgtgaaaagcaagaagaaccagaaccagatatgttggctgtgggagaaggtcaagtgcacagaagacaaaggctttcagagattcctggacaatgtgcagtacaaatccactggaatcttgcgttatgagcgcgtgtttggggagggttatgttagcaccggtggattcgagaccacaa

SEQ ID NO: 1258 - DNA, 402 bp, Triticum aestivum
  Clone ID: LIB103-028-Q1-E1-G7
ttcccgggccgacgggattcttacaaattatcggttgattaactgttgttgtatccatgggttagagttaatttgagctagttcgggctcaaatagccctaaagtatatccaaacatgagggctagtttgagctagttgcatctaacccaccccaaaaaactatccaacccaagaggtgctaattggagctagttctcctagtgcatttattgtcaatctaaccctgtcatccaaacacctctttggatggagttagttcagggttagtcatgagctagaaactaactctaacctctagctaagttgagtatccaaacagggctatgttgttgttgttgctgattctcttctacgtatatctagacatcatcaaaacattaaggctcttccttgttgctatg

SEQ ID NO: 1259 - DNA, 404 bp, Triticum aestivum
  Clone ID: LIB103-028-Q1-E1-G9
ggtccagaattaccgggtcgagggggcatttgatgaagcaagttcggttccggcgtttggaggcagagtgtccagcgacaccagcacactggtgaacttccggccgaagctgaggcccgtctgctccatgtgaagacagagatggttgatgggctaccgcacccaccggtgctgttgcagctagcatttggttgtttgggtcctgcggctgctcctatactgctacttactgcttgcgccctgattgtctcctgcttgcttgcaactttgcacgtctcctagaactcataatgttatgttatgctatgatgcgagtactatatgtagtcgtggcgctcttgttaattagagctatatggtgatgctagtatgttagatgtcatgtgttttaatggaacacctgc

SEQ ID NO: 1260 - DNA, 400 bp, Triticum aestivum
  Clone ID: LIB103-028-Q1-E1-H5
ccgggccgacgggggactctgcctggttcgccaccaccgccgccacccaccccctcatcctcttcctccgctctctgcagctgccgctcatctcggtgggaggtccttaggcgggcaggttcccctagatccccggagtcactcaatcaaatggctgacggtgaggacatccagccccttgtctgcgacaatggaactggcatggtcaaggctggttttgcaggggatgatgcacccagggccgtcttcccaagtatcgttgggcgcccccgccacactggtgtgatggtggggatggggcagaaagatgcatatgttggtgacgaggcccaatccaaaaggggtatcctcaccttgaagtacccgatcgagcatggcatcgtcagcaactgggacgaca

SEQ ID NO: 1261 - DNA, 365 bp, Triticum aestivum
  Clone ID: LIB103-028-Q1-E1-H7
cccgggccgacgggcacgtttacagggggtcaacccgggaagaagccaacccaagggaaaggtcacactgcccgtgacttttggaagcgacctgaacttcaggacgatgtggatcgtgttcgatgttgccaggatcccctggccctacaatgggatccttggctgcccagcgctggccaagttcatggcggcgtcacactacgcctacaacaccctgaagatgccgggacctgtgacgatcatcaccatcccctccgacaagaaagatgcactgatttgtgctgaccaactaaaccagcaagcagttgcagcagccgctgccgctagggcacttgctcttgccgctgagaccccgggggaaaaaa

SEQ ID NO: 1262 - DNA, 426 bp, Triticum aestivum
  unsure at all n locations
  Clone ID: LIB103-028-Q1-E1-H8
cccgggccgacgggcgtgagacccgggggccggccgggccacgtgggccattggtcccggttcgtctggacctttcggtcccggttggcgggacaaaccgggaccaatgtgccttgctcctggcccaccaccattggtcccggttggaggcatgaaccgggaccaaaggacgcccattagtcccagttcgtaccaccaaccgggactaaagtgttggtcctcgttgcggccagagtttagtcccacctcgccaaccgaagggggctcacaccggtttataagcccctccctctctgccttgttgagctcctctcaaaatgaaaatagatgcccttatacaggaaatttgacctanattcatactgaatttctctgaagttagtagaaatttattatgaatttaggttgaattttctctataagctc

SEQ ID NO: 1263 - DNA, 405 bp, Triticum aestivum
  unsure at all n locations
  Clone ID: LIB103-029-Q1-E1-A4
cgggtcgagggggccttccccagtcaccgattcaaccattcgcatagagagagaaagagagtcaacatccccgattcagcaccgagctcgcaccggtggagatcgtggtgggaggatgtcgtcggactactcgtcgtcgtgggcgcgcgcgctcgtgcatatctcgccctacaccttctccgccatcggcatcgccgtctccatcggcgtctctgtactcggcgcagcatgggggatcttcatcacggggagcagtctcatcggggccgccatcaaggcgcccaggatcacctccaagaacctcattagtgtcatcttctgtgaggccgttgcaatttatggtgtaatcgtggcgatcatcctccanacaaagcttgaaagtgtgccaacatcgcgaatgcatga

SEQ ID NO: 1264 - DNA, 343 bp, Triticum aestivum
  Clone ID: LIB103-029-Q1-E1-A5
tcccgggtcgacgggaatgagggatccagctcagaccaaaggcatgaggcagaaagtgatggaagaaatattcaagcctactgatgacagcaccctcagcgctccttctcctgagaagaaggtgcgaaggatcagagactcccccttcaacaagaagagcggctcggttctgcacagaatggcgagctcttcaacagggacagaagatgctgaggctcctccctccggcagctctgctgagccagttgtaccgagaaggacaacaagggagaggaaggcagcagtagtctacgttgcttctgagagcgaccatgatgattctgaggatgaaaatttttcggaa

SEQ ID NO: 1265 - DNA, 451 bp, Triticum aestivum
  unsure at all n locations
  Clone ID: LIB103-029-Q1-E1-A8
taccagtccagaattcccgggtcgacgggggtggtatgaccgaagccggtaatcataacatcatccgccttgtcatcagcagccttcactggacttgacggtttatcagcagccttaactgggcttgacggtttatcagtgtctcggaccgggcttgtcggtttatcagactggcctgttgggtcaacctccacttgttcaacaacaaaatcataatcttgcggcggtgggtcattaagcatggcatcggcatttgtatcctccagatctagagttttttccggttcaatagctacattgtcgtcagccggtttatttaaccgggccttcttgttgggtcaaggtttggcactgaagagaacaaacataaaggtcaatacatcggacaaatataatatatcaaggataaaattaanacataactcaaccaggaaccgtcttgaggggtgga

SEQ ID NO: 1266 - DNA, 240 bp, Triticum aestivum
  Clone ID: LIB103-029-Q1-E1-B1
tagtgagtcgtattactagactgacgcagatctacttactatcgacacaatgacgtggtaaatgattaagagaatcgggagtccggatttatagtttcacaaattctacaagctcgagattggcttaagcttagggtgtctgcacctccaaatcgttcttggatcaaactacgttgtgatcgagatagagtagaacgcatcaatagagaagatacggagatctagaatctatatactgac

SEQ ID NO: 1267 - DNA, 390 bp, Triticum aestivum
  Clone ID: LIB103-029-Q1-E1-B2
gggtcgacgggaggaggttcagcgcggagttccagctcgtcttccgtctgatcaacgggctgatattcataacattcatctccatcatcataatcttaacagtaatcgcccatatgacagtccttgacatcttcgtctgcatcctcgccttcatgccgactggatggggcctgcttctgattgctcaggcgatgaagcctgtcgtcgaaatggtccggctgtgggggtcggtgaaggctctcgcccggggctacgagatcctgatggggctcctgctgttcatgcccatcgcgttccttgcgtggttccccattgtgtccgagttccataccaggatgcttttcaacgaggcgttcagcataggcctgcagatctcccgtatcctcggcg

SEQ ID NO: 1268 - DNA, 411 bp, Triticum aestivum
  Clone ID: LIB103-029-Q1-E1-B3
attaccgggtcgacggggtctataatatccgtgctcaaccggttcccgtcaagcgctttcggccatgacctcaagttctgcagctaggccatgaagtgttggtccttctcaccgtccaccgatgatggtgcccgagagaagtcggggaatgagaaaaggatgttgctgtcatggtcgtcgaaacgacttgccgtggacgcagtcacgcactggatgccatcgacgactagccgtggacaagcacctcgccgcctccgcaaaatatggatgcacgggattctggtactaacattgtggagtgtgtgctatttcggtgttgtgacttatacactctgtggaagaaacccccggcttgatttacaggtgatgctgatttgtctgggatctacttccgatagattaatttggttt

SEQ ID NO: 1269 - DNA, 429 bp, Triticum aestivum
  Clone ID: LIB103-029-Q1-E1-B6
attcccgggtcgacgggtacagtcaacgaaaaagccacacacaaaaaatagggttagttcatcatatccgaaccaagctgagcctttgcataatctttttagggttttgctttgttgaatttgcggttgcatcgtcggtctagttgctggtcttagagtctagtcttttagagtttcgagttctggtcataagttgtcacgccgccgccgcaccatcatcatcgccctgccatctaccaccaccgctccgaattcgtatccatataccaccaccaatccgtgcccatataccaccaccgatccatatccatatactaccaccgctaccaccaccgctgccatataccaccaccatatatccaccaccaatccgagttccttgcttattaggtttgttttcgggatccatctagattccggttcgtgttt

SEQ ID NO: 1270 - DNA, 417 bp, Triticum aestivum
  Clone ID: LIB103-029-Q1-E1-B7
tacaggtccagaattcccgggtcgacgagtctgcaacattctgatccgtgtgtgctttacaaatctctatgtcatcttgtagatgcagctaccacgcgctactacgagctattccaaataactactctactatacgaatccggtttactactcagagtcatacggattagtgtcaaagtttgcatcgacgtaaccctttacgacgaactcttttaccacctccataatcgagaaaattccttagtccactagatactacggacaagttcgaccgctgtcatgtgatccattcccggatcactattgtaccccttgactaactcatggcaaggcacacttcaggtgcggtacacagcatagcatattgtagagcctacgtctaaagcataggggacgaccttcgtcctttctctctct

SEQ ID NO: 1271 - DNA, 441 bp, Triticum aestivum
  Clone ID: LIB103-029-Q1-E1-B8
attcccgggtcgacgggctactgatacaataaacaaattttctagatcgtcctattttggctgattttttggagttccataagtttgcgttagttacagattactacagactgttctgtttttgacagattctgtttttcgtgtgttgtttgcttattttgatgaatctatggctagtaaaatagtttataaaccatagagaagttggaatagagtatgtttaacacgaatatatatagaaaatgagttcattacagtaccttaaagtggtgttttgttttctttcgcaaacggagctcacgagattttctgttaagttttgtgttgtgaagttttcaagttttgggtgaaagatttgatggattatggaacaaggagtggcaagagcctaatcttggggatgcccatggcaccccaatataatctaaggacacctaaaag

SEQ ID NO: 1272 - DNA, 405 bp, Triticum aestivum
  Clone ID: LIB103-029-Q1-E1-C5
attcccgggtcgacattcgcccgcaggaaagcaacaagcgcgctttcctatttggggtcaagcttggcactgatggtgaaggtaccaccagtgccgtcctccttggcggacaccttcttagtctcaggtggagctgccatcgtctgcttgcacttgccggtggagctcgatggtgcgtcctcgacggtagcacagcactccgaagaggtgcgcttgccggagtgggcatcagagctcttgccggactttgtcttcttcttccgcccgggagcttcagcggcaagtatgttgtgatcagctgcggctgctgcttcccggtagatcttgtcggcgcagataagggcatctttcttgtcgccggggacagagatgacacttatcgggcctggcatcttgagcatgttg

SEQ ID NO: 1273 - DNA, 422 bp, Triticum aestivum
  Clone ID: LIB103-029-Q1-E1-C6
attcccgggtcgacgggcagataaattggcatagtctgacaaatccgtttttctcttccccttattcataaaggcaaattcatccttggcggtatgcttggataaaacaactagattgcctggggcggtatatgccgtgccagtaacaacaacgtcatcatccttggcggggcttgacgggttgatattctccttagcagggcttggcgctttggcagtagggctcggcggcttggtaccatggcttggcggatcagcagtttgatttggaggggtggcatcagttgatgtatcgacctgtatcttcggttcagcctttggcggattagcatcagcacctggattttccagagtagagtggtctgtggcagtctcaggattttcgccctcatcttcaaggctcttctccgaatcaacttcat

SEQ ID NO: 1274 - DNA, 404 bp, Triticum aestivum
  Clone ID: LIB103-029-Q1-E1-C7
attcccgggtcgacgggatatcacgcttgttaacacagtcgaggtcatgctcatccgccggatacgcccgtgccaacagcggacgttcaacctgtcggagtgtgctccggcacatcaccatcccttgagcaagctcctcgatcctacttacgaagacccctccaacgtgtcgttcaatggcaccaaagctctcgcaaccgcgactgacaatcccggattcagcctgcagcgtcaagccagtgaagtaagcaatttcaccctttacgagacgcatgtagctcaaagtttgaatccatgcatgatctaaactcccccaccttagccaggcctggcacatgaagtccaggtacgttaactgtccggctcccgtagcagacgacccatcagacgcccgattgacgggg

SEQ ID NO: 1275 - DNA, 455 bp, Triticum aestivum
  Clone ID: LIB103-029-Q1-E1-C8
gtaccagtccagaattcccgggtcgacgggagtgcattgaatactatgagaagtttgatacttgatgattgttttgagatatggagatagtgatactaaagttgtgctagttgagtaattgtgaaattgagaaatacttgtgttgaagtttgcaagtcccgtagcatgcacgtatggtaaccgttgtgtaacaaatttgaaacatgaagtgttctttgagtgtcatcctttgtgtggaggtcgggatcgcgggatggttaactcctaccaacccttcccctaggagcatgcgtgtagtgcttggttttgatgacttgtagatttttgcaataagtatgtgagttctttatgactaatattgagtccatggattatacgcactcttacccttccatcattgctagcctcttcggtaccgtgcattgccctttctcaccttgagagttggtgcaaac

SEQ ID NO: 1276 - DNA, 391 bp, Triticum aestivum
  Clone ID: LIB103-029-Q1-E1-D1
gggtcgacgggaatggttccaaggacgatgtgatcgccgtcggcacgctacctctgcatctacctacgggattagttttaaacctcaataattgttatttagtgccagctttgagcatgaacattgtatctggatctcgtttaattcgagatggctactcatttaaatccgagaataatggttgttctatttatatgagagatatgttttatggtcatgccccgctggtcaatggtttattattgatgaatctcgaacgtgatgttacacatattcatagtgtgaataccaaaagatgtaaagttgataatgatagtcccacatacttgtggcactgccgccttggtcacattggtgtcaagcgcatgaagaagctccatgcagatggact

SEQ ID NO: 1277 - DNA, 419 bp, Triticum aestivum
  Clone ID: LIB103-029-Q1-E1-D3
gggtcgacgggatctattatgtaatgttgatgtaatgatatccaccttgcaaaagcgtttcaatatgcggttctatccttggtgggaccttcgagtctctttaggatagtatcgcatattgggcgtgacagtttagttgatttggatcacgtgatcacttagattattagagggatatctatctaagtgggagttcttaagtaatatgattaattgaactttaatttatcatgaacttagccctgatagtattttgcaaataatgttgtagatcaatagctcgcgttgttgcttccctgtgttttatatgtgttcctagagaaaactaagttgaaagatgatagtggcaatgatacgaactggacccatgatctgaggtttatcctcattgctgcatagaagaattatgtccttgatgc

SEQ ID NO: 1278 - DNA, 402 bp, Triticum aestivum
  Clone ID: LIB103-029-Q1-E1-D7
attcccgggtcgacggggtctcccatttagaaaaacccatgaccatagaaagccaaaaaacttaggctctacatcattgatgaggctgtagctgtctaactgttcagcgaaaattatacctcaaagaagatagcgcctttttcttggtccggaaactcaagcctgcaaagcatgtattctatatgaaaacatctaaattttgagtgtcaaatcttcaagcagtcaattgccttgaagcacattatagagcagaaattcatttgaaataaaataattatctatatatgcatgctcttgaataaccttttttgcatctaatcatcatggatgatatcgtacaacccaaccacccaaataccattactcttgatgcagacataagctaaatagctaacttttttt

SEQ ID NO: 1279 - DNA, 360 bp, Triticum aestivum
  Clone ID: LIB103-029-Q1-E1-D8
aattcccgggtcgacggggaaaatcaagctccaagcgggacgagatccgcgccgcatccgtagatgacacacggtactggcacattcacggcttacatatcaaagttttggccaccgagcaggactcagtcgagagcttatatatgagaaataatgagacacatacgaccatatgtatgcgtgttatatgataactataaacattggttttcccgaatctcaatatggtctgtttcctttgcaaagtgcttttcttcgattgtagagagataacatagaatttcacatagactgcaatcatatggaaagtaaattcaagtttagaacaaagggattcaacgtacagctgaagtacaaaag

SEQ ID NO: 1280 - DNA, 409 bp, Triticum aestivum
  Clone ID: LIB103-029-Q1-E1-D9
ggtcgacgggcaagaacgcatgctaaagaagcctctctgctcacaattggggctttccgtgggaattgatatcaatggaagcggagctgtacctcttctgaaaattgcaaggatgttttcagaaatctattcaagccttaagaccagaagcaagtttaatcttctcgttggatgaacatctggctgaccctacaattaaaatggaactagcaatgttatcaattttttttacagcggcttgaagttttgaccaacatgtgcgtgatattattgactatgcaatttacttaagtagcattagttcctagaacaatgatctctggatgcatgtatcaaagcctccagagaagccttacatcaagcaaatctttgaggatttttcggatgtctccaaggaaatgggcaattc

SEQ ID NO: 1281 - DNA, 368 bp, Triticum aestivum
  Clone ID: LIB103-029-Q1-E1-E2
attaccgggtcgacggggatgaatgaatccattgtgagaagagcccttgtgatcatgcaccagagggacgaagtggagtacaagagggagcgccatgtgattgtccgcaaggcttgagctgaactgaaccgatggagctaccatggaaccctctggccatctgatgtgtgtgtataagtagtgctgacactgcagcccgtttcctgaggaaatttgttgggtcgttgaaattgagttgtagttgtactactttgagctgtagctgtagccctaaatcatattgtgtcgaactgaagatgtaccccagtaagttcattcatgaatgcaacattttggcgttctgcagctgagcagagtcaatgcctagg

SEQ ID NO: 1282 - DNA, 426 bp, Triticum aestivum
  Clone ID: LIB103-029-Q1-E1-E3
gggtcgacgggtatggtggaagaaattttcatgtcactaaattacctctcgttatgttgagatagctattgtttctttccgcttccttgcatatgctagtttttgcttgccttgataatttgtttgcctataacatgcctatgcataggaagtatgttagacttagatgtgtttttcacatgtttcatgatgctctctttgtgtttcaattattatctttcatgtgagcatcgttgaaattttatgccagctaggggcgttaaacgatagcgcttgttgggaggcaacccaattttacttttgtttttgtttctcgctttttgattctgtttagtaataaataattcatctagcctctgtttagatgtggttttatgcttttaattagtgtttgtgccaagtagaacctttgggaagacttgggga

SEQ ID NO: 1283 - DNA, 443 bp, Triticum aestivum
  Clone ID: LIB103-029-Q1-E1-E6
attcccgggtcgacgggcgtgtagcgctgggctgcggaatcttaaaatttgagtgtgcgacgaaacgggccaccgagctggaccgagcgaaaacaggctcggctcggtcgctgaacgggcctatatttccagctcggctcgtcctttttagttgtcgggccgagcccagtcgggccgagctagaacgagcttcgagccgagctaaaatgctcgctcgtacgtccagccctagtcctagggcatgcccacctagccgggaaacggcgtggtgagagacccctagccaagacatcatcagttgctcctaatcagtcttcaagtcacggacgctcctcgattttcctgagctattcttcatacatcagtcattggttttgaaaactggtttaacaagtcatctcgtatccaatttcttgatagtctaattgtacccgaggagtttt

SEQ ID NO: 1284 - DNA, 395 bp, Triticum aestivum
  Clone ID: LIB103-029-Q1-E1-E7
attcccgggtcgacggggagttcactgaggctgagaagaagaagatcatggcaaatgaacgcctcgcagagatagctttgacagatcctaagagggtcaagaggattttggcaaatcgccagtctgcggcaaggtcaaaggagcgcaagatgaggtacattcaagaactcgagcataaggtacaggtcttgcagacagaggcgactacgctttcagcacagttgacaatgatgcagagggactctggaggacttgcgactcagaacaatgagttgaaaataaggctgcaagcaatggagcaacaggcacagctgagagatgctctgaatgaagcactgacgggtgaggtccagcggctgaaacttgcaaccggtgagattacggatgctcgtatg

SEQ ID NO: 1285 - DNA, 309 bp, Triticum aestivum
  Clone ID: LIB103-029-Q1-E1-E8
aattcccgggccgaccgggacgattaaaccgtcaattcgcctacatccgacgaccaggcgcatctaaaccgcctttgggccacacgttcctcgacctcctctatagacatccatacgttgacgatcgtggcggcggccgaagtgatcgccatgtactaaagatttctagcgacggatgggttcagtgtgtctttgtcagcggaggttttgcggtctgtctgtgtctcaacgtgagggggcaatgtgaagtattatgaagcagcacatgtaactgcagcttttatgatgctaaacacatagtcatggcta

SEQ ID NO: 1286 - DNA, 397 bp, Triticum aestivum
  Clone ID: LIB103-029-Q1-E1-F5
attcccgggtcgacggggatggtcaggctggcatgaagcaaggggatctaatcatttggtatgttgagcagcagaatgcccaaggcgcatatagttctacagaagaggtgaaggaggaagtaaagtgcatcaaggccattatagagaggctgatacagagggaaggccatcttgtagtcatagatgaaggaacagcggcagcagaaggtgctacggcaagggcatcggagcacagaatcctggctgttaacccaaactacgtcattgattgattaaccagctgaggtcacacagctaactagatccatcatatgtggttgaccaatatagcagacattcaaacggaagacatcctgttgtcatgctctagaaatgatatgttgcacctgccatcccc

SEQ ID NO: 1287 - DNA, 437 bp, Triticum aestivum
  Clone ID: LIB103-029-Q1-E1-F6
attcccgggtcgacgggaggtgccacagggcaacctcccggactttgcactggactttgcaccggaacctgtggtggctccggagttcggcgggcggccccttcataagaagggcaagaccgtgacgccggcggcctccatccaaccgggggtgccggatagcttgatggaggagctcatcggcacttgcatcaaagaggaacaccgcaccgtcatgagtgtggtgattcagaaggttcagctcgccaagagcgggctgaccgaagcctgcatcagccttttaacaggctttgaggtaagaattttgatatatgtaaaatagtaccgcatagacagtagccgccgatgctcggttcggtgttcggaaagaaaagccggactaaggatctaaaaagatatacgcaggagtcataaaaaatatgtcaatatgggattgc

SEQ ID NO: 1288 - DNA, 416 bp, Triticum aestivum
  Clone ID: LIB103-029-Q1-E1-F8
attcccgggtcgacggggaggaggagcctgaggaggagctaggaactgaatatctggtgcagccgcttggccgtgctgaagacgaagagcattccagtgactttgagccagaagaaaatggtgatggtgctgaggacgaggagattgaggatgatgatgctgaggatggtgaggattctgtcaaggcgcaatcctcttcgaagaggaagaggtctggcgcggaggatgaagatgatgatgacggtgatgatgatggtgatgatgatgagaagcctccatcaaagcgatagtcaatttgttcttgctgatctggtatcttttctgcttgggccaagaaggaaaataatcctcacggagagggttgttggtaaatgctgtagctttaggacatctgtggtaggtgtaacagctcgaac

SEQ ID NO: 1289 - DNA, 421 bp, Triticum aestivum
  unsure at all n locations
  Clone ID: LIB103-029-Q1-E1-G1
gggtcgagctcgcccaggtgggtgcagtccgtcgtgcgctctgagtggactgcggaggtgtttgacatggagctcctgagggaacagagctccgaagaacagatgattcagcttctacaacttgctatagactgcgttgcccaagtcccagacgcccgtccgacgatgtcccatgtcgtcgtgcggatcgaggagatcaagatgtcaggtggaagcaccgaagaaactgatcaacaacagcagagcgccctgaatcagggcgatgagatggtcgagggcccctcctcgccgtgatctctaatggcctgagagaaaggagccggctgcctgtcgctgtagcccacattcattccgttcatagacttgacgaatgctatcttcctcttcgacggcgganccggctgttttttcatctcttcct

SEQ ID NO: 1290 - DNA, 433 bp, Triticum aestivum
  Clone ID: LIB103-029-Q1-E1-G6
attcccgggccgacgggtatatgaattcttttgattaatgttgagtccatggattatacgcactcttttacccttccaccattgctagcctcccttgtatcgtgcaactttcgccggtaccatatacacccaccatactcctttcctcaaaacagccaccatacctacctattatggcatttccatagccattccgagatatattgccatgcaactttccaccatttcgttcatatgacacgcattacttttgtcatattgctttttgcatgatcatgtagttgacattgtatttgtggcaatgccaccttcataattttcacacatgtcgctcttgattcattgcatatcccggtacaccaccggaggcattcatatagagtcatatcttgttctagctttgagttgtaaaaccataaaagtgtgatgatct

SEQ ID NO: 1291 - DNA, 417 bp, Triticum aestivum
  Clone ID: LIB103-029-Q1-E1-G7
aattcccgggtcgacggggatgaggatggtgacttcgcggagggcgaagaggaaatctcggaaggagaggagtatgacaaccccaaggccagtgacgccaagaagaaacaaataggcgagggtgaggagaatggcgaggatgatgaggaagaacaagaggagcaggagggtggaggaggtgacgacgatgatgatgacgacgacaacgacgatgacaatgaggacgacgacgatgatgacgatgatgtcgctgctgaagacgatggagatggagtagaagaggaggatgatgacgatgaggaggaggaggacgatgaggacttgctccagcccccgaagaagaggaagaagtgaagcccttcgacgcggctgctttagtcaccatgcgacgagatgtgcctgtccttcactgtgttc

SEQ ID NO: 1292 - DNA, 376 bp, Triticum aestivum
  Clone ID: LIB103-029-Q1-E1-H5
attcccgggtcgacagtggatataacgtcggtggtgggtgggaaacgaagttcttcgtcgtccgcctccctttcgagctggatgtagttcggccgagagttccccgacaaggagatagatttcaatgagtttaacacatcgcctagaggtgagtgctggaagatgtccacggagctgaactccaagatcggtgcccaatcaggttcgatggacgcggatgcacgcggtccagaacctatggccgagacgagtccgaggttccggtaacacaagcccagcttgatgttgggtctttgtgcggctcgagcgccactaagtctgcggcttccgtggcggggttaagtttcctgtcttcagacgacgcgatctgctccag

SEQ ID NO: 1293 - DNA, 242 bp, Triticum aestivum
  Clone ID: LIB103-029-Q1-E1-H8
atgcccgggtcgacggggatatcaaactcgagtacacgtcccaaacctcggtccgttctcaacctcgccgccgtccgtcacaactccagaattccctccccatggctctcatcaagatccgcatcaatggctaccgccgggtcggcacgctctgtggacagagttgcgctccaaaaccacgatgtcgaggacgacacggtcaacgacaccttcaacaccaccgactacatgacctacatgtc

SEQ ID NO: 1294 - DNA, 391 bp, Triticum aestivum
  Clone ID: LIB103-030-Q1-E1-A4
gggtcgagtgacatgaaccttcaagaagaagagatcctaaagttggcttcattgggcaaccatggcaaccttgagaatgctgttgacgttctgaagagatcacttgctctccgcaacaagagctacaaagacttgatggtccaatgcaatcatctgggaagatcagaaagtcgcgctcagcagaggattgagaaggacaaagagctgataaagaagttgagggcaaaggtacttgatcttcagaaggaactggaagaaaaggaaaataatgtcatcagagacttgaggtcttcaaagaaatttaaagctgaccagaaccagacaaatccagtgaatgccaatgctaataatggtttctctagtccaagtgctggatatgggaatcaaacag

SEQ ID NO: 1295 - DNA, 408 bp, Triticum aestivum
  Clone ID: LIB103-030-Q1-E1-A6
aattcccgggtcgacttcttctcccacggctgcggtggctgccgcgctctccaccccaagattgcgcagttcgctgagcggaatccggacgtgctgttcctgcaagtcaactacgagaagcacaagtccatgtgctacagcctccatgtccatgtcctccctttcttcaggttctacaggggagcccagggcagggtcagcagcttcagctgcacaaatgcaaccatcaagaagttcaaggacgccctcgcaaagcactcgccggacaggtgcagcctcggcccggcgcgggggctcgaggaggcggagctcttggctctggcggcaaacagggacctggaattcacctacaacgagaagccgacgctggtgccgatcgccgaagctatccagatggaagctgcctcc

SEQ ID NO: 1296 - DNA, 423 bp, Triticum aestivum
  Clone ID: LIB103-030-Q1-E1-A8
attcccgggtcgacgggtatagataacaatccttcatgtcctattattcttggtagacctttccttagaacgattggtgcaattattgatatgaaggaaggaaatattagattccaatttccattaaggaaaggcatggaatactttcgtagaaaaatattaaattaccttatgaatctattatgagagccacttatggattgcctaccaaagatggcaatacctagatctattcttgcttgttatgcctagctaggggcgttaaacgatagcgcttgttgggaggcaacccaattttatttttattccttgctttttgctcctgtttagtaataaataatttatctagcctatattttggttgtgttttttgtgtttaattagtgtttgtgccaagtagaaccgttggaaagacttggggaa

SEQ ID NO: 1297 - DNA, 406 bp, Triticum aestivum
  Clone ID: LIB103-030-Q1-E1-B1
cggtcaagaattaccgggtcgacgggtgcctagccgggaaacggcccttcgttaatgcggaggaatccctaagactccaataagtcattgagtggttgatcagtctcacgctatatcatgacagtccgttttcggctttctctactgaggtgctcgtctggatgaaccagggagcggaacgtaaggcagcaaaacacaggagccgggcaaacctaacatttgaccaaagacatgatttggagctgatgcatataaggccaaactcgcgacgccgaacactccctaaggtattcggtctttatggtgtaaactgggtctaaatagtaccctttgtaataagcccctggtgtccaggtacgtgcattattctggcgtggccacatgccaagacgtcagcatccttctc

SEQ ID NO: 1298 - DNA, 404 bp, Triticum aestivum
  Clone ID: LIB103-030-Q1-E1-B2
ggtcaagaatacccgggtcgacgggccaaccgaagggacctgcaaagggtggcgcacaagggaacgccgagcaaccgacggagtgcaagcagcagtagaactttgtggatgcagttgttgcagtattttttccattgaactgcccagggggaatgagcttttatgctggttgtgttgtgcacgggtgagacgtttggtgtggatatttaccgtaggcatggttttgtatcaggtggcgtggtgattgtgctggtgtgggatggatggtttgggagtttgggacggtcatgttagcgtgttattcttattatggtctctagctatatgcagtcgaaggacaccctaagactgtaattatatttgaactcgtaatagagccttttattattattttttgtgccatc

SEQ ID NO: 1299 - DNA, 436 bp, Triticum aestivum
  Clone ID: LIB103-030-Q1-E1-B3
ggtctagaattaccgggtcgacgggatggtctcaggcaactcttgctcgaactcgtagagagcttatgcttgggtcggggtggaacatcttcttcttcatcttggacttcttcattgttggagttgtcgttctcatgttgctgtggagatcgaggttgtttatgttcatcttggtgtgcttccgcagtttctacgtcttggtgtgtcacacatgtggatgcttctgtatcaactcttggttcaacttgtcctgaggtacaaccttacacttggactgacgaggtactctcattcaactccgattgaccaatcatgccatattacactcttggattgcttccgaacgatctttatctcatagatcacttggtaagtgctctacttgccatccattacgttcatcaagcttcagaattaccgtttcgtcaacctttcg

SEQ ID NO: 1300 - DNA, 369 bp, Triticum aestivum
  Clone ID: LIB103-030-Q1-E1-B4
gggtcgacgggcagaagaagaagagtagggtgcccttctgcggctgtgtgcgccccaaaacagtgactgagtcttgattcggagtccgcagcaagcaatgtctttagtatctcttctgtaatgggttgcatgataatgttaacaaggagctcatgcattcggagttttgtccttgttcagaaatgccccctagtttaactagttaatcctactgatacttttatgaatcgaagcattttgtaattccgttgcccttcgctgtttctctgtgtctgcaatgaagatatatgagaatgcttctttcagggatataattttcacccccttttacaaaaaaaagaaaaaaggataaaaaaaaaaaaaataaaa

SEQ ID NO: 1301 - DNA, 408 bp, Triticum aestivum
  Clone ID: LIB103-030-Q1-E1-B5
tcaagaattcccgggtcgacggggtgataaattattccgaggtcatagtccttaaccaactcgagccatcttcgctgtcgaaggttcatgtcaggctgagtgaatatatacttgagacttttatggtcggtgaatatctggcacttctttccaatcagataatgtctccagattttcaaagcgtgcaccactgcggccaattccaaatcatgagtaggattgtttccttcatgttgtcgcagttggcgagatgcataagccaccactttgccatcttgcaagagtacacaccccagtccttttctggaggcgtcgcagtaaacatcgaaactgcggtagatatctggaagagttaatacggctgccgatgtcagtctggtttttaactcattgaagctccgttcgcag

SEQ ID NO: 1302 - DNA, 415 bp, Triticum aestivum
  Clone ID: LIB103-030-Q1-E1-B6
attcccgggtcgacgggcaagctcacaccaatgaggttagcaagggcaaaccactagattgggtttcaggacaaccagtcacagatgagcatggacgccttcagattataaagaatgatgacctcgaagagctccaagaactcggttctggaacttttggaactgtatatcatgggaaatggaggggctctgatgttgcaataaaaagaatcaatgacagatgttttgctgggaagccatctgagcaagaaaaaatgcggaatgacttctggaatgaagcatctaaccttgctgatctgcaccaccccaatgttgtggccttttatggcgttgttctagatgggcctgggggatccattgcaacggttacagaatacatggttaatggctcacttaggacggctttgctgaaaaa

SEQ ID NO: 1303 - DNA, 415 bp, Triticum aestivum
  Clone ID: LIB103-030-Q1-E1-B8
aattcccgggtcgacgggctgtaccacgagacggaaaagaccatcacaattggtggcgagcatggcacggtcgcctgggtggacctctggcgtggcatcttcttttgcgacgtgctcaagaaacgcccactgctccgggatgttccactgccggtgccggcaaggtctaactgggatcgcctcctcataaatgatgaccccggctatttccgggacgtaactatcagccgaaacaaagactcgatcaagtatgttgagttggaattccggtcaatagaagtgctcaaccccgccaccacccctgtttcctacaccgactgggtggcggtgaagaattcctcaaggaaatctcttcatgtcatccgcgatggctggaagtccacaacatggagcatggcaatacccgttggtttgc

SEQ ID NO: 1304 - DNA, 369 bp, Triticum aestivum
  Clone ID: LIB103-030-Q1-E1-C10
cgggtcgaccggggcggctacggagttggacgaccggttcaaactggatatcgctcaactcgtgccatcgtcgttcgaggacgtgtatggcgggacactcttcgaggagagtatgaccatcctcgactctgagagttaaaagtcattcaatgatgctttatctgcgcatgaccatatgggaatcggcacattattgcgggaatgccatggcttactcaatggcttgcagtcacgcatcgacagtcgaggtggtgatggaatgagatctagggccaatgtatacgccttccctcaaataatatgcatcgtgttggacccttcaaagagtatcaataaagctccaagcgatggcctcgttaacgatatctc

SEQ ID NO: 1305 - DNA, 405 bp, Triticum aestivum
  Clone ID: LIB103-030-Q1-E1-C2
cgggtcgacagaagagtgcacggagacgatgtggtctctcgccagctctccgtgggctctaaggcatgtcggcaactcggcatagacggacgggcaatcagtttcattagatcgggtgcaaaaagaattgtgtgagagagatgcgcttggcaagtaagcatgtcaatggcgcaggaccggtcaaaatgtgccacatcagcgaaatacattggatacggtagggcttgaccgtagagtgacacatttctgcgacctcaatgaccatattttaacacttttgaattacggtgatgaaagtgaaccctagagtcaagttcaggtactaaagatgtaatttactcgatataatttggtctcatccaacttttatagccattggatgtgatgctataagatgcatgtgtg

SEQ ID NO: 1306 - DNA, 243 bp, Triticum aestivum
  Clone ID: LIB103-030-Q1-E1-C3
cggtccagaattaccgggtcgacgggatggtggtatagtacgaaagcagctgtaattccagggacgatcaatgatcgaagaatatcaatctatcgatacaccgtggcttacaacctggtcagaattattccgtatatgaagttgaatcagatcatgtggatttacaaaatttgagcgagaatgtgttgcatgtttagaatatgatcccttaccctgcattgaatcaattcgttgcgatctatt

SEQ ID NO: 1307 - DNA, 434 bp, Triticum aestivum
  Clone ID: LIB103-030-Q1-E1-C4
ggtcaagaatacccgggtcgacgggcaatcaaaaaagaggtgcttgatattctcgtcccgatcacagaaactacacctagtagatcctgtccagttgcgcttaatcaaattatcctttgttaaaattacttgtttatgcacaaaccacataaacactttaatcttcaaagggactttgactttccaaacatgtttggaactcggaataacactagagttgatgacattgatatacatcgacttgaccgtgaagtctccagacctagtaagcttccaacgcaactgatcaggctgatgagttagctgaacctccatcagtctactcactagatgaagccatgtttcccaccggtcaccaacaagcaccctccgaaattgaatattaagagggattgagggagtcctggattaaggggtgttccgatatccggact

SEQ ID NO: 1308 - DNA, 353 bp, Triticum aestivum
  Clone ID: LIB103-030-Q1-E1-C5
gcggatgtaggaggccatctgctctcccaggggcctgttggaaatccaagggcgccgccaaggggaacaacggccggtaggccacattgaaccctaatggaactccaaatgcaaagtgttttcacagcgagctatgacttcgaccatgtcgatgttaacgtcagtcgaaagcgcaaagacgtgaagtcctcctacgtgccacgcaaaatgtcggactctatgatctgcgtgcaagaaactctccaagaactaatgtttgacctcgagggtgttttcttggcaaccaatgacctgacgacaactccgacattatcaggacgagcatactcactcacaccagacatgacggggac

SEQ ID NO: 1309 - DNA, 415 bp, Triticum aestivum
  Clone ID: LIB103-030-Q1-E1-C7
aattcccgggtcgacggggagacacaaagacacatagatttatactggttcgggccaccgttgtggtgtaataccctcatccagtgtggtgtggtggattgcctcgaggggctatgaatgaactagtacaaggatgaacaagcctgaggaggtgaggtgttcttgagctggtgtggtgctctgcttgttctgattccggtcctcttctatggtggtggctaagtcctatatatagtggccttggtcctcttcccaaatatgagagggaagggattccacaacggcgggatttgaaaggtcacaagtagtacagtctatcctgacaaaagtagtcttcgcctacgaaaagcctctggtcgtgacgctgcggtgggctcggtgatgacctccgtcctgtcgtcctggcggtcttggt

SEQ ID NO: 1310 - DNA, 409 bp, Triticum aestivum
  Clone ID: LIB103-030-Q1-E1-D1
ggtcaggaatatccgggtcgacgggagccaagaagaccaaggccgagaagcggccgccggcgtccaaggagggcggcgagaagaaggggaagaagaagtccaagaagagcgtggagacgtacaagatctacatcttcaaggtgctgaagcaggtgcacccggacatcggcatctcctccaaggccatgtccatcatgaactccttcatcaacgacattttcgagaagctcgccggcgagtcggccaagcttgcgaggtacaacaagaagcccaccatcacgtcccgggagatccagacctccgtccgcctcgtcctccccggcgagctcgccaagcatgccgtctccgagggcaccaaggccgtcaccaagttcacctccgcctgattcggtcctgtccctgtgtgtgt

SEQ ID NO: 1311 - DNA, 374 bp, Triticum aestivum
  Clone ID: LIB103-030-Q1-E1-D4
gggtcgacgggcgtgcatatccctttctcaccttgagagttggtgcaaactttgccggtgcatccaaaccccgtgatatgatacgctctatcacacataaacctccttatatcttcctcaaaacagccaccatacctacctattatggcatttccatagctattccgagatatattgccatgcaactttccaccgttccgttcatcatcatcatgacatacattacttttgacatactcccattgcatgatcatgtagttgacatcgtatttgtggcaaagccaccatgcataatttttcatacatgtcactcttgattcattgcaccatcccggtacaccgccggaggcattcatatagagtcatatcttgtg

SEQ ID NO: 1312 - DNA, 431 bp, Triticum aestivum
  Clone ID: LIB103-030-Q1-E1-D5
gtcaagaattcccgggtcgacgggtttatttatttgcaaaagaattttaatgctatgattgaagaaaatttgattaagattgatgatttgtctaggaacgttgatagaattgctcttgatgttgatgctttgaaacttagatctatcccacctaagcatgatatcaatgagtctctaaaagccatgagaatttcaattgatgagtgtaaagaaagaaccgctatgatgcgtgcttcaaaagatgcctttattaaagcgtgttcttccaattcctatgaaaatcaagatgaagatctaaaatttattgatgtgtctccaattaaatctttattttgcaatatgaatcttgacgaaactgaatatgatcttcctttacctagaaggcgttctaaaaattcggagtatttagatcttaatgatgaaattgatga

SEQ ID NO: 1313 - DNA, 306 bp, Triticum aestivum
  Clone ID: LIB103-030-Q1-E1-D6
gtacaagtccagaattcccggtcgacggggagtaccacaagggcatctaggacgatggaatctaagccatccgcctcatcgctagcatcaggatcgcacctgacaacaagaggagtagcaggtactgttcaaggatgctactcacgcatcaccattacctaaggttgttgcgttggctaaagttaacgtggatgaattgccatcgaacctacaggtggaatcgtttcttgaatgcagcccccctagtttcggttttccttgcaaggtccccaataattcttatcaacaagttaaggtcaagggttt

SEQ ID NO: 1314 - DNA, 400 bp, Triticum aestivum
  Clone ID: LIB103-030-Q1-E1-D7
aattcccgggtcgacggtggcctgggacggcgagaagactcgctgatcggggcagcgtcctcggttccgtgaagcaggggaggaagacgtcgatggacttggcatctccggccttggatcgcagaggaacggggtcatggcggcgtctcgatgcgcgtgggtggagatagggtcggcgacgagcttgctacgccggaggaaagcttgagcacgagccggccatggcgtcgggcggaggtgatggggcgaggtggagctacccttacctggctggtggcgcggaggaggaagggaggaggaaggggaaaccctagggagggggcgctggttaaaaaggacgggcgtgggcgccgtggtagccacggtggccatgtgcccctgaatattactgtgagtggag

SEQ ID NO: 1315 - DNA, 143 bp, Triticum aestivum
  Clone ID: LIB103-030-Q1-E1-E11
ccgggtcgaccgggcgggaggccctcacgggccgcaccgctggccgaccctgatcttctgtgaagggttcgagttggagcacgcctgtcgggaccgaaagttgtgaactatcctgacgggcaaccagaggaacctgtgagctc

SEQ ID NO: 1316 - DNA, 426 bp, Triticum aestivum
  Clone ID: LIB103-030-Q1-E1-E2
ggtcaagaattacccgggtcgacgggtccatgaagaagcaaccttgcctatcccaccatggccatcacccacaaaggacttgcctcactacggtagatcttcacagagtaggcaatctctttgccagtacaaactccttggttcaactccacaatcttgagagatgctcccaagtgatacctaagcaatataggagacaccactctccaaaaggtaatatatggtgtgttgatgatgaactccttgctcttgtgcgtcaaatgatagtctccccaacactcgactctctctcatatgattggatttggtggaaagatgatttgagtggaaagcatcttggtgaaggctagagatcaagattcatatggtaggattggaatatcttggcctcaacacatgagtaggtggttctctctcagaaaatta

SEQ ID NO: 1317 - DNA, 407 bp, Triticum aestivum
  Clone ID: LIB103-030-Q1-E1-E3
gggtcgacgggatagaagaacagattcttcaagagttctccctagatgattcgtttcctcttggtgctccattattcatggagacgccacactcttgttcaatgtacgctgaaaaggatgatcactgttttgacgaggatgttattccttgtgagatggatgatgacgatgacatcgtctttgaacatagtggatcgcagtctgacaggaaaacatcaggatctatggcttcatccgatgttctaaatgtgaatcaactgatggaatctgtccatgagacagcaaggcaagttgctaacattccagtctccaccaatcctgtgtcctatgaccaaatgaagagccaatgtgaatccctagtaatggaaaagcagcagaagatgtctgttctcatgagcttcaagcac

SEQ ID NO: 1318 - DNA, 400 bp, Triticum aestivum
  Clone ID: LIB103-030-Q1-E1-E4
cgggtcgacggggggctctgggacacgctcctcaactggctccgaagcctgttctttaagcaggagatggagctctccctggttggcctacagaatgctgggaagacatctctagtcaattcaattgctaccggtggctacagcgaggacatgattccaactgtacgctttaatatgcggaaagtcaccaagggaaatgtcacaattaaactttgggatcttggagggcaacgtagattccggactatgtgggagcgctactgtcgtggagttactgctattttatacgttgtcgatgctgctgaccgggatagcgttccgattgccaaaagtgaattgcatgacctgctgacaaaacagtctttatctgggatccccttacttatccctggcaacaaaa

SEQ ID NO: 1319 - DNA, 365 bp, Triticum aestivum
  Clone ID: LIB103-030-Q1-E1-E5
aattccgggtcgacgggtgccaggactagctctctcctaggtggtctcaacctgccctatcattccgcgacaatgtagctgttgggggccgtccttgaactcaagcccaccactacttggagcgagccacttatcctctcagccaccacatcggaatcacttgtgggtactctacgagccgaccctaccttattcaccacatgtatcatataccatgtatgtcattacgtccccgtgatcatctcccaattgatcatggtcctattccatatcatggcagacggacaataatgtatggccactgattgtgacactatcatcctatactaagcatttaagattgtaggtaaaggtaacaacatcta

SEQ ID NO: 1320 - DNA, 405 bp, Triticum aestivum
  Clone ID: LIB103-030-Q1-E1-E6
aagtcccgggtcgacgggataggtcacccaggaagcgaagttacagcaggtctccaccgcctgcccgtgcgcgaagcaccagcaggtctccaccgcctgcccgtgggcgaagcatcagcaggtcaccgccgcctgcccgtgcgcgaagcatcagcaggtcacctccgcctcctcgcaacagaagcatcagcaggtcaccaccgcctcctcgtgccataagcatcagcaagtcaccaccgcctgcccgtgaacggagctatagcaggtccccagcatagccactccagcgcgaggagtccccttatgctgataacgcgtgagcacttggttccacaatgctggaagtgttggggggtgggggcctccgcttgtttccttgaatgttttggtatgactattgaatgg

SEQ ID NO: 1321 - DNA, 372 bp, Triticum aestivum
  Clone ID: LIB103-030-Q1-E1-E8
gtacaggtcctgaattcccgggtcgacgggtctgtttagccatgttccagtttttctactaagtctgaatctgttaacgaaagttactatgttcacatggttgccattgtattttctgatcccttttggcttatggtaagtaagggacttttgttgtatgctttgagtagcttcatgccatgccttgctttgccatgatatgttcatatagcatgttgttatcatgctctaaacattgcatcctgatgttaaattccgggcaagttgttattttctctaagtctgtaacctgatatcttttgcacttttgccatgcttgtttgaacctgctattatgtgagttatccgtagctcagtgttcatcttgtggca

SEQ ID NO: 1322 - DNA, 250 bp, Triticum aestivum
  Clone ID: LIB103-030-Q1-E1-E9
ggtccagaaatccgggtcgacgggtctgaaaaagtggggcggtggtgtcatgggctccaagtcgcatgccatgaccaaagccacggaaaggctcatcgccaatgatgctgcgcataggatgaactaagcctagccttatatgtcagagcatatgccatgtaatttccctttcagtgtgtcatgattttgacgaagaactcgaacccttttagcatcactgtggaatcgtattgtggttttctgattctta

SEQ ID NO: 1323 - DNA, 377 bp, Triticum aestivum
  Clone ID: LIB103-030-Q1-E1-F1
ggtctagaatacccgggtcgacgggggctcccaatgtccgggaaggctctgattaccaacttgtaatgccctcgatacggctatatcgcctacgtgtcgagccatgacttacatgcataaccacattcaaagcattgtcgcaagtaaggcactcttcagaacatcccatgtttatagatactacaagggaaggtacatagttggcttacactcgccatatcacacatagtacatatatagcattacatcaaccaatcaatcatggcacgactaccgtgccaaactaagagatcaacccaacatgcgacacagtcccgatcgctccaactgggcaccactactgatcatcagggaaagacacatactaactgcgtgag

SEQ ID NO: 1324 - DNA, 438 bp, Triticum aestivum
  Clone ID: LIB103-030-Q1-E1-F2
ggtctagaatacccgggtcgacgggtccacccattcgtcttcgtgcattggtaactttacttggagctatatttgtatttgctacatgagatgtgttttgcttggatcgtcgtacactatactagtcattgccttttagtttatcacaatcatccttgctgtgcacacctttttgggagaagcctacttggttcgaatttgctagaatacgtctatgtgcgtcacgttagatcttttgagcttgatagtttttgctctattgcttcacttatatctttcagagcacggtggtgtcataattttgaataaattgctaatctgtcatgcttcacttatataattgtgagagtcttttagaccaacatggtgattgctatggtcataaagttggtcctagattgatgagcatcccagttgggtataatgttggctatctta

SEQ ID NO: 1325 - DNA, 407 bp, Triticum aestivum
  Clone ID: LIB103-030-Q1-E1-F3
gggtcgacggggaagaccaccgcaggcaagaagcccaaggccgagaagcggctgccggcgggcaagacggcgtccaaggaggccggcggcgagggcaagacccggggccgcaagaagggcagcaaggcgaagaagggcgtggagacgtacaagatctacatcttcaaggtgctgaagcaggtgcaccctgacatcggcatctcctccaaggccatgtccatcatgaactccttcatcaacgacatcttcgagaagctcgccggggagtccgccaagctggcccgctacaacaagaagcccaccatcacctcccgggagatccagacctccgtccgcctcgtcctccccggggagctcgccaagcacgccgtctccgatggcaccaaggccgtcaacaaattcaactc

SEQ ID NO: 1326 - DNA, 289 bp, Triticum aestivum
  Clone ID: LIB103-030-Q1-E1-F5
acgccgccaggtaccagtcaggaattcccgggtcgacggggaccacaacaaggccgcggaccacaataccaaggacggcgaacacaccaaggacagctagcacactgacggcacgccggagaacatcaacgacaagatcagcggccacggccacagcgaccgcaccaacgacagcgacaaaacaaaaaaccacaaaaaacacagaaaacctgccgctccacaggatccaaccttacgtactcctactaccgacgtcataacacttctatactgtcacctaatgtccatt

SEQ ID NO: 1327 - DNA, 407 bp, Triticum aestivum
  Clone ID: LIB103-030-Q1-E1-F6
aagtcccgggtcgacctctatatataaagggatgacccggcggcggtttagggcaagtaacatcggatcgagagctaggtcaagcgatttcgctccctggtaatcgagacataagcaatcccactcaaaactggatcgtaggcttttaccttcactgcaaggggccgaaccagtataaaccccgtgtcctttgtcccgattaacccctttaagcttcctagttgcgatggctccacgactaagtccttccactaggacatctgacatgacaattccatgatagttggcgcccaccgtggggctagcgcacggtggatttgagttcttgaagggcagctttgaagggctcaagagatacgctatgggccggatgaccaagagtcatcgcggcaagctctacatcaacg

SEQ ID NO: 1328 - DNA, 427 bp, Triticum aestivum
  Clone ID: LIB103-030-Q1-E1-F7
aattcccgggtcgacggggagcggtacacggtgccgtcgctggcggcgctggagcacaacctggaggcggccatgcacagggtgcgctccgagaaggaccgcaagatcggcggcgagatgagctacctcgagaacatgatcagggggaaacaagcggagcgctacggtctgtgtgacaagctcgctcatgctcagagccccaaggtcgttgaaggtggatccacctcgctgaacaacggcctggacctcaaacttggattcaactaggaacgggtgaaagcttctggccgtggggttctgctctagtgttgcttttgagctcgagtgttatgtcaggttgaaatattctacaatttccttcgaagggattgtatgaacttgtaagagaccactgtcttatgagatgtttggcttaggctggactggg

SEQ ID NO: 1329 - DNA, 415 bp, Triticum aestivum
  Clone ID: LIB103-030-Q1-E1-F9
ggtccagaattcccgggtcgacgggaggctgctcgcactcatcaaatcgagcctcgacatagttgttgcggtggggctcctgcaacttgccccgaaaaaggtcactcctcgcgtcacaggggcctttgggttcgctagctcgctcatcgcctgttaccagttgcttccagccccatccaaatccaagtgatctgcctgcccacctcgggccaggcagctggtgcatcgattggtgaaactgcggtcgctgttgctgatacttgataagaattaaatctggaccaaattgtccgtcctgtaagatataaccgaggattactgttgtgcatgctggcattgcccagagccatctcatagcctggttgatctgccttgccttagacgtgatcatgtagcacccttgtatttggatggt

SEQ ID NO: 1330 - DNA, 417 bp, Triticum aestivum
  Clone ID: LIB103-030-Q1-E1-G1
ggtctagaatacccgggtcgacggggaggctgacaagctcgcccgctacaacaagaagcccaccatcacctccagggagatccagatctcctcccgctccaagtcccaaaccccttccggcggcgaagcaacacaccctcccttctccccctcccgaagcagcgatggcccccaaggcggagaagaagccggcggcgaagaagcctgcggaggaggagcccgcggcggagaaggccgagaaggcccctgctgggaagaagccgagggccgagaagcgggttccggcgggcaagaccgcctccaaggagggcggcgagaagaggggcaggaagaagggcaagaagagcgtcgagacctacaagatctacatcttcaaggtgctgaagcaggtgcaccctgacatcgggatctcctcca

SEQ ID NO: 1331 - DNA, 403 bp, Triticum aestivum
  unsure at all n locations
  Clone ID: LIB103-030-Q1-E1-G10
cgggtcgaccggagcatcacctggacgagcagaaacgatttcgagtacggggagatcgagaagctgaaggatgatctggcggacgcatacctgacgaccatgactcagcccaggaagaaagaatcatccatatcaaagctctggaagtcatctcgcgcaaagaacagcgacgtctccaagaaggatgccacggaggcactgaacggcagatcatcgaatgtgcggctgtcggtcgggaccaattccaccatcgagagcggcgttcaggatatcggcctcagctcgccgagcgtggggcaatggagctcgccggactcgatgaacatccaattcaaccgcggcttcatgggctgcatggagtaccgcgggcgtcccagaatcacagcctgaanggaaaactcat

SEQ ID NO: 1332 - DNA, 402 bp, Triticum aestivum
  Clone ID: LIB103-030-Q1-E1-G2
gggtcgacgggtgaagagagtgacaaccatggataagtgtcaaaacctccaaacacaggagactctgatgctgcgcaactcactgaggatgtacatgcaaagctggttgaatagctcagaccttgtgtaggtcttctactcaatattctgtactcgattgtcaccgaacctttcataatcaacatgctgaatcacaagacatattctgctcgctgattgcgatcgctgtctcatctatgatcaagtcttacacttgtgtctaactactctacgatcagtatgttcgtatattattagtgcttatattctttgcattggttcacataactgtcatactatctcagaatctactactgacgatcaatcggtaaccagttagacatatgctgcttgttatatcaa

SEQ ID NO: 1333 - DNA, 403 bp, Triticum aestivum
  Clone ID: LIB103-030-Q1-E1-G3
ggtcaagaattccgggtcgacgcgatgagaaagctgcaacagccaataaatgcgcagagggtgccacagtccaagcgccggatgagaaagctatgacagccatggaggactacatggcataggtggctgatgggcatgtggtacaactgaacataaaggctagctagctcacggctaattcttgtttctgtctgtaccaacgtaatcattctgcccaaccggttctcctcatcaggatgtcatgttttgtaaaggaacagactggagcctgtctgaccctagcatcgcatccctgttaggttagctaaggcagtatcatatatttggccactttcacatcagctccatcaatcatctacggtaatggtgtaaccctaaaattgagctgttgcagaacttccgt

SEQ ID NO: 1334 - DNA, 398 bp, Triticum aestivum
  Clone ID: LIB103-030-Q1-E1-G4
gtcaagaattacccgggtcgacggggaagaagcccaaagcggagaagcgggcgccggcgtccaaggaggccggcggcgaggggaagcagcggggcaggaagaatggcagcaatgccaacaagggcgtggagacgtacaagatctacatcttcaacgtgctcatgcaggtgcaccccgacgtgggcatctcctccaacgccatgtccatcatgaactccttcatcaacgacatcttcgagaagctcgccgagcgagtccgccaagctggcgaggtacaataagaagcccaccatcacgtcccgggagatacagacctccgtccgcctcgtcctccccgtcgagctcgccaagcacgccgtctccgagggcaccaacgccgtcaccaaattcacctcatc

SEQ ID NO: 1335 - DNA, 443 bp, Triticum aestivum
  Clone ID: LIB103-030-Q1-E1-G6
aggtataggtcctgaagtcccgggtcgaccgagccgcgcatgctggaggctgtcggcgtgcgagtttggacggccggggaccatcggaatttgttggcagaggggtccttggatcgacgcccatgcgaggtcacaccaggcggatccagcgcctgcaagtcagtggccacgcgaggactccggatttgaagctcgggcgccggcggcagggcgtggaggcttgcagcagtagcagttgtggcgcagtgggaagcgatggcgcttgggcggccgacgagtaacggatctcgtcggatttggctcaggggaggcacaggaccaggaggacctcgccggatctagcttgtgtaggcgctggacccatggaggcgcggctagtcatcgggaacgccgtggggccacgggggctgcaccggagatgaagagtacggtgttcccggggg

SEQ ID NO: 1336 - DNA, 429 bp, Triticum aestivum
  Clone ID: LIB103-030-Q1-E1-H1
ggtctagaattaccgggtcgacgggaccaagccaatgatgcaaggcttctgttgttgctgctgcaagtcttcatcaacttagttgttccacagggagagatataaatccttcacttgttcactttgtaatctgcagattacttcttccattaatcacctagtgctcctgttagtgagattcatctagtattttttttgcaaagcatgcaatggtctggagtagttgatcatggcctgatggaacctctagctgaacaataagataggttagttagtgtagtagaggaagaaagatgatatatttattatttgcttttgctgcttctatatacacatgtatgtatgtttagttattcgacatgcttctgaaattgattgtgcttttagatcgaaacactatgcttgttcaaagagtgtccatgttgtgtg

SEQ ID NO: 1337 - DNA, 290 bp, Triticum aestivum
  Clone ID: LIB103-030-Q1-E1-H10
gtcgtattactatttcgggtacggtgagatcgagaagctgtccgatgatctggcggacgcataccttacgaccatgactcaggccaagatgaaagagtcagcgatattaaagctctggaagtcatcactcccaaaggggatcgacgtctccaagaaggatgccacggaggcactgaagtgcagatcattcaatgtgcagctgtcgatcgggaacaattccaccatctagagcggcgttcatgatatcggcctcagctcgccgaaccttgggcaattcagctcgccagact

SEQ ID NO: 1338 - DNA, 341 bp, Triticum aestivum
  Clone ID: LIB103-030-Q1-E1-H3
taccggtccagaattaacgggtcgacgggggattgccagtttctcttcacatagaaaaccgccatttgtagaatgatcttttgcttcacttatatttgttagagcgtgggcatatcttttgtagaaagaattaaactcccttggctcacttatatttgtttagagagatgacatgagttggtcattcacatggttagtcatgaaatcctacataaacttgtagatcgctgaatatgatatgtttgaatccttgcaatagtctttccatacaaagatggtgatattagagtcatgctagtgggtggttgtggattgtagagacacttgtgttgaagtttgca

SEQ ID NO: 1339 - DNA, 455 bp, Triticum aestivum
  Clone ID: LIB103-030-Q1-E1-H5
gccgccaggtacaggtcaagaattcccgggtcgacggggaagtcggccgccaaggagggcggcgacaagaagggcaagaagaaggccaagaagagcgtggagacgtacaagatctacatcttcaaggtgctgaagcaggtgcaccccgacatcggcatctcctccaaggccatgtccatcatgaactccttcatcaacgacatcttcgagaagctcgccggcgaggccgccaagctggcgcggtacaacaagaagccaaccatcacgtcccgggagatccagacctccgtccgcctcgtcctccccggcgagctcgccaagcacgccgtctccgagggcaccaaggctgtcaccaagttcacctcctcttaggctgttcgtcttcctgtgtctcgtagttagctgttcgggtgtgtttgtggccgtgttatcctgtaagaatcgcaccgcgatgt

SEQ ID NO: 1340 - DNA, 411 bp, Triticum aestivum
  Clone ID: LIB103-030-Q1-E1-H6
ccgggtcgacgggaagcggcacgtccaagtgcccactagtttcgatgaaggacacgtcatttgcggtgttctggacaaaggaaggcggggacgaagataatcagacagtccagctgcagccggaagatcttgccactcaggaggagcagttaaatgaattggtggacaatcaaatggaagagattgctgaggtcgccaagaacgttgcctcacgcggcaaggataaattggctgcttgatgacgtgagatcttgtagctcgttggtagaaagttagaaaatttcttactggagattatcctcgacgtggagaactatgcaatgcggattttttgtttcgagaatgttacattgttatactgtttcaacttagtaaccgtaccaacttatgttatttgagtgaaaaacaaat

SEQ ID NO: 1341 - DNA, 407 bp, Triticum aestivum
  Clone ID: LIB103-030-Q1-E1-H8
ccgggtcgacggggctagcctgcctcccaggagcgccgagtccctccgtccccaacggatctacgcgcgcgaggttcggttcggtcttcggagctcgagacatggcggaggagaatgccccagttgaggttgctgctccggttgcggcccctaccccagttcttggagagcccatggacttgatgactgctctgcagcttgtgatgaagaagtcaagcgctcatgatggccttgtcaagggactccgtgaagctgcgaaagcgattgagaagcatgctgctcagatctgtgtgcttgctgaggactgcgaccagcctgattacgtgaagctggtgaaggcactgtgtgctgagcacaatgttcacttggtcactgtgcctagtgccaagactcttggcgagtgggct

SEQ ID NO: 1342 - DNA, 381 bp, Triticum aestivum
  Clone ID: LIB103-031-Q1-E1-B11
agtacaggtctagaattcccgggccgactgtgactgaacagatcccggtcgccgcagtccacctatcaactcaaccaagtcagtactccacgacctcgcagacctcctaacacatacaccgcctctctccgagccttggtcaactcattaatgcacaacatgcaattctcgcgcaacagcgaatccacatttaacttgatacaatcggttggcccataccctttcggcgtagagaatcattccgctcaggagaaacttcattcagggtgcagacagtcaggacattgtcgtcatacgaagtcgatattataccgagtgtcacttaccaaaccattactctcctgatgctgcagtgcaagcacttctctgattactcacagg

SEQ ID NO: 1343 - DNA, 419 bp, Triticum aestivum
  Clone ID: LIB103-031-Q1-E1-B12
gtaccagtcaggaattcccgggccgacggggaccccacggatggcagggaaagggaggaggctaatgaatacgctaggcaagaaatggcagagattgacttcagtgaactccgtctccttgatgctagaccaaatctgccacaggcgaaattttttccttacgttcctaacgaggacgacgctcttctagatgacattcccagcgatgatgatgattttgaagaggaggatgctctgcccatccaaggagaggacttcgaaggggaagccgccgccgccgctcacaagcttgttcctcctattcagtccagctgagaagatgattcagttggtctacctctatctattctatccaattatgtttagcagatgtctctgtcgtggatccgtacatgtgggttggtcgggtctatctatct

SEQ ID NO: 1344 - DNA, 448 bp, Triticum aestivum
  Clone ID: LIB103-031-Q1-E1-C11
ggtacaggtcaggaattcccgggccgacggggactgaattttacatctcaggaggttggtaccgtgctagctatctcaggttttggtgttttggtatatcaacttctgatctacccgttccttgccaagtatgctgggctagtcaagccattccgttctgcagcggtattatctatacttctccttgcaacatatccattcatggctaacctatatggtgtggagctcaaagtactcatcaacatagcctcgcttcttaagaatatgtttgcggctacgattactattgcctgcaacattctgcagaacacagcggtggcacaagaacaaaggggtgtcgcaaatggtatatctgtgactctgatgtcaatcttcaaagcagtagccccagcagcagcaggaattatgttttcatgggctcagaaaaacataactggattgttcatac

SEQ ID NO: 1345 - DNA, 448 bp, Triticum aestivum
  Clone ID: LIB103-031-Q1-E1-C12
gtaccagtctagaattcccgggccgacgggatgcgccccgctggcatggacacgtgtcggagcagggtggagcggcgacggacgggacatgggttagtctccgtccccgataaagtaagggacacctaatggggtgcattaaatgcaccttatcctgtaatggctagcgataagcttagccacgatacaccgatgccacctcctgtgtgccactgtggcaatccccttgactataaaaggaggcccgaggcatccaggagaaggattcggaccctgggacaagttacattcatggtagctagctcaagaactcaaagaacactcagatatacactaaagcaggactagggtgttacgcttccttccggcccggacctgggtaaacgacccgtgtgcttgtgctgattgctggtcctgctctcctcaacaccccgcgctccgcaaccat

SEQ ID NO: 1346 - DNA, 428 bp, Triticum aestivum
  Clone ID: LIB103-031-Q1-E1-D11
ggtacaggtctagaattcccgggtcgacgggagaatgaagaaagacctaaaggtcatgcttatttataaggaaggactgacagagagggcgcgagaaacgaggaggccaggcatggatatccagctactctgacgcctcgatttttgggatggtcattaagataaagatccgttgagatatgacagaataaaatgaatttaatggaagatgacatcatggcgggttatcatgaattcagaagatgacgtcatggcgggttataactttgcacagacaaaagccagaaagtttttcttaaagtattgaagattgacatgaaccggttcaaatcaatctggggcctaatgttggggatataactactggtgtaacccgcccaggaggggctgggttacgctataacaattcattatatgaagcccaatat

SEQ ID NO: 1347 - DNA, 449 bp, Triticum aestivum
  Clone ID: LIB103-031-Q1-E1-D12
aggtaccagtctagaattcccgggtcgacgggaagcaaactgaggataaatctgatgcgccaaaggaagattacattcatataagagctcgaagtggccaggctacaaacagccatagtcttgcagaaagggttcggagggaaaagattagtgaaaggatgaaatttcttcaggaccttgttcctggttgtagcaaagtcattggtaaagccgttatgctggatgagataatcaattatgttcaatcattacagcggcaagttgagtttttgtcgatgaaactttcagctgtcaacccagcactagacttcaacatagagcgcattctatctaaggatttatttcagtctcaaggaactgcatcgtctacctttggcttcttaccagacattggccatcaatttttgcatccaccaaaacattctcaagctgcgttgcacagcattgta

SEQ ID NO: 1348 - DNA, 398 bp, Triticum aestivum
  Clone ID: LIB103-031-Q1-E1-E10
aattcccgggccgacgggacggtcatcaactagtaatgatcaagaagtgatcctgaactcctacttacgtcaaacataactcaaaagccgtgttctcttcacggactccgccgaaaagagaccatcacggctacacacgcggttgatgtattttaattaagtcaagtgtcaagttctctacagccggacattaacaaattcccatctgccacataaccgcgggcacggctctcgaaagtttataccctgcaggggtgtcccaacttagcccattataagctctcatggtcaacgaaggatattccttctcccgggaagacccgatcagtttcggaatcccggttacaagacatttcgagaatggtaaaacaagtccagcaagccaccccctgtgccga

SEQ ID NO: 1349 - DNA, 431 bp, Triticum aestivum
  unsure at all n locations
  Clone ID: LIB103-031-Q1-E1-E12
aattcccgggtcgacgggcagacactatccttgtattcaaatttttccgtggtgtattcggaggaggaacctgccttgcaatgccgaagacaacactgcgcgccggactcatcgtcattgaagcctggttcaggggctactgagggggtcctggattagggggtatccggacagccggattatatcctttcgccggactgttggactatgaagatacaagattgaagacttcgtcccgtgtccggataggactctacctggcgtggaaggtaagctaggcaatacggatatgtatatctcctccttgtaaccgaccttgtgtaacccttgccccctccggtgtctatataaaccagagggttttagtccgtangacaactgtcacaccctagttaattcaagcattagagtgtgcatcatgtttaaatttc

SEQ ID NO: 1350 - DNA, 400 bp, Triticum aestivum
  unsure at all n locations
  Clone ID: LIB103-031-Q1-E1-F11
ggtaccaggtcaggaattcccgggtcgacggggatgttctggctggcatgaagcaaggggatctaatcatttggtatgttgagcagcagaatgcccaaggtgcatatagttctacagaagaggtgaaggaggaagtaaagtgcatcaaagccattatagagaggctgatacagagggaaggccatcttgtagtcatagacgaaggaacagcggcagcagaaggtgctgcagcaagggcatcggagcacagaatcctggctgttaacccgaactacgtcattgattgattaaccagctgaggacacagctaactagatccatcatatgtggttgaccaatagagcagacattcanacggaaaacatcctgttgtcatatgctctagaaatgatatgttgta

SEQ ID NO: 1351 - DNA, 417 bp, Triticum aestivum
  Clone ID: LIB103-031-Q1-E1-F12
attcccgggccgacgggtgagaggaaaagagagaagggacaatgctactatccttttaccacacttgtgcttcaaaatagcaccatgatcttcatgatagagagtctccaatgttgtcactttcatatactagtgggaatttttcattatagaacgtggcttgtatattccaatgatgggcttcctcaaaatgccctaggtcttcgtgagcaagcaagttggatgcacactcacttagtttcttttgttgagctttcatatatttataactctagtgcatccgttgcatggcaatccctactcactcacattgatatctattaatgggcatatccatagcccgttgatatgcctagttgatgtgagactatcttctccgcttttgtcttctccacaaccaccattctattccacatg

SEQ ID NO: 1352 - DNA, 403 bp, Triticum aestivum
  Clone ID: LIB103-031-Q1-E1-F9
gtacaggtctagaattcccgggccgacggggtccacaacagcgttgtgccgatcttttaatcgccccctattactgtgcatatggttgtgcaaaaggtctgctttgatgatggcacaatcgattgcacactttacaagctcatgatttgttattacccctgttcctctttctatgcggctgaaaagctagacctggactagtgtatcattatttgtttttgtagtaaaataaaaggcgcagttgtacggtaaactaaataaatgatgtttattttcgtagtgggtggcactatttgtgcagtttgttggcaatgtaaaatgtacacccaagatatcaaatggtttgttgccaaaaaaagaggagaggaggaaaggggaggagaaaaaaaaagcggccgctcta

SEQ ID NO: 1353 - DNA, 449 bp, Triticum aestivum
  unsure at all n locations
  Clone ID: LIB103-031-Q1-E1-G10
ggtaccagtcaggaattcccgggctcgacgggatctacatgtgaagcggagtacatggcagcctcggaggcagcgcatgaagcgatttgggtgaaggagttcattaccgacctaggagtcatacccaatgcgtcggggccgatcaaactcttctgtgacaacactggagctattgtcctcgcgaaggagcccaggtttcacaagaagaccaggcacatcaagcatcgtttcaactccatccgtgaaaatgttcaagatggagacatagagatttgcaaagtgcacacggatctgaatgtcgcagatccgctgactaaacctctctcgcgtgcaaaacatgatcaacaccagaactctatgggtgttcgattcatcacaatgtaactagattggtgactctagtgcaagtgggagactattggaaatatgtcctagangcaataataaaa

SEQ ID NO: 1354 - DNA, 451 bp, Triticum aestivum
  Clone ID: LIB103-031-Q1-E1-G11
gtaccagtccagaattcccgggccgaccttcatcatgagacaccacgtgcatcatctacttcacacattctgctacaccggcaactccatcggctgccacctccaaccgtgatacaataaagcaggcacaatcaccactatctgccaagatcacaccttctgggcctgcaaagagttgttcttcatccatggcatcaacagggcaaacacatgatattatttgtcgatgttgcaagggtggagctcattatgcgagagaatgccaatctaagagtgtgatgattattattgaggatggtgggtatgagtccgctagtgactatgatgaggagtctttggctcttattacacatgaagaacacggtggagatgattctgatcctgagacgcaatacatggctgctgaagatgctgacaggtatgaatgtttagttgctcaacttgttttgag

SEQ ID NO: 1355 - DNA, 415 bp, Triticum aestivum
  Clone ID: LIB103-031-Q1-E1-G12
cccgggccgacccatctggcatcgtacatcctattcattttaacaaagcgcttcgtgggtagctcagtttttaggaggttttctgtaaatatttttccatgaaaaaatgtccaagaattttctagcaaacatgaactttaacagaagttcatacattttgatcatcaaaatgtgatcttaaaacatgtacaattttttttaaaagcaattcttgtaaagcttaaacttgtttcaaaattttgagaattactaaattcgaaaactgaatttgaattcaattttttcctgaatttaaacattgtttgcacattatagaagtgtatcaaactaaagtacacacatattctagttattttgctaattttgaaatattccaacactaagaaatgttcactacgttcttagaaatgttcat

SEQ ID NO: 1356 - DNA, 446 bp, Triticum aestivum
  unsure at all n locations
  Clone ID: LIB103-031-Q1-E1-H9
gtaccagtctagaattcccgggccgaccatcctggtccacttgccatgcacgcagaactccaagggagagtccccccggtcgtcacgccgcagtaataatgacgaatgagccatcaaatcacaggcccaacctttcccactgtgaagttgctcggacgaaggaaccatcatgacttcgttgaattccgcttcttgaagaaaactactgtaccaactgtcctgctagctacagtagtactgtactccaccagaggcctcctttggttcataggataggaattttataggaatatgaaaatcataggaagtgagatgacaggcatctcaattcctatagagaaagagatgccatttgaatcataggataggaatttttccattgagtctaggctaatgtattggtaatttgctctanaaactacaatagtaactagtactggtacatg

SEQ ID NO: 1357 - DNA, 394 bp, Triticum aestivum
  Clone ID: LIB103-031-Q1-E2-B8
cgggatggtgtacctgtacccgggccgcggcggcgacagcggcggcatcgacgtggagctggcgctgcagccggagcccatgcagaggctcgagaagggcgaggagttcctgcaggtcgcggctgcctgatcacctgcacgccgctgcctgcaatatttagtgagcttaattaagcaaaggtttgtgatttagccactttcgttgattcgatcttcactagtgcgtgtgtgtttgcttgttactgctgcggatctgttccggctaaataaggatcgatcgattagtttgtgtaagatcaccatcctatttgtcgtgtcatgtcacacaaatagccatgtaatgccatgtagtagcatgtaatccgcctacaggatttgcatatttgtttacacg

SEQ ID NO: 1358 - DNA, 238 bp, Triticum aestivum
  Clone ID: LIB103-031-Q1-E2-C5
acgggaaatgcaataaaggcaatcttgacatcaatgaacttgaatctcttgagaatgtcttgagtgtatatatcatggatggtaaatgttccttctcttcattgcatgattttgaaatcgcgaaaataaaattaaataaaataaaaataaataaacagctgctcaaaaggataaaagcttacatatgcttgtatgcaacgtcatacatcttctatagtgttaccaaaattcaattaaa

SEQ ID NO: 1359 - DNA, 314 bp, Triticum aestivum
  Clone ID: LIB103-031-Q1-E2-D10
cgggtatggctgataaattagcatcagagctcatgccctctgatgttgcaaaggcgttatggggcaccaccaagagttcctccaagataaataaagaagtccaggagcttttaaagcttacactgagcaaggcccgagtcaagctgactgagaataccattttcaatcggatcgttacggactctaatggctcagatccattcaatggtctctatgtaggagcgtttagtccatatggccccgaagttgtacagctccgtcgaaagtttggccattggaatagtactgatgacgtggagttttcgagtatgtcg

SEQ ID NO: 1360 - DNA, 417 bp, Triticum aestivum
  Clone ID: LIB103-031-Q1-E2-G7
cgggtcgacgggagtgttgattcatgtatgcctgtccccataagttagtgccactttgggttcacgactagtcatgtcggcccgggttctctgtcatatggatgctagcgacactatcatatacgtgagccaaaaggcgcaaacggtcccgggccatggtaaggcgacacccgtgggaataccgtgtgtgaggccacaaagtgatatgaggtgttaccggctagatcgatgtgacttggaattggggtcggtgacagctttggtatcagagcctgactgcctgtatgattaccaagccaaactggtcgaagttgagtctagaaatgctttagttatgtaagggaattgattatggaagggaacgtaaggctctttttaatccttatacctcatggctttctgatctgagtcaacctc

SEQ ID NO: 1361 - DNA, 316 bp, Triticum aestivum
  Clone ID: LIB103-031-Q1-E2-H4
cgggggtacctgcatctagtccgaaggcggccgcacgcgctgggtaccgtcgccgatgggccatggtccgcgcgccgtcacctcgtcctccaggcaccggagtctccctttcttccgttcttcttttcctgtgattctgggcagagctctcggcacagctcgtgctgataacgtgttgaatgtacatgagaatgaatcgaacctctatctttcattgatcatcggatggtatttataccaggctttgcgtcataaaacacatagagagactctaccatgcaaaaagcggccgctctacaggatccgagcttacgta

SEQ ID NO: 1362 - DNA, 385 bp, Triticum aestivum
  Clone ID: LIB103-031-Q1-E2-H7
ccgggtcgacgggtaagttcacctctgaatcacttgtcttcagtttcgttcatagtttatcattgaatcactcaactcattccttgtttgcttctggtttatgcatgattgcagcaactctatagagttcttgacgagcacaaggccagagccgacgtggtcttgcttgcggctgtgaagaagaaagctcatcagttgcagtacgaggtgcgctgggttgccgtctcgcagtactaccacatctacctggaacaaaagatgaccaaaactcaagcgcagaggcaacgacttaccttgaacagggagcagttcatgatggtaactattactaacttatgattgtttcaagcagtcaactatatgtttcgtgctcacatgtcatgat

SEQ ID NO: 1363 - DNA, 412 bp, Triticum aestivum
  Clone ID: LIB103-032-Q1-E1-B1
ccagaaagaccattgccggaggcaatcgagtattccttcgaagaaaggcggctggccgtctatttgtcaagagaagtttaagctctctttgcgtaggcgaaagttggaaacctgacggctgttacttgtgagagactggctgctgcctagtatgttggtcgacgacagtcgtccagtgctgttctgattgttcccctctgccacatttgattgtttccatactcagcaaaggaagcttgcgcttcagcagcttccgttcagtactgccattggttagatataattaatgtgtataggtttctttctcggcactgaatcatcttgaatctgtttgattaatatagatcggtattgtgttctaaagaacaggagcgcggtcggcgggacagaaaagcggccgctctagaggatc

SEQ ID NO: 1364 - DNA, 462 bp, Triticum aestivum
  Clone ID: LIB103-032-Q1-E1-C1
taccggtcttacatgcacggggtcacgggacaatcaaacgacagttagctgctatcgctccaacacttgagcagttgaataagaagaagaatgagagaaagagggaatttgttagtgtacagtcacaaattgatcaaatatgtggtgagattgctggcaccacagaggtcggtgagcaggtggctacaccacaggtcaacgaggatgatttgacacttgagaggcttgaagattttcggtcccaactccaggagcttgagaaagagaagagcaataggttggagaaggttcttgagtatgtaagcatggtacatgatctatgtaccgtcttgggcatggattttctcagcaccgtgactgaagttcatcccagtctagatgactccattgctgataactgcaagagcatcagcgacgagacattatcaaaacttgacgagacagtacccacaactcatgaac

SEQ ID NO: 1365 - DNA, 148 bp, Triticum aestivum
  Clone ID: LIB103-032-Q1-E1-F2
cacgaggcaggaggcgtgccctccacccttgtggggccaggttttggtcccggccgtgcggggtgttgcggccgctcttgaggatcctggcttccgtccgcgtgggtgcgatgtcgtaggtcttctgtactgtcaccgaaattcaatt

SEQ ID NO: 1366 - DNA, 100 bp, Triticum aestivum
  Clone ID: LIB103-032-Q1-E1-F8
ggtggcacttttcggagaaatgtgctctgcacgcctatctgtttacttttctaaatacattcagatatgtatccgcccatgagacaatggccctgataaa

SEQ ID NO: 1367 - DNA, 401 bp, Triticum aestivum
  Clone ID: LIB103-032-Q1-E1-F9
cgggtcgacgggtttctccacataagtcaaatcactatccaactgaatcgcttatagcggcactgtatctctcagcggtatatcagccatctctgcgtgacacttcttcaactgggaaacgtggaatacgtcgtgaactcctgacaatccttcgggcaattccaacttgtaggctacttctcccatacgctccaaaactttgtatggtcctacaaaacgtggcgctaagtttcccttaactccaaagcgcttaactcctcgaagtggtgacacacgaagataaactcggtctctgactttgtaaactgtctccttacgtttagaatctgtgtagctcttctgcctggactgggctactttgagtctatcgcgaatcaacttcaccttctgttcagactcct

SEQ ID NO: 1368 - DNA, 419 bp, Triticum aestivum
  Clone ID: LIB103-033-Q1-E1-A1
taccggtccagaattcacgggtcgacggggtattgtatgatttgagtctttgccttttagtttaccacaatcatccttgctgtacacaccttttgagagagacacacatgattcggaatttattagaatactctatgtgcttcacttatatcttttgagctatatagtttttgctctagtgcttcacttacatcttttagagcacggtggtggatttgttttatagaaactattgttctctcatgcttcacttatattattttgagagtcctacaaaacagcatggtaatttgcttaaatcgagaaattggtcctaaagtaataggcatccaagattagtaaaaatttccttatgagtgtgttgaatactatgagaagtttgatgcttgataattgttttgagatatgaagatggtgat

SEQ ID NO: 1369 - DNA, 404 bp, Triticum aestivum
  Clone ID: LIB103-033-Q1-E1-A10
tctagaattcccgggtcgacggggacgagcgatggtcttttcttaccaatctatccccctaggggcatgcgtagtagtactttgcttcgagggctaataaacttttgcaataagtatatgagttctttatgactaatgtgagtccatggattatacgcactttcacctttccatcattgctagcctcttcggtaccgtgcattgccctttctcacctcgagaattggcgcaaacttcgccggtgcatccaaaccccgtgataggatatgctctatcacacataagcctcattatatcttcctcaaaacagccaccatatctacctattatggcatttccatagccattccgagatatattgccatgcaacttccatcatcatcatattcatgacttgagcattc

SEQ ID NO: 1370 - DNA, 366 bp, Triticum aestivum
  Clone ID: LIB103-033-Q1-E1-A11
cgggtcgacgggagagctctacctcatcgagtgttcggcgcacaggccatatttcttttattactcactttgcataaattattgattatgcaacaattttattattattcctaatatctccggcttgcactattttccgtgcacaagtagataatccgggcaacgctgtcaacgcggggtatccacgtatcacatcacctcgggtgagccggggggttgtcatcacttcacttacacacacccggggggtttgggttacactaacgggctgctccacaatctccggggtcggactggggtttacactttgcccatcgactatgctgtgtcaccatttcatcaaatcgtgttctttacgcggacatc

SEQ ID NO: 1371 - DNA, 400 bp, Triticum aestivum
  unsure at all n locations
  Clone ID: LIB103-033-Q1-E1-A4
cggtccagaattcacgggtcgacggggtcatatttcagggcccaatgcatggtagtagctgtatcttaaatcacacatacagatctcagtgcttaaggtcggcttcaatgaaacaacccaccatgtactcctacatggcctctcatcgatacctttaccaaatcgtgttcaccacaccactctcattaccgacataatcatttcactctagcccatcacccagatgaaccagacctgtcacgactctaagcatagcaggcatagcaaggtangaacaacacatacatatggctcaatcaactcctacacatgctagtgggtttcatctagttactgtggcaatgacaggtcatgcagaggaaatgggttcaactaccatagcacacagcagtttgaaacg

SEQ ID NO: 1372 - DNA, 433 bp, Triticum aestivum
  Clone ID: LIB103-033-Q1-E1-A6
ggtctagaattcccgggtcgacgggtggtcattcgggtacgccataaggatgcaaagaggcatcctatatcagcaaggactggttgttccaccaatagctcatctaagagaactctcaagttaactgtgctcaggctggagcagccatcagatgggtgattggatgggaagttttcttaatgttaaattaactaatgggatgggtcatagaggtcaaattaaatgacctctatgatccatctcatcagttaaataaacctcgaggtccttgttttttttaacacatgttaaagaaggtctacttcataactttttgacaatgtgcgatacgtcgcatatagttgatccatccaagttgtttgtgatggaataagttgtgtgtatattgggaaaacgcttgctggtatacaaccgtttgtcattgatgaattca

SEQ ID NO: 1373 - DNA, 432 bp, Triticum aestivum
  Clone ID: LIB103-033-Q1-E1-A7
gtaacggtctagaattcccgggccgacgggattgccaagcaactttccaacgtttcgtatattatgacacgcttcatcattgtcatattgctttgcatgatcatgtacttgacatcatatttgtggcaaagccacctttcataattctttcatacatgtcgctcttgattcattgcatatcccggtacaccgccggaggcattcacatatagtcatattttgtcctaagtattgagttgtaattcttgagttgtaaataaatagaagtgtgatgatttccattattagagcattgtcccatgtgaggaaaggatgatggagactatgattcccccacaagtcgggatgatactccggactttatgaaaaataaacgaggccaaagaagcccaaacaaaaaaagaggccaaagaagcccatcatgtcagaaaa

SEQ ID NO: 1374 - DNA, 381 bp, Triticum aestivum
  Clone ID: LIB103-033-Q1-E1-A8
gtctagaattcccgggtcgacgggaatatcagacattcttacatgttatcgagtctgcacatacttgcacacatagtcaactagccattgatgatcacgtatgtcttatgaagtatgttgtcatttgctctagcgcatatcttacatctttgacaccatggaggcattgtaaattttaggacatagatgaacgcacacgaatcacttaaaatattgtgagagtcataaacatcatggtaatttgatgtaaaaactatcatagtatgtgaattgaatgcaatgatcaatttcacacttgatagttgtgttgagataacgatgtagtggtaataaagtcatgctagatgcgtgactacgagtttaatgaatgcttgtgttgaa

SEQ ID NO: 1375 - DNA, 330 bp, Triticum aestivum
  Clone ID: LIB103-033-Q1-E1-B10
gtacaggtctagaattcccgggtcgacggggtaccatacaacagcttccaacacatgccatgcactgtacacagtaatcaccatcatgtgaggtcatgcagaacttcacatgatctaatcagcgtcgtaccgggcatttcatgcaacaatggaggtaaacgtgacagagatgcagagtggattcaatttgtctctcagttcgttcgtgtttagccgtgcgacaggatacagacttaagctccttccaggcacaattggagagccacgaaactgacgacgacgtgcaattcaccgtgccatcggatacaccgacgcaactgggatcaccct

SEQ ID NO: 1376 - DNA, 401 bp, Triticum aestivum
  Clone ID: LIB103-033-Q1-E1-B12
gtaccaggtctagaattcccgggtcgacgggaatccattgagaagctagcaccgccggggacacgcaattttttgtcagatgtctaagggggcttggtttggatcctcattttgttttttccttgttcaaatttgtttatgttctttcagagccattgccatggttggcattggcaatgctgttggattggtttggattggcttgtgagaggggtaagcggtgagcgaagataagggctgggctgagctttcctaatgagaggagagcttcactggagcccaattccggtgcccaaatggagcacatttcctgtgagaaattcaccccaaatctgtactgtttttggtattgccatagtggtggatgccatcttacgttgcatatggtgagatgccagctg

SEQ ID NO: 1377 - DNA, 405 bp, Triticum aestivum
  Clone ID: LIB103-033-Q1-E1-B2
tgacggtccagaattcacgggtcgacgggagaagggtctagggtacctagggtttatgacgtctcgttgtttttgcaagctagcatgtgactccgggatgcctgttttaagatttcgcttgtgttgaaagatattattatttactgcttgtagcctacctgggataccatcatattttgctgattatggaactacttttaaaaaaaaaaaaaaacaaaaaaaaaaaaaaaaaaaaaaaaaaaaaaaaaaaaaaaaaaaaaaaaaaaaaaaaaaaaaaaaaaaaaaaaaaaaaaaagaaaaaaaaaaaaaaaaaaaaaaaaaaaaaagggggccccccaaagggttcaaacctaatttccccggtaagggaattttaaacccctccaaaggttcccccaaattcaa

SEQ ID NO: 1378 - DNA, 436 bp, Triticum aestivum
  Clone ID: LIB103-033-Q1-E1-B5
aggtacaggtcaagaattcccgggtcgacgggtctatacaattcaatagttacaataattgttgaattccaatatgtatacgaggtctatagtacttcacaatatgttcaaactcacataatcccagtcaaatgagaatctaaatgcatttcatagttactactttgtaggatgcaacaaaaccaaccataactctacatcatccattataaaatcaacattttgaacacattccaatgtgtgaatgaagcgtgtagagagagcttgcgaagatggagcagatagggcgggaaagctacatgctaaatagggtttgtgtgtgtgtgtgtgtgtgtgtgcgcgcgcgcgccagatactgagagaaatcaaacctatggagagaaatgtgtgtgtatgtgacggaaagctacatgctaaatagggttttcacgaagag

SEQ ID NO: 1379 - DNA, 300 bp, Triticum aestivum
  Clone ID: LIB103-033-Q1-E1-B6
tctagaattcccgggtcgactattgggttttgctgggatgtgatgatttttttttctggtcatcggtattgtttgtaaacatgtaacccaaaattggattctactagttctgttacacatctgagtcacagaggaggatagttgtgttaatgcaagagtggagacgaactgtttcttgctattaaccgaaaagccatgcggttcagagttgtcacaaaaaattaaaaaatataaaaaaaacaaaaaaaaaaaaacataaaaaaatagaacaaataaggaaaaaaaaactacatgcaaaaa

SEQ ID NO: 1380 - DNA, 421 bp, Triticum aestivum
  Clone ID: LIB103-033-Q1-E1-B7
attcccgggtcgacgggaggggcgttaaacgatagcgctagttgggaggcaacccaattttatttgtgtttttttttgcttatgtttaggaataaatcttgcatctaacttctgtttagatgtgtttttatgttttaattagtgtttgtgccaagtagaatctatgggataacctatggtgatagttaatttgattctgctgaaaaacagaaactttgcacgcatgaaattagttttgttaaatcacaggaacgtgcttttgcgttgattattcttgcttctgatcaatagacaaattttccaggacttcctattttggtaggatttttaaagttccagaagtttgtgttagttacagattgctacagactgttctgttttttatagattctgtttttcgtgtgttgtttgcttattttga

SEQ ID NO: 1381 - DNA, 304 bp, Triticum aestivum
  Clone ID: LIB103-033-Q1-E1-B8
gtacaggtctagaattcccgggtcgactctccaatgtagtgtcggtaactatcagatgttgagtgtcttgaaaactttctgataattgtgggatttgctttgtaatggtaatcgtgaaattggtgtggttaagaaaaaaaaaaaaaaaaaaaaaaaaaaaaaaaaaaaaaaaaaaaaaaaaaaaaaaaaaaagaaaaaaaaaaaaaaaaaaaaaaaaaaaaaagcggccgctctaaaggatcaaagctaacttacgcgtgaatgcaaggtcatacctcttcaaaaatgtcaccaaaattaaatt

SEQ ID NO: 1382 - DNA, 364 bp, Triticum aestivum
  Clone ID: LIB103-033-Q1-E1-B9
caggtataggtctagaattcccgggtcgacggggtcaggaagaagtggggcggtggcgtcatgggctccaagtcgcaggccaagaccaaggccagggaaaggctcatcgccaaggaggctgcgcagaggatggactaggcctagccctataagtattgtcagagcatatgccatgtagtttccctttcagtctgtcctgattttgacgaggaactcgaacccttttagcagcactgtggaatcgtattgtggttttctgattcgctgttccgttctccagacttctgcaaagatcagatgaggtttacccatgtttggattctatatagttttatgtcctttgtcgagtcaagaaaataaaaac

SEQ ID NO: 1383 - DNA, 111 bp, Triticum aestivum
  Clone ID: LIB103-033-Q1-E1-C11
attcccgggtcgacggggtcaggaagaagtggggcggtggcgtcatgggctccaattcgcaggccaagaccaaggctagggaaaggttcatcgccaaggaggttccccaaa

SEQ ID NO: 1384 - DNA, 379 bp, Triticum aestivum
  Clone ID: LIB103-033-Q1-E1-C12
attcccgggtcgacgggccgcaaggtggagctcctctcgccgttaccgccgccgccggaggagaagaaggaagaggaaaagaaggaggaaccagagccgccgaaacctgaagagaaaaaggagccaacggtgatctccgtggtgctgaaggtgcacatgcactgcgaggcctgcgcccaggcgataaagaagaggatcgaaaagatgaaaggagtgcaatctgcagacccagacctgaaggcgtcggaagtgacggtgaagggcgtgtttgaggaggtcaagctggccgagtacgtgcacaagcgcaccggcaggcatgcggccattatcaagtccgagccggtcgccccggccgagaaagccggcgaaggcgacgcca

SEQ ID NO: 1385 - DNA, 418 bp, Triticum aestivum
  Clone ID: LIB103-033-Q1-E1-C2
ggtccagaattaccgggtcgacggggacctaagttttccccaattcatttggctccaatccatccccgaacaaggcaagaacacggacaagccaagaacaacaactccccagcgtctccagcgagcagcatttaactccatccaggctttcgaggtacaagaagaaaggcttctgttcggccatggctttcccagctccagctgctgtattccttgatgagaacctgccaatccatagaggcaagagggctgatgggctgaacgcgaggccactgaaaccatcagcaaagccatcagcaaggaaggccctgcgggatgtgtccaacaccagcaagccccaagcgcctagcattcaaaaaggccaccccttgaaggacaggtccgtcctgaaagacaagtctgctcttcgcaacccaag

SEQ ID NO: 1386 - DNA, 392 bp, Triticum aestivum
  Clone ID: LIB103-033-Q1-E1-C3
cggtccagaattcacgggtcgacgggatcttcggccccatcaacgaatcatatttctcggtcaagatgtttgagggagtcattgcaacatcttacaacgaaggtgacaagttcttcattgaccccatgaagctgctgcccctctcacgcttcctgccgcagccaaagggcttgactccaagaggtggtggtcgaggtggaagaggtggtggtcgtggtggatttggtggccgtggtggattccgtggaagaggtgcaccaaggggtcgtggacctcccaggggtggagggcgtggtttcagaggacgaggcagattctaggatgtagttttaagtttgctgtttgttgaaacatgatgctctacattatatgttcagctggaaacattatgc

SEQ ID NO: 1387 - DNA, 425 bp, Triticum aestivum
  Clone ID: LIB103-033-Q1-E1-C4
taccggtccagaattcccgggtcgacgggggagcaagtggccatcaagaagatcgccaacgccttcgacaacaagatcgacgccaagcgcacgctgcgggagatcaagctgctccgccacatggaccacgagaatattgttgcaataagggatattatacctcctgcacaaaggactgcatttaatgatgtctatattgcatatgaattgatggacaccgacctgcatcaaattattcgctcaaatcaagctttatcggaggagcactgccagtatttcctttatcagatccttcgtggcttgaagtatatacattcagcaaatgttctccaccgagacttgaagcctagcaatcttcttttgaatgcaaactgtgacctaaaaatttgcgattttgggcttgctcgtaccaactcagaaactga

SEQ ID NO: 1388 - DNA, 425 bp, Triticum aestivum
  Clone ID: LIB103-033-Q1-E1-C7
ggtacaggtctagaattcccgggtcgacgactcaatcacacaagcaaccagaaatgacaacctacgacaccacaacagttgctcaaaaaaaaagtacaagtgcattttacttacaaatggctacgaagaatcagagcctcagaagttgaagaaaaagtagatagcatcgtgctcaaaagaaaagcaaaagagtagatagcctcctgtccaagtccttcagacgctggtcgccaactggcatattcagtacacagactcacgaaatcaacatacaactcgcaatctaataaatatcttatcagccggcataaacaaccaagcagcatgcacgcacccaggatcgacggttagcaaggaggatgccatgagagacttaattgtgaagcttcttaattaactgtgcttactttgaaaatacctccctt

SEQ ID NO: 1389 - DNA, 435 bp, Triticum aestivum
  Clone ID: LIB103-033-Q1-E1-C9
ccggcaggtataggtctagaattcccgggtcgacgggactcctactacactggaggtacctactactacgtgcaggccgctgacgacgaccaggagtagtttaggaggatcccaggcaggaggcctgcgcctctttcgatctgtatctcagtttgtgctagccatcttatggcaacttgtttaacttatgtctgtactcagatatttgttgcttccgctgactcgtctatgatcgagcacttgtattcgagccctcgaggcccctggcttgtattatgatgcttgtatgacttattttatttttagagttgtgttgtgatatcttcccgtgagtccctgatcctgatcgtacacgtttgcgtgtatgattagtgtacgattgaatcgggggcgtcacagggggagttgtaattgtcttagactcgagacgtaaag

SEQ ID NO: 1390 - DNA, 429 bp, Triticum aestivum
  Clone ID: LIB103-033-Q1-E1-D1
ccggtccagaattatcgggtcgacgggtaggccttgtttcgaagcattgccataccgtttgtgctcacttttaccacttgctaccttgctgtttttatattttaagattataaaaacctatatctaccatccatattgcacttgtatcaccatcccttcgccgaactagtgtacctatacaatttactattgtattggatgtattggggacacaagagactctttgttatttggttgaagggttgttcgagagagaccatcttcatcctacgcctcccatggattgataaaccttaggtcatccacttgagagaaatttgctactgtcctacaaacctcttcacttggaggcccaacaacgtctacatgaagaaggttgtgtagtaggcatcaagctcttttctggcgccgttgccggggaagttagtg

SEQ ID NO: 1391 - DNA, 419 bp, Triticum aestivum
  Clone ID: LIB103-033-Q1-E1-D10
gtaccggtccagaattcccgggtcgacgggaagttgaaagtacccgctgacgggtcgcaatggagaaaaatcgagagaaagtacaggaatgactttgcaggtgatgcaaggaacgtatggtttggcctaagcgcagatggtattaatccttttggggagcagagcagcaaccatagcacctggcctgtgactctatgtatgtataaccttcctccttggttgtgcatgaagcgcaagttcattatgctgccagtgctcatacaaggctctaagcaacccggcaacgacattgatgtgtacctaaggccattagttgaagaactcttacagctgtggaatggaacaggtgtacgtgcgtaggatgagcacagacaggaagaatttgacctaaaagcgttgctgttcgtgactatcaatga

SEQ ID NO: 1392 - DNA, 435 bp, Triticum aestivum
  Clone ID: LIB103-033-Q1-E1-D11
ccggcaggtacaggtctagaattcccgggtcgacgggacactctgtcatcttctgccaacaattggactccttccaacgggggcggccacgcttcaggctactcaaaggaggctgacccaaccacagcttgaaagctgaagcactaaccacaacatcaacatccaacctttttgacatttgcaatcccagttttcacattaccatcctttcccacctctttttgcttgtggtgttttcggagtctgtagctatttagtactttctatgtcgtgggctaccagaggctccctagaggctgcaaattttggcgctgagtagaagcaagggaacggacggagggtgctcccagtttctcctgagcctatatgcgtgtattaactgaaggccgtggaaggcaaaactcgtggggagctctctgagattttggactgtaa

SEQ ID NO: 1393 - DNA, 423 bp, Triticum aestivum
  Clone ID: LIB103-033-Q1-E1-D12
gccggcaggtacaggtctagaattcccgggtcgacgggactacacaaatgtcaagaaggttcttgatgatgttctccccggctacgccaaatctggaggcaccttcaccaggcctattcgtaagtacgacaagcacgtgttctcccacaatacgacgttctgctgcgtcaagcagtcgcctggcggtcagaagggtgcctactacaccatccatcacatgcgggcgatcgtacgggaccatcatcaacttctgctaccgagtaaactccaagattgggccgcgagcgtgtcggcaatccaggacgcggacctccgacaagaattctttcgcatccagtcggagtttgcggaaatcatccatcaagatgtccttcgtacctcggggcagttctacctcagaaatcaaccgtccaacagtgacat

SEQ ID NO: 1394 - DNA, 396 bp, Triticum aestivum
  Clone ID: LIB103-033-Q1-E1-D4
ggtcaagaattaccgggtcgacggcgaatatttgaggcatactctggcatattacagggtataaaaggtccaaaagctcagctgatggtaccttatgcaacccacctattgcagttcactgaagctgtctacaaggatgggagcagggatgagagtgtgacaaaggctgcagttgcagtccttggtgatcttgcagatacacttggcccaatatcaaaagatctgttcaggaaccacctgttccatgtcgaattctttagggagtgccttgattcggacgaagaagtcagggaggctgcatcgtgggcgcagggaatgataaaccaagcagtggttgcttaatatgtgaaatcattttctgttgttggttgtggtggaagtttcctccttgtgcat

SEQ ID NO: 1395 - DNA, 435 bp, Triticum aestivum
  Clone ID: LIB103-033-Q1-E1-D5
ggtaccggtctagaattcccgggtcgacggagcatcggagaaagggcggtggctggaggcgtgcatgagcttgatttggccatggcagagcgggcgctgagatgagatgtagagagggaccatggtgggtcaacgcttggggaaaagtaacgagtggctgtgcttgctcgagagaagagataagaaggggagggggcggtgcgtgcttgaggtaggtgcctcctcgtgcgtgcgatattgccagatcgtacgcgaccggctcgatgttcggccggcgcgccgagcgcaaacatttcccataaaaaaatgccatccaataaacatattcacgaatttcctttaaacatagtgaaaagagatgttgaaaatcatttaaacattcattttttgacaaatagttgctttaattggattattatgctgatcaaatgtatg

SEQ ID NO: 1396 - DNA, 420 bp, Triticum aestivum
  Clone ID: LIB103-033-Q1-E1-D7
gtacaggtctagaattcccgggtcgacggggacactgaagagtttcatgggcatgtcccagctcaacctcagaggcctaatgtcactgttcggaattggaaagacaaggactactcggtggtgaccatccggtgcaaggacaggccgaaacttctgttcgacactgtgtgcaccttgacagacctgcgctatgttgtctaccatgcaaacattgacgccagcaataatcaagcgtaccaggaattctatgtaagacatgtgaatggatctccaatgaacactgaagctgaaagattgagagtcatccagtgccttgaaagtgcaattgagcgcagggtatctgagggtgtgaaacttgagctgtgttcaaatgacaaggtcggcctcctgtctgaggtcaccctcatcttccgggagaac

SEQ ID NO: 1397 - DNA, 430 bp, Triticum aestivum
  unsure at all n locations
  Clone ID: LIB103-033-Q1-E1-D8
taaggtctagaattcccgggccgacgggggggacaacatcgctcgcgtgttggagatcgagagaaggaaaccctagccgccgtcgtccagatctgcttgggttggtggagggtatggctatggcgctgcgcaccatggccgccaagctgaagcataagatccccgccgctgtccagcgggttcgcgtctcttctcgtgctccggcacctgctgatgctgacttcgaccgcttcggcttcggcccaaagtttcgccgggcactggataagattgtagagaaacacatgaagaggcgcaaggatgaggccttggcctgtggtgctggcttcagtcttggagcactcacctttttgcttggggtccatangctcggtttaacggagatggctcaatggttaatgactggaatatctatcctgcaccgcatgtt

SEQ ID NO: 1398 - DNA, 432 bp, Triticum aestivum
  Clone ID: LIB103-033-Q1-E1-D9
gtataggtctacaattcccgggtcgacgggacaacataaacaacaagctgcagcttgtcatgaagagcggcaagtacacgctcggctacaagaccgtcctcaggaccctcaggaactccaaggcaaagcttgtgatccttgctaacaactgccctccgctccgcaagtctgagattgagtactatgctatgttggcgaagatcactgtccaccactaccatggaaacaatgttgatttgggaactgcgtgtggtaaatacttccgagtctgctgcctgagtatcatcgaccctggcgattccgacatcatcaacgcaacaccagctggccggtaaacctgtgtatgccattttcagtgtctcgtctgatgcgtcatctaaggtggttctagagtgtagttcttgctggacttgattttggtctgtgtacatc

SEQ ID NO: 1399 - DNA, 416 bp, Triticum aestivum
  Clone ID: LIB103-033-Q1-E1-E10
gtacaggtccagaattcccgggtcgacggggatcacagaaacatgacatgatgcacaaacaagtatgatgcatgtccggtttaaatgaggcatggaatggcaaaatgcaacaaacaacactacaaattaagtggagctcaatatgcaacgagttgcacattgacggaacaccacatcaattatttagttctctctcggttatgtacccaacaatattaaatgttgattaacatggcaagaggtgaagcataagtaaactaactatttaggcaagtttaaatgtggccggaacaacaaacaacaattatggaaaatcctcatgtccatattatagatttggtgctgctctgccctaaaccatatttaaagttgttaaacagcaaaataaagtgcaccatgttaaactaggaattttt

SEQ ID NO: 1400 - DNA, 337 bp, Triticum aestivum
  Clone ID: LIB103-033-Q1-E1-E11
gtacaggtctagaattcccgggtcgacgggcatacctacctattatggcatttccatagccattccgagatatattgccatgcaactttccaccgtttcatttatgacacgcttcatcattgtcatattgccttgcatgatcatgtagttgacatcgtatttgtggcaaagccaccatgcataatttatcatacatgtcactcttgattcattgcccatcccggtacaccgccggaggcatttagatagagtcatattttgttctagtatcgagttgtaatcattgagttgtaaataaatagaagtgtgatgatcatcattaacagagcattgtccc

SEQ ID NO: 1401 - DNA, 389 bp, Triticum aestivum
  Clone ID: LIB103-033-Q1-E1-E12
tccagaattcccgggtcgacgggaccatacagaagttagaatacagtatatattacaccaatatgaatttataattatttcacaatagtaaataagtggtgatttattttcttatactaacggagcttacaagttttctgttaagttttgtgttgtgaagttttcaagttttgggtaaagattcgatggactatggaataaggagtggaaagagcctaaccttggggattgccaaggcaccccaaggtaatattcaagtacaaccaagagcctaagcttggggatgccccggaagtcatcccctctttcgtcttcgttcatcggtaactttacttggagctatatttttattcaccacatgatatgtgttttgcttggagcgtcatttt

SEQ ID NO: 1402 - DNA, 463 bp, Triticum aestivum
  unsure at all n locations
  Clone ID: LIB103-033-Q1-E1-E4
ggtcaagaattaccgggtcgacggggaccaccgctcccagcaacggaaccaacaaatcccaagctaatctcgtctccgatcgacccgaggctcgtcgaatcctccttccccaccgcctcaagatgcagatctttgtgaagacactcacgggcaagaccatcacccttgaggtggagtcgtctgacaccatcgacaacgtcaaggccaagatccaggacaaggagggcattcccccggaccagcagcgccttatcttcgccggcaagcagctggaggacggccgcacccttaccgactacaacatccagaaggagtccactctccacctggtgctgcgcctgcgtggcggcatgcagatcttcgtgaagaacctcacaggcaagnacatcactctggaagttgaaaactctgacaccatcgacaacgtcaaggccaagattcangacaaggagggcaacccccc

SEQ ID NO: 1403 - DNA, 419 bp, Triticum aestivum
  Clone ID: LIB103-033-Q1-E1-E6
attcccgggtcgacggggacgtgtagggcgagctattcgtcacggatgctgtgtttgaaagccgctaaggcttcggcgtccggacagttgacaatttaattcttcttagtgaggaatctattccaaagctcgcgggcggactctctgggccattggattatgtgacttagatcgtctggatccggaggccagacataattcccttgaaatttttccctaaaagcgtcttctagttcctcccaactcccaattgagttttcggggaggcttttcaaccagtgtcgagatggtcccttcaacttgaggggaaggtatttgatggcgtggaggtcatccccacgagccatgtgaatatgcacgataaaatcctcgatccagacccctgggtctgtcgtgccgtcgtatgcctctatgttcac

SEQ ID NO: 1404 - DNA, 271 bp, Triticum aestivum
  unsure at all n locations
  Clone ID: LIB103-033-Q1-E1-E8
attcccgggtcgacgggcattgaaattgacggggttctcttgttgtatggcaccggaagtggttctagacagatgcttgcttatgtagctgcagaaagtcatgttttagaaaaggaggatgacccccggcctttgcatctgagcgatgcatacggtcactttattaattattctcataagaccttacaaagtaataccacagtaagactaanaaataaaagggaaaaaagagaaaataaccaaaataaaaaaaaaaaaaaaagcggccgct

SEQ ID NO: 1405 - DNA, 422 bp, Triticum aestivum
  Clone ID: LIB103-033-Q1-E1-E9
gtacaggtctagaattcccgggtcgacgggcaagaccacctccaaggaaggcggcgagaagaagggcaagaagaagagcaagaagagcgtcgagacctacaagatctacatcttcaaggtgctcaagcaggtgcaccccgacatcggcatctcctccaaggccatgtccatcatgaactccttcatcaacgacatcttcgagaagctcgccggggaggccgccaagctcgcccgctacaacaagaagcccaccatcacctcccgggagatccagacctccgtccgcctcgtcctccccggggaactcgccaagcacgccgtctctgagggcaccaaggccgtcaccaagttcacctcctcttagactgcgtcgcctgtatctagtagcaaatgtagttctatactgttggcttaatgcttgt

SEQ ID NO: 1406 - DNA, 293 bp, Triticum aestivum
  Clone ID: LIB103-033-Q1-E1-F1
ggtccagaattaccgggtcgacgggtaaaagttctgtcagcacgactgcgtgctggccatattgatattctaacgtcgcatggcttcgcctatcacaacgcatacaattactattccaagattatttctcgaaagggcatctcataatgcattgagatcaatgatcaattgatatacctatagtgtgcccctgcgcccgtatatcaatgatcaatgaggaagaagtgtcgccaatcacagggcgcaccattacgagtcttactcccaccagtagtatgactcccatccttcca

SEQ ID NO: 1407 - DNA, 403 bp, Triticum aestivum
  Clone ID: LIB103-033-Q1-E1-F10
gtacaggtctagaattcccgggtcgacggggagacaaatggttatgacattgacatgatccttagtatcgtcgaagagtatgtgaggcaagatagcaaaaatgctcagaaacataatgctgaggtgaacggtcacgtgcaagcacctagtgcatctatgatcacagtagcaaaaatcgttgatggttatctcaccgaggttgcaaaggacccaaatacccctgttttgaagttcatcaatcttgctgaggcaatttcaggcaattcaaggcctttccatgatgggatatatcgcgccattgacatgtatatgaaggagcacccaagcctaagcaagagcgacaagaagaagctgtgctgcctcatggactgcaagaagttgtcgccagaagcatgcgctcacg

SEQ ID NO: 1408 - DNA, 434 bp, Triticum aestivum
  unsure at all n locations
  Clone ID: LIB103-033-Q1-E1-F11
gccggcaggtacaggtccagaattcccgggtcgacacgcaggcatggcatggtggacacgcgtggtcaccgcgcgaactcttccctcgggccagcctacgtccaaaaatcatgtctggcatgttgttcgtggtggttttaaagtttaccacgctttggtttggatccaggtgaagtagaggagtttttacatgccaagtaagtttctcatcagtaactttgagaggttactgaggtcaaatggctgggagttgggggctgtgctttggaggttagccatgatctactaaggtgaagatgcacaagaaaatccaggcacaatggagcaagtaaaatggtagttgctatagaaaccaccatttctgtccagaacagaaaatatttttctgtagcanaaatattccanaaagtgatgaaaatatttttacccaggaa

SEQ ID NO: 1409 - DNA, 405 bp, Triticum aestivum
  Clone ID: LIB103-033-Q1-E1-F12
ttcccgggtcgacgggcaatgatagatatgatcttaaaaattattagctaaatgtaagcagcagtctcttaatgctagagtgaaacctggccctgcttttgctacttcacctatctgtgttactgataaggattatgaattctctgttgatcatgaaattcttactttagttgaatctgatcctttttatggccttgaatctgaaactgttgtggcacatcttaccaagctgaatgatatagccaccctgttcactaatgatgagaagtctcgctattattatattcttaagatatttccgttctcattaaagggtgatgctaagacttggtataattctcttgctcctggttgtgtgcgtagtccacaggatatgatttattacttctccgctaaatatttccc

SEQ ID NO: 1410 - DNA, 394 bp, Triticum aestivum
  Clone ID: LIB103-033-Q1-E1-F4
cggtcaagaattcacgggtcgagtacatcaacacatgcaatgcctttggtcttcgaatgttgttcacttttgagagtgatgttgttcacttgcgtatgagaaaaaaaacatccgacaaaagaaattatgcagctcacttgcctgtctgatgcagtgcagtttttatttctgaagcagtgcggtcggcctatgatgttgttcatcccgtaagtgcaaaaaaattgttacggaaacgaaaaaaaataatgcggttcacttcttgatagtgttgtgattcatttacaccatatgtgaagtgcactctactttctcgtccttgaaaaaatcacgtttgaataaaagaaaccatgcagttctcttacctgtatgatgcagtgcggtttttcatccaatg

SEQ ID NO: 1411 - DNA, 385 bp, Triticum aestivum
  Clone ID: LIB103-033-Q1-E1-F6
aattcccgggtcgacggggaacaaacttggtctctgtgtgcttacgatggagtcccgcatttgctttgagaactgtaagcgtgtttaacctgacagcgcctgtaattgtacgccctttccgcatacttcacagcttgttgtcttatgaggtgctgcatggcagcatgctggtttatgccgcctcggtcattattatcatttgtaacttgttagagtgcacattaatctcatgaggatatacacataatacttatgctgctgttgttgttacgacctttatgccattgccttgtgttgctaatcatcaataatccttgtaagcttgatcatgggttgggttgctagctggggtacatttgagattatcacttctgcatattgtttt

SEQ ID NO: 1412 - DNA, 443 bp, Triticum aestivum
  Clone ID: LIB103-033-Q1-E1-F8
taaggtctagaattcccgggccgacggggatcttcatccggagatgatggagagcgaaacacctccccatgcctccccgcctcatgaggcgggcgacccggaggtgtcgtcacagaggatttctcctgatccgccaaggccagagggtaatccttcggcctcccgaagtccgaagtattcggctcctaaagggagcagcagaaaaagtctggagctgtccggtgcgcgaccggacgtattgatgagtcttctggagcaagcggctatctcagaagcgcatcgtacgctaatgggtatggtggttgagaggatttcatccgccgaaagcgggttgcatgaagcttttatgagcctgctgagaggctttgaggtacgcaaagtaatatatattttttgacagtaccgcacatgctaggtgtgccctatgcagatagtagcccctg

SEQ ID NO: 1413 - DNA, 388 bp, Triticum aestivum
  Clone ID: LIB103-033-Q1-E1-G1
ggtccagaattcacgggtcgacggggacgccattgaccaggccatccagtggctggacggcaaccagcttgctgaggcagatgagtttgacgacaagatgaaggagctggagggcctctgcaaccccataatcgccaagatgtaccagggtgccggagctaacatggcgggtggcatggacgaggacgatgcacctccggctgctggcggcgctggccccaagatcgaggaggtcgactaagcgagcacttgtaccagtcttaccctaaagttattccgttcgttatgttggatgctactgcagtacgtggtgttggatgtgatgtgtgtgaactgcgtttgctgctgcttttctgttaatgttagttgcatctggtgatatgctgct

SEQ ID NO: 1414 - DNA, 386 bp, Triticum aestivum
  Clone ID: LIB103-033-Q1-E1-G11
ggtacaggtctagaattcccgggtcgacgggagcttaaacttccttctgctaatgaattgattagttctcagtcaaacaatgaggcaaatggaaatctggaaagcacacgggaagtgcaggtgaacccaacgagcttatctcaatacagggacatccagagaaagattgttgagtttatcagaaagagataccatattctggaaaaatgcttggaccttgaatatgccgtgataaaaacaaatactcctgttcctgatgatcttactgaacaaaatattcctatgggacatagcccagctgttccagatatcagtgaagtgttgagagaacttccccctcttgtaccaatttctgccaaagaagtggcttctgatggctcaactga

SEQ ID NO: 1415 - DNA, 351 bp, Triticum aestivum
  Clone ID: LIB103-033-Q1-E1-G12
attcccgggtcgactatgccacatacatcctggtcctccgacctctggctagacgaatctgaagctgacgactcacaatgtgatctaattctgtcccatgtaattttgggtgctacaatcttgttagtgacattaggtgttacagccttcagggtacattccgtgtagaacaacagccatgggtgacaaagaacttgatcagcagttattctagaagagacatctcgatctaacattcgacttataagatatcgtccaagaactgacattgattcccatggagcgctgttgaaatcaagctcaactgtctttatagcttcaaagacagcttccagagagcccccttgaaat

SEQ ID NO: 1416 - DNA, 416 bp, Triticum aestivum
  unsure at all n locations
  Clone ID: LIB103-033-Q1-E1-G2
gtccagaattacgggtcgacggcaacttgacctttcaagtaacaaaatagttggccaacttccagatgcaatcggaaacatgacatctcttcagacactgaggctaggtgacaattacctctcaggtgtaaaatctgaactgttcggaaacttgtgcaacctcagctggctagagctgtggtcaaatgagatcgaccaggatatgtcagattttatggaggggtttccggtgtgtacaaagagtaaattgcggtccctagatctgtctgctaccaaccttactggcaggattccaagcagtattaagcagtggaaaaatttaagtgatcttcaactctctgagagtangcttgtgggattaatacctttgggaattggcaagatgactaatctacggtcattgattctaaacaaca

SEQ ID NO: 1417 - DNA, 385 bp, Triticum aestivum
  Clone ID: LIB103-033-Q1-E1-G3
ggtccagaattcacgggtcgacgggctgaacttgatgctggtgacgagaaaattagagagttgatatcagttttagaccaaaggaaggatgaatcaattgaacgcacatttaaaggagttgcaaggcacttccgcgaagtgttctctgaattagtgcaaggtggtcacggatacttggttatgatgaagaaaaaggatggtgatgctggcgatgatgacatggatgaggacgtgcctcgtgaagcagatcctgaagggaggatagagaagtatattggtgtgaaagtcaaggtttccttcactggcaagggagaaactcagtccatgaagcagttgtctggaggacagaagacagtggtggcattaacactgatctttgctatcc

SEQ ID NO: 1418 - DNA, 426 bp, Triticum aestivum
  Clone ID: LIB103-033-Q1-E1-G5
ggtacaggtctagaattcccgggtcgacggggaatcagattagacaacttccaaagggagtgaaagggatgacgcttccagttgttaagataaatgctcgggttgtcaaggatcattcctctatcgaaccatgcataaagtccagagcagctgagcggtcactttctagatcttcacgctcccagtcaactggaactgataggaattctgttcatgaaggtttgtctcatttgaagaaacatcatgaacatgatttacaaagtctgcagaagtccaagtctgttccaaacatcccagaggaccatgtttgcactgttgaagaattgtcagtcaaactgggtgactggtactacatggatggaactggacatgagcatggcccattttcttactctgagttgcaaaagttagttaaaaggggcacta

SEQ ID NO: 1419 - DNA, 406 bp, Triticum aestivum
  Clone ID: LIB103-033-Q1-E1-G6
attcccgggccgacgggtttctgaagaggtaagttctattaattcctttccttccaaaggcaacgcggactttattcctgcttttaatcttttccttcatctgaggcaaaaggctgaatttgctccttcttttattttcgttccttcccgaggcatggccgaatttccttttttttattccttcctaggggcttttgcaacgattgttgacgcatcttattaattttggatgacataacatatataaattggtggaatgatgtgcatcgaggcgatgtgagactatttaatataagaacatatcttttagtttatatcaaaccatgttgtagtttggtggatcgtaacttttgatacacatgcaggatctgccccagatttaatggatttacttgggccatagagc

SEQ ID NO: 1420 - DNA, 433 bp, Triticum aestivum
  Clone ID: LIB103-033-Q1-E1-G7
attcccgggccgacgggaagcaaaatattacacgcatgctcctagggggatagattggtaggaaaagaccatcgctcgtccccgaccgccactcataaggaagacaataaataaataaattatgctccgacttcatcacataacggttcactatacgtgcatgctacgggaatcacaaactttaacacaagtatatctcaaattcacaactactcaactagcatgactctaatatcaccatatttatatctcaaaacaattatcaagcatcaaacttttcttagtattcaacacactcataagaaagtttttactaatcttgaatacctagcatattaggattatttaagaaaattaccatgctatttaagactctcaaaataatctaagtgaagcatgagagatcaatagtttctataaaacaaatccaaca

SEQ ID NO: 1421 - DNA, 425 bp, Triticum aestivum
  Clone ID: LIB103-033-Q1-E1-G8
ttcccgggccgacggggagaagaagaaatccagcgagaacatcaaggtcatctacgcccgcgccaagcagtacgccgaggagtacgatgcccaggacaaggagttggttcagcttaagcgtgaggcccggatgaagggtgggttttatgtcagtcctgaggccaagctgctgtttgttgtcagaatcagaggtatcaatgccatgcacccaaagaccaagaagatcttgcagctgttgcgtttgaggcagatattcaatggagcgttcctgaaggttaacaaggccaccatcaacatgctccgcagggtcgagccatatgttgcatatgggtacccgaacctgaagagtgtgagggagttgatctacaagagaggttatggcaagctcaacaagcaaaggattcctctgaccaacaacaaggtca

SEQ ID NO: 1422 - DNA, 419 bp, Triticum aestivum
  Clone ID: LIB103-033-Q1-E1-G9
attcccgggtcgacgggcgaagtaatagatgagttccggcagcacgacagcgtggtgacggtgttggtgaagaacaatctccgcagggcttcgcctaagcaccacagaaactatgacggaggataaactagaggggacggggttgccggcacacggcttggtgtttcttgatgtatctttggtgctagcacctacccttctatttatatgttgagccttggggtcgaaacttggtgtaaaagccttcacaaagtcggtttcacccgaaaggcaagagtccttctcggactccagggccagacgctagggttcccgacgtctagacccagacgccagggaccctggcgtctggccccttggactcgccaaaacttccttttgcgctttcaaaaaaccttgtgggctttcccctttggccc

SEQ ID NO: 1423 - DNA, 374 bp, Triticum aestivum
  Clone ID: LIB103-033-Q1-E1-H11
ggtacaggtctagaattcccgggtcgacgggtcagatgatgtccatgagagggcatgccgagcggtttggcatgcccaacccaccaaagcggatcatagcaactggtggggcatcctccaatgagagcatcctcaagttgatcgcgcaaatctttggctgccctgtcttcacagttgagagacctgattcggcctcgctgggtgcagctctgagagccgcccacgggtggctgtgcaaggaggaaggaggttttgttcccatctcccggatgtacacgggcaacctggagaagacctcgctgggcgcaaagctggcggtcccggcgccgggggaggagggcatggagctcctgaagaagtacactgtgctcatg

SEQ ID NO: 1424 - DNA, 376 bp, Triticum aestivum
  Clone ID: LIB103-033-Q1-E1-H3
gggtcgagggggatcgtgaagaggagtatgacggcaatgttgaggccagtggcgacgacttctctgatgagccttctgaatagaggaagcctttccgtgcgcttttggatgttggtcgtactaagaccaccactggaaaccgtgtgtttggtgcccttaaaggagcattggaccgtggtcttgacattcaccacagggacaagagatttgctggtttcaaacaagatgataaatcgcaggatgctgagattcagcgcaagtacatctttggagggcatgttgctgactacatgaggtcactagcagatgaggaaccagagaagttccaaactcacttcagtgagtacatcaagaagggaatctcagctgatgacat

SEQ ID NO: 1425 - DNA, 413 bp, Triticum aestivum
  Clone ID: LIB103-033-Q1-E1-H5
attcccgggtcgacgggttatgtgacaaatagaccatagggtttctctagttactcctgcctcccccttcttggaatagaaatcctatggttatgttctcccaatccatgaaatctgagtaagtttcgttagatccctgtagtgtattgattgtttgaatggtacaggtgataggtgattagttgtttcatctatgcaaatgatttctgctagtaatccgaatagggttagtgttcgtgctaataattcctagccaagacttgacaattgattttgaatgacctacctatgtttgtgccattattttattcaagattggtctgtacatagatgattgtgcttaaaatcaaaccataatctctggatatgtataagtaaatagccataaattcctaatcctacttcacggcatg

SEQ ID NO: 1426 - DNA, 423 bp, Triticum aestivum
  Clone ID: LIB103-033-Q1-E1-H6
cccgggtcgacggggtagaccaggataattttgtgcatggcaggtggatcaggattgtcgacgtcccacatgtcggcgaatgaaagtattctttccgatatagaggacgagcaatgagtattcattgtttatttttgatgaaagctattgtctccattgttactccttgactttgtcaatgcctctctctcctccacataagcggggactacttgctatgcatgcagcgggcagctggcatcttgaggggccagagcggtgagagcgggctccggaagcggtccggactccagcagggcccacctcacattatcaccatatatttcttggagtccgtgcacggcgggcgagcgatctcttctccctcccccatttctctcttctcagtcgatacccgccgagcgattaaatttcggctatcga

SEQ ID NO: 1427 - DNA, 432 bp, Triticum aestivum
  Clone ID: LIB103-033-Q1-E1-H7
tacaggtcaaggaattcccgggccgacgggggtcaccatggagcccaaggcagcgtcgccaccagagccttttggcaggcaaagactgcttttgtcaggataagctgtactagctgtcccctttcaaattggtcattgttggctcccttccttgctcaatatttggggagaggaccagggcctctataaataggattagccaccacagtaggaggcaactagtctcaaacgagtctcgaactcattcagagacatctgatctttagccgatccttagtcacacacggagcacaagaacacctcacctcaggaggttgttcttccccttgtaatgtcatccatagcccaagaggcaatccaccaccaccacactcactacaaaaagaagacacttccgtgatgatacgtgtttgtcacagtaggtcatgtttt

SEQ ID NO: 1428 - DNA, 391 bp, Triticum aestivum
  Clone ID: LIB103-033-Q1-E1-H8
ccgggtcgacgggcacctgcagcctgttgatgatacactcaaaacaatggcactagaatttgctgagtatcaagtttgtgtagatgtgttccttaccacacagtcatacacagatgttgcttcgatatcagttgttcccagtaccactggtggccgggtttactactattttccattttctgctctttctgacccagccaaactcttcaacgatctcagatggagtatcaccagaccccaggggtttgaggctgtcatgcgtgtcaggtgcagtcaggggcttcaagttcaagactattctggcaatttctgcaagcgcgtccctactgatattgatttgcctgtgattgactctgacaaaaccataatggtttcccttaagcatgatgat

SEQ ID NO: 1429 - DNA, 394 bp, Triticum aestivum
  Clone ID: LIB103-033-Q1-E1-H9
ccgggtcgacgggacattttagattagctgatcttgtaggttttggcgttgccgttgccactggaaagcaatattataagagttatccagagcgatgttataaatcacgtcttactgaaattatgctcgatgagaacaggacaggtgaatcttctcataggggattttatctttataatgataagcgacaagcttctccagatcctgatatcataaagtatgttgagaaatcaagaaacatggcagctgatgaaattaacagacaaggacattgtagagatggtcatctttcccgtggtgaatgaggcctgccgagtgctggatgagggaattgcactgaaagcatctgaccttgatgtagcatccattatgggaatgggcttcccttcattta

SEQ ID NO: 1430 - DNA, 431 bp, Triticum aestivum
  Clone ID: LIB103-034-Q1-E1-A12
ctcgcgggtcgacgggacacgtgaagataatgcatagtagaagaaaaaagaacaactgaggaatttcaaaaatgaggaaaaactcaaattgaagattttcaacttttgttggtggcgtgacccaccgtataagaatgatgatttcagacaccgcgtacaattttcgtagggctctgagaatcaagttattcgttaatttcttcacacttagagggttaatctttactgattgaagaaaaacgttacgtgtgttgcacatcaaggtcataaattttgcataagtgttaggatgtgtgtccttttcaaaggacattcgaagattataggatattagctcacaccgcaacttgctaaatctcttctcatccaagggctttgtgaagatatcatctagctggtcttcagtcttcacatgctcaatagatatgttg

SEQ ID NO: 1431 - DNA, 398 bp, Triticum aestivum
  Clone ID: LIB103-034-Q1-E1-B11
gggtcgacgggtaaaaaaagactgggaagcgaccagctagagagcgacaacagttatgaacatgcattaaaattaatcaacaccgaatgcaagcatgagtaggatataatccaccatgaacataaatatcatgaatgctatgttgattttgtttcaactacatgtgtgaacatgcgccaagtcaagtcacttaaatcattcagaggaggataccaccctatcataccacatcacaaccattttcatagcatgttggcacacaaggtaaaccattataagctcctagctaatcaagcatggcacaagaaactatgatctctagttgtcattgcaaacatgtttattcataataggctgaatcaggaacgatgaactaatcatatttacaaaaacaaaag

SEQ ID NO: 1432 - DNA, 404 bp, Triticum aestivum
  Clone ID: LIB103-034-Q1-E1-B2
gggtcgaccggagcaacaaaatctgagtacagacataagttacacatgttgccataagatggctagcacaagctgggatacagatcgaaagacgggtatgcctcctgccctggatcctcctaaactactcctcgtcgttgtccgcggcctgcacatagcagtaggcacctccagtgtagtatgagtcatcatcgacagtggcgtctggctcctgggctccaacatctggtcgtaacaaccatgtatataaaggggaaaaaagggggagaaaagcaaccgtgagtactcatccaaagcactcgcatgcaaggaactacactacatatgcataggtatcaatgaaaggggtggtatatgtggactgaattgcagaatgccagaataacatggggatagcttgtcct

SEQ ID NO: 1433 - DNA, 442 bp, Triticum aestivum
  Clone ID: LIB103-034-Q1-E1-B7
gggtcgacggggacatccatggccaatattctgatcttcttcgattatttgagtatggtggtttcccaccggaggcgaactatttgtttctgggtgactatgttgatcgtggcaaacagagtattgaaacgatatgccttctgcttgcttacaagattaagtacccggagaacttctttctccttaggggaaaccatgaatgtgcctctatcaacagaatctatggattctttgatgaatgcaagaggaggttcaatgttcgtctctggaaggtttttactgactgttttaactgccttcctgtggctgcacttattgatgacaagatcctgtgcatgcatgggggtttatcacctgatttaaagaacatggaccagatacgtaacattgcccgtcctgtggatattccggaccatggtctcccctgtgatctgctatggtc

SEQ ID NO: 1434 - DNA, 427 bp, Triticum aestivum
  Clone ID: LIB103-034-Q1-E1-B8
gacgggggtaccaagaatttggcacagtctgtccaggactctgtttagattggacggtccctctttactacctttaagtggcttcttttgctgatcgggtcgagagcccttgaatccggcatttaccgttgtgttgtccgggctcttttccttgttttgacgtttgtttttattacgccgtggcttcccgttgccatcccttatttcggatgtgctgggatcgctggtgcctttacgggccagccaactatcttcacccgcgcaaaagcgggtcataaggcttgttaaggctgccattgtccttggcttttcttggccgaggtgtctggcaagccactcgtcgggatgctatgtttgaatgccgctaaggcttcggcatccggacaatcgacaatttgattcttcttagtgaggaatctgttccaaa

SEQ ID NO: 1435 - DNA, 433 bp, Triticum aestivum
  Clone ID: LIB103-034-Q1-E1-B9
gggtcgacggggcaagcaacggagactttgattatccctgcagttgacatagctaaaacaccaggtgcttaaaccgaatcacaccgaacaagggagtaccttgctctgataccaattgaaagtgctagttatcgactagaggggggtgaataggcgatttttatgaaagtattcaaaacatggaagttttgaagacaaacgatagaaatgaacctattaacatgcagcgaaaggtagactacactaagcaagccatagtcaagtatacaatgaagtgaaagcacgaagactaatagcagctaggcagtatggatcaggatggaagatagtatgaagccaattagaacaaacagtcacacagtgaagacaaacaagtaatgcaagtaggcaatgacttcacaaggaccaactattgattaagaagaaggaaagg

SEQ ID NO: 1436 - DNA, 430 bp, Triticum aestivum
  Clone ID: LIB103-034-Q1-E1-C10
aattcgcgggtcgacgggaatcactcttctgtaaaaaaaatgacagcaaatctcgtgagggcaaagtttctgttttttacagcaagatcacattgactttctcccaagtattcccaaaggtcttacttggcactttattgaaacaaaagctataaaacatgattaatacagtagcataatcatgtaaacacacaaaaacagtaagggtaaatattgggttgtctcccaacaagcgcttttctttaatgccttttagctaggcatgatgatttcaatgatgctcacataaaagataggaattgaagcacaaagagagcatcttgaagaatatgactagcacacttaaatataacctacttcctatgcctagggattttgttagcacacaatttatgggaacaagaatcaactagcataggaaggcaaaaca

SEQ ID NO: 1437 - DNA, 61 bp, Triticum aestivum
  Clone ID: LIB103-034-Q1-E1-C11
tatagtgagtcgtattaaacagcaaatcacgttagggcagcctctccgttttttacaacaa

SEQ ID NO: 1438 - DNA, 423 bp, Triticum aestivum
  Clone ID: LIB103-034-Q1-E1-C6
aattcccgggtcgacgggtattagaatactctatgtgcttcacttatatcttttgagttatatagtttttgctctagtacttcacttatagagcacggtggtaactattgttctctcatgcttcacttagattattttgagaatcctacaaaacagcatggtagtttgccttaacaataataggcattcaagattagaaaaaggaaaaattcttatgagtgtgttgaatgctatgagaagtttgatgcttgataattgttttgagatatggacatgatgatattagagtcatgctagttgagtagttgtgaatttgagaaatacttgtgttaaagtttgtgattcccgtagcatgcacgtatggtgaaccgttatgtgatgaagtcagagcatgatttatttattgattgtcttccttatgag

SEQ ID NO: 1439 - DNA, 398 bp, Triticum aestivum
  Clone ID: LIB103-034-Q1-E1-C7
gacgggccacatgatatgtgttttgcttggagcgtcattttattttcttttgtcttgcttgctgtttgaataaaataccaagatctgaaattcttaaatgttatagagtcttcacatagttgcataactattcaactactcattgatcttcacttatatcttttggagtagtttgtcatttgctctagtgcttcacttatatccttttagagcacgacagtggttttattttatagaaattattgatctctagttcttcacttatattattttcagagtctttagaacagaatggtaatttgctttggttatgaaattagtcctaatatgatgggcatccaagagggatataataaaaactttcatataaagtgcattgaatactatgagaagtttga

SEQ ID NO: 1440 - DNA, 423 bp, Triticum aestivum
  Clone ID: LIB103-034-Q1-E1-C9
aattgccgggtcgacgggcaatcttagagcatcttttgcatttagttttcatttttattttatgcaccatgctggtatgagatagtccttggtttatttatagaatgctctatgcacttcacttatatcttttgagtatggctttatagaatgcttcatgtgcttcacttatatcatttgaagcttggattgcatgtttctctttacatagaaaacctccatttgtagaatgctcttttgcttaagttatatttgttagagcatgggcatatcttttgtagaaagaattaaactctcttgcttcacttatatccatttagagagatgacaggaactggtcattcacatggttaatcataaaatcctacataaaacttgtagatcacagaatatgatatgtttgattccttgcaatagttttgc

SEQ ID NO: 1441 - DNA, 425 bp, Triticum aestivum
  Clone ID: LIB103-034-Q1-E1-D10
attcccgggccgacgggactcaaaaaacctctcgaacagcgaccagtctctcgcctcgtcatgacagtcagttttagctttctctactgaggtgctcagcccagctcaactggggcacaatcgcagtagttctcctagtgctaccttagccaatatagcggaacgtaaggcaccaaaacataggagccgtgcaaacccaactattgacccaaatcatgattcagagccgatgcatatagtgctataagttcggggtgccgcacttgtgaaagtgttcggacttctcacaccatattgaggggtactggagcccctggcgtatttgccgtaccatagtgtacgggtgtagcatgttattaatgaacatatatatgaaaagagattaatgcaaaagatagacaaaaagctatgcattgtttataaaa

SEQ ID NO: 1442 - DNA, 417 bp, Triticum aestivum
  Clone ID: LIB103-034-Q1-E1-D6
attcgcgggtcgacgggggacatgaggagcgcgaggaaggagaaggagggaggaaagaagagccaccatggttctttttgtccgatgttagactatgggctatctttttccataagccgtcttgcttattcattggggcttctaaactagttatgaaatagctaatttagaagtctcaacaaatctagagggcaacttatattttaagccggagagaggcatcttattttgtaagccactcaaaagaactagccctacaaataagatacacacatttacacacacacatatgctaaatgtcacttgtctgaagatgaatttggcactacttgattatgcgtagagcatcgacaacgcgacccgtcatggtgtcccatcggagatgtgcctggaacgagtcagagccaggcgagacat

SEQ ID NO: 1443 - DNA, 423 bp, Triticum aestivum
  Clone ID: LIB103-034-Q1-E1-D8
attcgcgggtcgacgggagattaaaatgatggaaaatagaccccaggaccataggtttcactagtggcttctctcaagatagcataagtattacggcgggtgaacaaattactgtcgagcaattgatagatttgagcatagttatgagaatatctaggtatgatcatgtatataggcatcacgtccgtgacaagtagaccgactcctacctgcatctactactattactccacacatcgaccgctatccagcatgcatctagagtattaagttcataagaacagagtaacgctttaagcaagatgacatgatgtaaggggataaactcatgcaatatgatataaaccccatatttttatcctcgatggcaacaatacaatacgtgtcgtttcccctactgtcactgggatcgagcaccgcaag

SEQ ID NO: 1444 - DNA, 429 bp, Triticum aestivum
  Clone ID: LIB103-034-Q1-E1-D9
aattgccgggtcgacgggatgaagtctcacgactgtcacgtgctgatgatgcagatacttccagttgcaatccgtgggatcatggatgcgcacgttcgtgaaacgctatttggcctatgcaactttttcgacgtcatctctcggaagtcggttggcgtgaggcaactcagaaggctacaggaagagatcgtggtgatactatgtgagcttgagatgtactttccgcccgcattctttgactttatggtgcatctactggtccatatcgtggaggatatcatccaactcgggccgacgttccttcacaacatgatgccgtttgagaggatgaatggtgtcatcaaaggatacgttcgcaacatgtcacgtccagagggaagcatagccaggggctttctgaccgaagagtgcatctcctactgcatgaat

SEQ ID NO: 1445 - DNA, 414 bp, Triticum aestivum
  Clone ID: LIB103-034-Q1-E1-E10
gactttagtagaacgacaagacaccattgttgagcacgaaataatgacacaattgagctggagcttcggtcgagggagtagatgtgtatttatatgcgcgttcatcggcctctggaacagccaaaggagaccctgccagagttcctgccgggctccccatggacgcaggaagtgtttgtgtcagagaaggtttcaagcgcaggaaggattggatcaaaaattggaacgattgaatgaaagaagaggaaggagattgtgttggatcaaaaagaagagaaagaagacctggtctgccgtggaagggcatcgagctgctgtgctctacaaaggaagaagcaagagaccggatctgttttttttttttgagggatggagaccggatctgctgggtaacgcatcagcgtatcctttttg

SEQ ID NO: 1446 - DNA, 423 bp, Triticum aestivum
  Clone ID: LIB103-034-Q1-E1-E11
aattcgcgggtcgacgggcattcaggctcttgcagcgaggcctgggggtccaccattcctaagaatcactggtatagatgactcaaactctgcttatgcccgaggtggtagactggatatggttgggacaagattgcacagtgtgtctgcatcgtgtggcctgccctttgagttcaatgctattcatgctgctagccatgaggtttatattcagcatcttgacataagacctggggaggctattgtagtgaattttgcctatcagctgcaccatactcctgatgaaagtgtgagcatggaaaatcaccgggacaggatcgtaagaatgatcaagagcctgtcccctagggtggtgactcttgttgagcaggagtcgaacacaaacacaagtgcattcttgccaaggtacttggagactctcga

SEQ ID NO: 1447 - DNA, 423 bp, Triticum aestivum
  Clone ID: LIB103-034-Q1-E1-E5
taccgatccagaattcgcgggtcgacggggggtataataaaaactatcacagaaagtgaattggatgctatgatcaatttgatacttgataattatgttgagatatggaggtaatgatattatagtcatgctagttgggtgattatgaatttaaagaatacttgtgttgaagttggcaagttctgtagcatgcacgtatggtaaaagttgtgtaacaaatttattgcatggggtgctcttttgattgccttcccttgagtggaggtcgggggcgtgcaatggttaactcctaccaacctcccccctaggagaatgcgtagtagtactttgcttcgagggctaataaaacttttgcaataagtatatgagttctttatgaccaatgttgagtccatggattatacgcactctcaacctttcaac

SEQ ID NO: 1448 - DNA, 432 bp, Triticum aestivum
  Clone ID: LIB103-034-Q1-E1-E6
taccgatccagaattcccgggtcgacgggctactccagtgtggtggtggtggattgcctcttgggctgatgatgaacagtacaaggggaagaacatcctcctgaggttgaggtgttcttgcgctctgtgtgtggatgaggatcactcaagatcagatgagatgcctccgaatgagttatctcctacggtggtggctagttcaacttatataggccctggtcctctccccaaatattgagtggaaagggagccaacaatggccaatttgaaaggggacagctagtgtcacgaccggtttttcaataaaataattattgagaaaccaatccctattatggatcagcgaggaagaatccttctcactgatagacaatacattggtcacaaaaaataaaagaaagaaaaaaaaaaaaaagcggccgctctagagga

SEQ ID NO: 1449 - DNA, 411 bp, Triticum aestivum
  Clone ID: LIB103-034-Q1-E1-E7
attcccgggtcgacgggatggcgaaagggtggcctgagacggtgaagcacgagctgcacgagcacgagctcgtgctgatccgccgccccaggccatacggctgcgacgggtgcgaagagatgggcacctcctggtcctacaactgcgcggagtgcgacttcgatctgcacgccaagtgcgcgctgggtgaggagaagaagggagaggaggtgaatgggcaggagcatgccgctgccccagctgggtacgtgtgcgagggagacgtctgcaggaaggcctaggtagcgttagcgttgtgtgtgttccttgccagctgaatcgtgtctgaatcatgtcctgtgtggtgtgatgataaataaatcttgcatccgatgatttggcttgggaagtatttgtcgtggtgacatttat

SEQ ID NO: 1450 - DNA, 414 bp, Triticum aestivum
  Clone ID: LIB103-034-Q1-E1-E8
aattcccgggtcgacgggatctgctgaggaaaatgatgatgaggaggatgctctggagaaggaagaggaggatgacagcagcctgaatgaggaagagaatgatgatggtgctgagaacaaggctggagaagaggatgctgtcgtcacaatcgtggttgaggccaaggatgagctgaagaagcctctgaagcgcaagggagctgaggaggaggccaaagatgagaagaagatcaagaccactgctgctgctcctgatgtggaaaatgcagctgaagaagacaccgagatggttgaaaaggaggaagaagaaggtgcccagaaggctcagaagaagcgcaaggggcgtgctggggctgcaggtactgcagctggcggcggtaagaggaagagggccagccctgctgctgctgaaga

SEQ ID NO: 1451 - DNA, 417 bp, Triticum aestivum
  Clone ID: LIB103-034-Q1-E1-E9
attcgcgggtcgacgggtatgcacaaaaaatgcattgaaaagtcagataatgcataaaaatgtccaaacgaaccccgagaaatcacaaaaaatcacacaacactcctgttgttcaatgttgacacgagaaaaaaaattgaaagcaataagaggcaatggatatcatttcgtccacaaaggtgggacgttccctaccgaaaaccatcatgcttgttgtgacaagctccggtttgtgagaagcatatacccatacctgccccaaatgggacaaaatttgtaccacggcatgttgatgccgctctatgatagcatgccaagtttcatgaatttcacacgagttttggaattactagaatttaaaaaccaggcatctcaatgttttgccggcaatcaacggtgtcccggtgtttgaaattc

SEQ ID NO: 1452 - DNA, 415 bp, Triticum aestivum
  Clone ID: LIB103-034-Q1-E1-F10
attgccgggtcgacgggcaaaaagttccggatgttcccacagaatcaaatgggcaagaagaatctgatgacattgccagtgcttctgatgctacggctgtttctgcggaggaacatgacaagtctgatgaaagccctgcttctacacctgccgaaagtaacgactcgactgctgaaattcttttcaatccaaatgtatttacggagtacaagcttgctggcagtcctgaggagattgaagccgatgaagctttggttaaaaaggttggttcgtatctgctagatacggtgatcccgaagtttgttcaggatctttgctctcttgatgtctcccctatggatggtcaaactttaactgatgtgctgcatagcaatgggataaatgttaggtatctgggcaaagttgcaggcatgat

SEQ ID NO: 1453 - DNA, 441 bp, Triticum aestivum
  Clone ID: LIB103-034-Q1-E1-F11
taccgatctagaattcccgggtcgacgggcggggttcactctcggtgtccagtccagtcccaggtcgccttgccagcttgctcaagtcaatcaacaagttgcctccccgggttgctatgaccggcgatgtcctgcgcatgaaggagacaaagattccagttatagctgaaagctttaagaaagctattctgaaggaacataaagctgctagcgaagctacttatggggtatcaacggtattgtcttccgcaagtgctacttgtaggtcgcgcagcgaaggtctccttagcttactcaatgaagagagctcctacaatatcttgaagtttgaaattggctcgtgtgtcttcatagattcattggggagcagccataatattgagttggatacttttgaaccaccaaaagccgacctgctattgccattctctgcgaagctta

SEQ ID NO: 1454 - DNA, 418 bp, Triticum aestivum
  Clone ID: LIB103-034-Q1-E1-F12
attcccgggccgacgggttaacttaaaggggttaaagcgaacaaaggacgcagagagttttatactggttcggccccttgcagtgaaggtaaaggcctaatccagtcgttgtggaattgctagggtttcgatgaccagggagcgaaccctctatgcctggctctcgagttgttgtttcttgtccctaaaccgccgcgggtggtccctttatatccacaggttgacgcccggtggtttacagaatcccgagggcggctcataaatgtgtccggctcggtttctacctttcttatcttacaacacaagttacatatgatgtggtggtttatgtctacaggccataacccgcctctgggccctgggccttcgtaaagcgccacactccttgtcttcatgggcttcaaatatgaataactca

SEQ ID NO: 1455 - DNA, 392 bp, Triticum aestivum
  Clone ID: LIB103-034-Q1-E1-F5
aattcccgggtcgacggggaactgcaaactatgcagtcgtctctctgcaaaaacataaaataggaaaacatgactaacaatgtgatcaacacgacttacatcataactacctacatatgcatcattatcaacatcgggggtggtggagtttgactgcatcatgccagcttctactcagtggccatcctaactactactgcaagtaactcttttgacgtggcacacaccattccacatattcaccatatcaatacatcactatggaacctgctcccgtctccctattacaaagccatccatagcactcacacttatcttgcgacttttacagttcccactttcacttgtctatgaactgttatatgcaacgcacaagtcctttaccgtggaca

SEQ ID NO: 1456 - DNA, 423 bp, Triticum aestivum
  Clone ID: LIB103-034-Q1-E1-F6
aattcgcgggtcgacgggatcgatcatcttggcctcctcccggcctcctctttctcgtcctgctacactggagtcattttcgacgtcgatcatctcagctcctctctctcattctactacactgatgttaccatggcgtgagcactgcatttcttctcctctctccactgtctttgtgcaagcactccaactagttcgccgacagggtcgctcgcccatgacttcgtgctcgtcatgtcggacacggcgccacgatcactatccaccgcagtcgccatggtccggtgcacaatgcatttcttctcccctttcctctgctagctcttaaccatgtgtgctaagtgcaagtgctagctcttaatcataccccatgcgggcaaccaaacaacgtgtagttgcagtggcgaacgcaggaataatttc

SEQ ID NO: 1457 - DNA, 413 bp, Triticum aestivum
  Clone ID: LIB103-034-Q1-E1-F8
taccgatccagaattcccgggtcgacgggcaaatgacaggaagtcactacaacgagctctggataataagatatatcttctcctgtatggcaaaacttttggggctcctgatggcaaacctgtttggcatttcccagaaaaagtgtacgaaaatgaagactctttgcgtttgtgtgccgagtcagccctaaaatctgttctcggcggacttgacaatacatattttgttggcaacgctccaatggctcacatggtaactgaacaaaaagaggattccagtgtttcgccattcaagcggttcttcttcaagtcgcaagtgatcggcaccacgcatttggacatcaggaggtgcgaagaccacgcgtgggtgaccaaagctgagttgctggaatattttccggagcacaaggatc

SEQ ID NO: 1458 - DNA, 303 bp, Triticum aestivum
  Clone ID: LIB103-034-Q1-E1-G1
agtgagtcgtattaaaaggctcaccatgtcgcagaagctcaccctcgcctactccgcgctcatcatagctggtggcataatgggttacatgaagagcggaagccatatgtcattggctgcaggaggcatagcaaccctggtgctgttcttcgttcacactcaacgtaccagtgagacgcgtctttgcgtcatcgatcgggttatgtatatctgctgcactgctgtcagtcatggggtctcgcttcaggaagtccggaaatatattccgcagccggcgtcatgtcccgccttgccgtggtgatg

SEQ ID NO: 1459 - DNA, 409 bp, Triticum aestivum
  Clone ID: LIB103-034-Q1-E1-G10
gggtcgacgggtgaagaagacgcatcttgtcaaggctgctggccccggcggacaaaggcgggagcggctgctgcgcgagaaccgacgtgagctgtgtgcggtggtgtcataaggagcctgtcgatctccactagagttatcccaagtttcacttcacatcgtgatgttgttttacctttttttcatgtcgtcgtcccgctgcctgctataacggacagcgctccctgttggcgccgccgccggcgggggtggtgccctggcggcggatggtgtatgtcctctgccgccgggtgctcccctgcttgtacctagatggttggttactctttccgtccattgtcaccggctaagattgtgataatatcaatctgggtaatgtcaaaagtgtcgtttcccacggaaataaaaa

SEQ ID NO: 1460 - DNA, 411 bp, Triticum aestivum
  unsure at all n locations
  Clone ID: LIB103-034-Q1-E1-G3
gggtcgaccggtaagatggaggtgttgtccgaacagtggttgctcggctgcgaccatatgaccttttcctattgtattatcagctgtgtgacgagaggatagaccgaccaatctgaagctgctactcccttttgtccctaagcagaacaagttggcatggagcagtctgttctaaaagtaatgtatccatatgttactgccaatcaggatagggacatgagttttaacttcctctggttgtgaggagataataaagaagctgagagatcgactgtttgagaagcgggttcaggagatcaaagccaacaacaacctaggctttgaaaaagatgtttacaatgaaaaactgaggaagttgtgatggactgaaagatttgcttgaagcanaggcatccacctgngatatatatg

SEQ ID NO: 1461 - DNA, 430 bp, Triticum aestivum
  Clone ID: LIB103-034-Q1-E1-G5
attcccgggtcgacgggaggaggaaaagatgggggaggggctctccatgtcgcagaagctcaccctcgcctacgccgcgctcgtcggagctggtggcgtaatgggttacatgaagagcggaagccagaagtcattggctgcaggaggcatatcagccctggtgctgttcttcgttcacactcaactaccagtgagacccgtctttgcgtcagcgatcgggttaggtatatcggctgcactgctgtcagtcatggggtctcgcttcaagaagtccggaaagatattcccagccggcgtcgtgtccctcctttccttggtcatggtcggaggctacgcccatgggattatgcgtagctcgcatgcgtgatgcagtcagtgcggttaccatatgcacctccggacttagacttgcgagttccttttccttttt

SEQ ID NO: 1462 - DNA, 420 bp, Triticum aestivum
  Clone ID: LIB103-034-Q1-E1-G6
aattcgcgggtcgacgggcagatagagctgctgaaacagaagctcaagatgatatgcctcggcgaggccttcaacgggaagatcaccaagacggcacgatcccatggcaagaagttccaggtctcgatccagcaggagatgtcacgcattctgggtaaccttggctgggcttacatgcagcagaacaactatgaagccgctgaattggtttatcgaaaggcccagactatcgtacctgatgccaacagggcgtgcaacctcgggctgtgcctgattaagcagggcagacatgaggaggcagtgcaagtactcgaggacgtcctacttcgcagaatctcagggttggatgacgacaaggcggttgcccgagccgagcagctcctccgtgagctcggtccgacaacacatgtttcatcgccc

SEQ ID NO: 1463 - DNA, 422 bp, Triticum aestivum
  Clone ID: LIB103-034-Q1-E1-G7
taccgatccagaattcgcgggtcgacgggcgacggtagaggcgcccacatcaacctcaaggtcaaggggcaggatggcaatgaggttttcttccgcatcaagagatccacacagctgaagaagctgatgaacgcttactgcgaccgtcagtctgtggatctcaactccattgctttcctttttgatggtcgtaggctccgtggtgagcagacccctgatgagcttgagatggaggaaggcgacgagatcgacgccatgcttcaccagaccggagggtgctttcctggcccttagaaggagcttgctgcagcctggctgttctatgtcgtatgctacctttagaactagagtaaaatgtaagaagtgaaagaacttgtgaggctatggttctgtgccatagcctgatggggggtctggaggtg

SEQ ID NO: 1464 - DNA, 453 bp, Triticum aestivum
  unsure at all n locations
  Clone ID: LIB103-034-Q1-E1-G8
attcncgggtcgacgggaggacgcctccctactcaccccagtcaaacggggttgccaagcggaaaaaccgtactctaactgatttggttaacgtcatgttagatacatcgggtttatccaaggcatggtggggggaggctataatgacatcatgtcatgtcctgaataaagttccgacaaaggataacgagatcactccttatgagaagtggaccaagagaaggacaacactctcgtacttacgtacttggggtctgcttggcgaaagttaatgtgccgatccccaaaaagcgtaagcttggaccaaagaccgtggactgtgttaatttgggctacgctatgaatagtgttggctatagatttctagtagtgaaatctgaggtacctgacatgaaggtcggtacaattatggagtctaaggatgctacattctttgaaggacatttccccatg

SEQ ID NO: 1465 - DNA, 385 bp, Triticum aestivum
  Clone ID: LIB103-034-Q1-E1-G9
aattcgcgggtcgacggggaagggcaaccgcgcgctgcgcgacgcagcaatgatgggtggccgccatgtcctgcagtgtttcttcagatctgaattatgaacggggtgagaaagaagaaagcgaactggatggacgaggatcctacggctcgtggtgggctaatcgggcggctagggtgcgaccggccgaaattttgggccggcgcaccggcgccgatcagtcgccttttttctggctgatgtatgcatgcttttatagtttgagcgatggtggttcacttttaagctaacttgggtgattcgttacccaaaattgtaccaaaaaaaaaaaaaaaaaaaaaaaaaaaaaaataaaaaaaaaaaacaaaaaaataaaaaatgaaaa

SEQ ID NO: 1466 - DNA, 450 bp, Triticum aestivum
  Clone ID: LIB103-034-Q1-E1-H5
taccgatccagaattcccgggtcgacgggagattaatatgatggaaaatagacccgggggccataggtttcactagtggcttctctcaagatagcataagtattacggtgggtgaacaaattactgttgagcaattgatagaaacgtgcatagttatgagaatatctaggcatgatcatgtatataggcatcacgtccgcgacaagtagactgaaacgattctgcatctactactattactccacacatcgaccgctatccagcatgcatctagagtattaagttcataacaacagagtaacgcattaggcaagatgacaagatgtagagggataatctcaagcaatatgatataaaccccatctttttatcctcgatggcaacaatacaatacgtgtcgtttcctcttctgtcactgggatcgagaaatttaacttgtgtttgaataaa

SEQ ID NO: 1467 - DNA, 393 bp, Triticum aestivum
  Clone ID: LIB103-034-Q1-E1-H7
attccgggtcgacaggacaaaatagacggtgcaagcatccgtactatgatgcgatgcacgcgatacgggttcactgtgtcggtggaaacatcaaacttagctgaatttcttttcaccttcgtcagttatatactcactagctgaactctgtcccacagcgcaactgttgtacgtgcatacataggatgtatggcttgtcataactaattatgacttcatatgttgcctaaaaaaaaaaaaaaaaaacaaaaaaaaagcggccgctctaaaggatcaaaccgtagctctacatgatataaacttacgtactcttccatgcgagtctcatagctcttactacactgtcacctaatttcaattcatcggcagtcgtataacactgtcgtgactggg

SEQ ID NO: 1468 - DNA, 420 bp, Triticum aestivum
  Clone ID: LIB103-035-Q1-E1-A3
cgggtcgacggggcaccacacagcaatcatgtcatggaggaggtggtttggagcagtgagtgagtggggcaaggagtgaccagtaacagggcaggtatttttctgtgcaagggaccactgttggcatgatttatcaacagtctgcaatcaagcaaagcaaaacgtggttactgggtcaatctaaaccatgggagtgttccagaagaagcacaagacactgtgaataaatttattataataattgatcatgaccactaatgaccaaccttagcattctggaacaagaaaaggacataatacagcttacataaaacctacacccatgcgaccatccgatgaatgtaagcacagcatgtcagtttcactttcaacttatccgtgggacatagtatttccttggcagaaaatgggaaaaaagat

SEQ ID NO: 1469 - DNA, 365 bp, Triticum aestivum
  Clone ID: LIB103-035-Q1-E1-A6
ggtccagaattcccgggtcgacgggatgacgaaggtcatcccctacgcgtttgtcataggctctatacggtatgccatgccaactaccgcacctgatgtgtgccttgccacatgtctggcaagagggtacatgggtgatccaggagtgggtcaccagataccagtcaaaattgaccctggagtaataacgacatgtttctcgattatggaggtgataaaaagttcggcgtaaagggttacatcgatgcaagctttaacacctatccgactgactctaagtggcataccggatatgtataatggagcaactagttggaatagctccaagtggagcgtggaagcagcatttataatatgccaaagca

SEQ ID NO: 1470 - DNA, 404 bp, Triticum aestivum
  Clone ID: LIB103-035-Q1-E1-A8
ggtccagaattcccgggtcgacgggtatgtgtattgcttggagcgtcgtgtattatattagtctttgctttttagtttaccacaatcatccttgatgtacacaccctttgggagaagcctatttgattagaatttgctagaatactctatgtgcttcacttatatattttgagcttgatagtttttgctctagtgcttcacttatatcttttagagcacggtggtgtcttaattttgaagaaattgctagtctctcatgcttcagttatattattttgagagtcttttagaacagcatggtattttctattatcataaagttggtcctagaatgatgagcatccaagttgagtataataaaaactatcatacgaagtgaattggatgatatgatcaacttgata

SEQ ID NO: 1471 - DNA, 419 bp, Triticum aestivum
  Clone ID: LIB103-035-Q1-E1-B1
ggtcaagaattcccgggtcgacgggattcgaaatttcgggaagcgcgcgggacggagaggaccgcagtaaacggagcggattaggcaggggcgcctcgattcttgcgccacctttttcaccacgtaccgagcgcgcgactgttgcgggatttgacgggattgccttggcccacaagtcagtcactcggcgaataggcctatataaggcgtctgggccggtgttttttgcacagtgagtcccattttctttctcctcctctacttctccactgcatccgcctccactctcggcgccatcgcccagcctgagcgcaacccgctgcgatggcgaaggacaagacggcggctctggagcgtgcgaagaaggcgaccgcgaaggcgaagggcaagaaaacgagccggggagggtcgtcgtccag

SEQ ID NO: 1472 - DNA, 390 bp, Triticum aestivum
  unsure at all n locations
  Clone ID: LIB103-035-Q1-E1-B2
taccgctccagaattcncaggtcgacgggatgcattacaacgacatggtctatgatgctgtcatgcatatcatgctcaatgcattagtgattgagtcgcaacaaaggatctgactagtcgtaggggttcttgaagcaggtgtgctcccaacccctcttcttttggttcgttacagtacatgggtaattagaatgtgttgtgagataggaaggttcttttgattgcttcggcattttggttacgtgccagaaatcgccatcagattgctcaaccttagagtgtaatatagggacatcttagaaccacacagtttttggctgaatggtaaacggagatgatgtattgtatactttttctcgggtaataactaagatggtgattctgacatgt

SEQ ID NO: 1473 - DNA, 424 bp, Triticum aestivum
  Clone ID: LIB103-035-Q1-E1-B3
ggtctagaattcccgggtcgacgggtagctggaacatcaaatagttctgattctttttgcactgtcttcctatacaaattgtttattttgcctaattttggtagaatttttaaagtatcataagtatggtgaatgttcaaattattacagactgttctgttttagacagattctgtttttgatgcatagtttgcttgttttgatgaaactgtcaatttatatcagtggattaagccatgaaaaggttatactacagtagaaacaatgcaaaaacaaaatatgaattggtttgcaacagtacttagagtagtgatttgcttcattatactaacggatcttaccgagttttctgttgaagttttgtgtggatgaagtgttggatgattgagaaggtttcgatgtgagaagaaggaagagaggcaag

SEQ ID NO: 1474 - DNA, 385 bp, Triticum aestivum
  Clone ID: LIB103-035-Q1-E1-C1
attcctagtcgacggggacttcaatgactttcagaggattggcctggggtctggaaacagcttcccactacctgagaattggaaggctgatgtcttacaggcacagcgacctggacataccccatcccatgaggttttacaggtttatttaacctcttggcttgctaatgtgaacatcaagacgagtagaattgacgagatatttgagcttgttgaggaagagatgcagatcaaattgcgttgaagatttcgattcatagaatttaagtgggaaccattcgggaatgttcaggggttctttttcattaacggaagtgatttacgcgaaaatcatccacttagactcaaaacaaaaagaggccgctctagaggatccaagcttacg

SEQ ID NO: 1475 - DNA, 157 bp, Triticum aestivum
  Clone ID: LIB103-035-Q1-E1-C10
caagcacctcaacaatttcaataagggcctcccctcccaagccccaaatagatggcgcgcaccgccattcgagatggcggcggctctaaagggtccaagcttacgtaggcgcgtatgcgacgtcatacctctgcaatcatgtcacccagattcaatt

SEQ ID NO: 1476 - DNA, 409 bp, Triticum aestivum
  Clone ID: LIB103-035-Q1-E1-C3
attcccaggtcgacgggacaattaaggccaggcagatgatgtctggtgatgaacttatgatgtctgcggaaggtcggagctttgtggatggtggcatgaaggagatagaagctggaggtggaggatacagaagaggggcaaatgatgacttcatggtttatggacaggacaactcaatggacaggaggagctccttggacccccttgccgaggcgcattacaagagactcactcctctagaggaaaagaagaatgtgcacagtatgggcgatgagtccttcatgatacctgttacctccaactcacaggataatcttggagcagccggccgtactgccattgacatagatgccgagcttggctcaagtgttcagaaaacatcagatgctaaggctggagctgaactttt

SEQ ID NO: 1477 - DNA, 344 bp, Triticum aestivum
  Clone ID: LIB103-035-Q1-E1-C5
ccggtcaagaactcccgggtcgacgggaaatgataatataaagtatgctgctgttgcatgagttaagtcctctcagcgtgatccaaacaaatccaaaaacaattaatttggaatggaggtaatacaaaccaaagtaatttgcccaacaatcaccaagccacatacatgcaacattgtaccgagtaggcaatcaaactttcttttgacattgattaggaaaaaaatggcatgacttcatgtgcgaccactaaaactgtgtgagatacccttttttgtaatagatgatgcgtcatcaacacatcctgatagtgagctgtgtttgaccctagggatattgcctctgt

SEQ ID NO: 1478 - DNA, 449 bp, Triticum aestivum
  Clone ID: LIB103-035-Q1-E1-C6
ggtcaagaattcccgggtcgacggggccccgtaccctgggcgtccggattcatcgaagatttgtgtccgccagccggtagagctaacgtcgagctccccaacaaaccacccgtacttggaattgatgcagtcatgtcttatctctgttagaagctactaggtgccatggatctcaggctctcagctcaagctccgtgtcgggacgagctctggtgcccttgctcggcgagtactttcagatatgcacgtcgtcgatagtggtgaatccatgctgcaatgaacacaacaacattataggaccccgactgttagcttttttgacaaaggggatatactaatatcgtgaagatatcaattacacccagcctttgcatcaacacagacaataagcatgcacacaaccaaggagaagaaggatttttcgggacaaataaaaaaggggccgctct

SEQ ID NO: 1479 - DNA, 400 bp, Triticum aestivum
  Clone ID: LIB103-035-Q1-E1-C8
ggtcaagaattcccgggtcgacgggcattgggacgttcaaggagcagttgatgtggacattggagccaatccctctgctgagggtggtggtgatgatgagggtgtcgatgaccaggccgtgaaggtggttgacattgttgacaccttccgtcttcaggagcaatctgcttttgacaagaagcagtttatctctcacatgaagcgctacatcaagaacctctctgccaagcttgaaggggatgacctagatgttttcaagaagaatgttgagtctgccacaaagtatcttcttagcaagctcaaggaccttcagttctttgttggcgagagcatgcatgatgatggcggcgtggtgttcgcctactacaaggagggagctgctgatccaactttcctgtac

SEQ ID NO: 1480 - DNA, 388 bp, Triticum aestivum
  unsure at all n locations
  Clone ID: LIB103-035-Q1-E1-D10
attcncggatcgacgggggaccgaaagcagcatggggggcgtcctcttgtttgggaacgtaatggaactgcaaatatgactggcatcggcgaccaggatgcaaatggaagtggttcccaaagaccttggaaaggacttaaagacaataactttgcaatgctaaatggcacgtgagcaaaggatatcaagaagcttttggatgttgggaagcttggagctgatgcttcaaataagctgatggttgtcttttggagatgtttctatgtttaatgctttaaagtcttttggctgtactggactatttaaactttgaactatgctgtgatggttgaactgatgctggacagttaacggttatgtcagangcaactttataactaatgtgtgt

SEQ ID NO: 1481 - DNA, 422 bp, Triticum aestivum
  Clone ID: LIB103-035-Q1-E1-D5
ggtctagaattcccgggtcgacgggtacggctacgagagagagggagagaggaggaggacggagttcatgtgtgacaaagacacaaagagtgtgtgtgcgagaggtatcagcttaaaatgaggtgatagtgtgtgtgtgcacgatcgagagggcgtgtctcaagaagggacgaaaaatctacatagatacaaggagcgcgagagagacatgtacgcgatagtggaagcacgagtgtgcgggtgtataaacctatctggaggctagtcgatcaatgtttgtgagagaaatacgagtcgggtgtgcgaaagtgagagttttgtgtgtgtgtgtgagagagagagagacggtagtcgggaaggggagtggaagcaggagttgtgtgtgtgtgtgagagagagagagagggggggggagagttttt

SEQ ID NO: 1482 - DNA, 398 bp, Triticum aestivum
  Clone ID: LIB103-035-Q1-E1-D6
ggtcaagaattcccgggtcgacggggagaaagaaatgcctttgtatcagatgatgaagaaaacagatgattttgtttggagtgatgctgcgaactctacctttgaggatctgaagaaacagcttgctgagccaccggttcttgctgctccaattgagaaagagccgctattgttgtatgtagccgctaactcacgggctgttagtgtggcaatcgtggtggagcgcaaagaggttggcaatgaacagccagttcaatggccggtttattatgtgaatgaggtactgatcgaatctagacatagatatccacattggcagaagctcgtgtacggggtgttcatggcaagccggaagctcaagcactattttcagggtcacccgatcactgtggttagct

SEQ ID NO: 1483 - DNA, 379 bp, Triticum aestivum
  Clone ID: LIB103-035-Q1-E1-D7
gacggggagagctaaatgccttcgtatcagatgatgaagaacacagacgattttgtttggagtgatgctgctaactctacctttggggatctgaagaaacagcttgctgagccatcggttcttgctgctccaatttagaaagagacgctactgttgtatgtagccgctaactcacgggctgttagtgtggcaatcctggtggagcgcaaagaggttggcaatgaacagccagttcaatgggcggtttattatgtgaatgaggtactgatcgaatctagacatacatatccacgttgacagaatctcgtgtacggagtgttcatggcagtccggaagctcaagcactattttcagggtcacccgatcacggtggttagct

SEQ ID NO: 1484 - DNA, 362 bp, Triticum aestivum
  Clone ID: LIB103-035-Q1-E1-D8
ggtcaagaattcccgggtcgacgggctccagcagcgctgcgccggatagcgtatgacggatagggccggaagaggccagcagcatgatcatgagcatggccgctggtacgttgcttggcgccatattttcttgttaagctgcacggtttgaatgctccaataccttcttgcttaattagaacaagaaggtcccctggtacttcattttcttggtatgaataatacattacgagcgatcaacctgtatgatggttatccttggatggacgcgtctcaatataatctctctctcagtgcacatttagacactctatcatggatagataacaatgtcctactcgtgtctctttttctttcccttt

SEQ ID NO: 1485 - DNA, 384 bp, Triticum aestivum
  Clone ID: LIB103-035-Q1-E1-E5
ggtcaagaattcccgggtcgacggggaagaagaccaaggcggagaagcgggcgccggcgaccaaggaggccggcggcgaggggaagacgaggggcaggaagaagggcagcaaggccaagaagggcgtggagacgtacaagatctacatcttcaaggtgctcaagcaggtgcacccggacatcggcatctcctccaaggccatgtccatcatgaactccttcatcaacgacatcttcgagaagctcgccggggagtccgccaagctcgcccgctacaacaagaagcccaccatcacgtcccgggagatccagacctccgtccgcctcgtcctccccggcgagctcgccaagcacgccgtctctgagggcaccaaggccgtcacca

SEQ ID NO: 1486 - DNA, 449 bp, Triticum aestivum
  Clone ID: LIB103-035-Q1-E1-E7
ggtcaagaattcccgggtcgacgggttgattcattgcaatagttttgctatataaagatggtgatattagagtcatgctagtgggtggttgtggattgtagagacacttgtgttgaggtttgcaagtcccgcagcatgcacgtatggtaaccgttgtgtgacaaatttgaagcatggggtgtttctttgattgtcttccttatgagtggcagtcggggacgagcgatggtattttcctaccaatctatccccttaggggcatgcgtagtagtactttgctttgagggctaataaacttttgcaataactatatgagttctttatgactaatgtgagtccatggattatacacacttttacctttccatcattgctagcctcttcggtaccgtgcattgccctttctcaaccccaaaatttggtgcaaacttcgccggtgcatcaaaacc

SEQ ID NO: 1487 - DNA, 449 bp, Triticum aestivum
  Clone ID: LIB103-035-Q1-E1-F5
ggtcaagaattcccgggtcgacgggcgggctcaaattccatcgacacgaagcaaaagaacactaccggcggcgatgaggggcatcttgagggcggtcgatccccagcggcgacagcgacaaggtgcggctcttctcaacggatctgcagggatggtgcggcctagcggtgattgagggtgcaaaatgcctcgccgacgctattccaccggctgatttggccggaatcggtggcggaggacgggcggaacttgtggcgggcggcggcggaaggaggtgggcaaaggggcacgggctgaaatgtccctccagccaaatgcttcactgcgatatggggcaccgcagggacgaggcggaaacccgcgaacacgcgggttagggccgagtttttgtcgcgcccctcaaaaaatttttgcggggccaacggttgtttccggggtcggtttgggtg

SEQ ID NO: 1488 - DNA, 404 bp, Triticum aestivum
  Clone ID: LIB103-035-Q1-E1-F6
ggtcaagaattcccgggtcgacaggcatgcacaaggggaatcaggcgacttgccgtacgcggtaggttgccctgcgttcagtcgtgagctgcgcaagtctagtggcccagcacgaagaatttcaagcgagacgtaccagagatgtatgacggcaagtcgcatccgtcggagttcctgagcatctacaccatcgcggtgcaagctgccggggggcgggacgacaagatgctggccaacgacttcccgctggtgctcaagcccaatgtcagatgctggctcatgcacgtgccggacaactccatatcctcatgggtagacttatgcgatcagtttgtcagcgcctttacaagcggtcacaagcctcatggccaagagagcgaccttcatctgctcgcccagaagga

SEQ ID NO: 1489 - DNA, 455 bp, Triticum aestivum
  Clone ID: LIB103-035-Q1-E1-F7
ggtcaagaattcccgggtcgacgacgcctccaactccagggcgtccatggcgcacctaaaggcagtctacttcctccgcccgtcctctgacaacgtccagaagcttcgctgccacctctctgcgccgcgattcgccgagtgccacctcttcttctcaaatatattgaagattccacagattcaggtgcttgccgattctgatgagcaggaggttgtgcagcaaattcaggagttctatgctgacttttgtgccattgatcctttccatttcactctgaatatacacaataaccacatctacatgcttccaacggtggttgatcctcctggtatgcaaagcttctgcgatcgagctgttgacggcatcgcttctgtcttcctggctctgaagcgtcgccctgttattagattacaaagggacatcaaaggtcgcaaaaaggattgcacaagaaact

SEQ ID NO: 1490 - DNA, 249 bp, Triticum aestivum
  Clone ID: LIB103-035-Q1-E1-F8
cccgggtcgacgggacgacgtagaagacgaagatgaagaagacgaagaagaaggagaagaagaagaagaagaagaagaagaagaagaagaagaagaagaagatgaagaagaagaagaagaagaagaagatgaagaagaagaagaagaagaagaagaagaagatgaagaatttgaagtagatgaagtagaagaagaagtagaagaatatgaagaataatcagtagtagaagaagatgaagttgattaatt

SEQ ID NO: 1491 - DNA, 95 bp, Triticum aestivum
  Clone ID: LIB103-035-Q1-E1-G4
ccgggtcgactaacctggctatattaaagcaaacgtgttttggctcaaatcaaaggcaatgtttaaagatgagggtattagtcaggagcttctta

SEQ ID NO: 1492 - DNA, 330 bp, Triticum aestivum
  Clone ID: LIB103-035-Q1-E1-G5
ggtccagaattcccgggtcgacgggctctggtattgtcgtctatgagtctaaaagtcattgtgtgggagattcataaaagatataacacagaaaaaaaaaaattaaagaaataaatagagctaaaaaaataataaatcaaacgatcattcagataacaagagattcaaagtgtataatagataatggaaccacgattgccagtaaaacaaaaatagattaacaaaagaattggtccacacgtaggttccctatcaactctatggttatatcctacttaaacgcctttcagtggtcataccatattctaatctggggtcaatttttttaaa

SEQ ID NO: 1493 - DNA, 414 bp, Triticum aestivum
  unsure at all n locations
  Clone ID: LIB103-035-Q1-E1-G7
ggtcaagaattcccgggtcgacggggaaagtgagctgtgaaattttcccaccatgatgttgcgggtccttcaagctgatgtgcggcaaacttcaccttctccgcatctgtgcatcctgttgtggtcaactctctagctgtcttgcggagccaatcatctgctactatcggctcggtgctactggaaagcaccggtggattcagcctaagaaaatgggctaagtgatcaacaggtggtggtggtggtggtgggttgttgttgttgttcccctgattctgattctggactagcaactgcattaatgtgttctgccgctggatcaactgggtgagctccagtggaaaggtaaatccgaggtcacgtctcggaggcatctganggtttagaaaagatgagatttaagaatanaggggg

SEQ ID NO: 1494 - DNA, 395 bp, Triticum aestivum
  Clone ID: LIB103-035-Q1-E1-H1
attccaggtcgacggggcctcttctcacagagtatcttggttcgccacagcggcacattgcagcttctgaaagtaattcagaagttaatggtacaggaaaaaaagaggatatagttggtggtgcagagaataatggtaaaagtacggagagcttaacagaaaaaaatgagagtggtgagataaatgaggacttggatgatggggttagcaaagagttggaaggtggacatgagcaatgcaatgaggttgttcgtaaccaaaatagcgaggaagcatcatcattggtcaatgaggagtctgttgatgtaaaagcagctgactgttcagagcacagcaaaacacgcgaggaaggttcttcgatttctaaaaatgatgtgcttgcagctactgcatgt

SEQ ID NO: 1495 - DNA, 454 bp, Triticum aestivum
  Clone ID: LIB103-035-Q1-E1-H7
ggtcaagaattcccgggtcgacgggctcgaggagcttcagtcgtggtagaaaaagagcgtgcacgttattaagggggatggcagttcatgaaattggcgaggcgcagcgtgggcgcgaaggggagtgccgacgttggcagcgagcgcatatgtccatcattaaaacagagatcctcgagctgatcaagggcgggggatcggaaccactcctcaagcttggctcggtcattgccgttggaacagaacttgccgtgccaaggcctctgattgggccatggtgactgccgaggatctgggagaacgcatccaagcttttgcaatagccatggcagagctcgtgggtgtcaaggaggtcgagatgggtggggagccatcgggggcgccacgccgggaaaggacggttggtctcgccccaaaatttgattggaaggagatttatgatgactgtcaacat

SEQ ID NO: 1496 - DNA, 253 bp, Triticum aestivum
  Clone ID: LIB103-035-Q1-E1-H9
cgggggtgctgaaatctcgcaagctacatcaagaagccaccatcactccagggaatcaaacctcgtacactcctctccctggggagctcaccaagcacgccgtctccgagggcaccaaggccgtcaccaagtttacctcctcttagatcgcgtcgcctgtatctagtagcaaatgtagttccatgctgttggcttaatgcttgtctgtggactctggttatctgcaagtaatattagtcctactgttggaaaa

SEQ ID NO: 1497 - DNA, 267 bp, Triticum aestivum
  Clone ID: LIB103-036-Q1-E1-A1
acgggtgaaatgcatttttgttaaagtctggcaccctgcacaacggacctgttcctttgagttttggttattatcttgctggagttatagattgtgttatcgggattatgtgccgtgctggcatttggatattgatcttaatccgttcgtctggcaaaaaaaaaaaaaaaaaaaaaaaaaaaaaaaaaacaaaacaaaaaaatattaaaaacaaatccggaaaaaggacaagctaatgagacaaaacaaggggccgaccaagaggat

SEQ ID NO: 1498 - DNA, 449 bp, Triticum aestivum
  unsure at all n locations
  Clone ID: LIB103-036-Q1-E1-A10
cggtcaagcattcccgggtcgacggggatgcgaaagttcaggcagagaaagccgctgccgctgctcctccagctgtgacctacgcggcgaaggtggcccaaacagcagcggccgagaagaagcctgtggccaccgagaaaaagcctgtcgtcgccaacggtgctgtcaagaccggtgtagctgcttgatcgcatacctgatcctcccagctagccatgaggaacaaacggacggtgctggcgaaccaggcgagacatgcagggtcccaagtaccgatcaccaaaggtggctggaaagcgggttggatagttaggtttattccctagctctctttttctcctgtcatcgtcgtattatccgtatttcagtttgcttagctctaaagactcctcctatagtggtatcatcggaatcaccaganaaagagaaaagagaacctgtggcaagac

SEQ ID NO: 1499 - DNA, 481 bp, Triticum aestivum
  unsure at all n locations
  Clone ID: LIB103-036-Q1-E1-A2
acgcctgctggtaccggcccagaattcncaggtcgacgggcatcatataagtttccgatctattttattttgcaatctttacttttcaatctatatcataaaaataccaaaaatatttatcttattatctctatcagatctcacttttgcaagtggtcgtgatgggattgataacccctttatcatgttggttgcaaggttcctatttgtttgtgtaggtacaatggatttgtgtgtagactcctactggattgataccttggttctcaaaaactgagggaaatacttacgctactttgctgcatcacgctttatcttcaagggaaaaccaacacagtgctcaagtggtagcaagaaggatttctggcgccgttgccggggaggtctacgcacaagtcaagacataccaagtacccatcacaaactcttctccctcgcattatattatttgccatttgcctctcgttttcctctcccccaa

SEQ ID NO: 1500 - DNA, 419 bp, Triticum aestivum
  unsure at all n locations
  Clone ID: LIB103-036-Q1-E1-A3
cgacggggaccggtacacggtgccgtcgctggcggcgctggagcacaacctggaggcggccatgcacaaggtgcgctccgagaaggaccgcaagatcggcggcgagatgagctacctcgagaacatgatcagggggaaacaagcggagcgctacggtctgtgtgacaagctcgctcatgctcagagcctcaaggtcgttgaaggtggatccacctcgctgcacaacggcctggacctcaaacttggattcaactaggaacgggtgaaagcttctggccgtggggttctgctctagtgttgcttttgagctcgagtgttatgtcaggttgaaatattctgcaatttccttcgaagggattgtatgaacttgtangagaccactgtcttatgagatgtttggcttaagctggactgggctg

SEQ ID NO: 1501 - DNA, 441 bp, Triticum aestivum
  unsure at all n locations
  Clone ID: LIB103-036-Q1-E1-A4
attcncgggtcgacgggctgctatcacaatggtgatgagcattgggaagatcccagtatcgttcagcctcttggatgtgagtggaagtatcagggcctgcaagaatgccgcgctggagtgcgaagaaccgaagtttgatcagtacaagctggcagctggtgatcgtatgacgcacgagatcatcgaatccgtgcagagttgcgttgccaaacttaaaggattacacagttagtaaattaagtttgttccatgccagcagtctcgaaaagaaccagtaatctacacaaactgcattgtcgttgcactgtccaatggcgccgcaagaatgcagcttccatgcccaaaacaggcccattctggaaggagcttatggaaaatgatgttcttgtggaagaaatgttgtgtaactaatcatgattaagccagcatctggtatggcac

SEQ ID NO: 1502 - DNA, 445 bp, Triticum aestivum
  unsure at all n locations
  Clone ID: LIB103-036-Q1-E1-A6
cggtccagaattcccgggtcgacggggggctacaatgcatttacatgaatcaaacaaatgattatgatcgtattaacatcaaagctcatttctcactcatacgtccgggcatgttcggacatcaaataggcgcccaacgggctcctcaaaattcaactggcaggacaatctgggctccccatattattgatagtaaatgggaaaatcccattcatttgtctgccaaattatcaaaatatgaagaatccatcgtgaccattttttcggaaggatgcaaccgtcattttctagtgtaacaagcagtcaaattatttgatggttaacaaatatttccgttttaagggaccgcaatgaacataactcatggcaaagttccttcatttcccaatattaaaacaaccccataggccagtgtgttaggcatcatctaataaaanaattaaat

SEQ ID NO: 1503 - DNA, 443 bp, Triticum aestivum
  Clone ID: LIB103-036-Q1-E1-A7
tcccgggtcgacggacgtgctaaatacaccgtacatgtgtaccgccgttttctagaagctttgctccatggcgcgggcgcaatccatggatacaaaattagtatattttatactatttacaagtcgagggcggggcttttcctgcgaggtacgcggcggggcagttccgcctagtcggttccacatagacacgataagacgagggagtatgctgttgcatacgtagggctgtgtgatttgacagtgagttactgctggacaggtggggccccgtgatttgacttgccattatcattttaactgcggcgctacgaccggtgtgagtctcgcaattcctgaccacctccatacaagtgcctctcgcaatgctccaccatttagtagaggctggctcttgcatgaaagcctacttatccactttttccttgcctctcttttctcca

SEQ ID NO: 1504 - DNA, 443 bp, Triticum aestivum
  unsure at all n locations
  Clone ID: LIB103-036-Q1-E1-B1
gtaccggcccagaattctctagtcgacggggacggcatcctttttgacaacattcttatcgccgatgatgagaaggtagccacagccatcttggagaagacctggaagcccaagtttgatgttgagaaggaaaagcagaaggctgaggaggctgcagcagccgattcaganggactttctgagtccanaaagaagaatatcagcgtttttgtacaaaatccctgacattcaattcttggaaccttacaggatcaagatcattgatattattgagaaaggaagagaagcagcccaacattacaatttcgatcttggcctcagttgctgtcatccttgttactgtgctcttcagaaccattttcggtggcaagaagccattggcacctgtgaagcccgttgccgaggtcaagaagcccaatgccacggaagctgatgccgctgga

SEQ ID NO: 1505 - DNA, 441 bp, Triticum aestivum
  Clone ID: LIB103-036-Q1-E1-B10
accggtccagccttcccgggtcgacgggtgaagatacagaaaagagaagctacttctttttgtttgtttgtttgtttgttccgaaataagggggacagctgagttcatcctccattgtagttgtaggttaacaaacaggcagatttcatttgggaacatagatgaggggaaatcaatcaatcaagcaaagaaagaaagaaagaaacagatatcatcacgcacctaatcaatcaatcaatcgatggatcaatcaaagaaattaagcacgatgagacagatggagagagggacgacgggagagagacgaactgtctttgggcccgtggaagtggacgaagaactcgtgcatcgcgtcgttgatcatgtccaccttgtaatcgctcatcatcctgaccaatcaatagaagcaagctagctattaaacatgaatcaacaatcctc

SEQ ID NO: 1506 - DNA, 340 bp, Triticum aestivum
  Clone ID: LIB103-036-Q1-E1-B11
ggtccggcattcgcgggtcgacagggggcaagagcgccgtgcagaagggttccaagggcccaaggattggcggcggcggcgggaagcgttgaaagtgcgttgatagtcgattacgccagtagacagagagttgtgctgcctagccttgtttcgaaccctgctatcgggaacctttgccatgttattacgccggcctcttgaatttgcaccctacctgcgcggctgcatgctgtcaatgttttggtatgtctcgatcatgattcttgatgacaaatgtggattgaggtacgtcgtgacacagaccagctgtctttgggcccgtggaagtggctgacgatct

SEQ ID NO: 1507 - DNA, 463 bp, Triticum aestivum
  Clone ID: LIB103-036-Q1-E1-B12
ggtcaaaaattcgcgggtcgacaaactcaccaaagtggctcactttctgcctatcaaagagtcaatcactgcagctcaattggcggaactctatacctctcgtattgtctctctacacggtattcctcaagtgatctcttcagaccgtggtagcatctttacatccaagttttgggattcttttcagaaggccatgggcactaacatccgcttcagcacagctttccatcctcaaactagtggtcaagtcgagcgtgtcaaccagattcttgaagatatgctcagggcttgtgtcatctccttcggcatgaaatgggaggattgtcttccttatgctgaattctcccacaacaacagttttcaagcaagttcgggcaaggccccattcaaaattttgtatggcaggaattgccgtacccctctcaactggtctgaaaccggtgaacgtcagcttttgggtaat

SEQ ID NO: 1508 - DNA, 462 bp, Triticum aestivum
  unsure at all n locations
  Clone ID: LIB103-036-Q1-E1-B2
tgtaccggcccagaattcccgagtcgacggggattcccaaggcaccccaagtaaatatgcaaggagactcaagcgtctaagcttggggatgccccagaaggcatcccatatttcttcctcgacaattatcggtatgtctcggtttttgctttcttcacatgacatgcgtaaattcctggagtgtcgtgtgctttttatttttatttttagtaatgcactgttctggcatgagatagtccttggtttatttatagaattctctttgcacttcacttatatcttttgagtgtggctttatagaatgcttcgtgtgcttcacttatatattttgaagtttggatgctcgtttctctacattggagcaccattatttgtagaatgctcttttgctttagttatatttgttagagcgtagaagagtcttttgtagaagaattaaacttgcatgcttcaattanatat

SEQ ID NO: 1509 - DNA, 423 bp, Triticum aestivum
  unsure at all n locations
  Clone ID: LIB103-036-Q1-E1-B3
attcccgagtcgacgggacatagttcaattgcaggtacgtaatcgagcttgcgtgtttcctgatatggagacaaaggagatgcatangcagaagtgtggctcttgctccccattgtttgagatcgacctgccatctcacctacaagccatgaaagttttctcgtagctagcaagccagccaagtaggtanggtatgttacaaatgtatttaccacgaccttgatcgagtggtgcttgattagtccatactagattttattttatcatatcatgcaagcacatgaatacatggtccactgagtaatataaagtcaacgcgacatcgcataaattccatatatacattatagaacaaggatggatattttatatctatacaagtgtatgcatgtcccatgcaatcaagaaagttcgatcataccg

SEQ ID NO: 1510 - DNA, 442 bp, Triticum aestivum
  Clone ID: LIB103-036-Q1-E1-B6
ccggtccagaattcccgggtcgacgggactccagacactggcgactatacacaggctggcaggaaaacacttgctgacaagtatgactatgtcatgcatggaaagctttacgatatttcagaggacaattccagcaaggataaaggacctactaaagtggagatctatgcatcttttggcggcctcctgatgttgctcaaaggtgatccttcaagtgctgctaacctcgagctggatcagaagctgttcctcctcatccgaaaggtgtaaacgtgtcatctacctgataaccagcgcttgtagttcactcaaggctataccaagcctgtgatcgtttggaggctaatcgtccgagacccttatgtactcttttggcggtaatacgactctagattggtaccatggcttcactgtatcaccagtcgcttattcctgttcccct

SEQ ID NO: 1511 - DNA, 430 bp, Triticum aestivum
  Clone ID: LIB103-036-Q1-E1-B7
tcccgggtcgacgggacgaagcaaatgcggcgtgtgcatagtcattgccgaaaaagaacacaatgacggggaacaccacgtacctaattttgggagcttctgttccgtgccttaaccgcccgaacatttccctcgcgctcacacatccacactggtgggccggcacaagaagaaggcgagcggcttgatcgtctgttcacgagaaaatgtgagcaccattttttaactgtaatttctcttttggagttagagcatctaatatggatgctgataggttagccaagtttgcacattctcttgatcaggggctgacatgtctggctagaacaaacccatgttccgaattgtaatccacatcatgtggactttgagtcataaagcttggtttaacacttacaaaatgagacaatgtgaacggcctcgttcgttc

SEQ ID NO: 1512 - DNA, 441 bp, Triticum aestivum
  Clone ID: LIB103-036-Q1-E1-B8
cggtccagaattcccgggtcgacttccaccaaagcgaaatccaccatctcatcgaaagacgggacacctttgcctctatcaagtggtatcagatttccaggttgctcggtgagattttacagttttttgtagtttagatcgagtctgttcttcatacctacagtccacgaaaaagccacaaaaaaaaattagggttagttcatcatatccgaaccaatctgagcctttgcataatctttttagggttttgctttgttgaatttgcggttgcatcgtcgtgtctagttgctggtcttagagtctagtcttttagagtttcgagttctggtcataagttgtcacgccgccgccgcaccatcatcatcacccctgccatctaccaccaccgcttatccgccaccgcttcgaatctgtatccatattacaccacaactgtcatat

SEQ ID NO: 1513 - DNA, 371 bp, Triticum aestivum
  unsure at all n locations
  Clone ID: LIB103-036-Q1-E1-C11
tggtcaaacattcgcgggtcgacgggtagtcataaaatcctacataaacttgtgggtcactggatatgatatgtttgattcctcgcaatagttttgcgatataaaagtggtgatattagagttatgctagtgggtgactgtggattagtagaaacacttgtgttgaggtttgtgattcccgtagcatgcacgtatggtgaaccgctttgtgatgaagttggagcacaattttatttattgattgtcttccttatgagtggcggtcggggatgagcgatggtcttttcctaccaatctatccccctaggagcatgcgcgtagtactttgttttcaatggcttgtanattttttcaataagtatatgagttct

SEQ ID NO: 1514 - DNA, 460 bp, Triticum aestivum
  Clone ID: LIB103-036-Q1-E1-C12
accggtcaagaattcccgggtcgacggggctagtaaaaagtggtatgaaccatagagaactttaaatacagtaggtttaacaccaatataaataaataatgagttcattacagtaacttgtgtggtggttttgctttctttcactaacggagcttatgagatttcctgttgagttttgtgttgtgaagttttcaagttttgggtaaagacttgatggactatggaataaggagtggcaaaagcctaagcttggggatgcccatggcacccgaagatactcaagaatagccaaaagcctaagcttggggatgccccgggaaggcattccctctttcgtcttcgttcattggtaactttacttggagctatatttttattcgccacatgatatgtgttttgcttggagcgttcgtgtatgatatactatttgatttttagtttacacagtcatacttgctgt

SEQ ID NO: 1515 - DNA, 395 bp, Triticum aestivum
  Clone ID: LIB103-036-Q1-E1-C3
attcccgagtcgacggggccaaagtatgagctcgagccgccagccagccaacactaagctttcgagcaacaagacagtgaggagggtccgtgtccccggaggtaacgtgaagtggagggctctccgtcttgacactggtaacttcccatggggtagtgaggctgtgacccgcaagacccgtctcctggatgtggtttacaattcgtcgaacaatgagcttgtgaggactcagacccttgtcaagaatgccattgtgcaagttgatgcagcccctttcaaacagtggtaactgactcattatggagttgaaatcggtatgaagaagaaagctgctgcagctgccaagaaggaagctgctgagggacaagaagctgaagttgctgctgctgccacag

SEQ ID NO: 1516 - DNA, 439 bp, Triticum aestivum
  Clone ID: LIB103-036-Q1-E1-C6
ggtccagaattcccgggtcgacgggtggaaggccgccaaggtgctcgtccgcaggggcgccaactggaagatcagcgacaggaagcactccgagatctcagaaactgaggatctcagcaagggcaagaggagggccggccttgttgccaaggtactgagagataaaaagaaggggaaaggcgctgccttgccgggaaacattcatcctagtagtggaattctgattaaggtaccggatgatgctgccattgaagcaccaaaaagaccaagaagctgcgaaccagtaccaatagcccaaagtgcacctattcttcagttaccaagttcaagtacctgtagccagccttgaaggtggctttaaaacagaaatgaaggcatgaagccaggaatcgcatagcaacatattttcattactttgggattaacaaatttaacaaac

SEQ ID NO: 1517 - DNA, 442 bp, Triticum aestivum
  Clone ID: LIB103-036-Q1-E1-C9
gggtcgacaagaataatcatgaagaaacaaatcatataaccgaggaagagcgcaagagagatcatagaaatgctcttaggagagcatcttatcggaggaaaaaggataagataaaagcagatgaaaatgtacggccacgacctaagacaggtacgtaccagcatttttagatatgcacggtgcataccttatcataccaacagtttctttatgttcacgttgactgacaaatcatttgctcacaaagcctaccgtcatatgcttgatcttactaaaggaatgttcttcttttcattagtcactaaaatagactttttctaatgatcatttcacatctactttcataaaggcacctctgatagcgctaactatccagacttgttgcatgatgatgcaacattaccaaactcatcattagacgcctccggtgttacccttaatt

SEQ ID NO: 1518 - DNA, 436 bp, Triticum aestivum
  unsure at all n locations
  Clone ID: LIB103-036-Q1-E1-D1
attcccgagtcgacgggaggcaccctagaggcaacaattcagtcaattcttgaaatgggtggtggaacatgggacagagacactgtgctgcgtgccctacgtgctgcattcaacaacccggagcgggctgttgagtatttatattctggtattcctgagccgatggagattcctgcaccaccaccaagtgcccagccagctgatcctgccctggcttcacaagcagctcaacctgcagttgcctcttccggtcctaacgctagccccttggacctcttccctcaagccctgccaaatgcttcagcaaatgctgctggtgaaagaaatctggatgttttgcgtaacantgcacaattccgaaacttaacttctttagtgcaggccaaccctcaaatcttacagccattgcttcaagagctgggaaagcaaaaccctc

SEQ ID NO: 1519 - DNA, 208 bp, Triticum aestivum
  Clone ID: LIB103-036-Q1-E1-D2
cggggggtgattagactacttgaccagataaaaatctagcattttcccaattatagttcttggcagattttagcaacttagcacaagtcatgcaatcaacctacacatgcaattctaagagtatagcagcggaatgtaaaacaatttcatatgaaggtaaacggacgagtttgagaaggcaaacacaattggagacacggatgttttt

SEQ ID NO: 1520 - DNA, 438 bp, Triticum aestivum
  Clone ID: LIB103-036-Q1-E1-D5
acggtccagaattcccgggtcgacgggttggggtacaaagaagcacaagcgagagtggtcaccgtataaccttggatggggatgaattgtgtgctcgggagagtgtgtgtgtgtgtgtgttgtgctgcacgtgtgtgtgtgtgtgtcagatattgagcgaaaacaaacctaaggagagaaatgggtattcatgaagagattgtgcgggccttgaggtgcgcaggggccgagtgagggtgtcaaaatgcccgcgtttatgcatatgttgcatgcgatcgtgcgagggacagacgaatcgagagagatggttgttgtgttacggatgctcctctctctctctgtctatctgtctctctctctctctctcagacacacacacacacacacacaagtaaaatagaagaccgttctctcatgtatacacaacgtatcggcatc

SEQ ID NO: 1521 - DNA, 280 bp, Triticum aestivum
  Clone ID: LIB103-036-Q1-E1-D6
ccggtccagaattcccgggtcgacgggctgcaggacacgcaagatcacctccctctgggcgcaacctgaaatctcacccacatcatctctcctaatatttgacaaagtcatgatgcagttccggctccatcgacgaccagcattccttcctacgtatgctgaaaggagtcatcgcaaaatcgccttctctgccttgcatggattcatgcaaatgatacatctccgggcaatgtatgtgttgaacccgcaagtgacgtacgttcggcactaagatcctccg

SEQ ID NO: 1522 - DNA, 430 bp, Triticum aestivum
  Clone ID: LIB103-036-Q1-E1-D7
attcccgggtcgacgggggaggctattacttggcatgtccgcacactttttaagctgaaaactatgattactcctgtttataatctgtcagtaacgagttctacttgtgtttttatttgatgttatgtgtgattatgatttcatatttaagctttccttgtatgtactttttctgttctaaatactttactcaggataacaatactcctgcctactatatatttggtgctatctctgatcactacattctacttttgaatctttgtagacaccgtgtggccacaacttctgtttgaaatgccttgagaagtgggttaatagtggaaaaaggacctgtggaaaatgtcggggaccaatcacatccaaaatggcttcgcagccaatgattaaagcagcgttggttgcggatatccgtatggctaggactgca

SEQ ID NO: 1523 - DNA, 404 bp, Triticum aestivum
  unsure at all n locations
  Clone ID: LIB103-036-Q1-E1-E1
attcncgagtcgacgggcgtgcaccacattaccaattcttccaagccagcagacctgcggtcaatcttttgctggtgctgttgctgttgttgcatgttctgtggtaataatgttgaatgaaacagtaactaaagcgttcttttagtaaagagaaaaaaaggtaaagagactataaagatatagtatatttgacttaactgaaaacttaagaaggatataaacaaataagctggtattgcactaacatcgttagatgaaacaaacattttccataaattccaaatggttccatccgtgaaggacggaattatagagcaccatagtttagtgtactttaaaatacaagtggtttctcatgctatgcttataatcaacctagaaagctgaatatgctacaacacaaa

SEQ ID NO: 1524 - DNA, 462 bp, Triticum aestivum
  Clone ID: LIB103-036-Q1-E1-E11
cggtcaagcattcccgggtcgacgggcgatagaagaaattaatgtgttgagtggaaagatggatgaacttatgaaattatttgctactaagagtgtttcttctgatcctactgatatgcctttgtctactttgattgagaataacaatggatctatggatgtgaattttgttggtaggaataattttggtaacaacgcttacagaggaaattttaatcctaggccatatcctagtaatccttctaataattatgggaattcctacaacaactcttatggaaattataataagatgccctctgaatttgagactagtgttaaagagtttatgaattcacaaaagaattttaatgctttgcttgaggagaaattgcttaaagttgatgatttggctagaaacgttgatagaatttctcttgagattgattccttaaagcttaagtctattcctcctaagcatga

SEQ ID NO: 1525 - DNA, 189 bp, Triticum aestivum
  Clone ID: LIB103-036-Q1-E1-E3
attcccgagtcgacggggatcgaggtgcactacctaggagtacgtggtgcagctggacgagacgacgctgaccgagcagtaccccagcgacaacttggtgctcaaggacccaatggcaatcaacaagcaggggtggaacccgctcaaaacaacttacttcaacaaccaaaacgtccggccgaacctcgg

SEQ ID NO: 1526 - DNA, 441 bp, Triticum aestivum
  Clone ID: LIB103-036-Q1-E1-E5
tcccgggtcgacgggtctgtcaaacataagcctcattatatcttcctcaaaacagccaccatacctacctatcatggcatttccatagccattccgagatatattgccatgcaacttccatcatcatcacatacatgacttgagcatttattgtcatattgctttccttgatcgtaagatagctagcatgatgtttgcatggcttgtctgttttttgatgtcattgctacgctagatcattgcacatcccggtacaccgccggaggcattcatatagagtcatatctttgttctagtatcgagttgtaatattgagttgtaagtaaataaaagtgtgatgatcatcattattagagcattaccccagtgaggaaaggatgatggagactatgattcccccacaagtcgggatgagactccggaccttaaaaattaattaaa

SEQ ID NO: 1527 - DNA, 451 bp, Triticum aestivum
  Clone ID: LIB103-036-Q1-E1-E6
cggtccagaattcccgggtcgacgggggtccctatgggattgaggacagtgtcaaggctgctggaccactcctggcaattgtggggtttcttctgtttgcgctcatatggagtattccagaagccctaatcacagctgagatgggtactatgtttcctgagaatggtggctatgtcgtctgggtctcttcagctcttgggcccttttggggttttcagcaaggctgggcaaagtggctcagtggtgtcatagataatgctctctatccagtcctttttcttgactatgtcaagtccagtattccagctctcgggggtgggcttccaaggacttttgcggtgcttatcctcacagctgcccttacttactggacctacagaggaataacgataggtggctgggtggcagtccttcttggggtgttcactctgctccctttctttgttatggg

SEQ ID NO: 1528 - DNA, 315 bp, Triticum aestivum
  Clone ID: LIB103-036-Q1-E1-E7
accggtccagaattcccgggtcgacgggcagctcaaagcgtaggcgtcaactgttatgtactcaacatgttacccacccattggctggcgttgtcacggattgttgcagtagcatttgtagggttccatgcggcgctctgacccggagctaaagttccaccataggaagtttgaccaatttgaactttaacagtatgctaattgcctgccctcaaatttgggagcctatggttcaaccgccggtacctctaagtggacaatcgtgttgcgtgtttgtaatcaccatctggtaccaatcccattcacgatcacggt

SEQ ID NO: 1529 - DNA, 378 bp, Triticum aestivum
  unsure at all n locations
  Clone ID: LIB103-036-Q1-E1-F1
tcgacggggcaaaaggcaaatagaaacaaacgttggtgtctgtatgtcggatgcgccatccactgctggatttgtactgcgtagctcacacctcatagtctggttgttgcttggatgtggatgttttgtgggatgtgtgacccgtgaccgccgatcgccgctctgcttgctaacaacaagttcatgtagctgacctgtccaacatcactgttggcctaagtacaaaatccttgcatttgtgtggtgcccctgagactgtcctacatcagttcactagtgtacatttgcagaatctctctgttttcttgccaactctgaataatttccttctttgaacaaaananaannnnnnaannaaaaaaaaaaagcggccgctct

SEQ ID NO: 1530 - DNA, 459 bp, Triticum aestivum
  Clone ID: LIB103-036-Q1-E1-F11
ccggtcaagaattcccgggtcgacgggataaagaacttcaagcacatccggatgagctaattgaaagtttctccgtgatgtgggaaaccatgctccagtgccgtcggcgccaacacgcgatcatcaagtcactatcagcggctgcaaactagaaacaccattcgactccgagcctcgacgccaagccgccctctttctgtcgatcgagctcggcaaactatgctcaaacctccgaaactggatcgcatcccgcagggcctacctgggcagcctcaacctgggccttttcggaaatttcagtgcagaaataccttgatctgcagaaaggcgtctgtgcggctaaatacaggcttctgagataagcttgaggtagtgattactgcagcctgcgggtgtactgtactgtatatcggctgggtgaaacactgcgacttcatccttgtcaattttccaagtaca

SEQ ID NO: 1531 - DNA, 407 bp, Triticum aestivum
  Clone ID: LIB103-036-Q1-E1-F6
tcccgggtcgacggggcagcagactcagcttcgcattggaggcctgcctccatggatgcttagccacctcaacgcttgaggaaggaagaggtttaatttccaaagcagctgaaacagcattaatcggcacactagcaattaagctgctatggttatgtttgcttgcccctacccttatatatatgatttgcaaggtaaaaaaatgagcagagagatcaggaatgctggttcactgtataattttgttgcatgttcagcaacacgtaccagttgatgcaaaaaaaaaaaaaaaaaaaaaaaaaaaaaaaaaaaaaacaaaaaaaaaaaaaaaaaaaaaaaaaaaaaaaaaaaaaaaaaaaacccaaaaaaaaaaaaaaaaaaaaaaaaaaaaaacgggccccccaaaa

SEQ ID NO: 1532 - DNA, 456 bp, Triticum aestivum
  Clone ID: LIB103-036-Q1-E1-F7
ggtccagaattcccgggtcgacggggaggaggagctgtacgaggacgaggacgacgccgacctccaggagtaggggcgtgcgaggtctgggttcttctgtgatcgcgtgcgtgctcagtcgggggctatttctgatggctccatgttgctgctactagtagtgtgtgtgtgtgtgtttcgcgcttgctggcccccatcttcggggtgtcgtggacttgttgcttgtgtagtttgtctgtgtcgggttaattcggtagtcagtttgttgcgcgtgcgttacggtgaactagaggtcttagtagcaggtttgcaatatggctggctcattgtttcttcacatagtttgtgatgattgtcgttgtcaagtgctccaccacctcgagggcaatattggctttaccagtggactggatgcatccgtggatgtgttacgtgccatgatgtgcagtcggcatc

SEQ ID NO: 1533 - DNA, 410 bp, Triticum aestivum
  Clone ID: LIB103-036-Q1-E1-F8
gggtttcgaagactaatagatttttgcaagaagtatgtgagttctttatgactaatgttgagtccatggattatacgcactctcatccttccaccattgctagcctctctaatactgcgcacatttcgcgggtatcatacacccacgatataccttcctcaaaacagccaccatacctacctattatggcatttccatagccattccgagatatattgccatgcaacttaccatcgttccatttattatgacatgcttcatcattgtcatattgctttgcatgatcatgtagttcacatcgtattcatggcaaagccaccttcataattctttcatacatgtcgctcttgattcattgaatatctcggtacaccgccggaggcattcacatagagtcatattttgttcca

SEQ ID NO: 1534 - DNA, 376 bp, Triticum aestivum
  unsure at all n locations
  Clone ID: LIB103-036-Q1-E1-G3
cggggaagaccacgcgggcaagaagcccaacgccgataagcggctgccggcgggcaagacggcgtccaatgaggccggcggcgagggcaagacccggggccgcatgaagggcagcaaggcgaacaacggcgtggagacgtacaagatctacatcttcaaggtgctgaagcatgtgcaccctgacatcggcatctcctccaaggccatgtccatcatgaactccttcatcaacgacatcttcgagaagctcgccggggagtccgccaagctggcccgctacaacaagaagcccaccatcacctcccgggagatccagacctccgtccgcctcgtcctccccggggagctcgccaagcacgccgtctccganggcacc

SEQ ID NO: 1535 - DNA, 434 bp, Triticum aestivum
  Clone ID: LIB103-036-Q1-E1-G5
attcccgggtcgacgggatcattgatgcttcttcagtcaagaaaataaaagtgaatgtcgtcgtaaaaaaaaaaaaaaaaaaaaaaaaaaaaaaaaaaaaaaaaaaaaaaaaaaaaaaaaaaaaaaaaaaaaaaaaaaaaaaaaaaaaaaaaaaatttaaaaaaaaaaaaaaaaaaaaaaaaaaaagggggccccccaaagggttcaagcctaatttacccttgaaggcaagttaaaacccctccaaaggggcccccaaattccattccaggggccttcttttaaaaacttctgacggggaaaaccccggggtttcccaatttaaacccctttgaaaaaaacccccttttcccaagtggggttaataccaaaagggcccgcccgattgccctttccaaaaatttgcccaccctaaatggcaaaggggaaccccc

SEQ ID NO: 1536 - DNA, 423 bp, Triticum aestivum
  Clone ID: LIB103-036-Q1-E1-G9
cggtcaaaaattcccgggtcgacgaggtttagatatgtttttatgttttaattagtgtttgtgccaagtagaacctataggataacttatgatgatagttgatttgattctgatgaaaaacagaaactttgcgcgcacgaaatttgttttttaaatcacagaaacgtgattttgtgtttattcgttttgctgctgatcaatagacaaattttccatgactgcctattttggtagtatttttagagttccagaagtttgcgttagttacagattgctacagactgttctgtttttgacagattctaactttcgtgtgttgtttgcttattttgatgcatctatggatagtaaaatagtttataaaccatagagaagttggaatacagtaggtttaacacctaagtaaataaagaatgagttcat

SEQ ID NO: 1537 - DNA, 430 bp, Triticum aestivum
  Clone ID: LIB103-036-Q1-E1-H5
tcccgggtcgacggggaatcgaaggaacaaaagagcttgcgcaagaacacgttaaccttgcggtcaaagccatcgaatctctcccagacagtgacgatgaagatgttctgatttcaaggcgcgctcttattgatatcacacagagagtcatcacaaggacaaaatagcatgattatacacagggtggagaagataaggcggagtttcaccacaggtgtagtgttccgcttggaaatttttggtcgccttggtcattgcattctttccattgcccgggttttgtgtaacatttgatgagacttcagggtaaccattcctgggaatcatcctaagtcgcagctgtagtggttttagttactggtggcagcagaatctgtgtattaatatcacgattggcgattgcacgatgacctgatcataagactgtaac

SEQ ID NO: 1538 - DNA, 410 bp, Triticum aestivum
  Clone ID: LIB103-037-Q1-E1-A1
tcacgggtcgacgggttactgaaaagactatccaaggacattcaagccttaatatactggtgacttaaagtcaaaagccagggcgggttatcaaacctcgcatatttatataaacaggaaaacatacctgtagaattgacttatactgctggcttacatcaccacaggcagtgaaggtaacaatccaatgatttataagcgcatgatttcaatggcgcaatccaaaatataatggcgacttaacgtccaaagccagggcggtttttcaaacctcgcatattcatccaataatataaaaagggccaattctagttctgcccctaactcgaacccaccactcagttttgcccctaattttcaggtatgctcagttttgcacctccgccgttagtgtcacttatagaaatgcc

SEQ ID NO: 1539 - DNA, 423 bp, Triticum aestivum
  Clone ID: LIB103-037-Q1-E1-A7
ccgggtcgacggggaatctcatgagcttgctgtacaacagagcgctcatcagtcatcttgtagtcatagaattgctccatgacgtacaactcgctgccggcgtccgagtcaccaaacttggcctcgagcgcaacccacatgtccttgccgttgtcaaacgacatatacgaatccacaatggagtcatcaaaaacacttagaagagcacctttaaagagagtatcgatcttctcgaaagcttccagctgtgctgcattaagatcgccctcagtcttgcccttagtggcgtcatagcagcacatggtctgaaaccagtaaactgccctcgtgcgccacctcttatattggacccccttaaaggcggatggcttcaaatgcgcagcgaaaccactcggagtaaattgcctataatcaggtttttgg

SEQ ID NO: 1540 - DNA, 346 bp, Triticum aestivum
  Clone ID: LIB103-037-Q1-E1-A8
acaccctatagtgagtcgtattatggtcatttactaccgactacaatgcattagcggtcagcgaacttgtcttgctagctcactttgatcattgttcacgagatatggtgattatagggtcactatctcagcgtagatctccgtagttgtatggttgaccagtcagacattccgcatgtgcctcattagctcgtgttctttatcaatctaagggctcacctgtcaatggacattgactgtataaaaatttatgcatacgtggggaatcatgccacagactcatcgctgcatcgcaccctcatcagccacactcagtgtgaaataccttgcgtcagaccctcatgct

SEQ ID NO: 1541 - DNA, 344 bp, Triticum aestivum
  Clone ID: LIB103-037-Q1-E1-B11
tataacgatgtgtgggtcaatgaaccaacacatggaggtccctaatccggaatccctaaacctcaatccggcaggtataaaaccggccacaacattatattaaggacatatatatattgcatgcaatatgaacaaaatggggtaaaaataaatcacttacagaacgtaccaactgatgatagatttgtcgagctcgcgcagattgaaaagctggaacaattcactcagatgaatttgcacatagtaatgtttgaagtgatgctcatatttaacttccgcataaatatattctttggcgtttttattttttatgtaacccttgtaccatttcagcagacctttca

SEQ ID NO: 1542 - DNA, 396 bp, Triticum aestivum
  unsure at all n locations
  Clone ID: LIB103-037-Q1-E1-B12
tagtcgtaggaagttttggatgggggaccatttggtggtaaatttgaacggtttggcaacaaccaaggataatggctttgctaaaaaccaacctaaggctgtgtcggtggttgttgttgaaatggcggaggatggtggcaaggataacccactcatcaaggctgcaaattgccgcatatgcaaggaaaaggacagcatcaaaaatctcaaaaaaccatgtacgtgcaacggcagtctgaagtatgctcataaagcgtgtgtgcaacgctggtgcaatgagaaaggaaacattacatgtgaaatttgccatgagcaatataagcctgngtacacagcnacaccacgtgttcaaccagatgagaccagcatagatataagtgggggattggacattac

SEQ ID NO: 1543 - DNA, 292 bp, Triticum aestivum
  Clone ID: LIB103-037-Q1-E1-B5
cctatagtgagtcgtattaagttttggctgggggaccatgtggtggtgaatgtggacggtttggcgaacaccaaggatgatggctttgctgagaatctatctgaggctgtgtcagtggttgttgttgatatggcggatgatggtggcgaggatgatccactcatccaatctgcagagtgccgcatatgccacgaagatgacagcatcaagaatctctagaatccatgttcgtgcaacggtactccagaagtatgctcatagagcgtctgtcgcaacgcttgtgcaatcagaa

SEQ ID NO: 1544 - DNA, 188 bp, Triticum aestivum
  Clone ID: LIB103-037-Q1-E1-B6
ttacaacaccctatagtgagtcgtattagcagacgagatacgctacagggagggagggaaagatgcgacgcgggactcgccgaccgtgagggtttttatagcaggctggtaagcagtgggatggggggggatgatacgtccactttgcggcatgcgtctagagcgacatgtagtgcattatgggctgt

SEQ ID NO: 1545 - DNA, 261 bp, Triticum aestivum
  Clone ID: LIB103-037-Q1-E1-B7
gagtcgtattacaggcgctccggattgggacttggttctcctccacgcgggggcggtttacccttacgacgccgaccattaccctgcgcattggtattagccacagaatctgaactgttatccgccttacggcttaccgttgtttccatgacccgccgggttatgctgctgccctttggtgctgccgcccttctttccctttcctgtcttctcatcatcatactcagggtccttggtactatcggagtcggcatacttcac

SEQ ID NO: 1546 - DNA, 388 bp, Triticum aestivum
  Clone ID: LIB103-037-Q1-E1-C12
gtcgtattaagggtttattcaggtaaacagaatagcaattatttcttgacttaaatgaataaccatattgcaataaaaataatccaatcagattatgctcaacgcaaacaccgaataacatttattttaggtttaacactaatctagaaggtaaagggagtgtgcgttggtgatcttataaaccttggaattacttccaacacacatcatcatctcgccctcaactagtctttgtttaatttgcaactcccgttttgagttactacttttagcaactgaaccagtatcacatactgaggggttttctataaacactagtaaagtacacatcaataacatgtatatcagatatacctttgttcactttgccatctgtcatggttttgtc

SEQ ID NO: 1547 - DNA, 236 bp, Triticum aestivum
  Clone ID: LIB103-037-Q1-E1-C3
caccctatactgagtcgtattagaggaacacggtagcggctcccgagacattgaacgatcagtgatacgaccttaattactatgatagggaattatttgcgattccattacagatccagcctcatgtgatcacaacaaagttctggatccgcagatcacaaatgccccccaacactccaatccaatccatctcacgtctctgctccacattgcgcattcttatcgaagtcccgctg

SEQ ID NO: 1548 - DNA, 368 bp, Triticum aestivum
  Clone ID: LIB103-037-Q1-E1-C5
tataatgagtcgtattaaaggtttattcatgtaaacagaataacaattatttcttgacttaaatgaataaccatattgcaataaaaatgatccaatcatattatgctcaacgcatacaccgtataacatttattttaggtttaacactaatccagaaggtaaagggagtgtgcgttggtgatcttataaaccttggaattacttccaacacacatcatcatctcgccctcaactagtctttgtttattttgcaactcccgttttgagttactacttttagcaactgaaccagtatcaaatactgaggtgttttctataaacactagtaaagtacagatcagtaacatgtagatcaaatagaactttgg

SEQ ID NO: 1549 - DNA, 252 bp, Triticum aestivum
  Clone ID: LIB103-037-Q1-E1-C6
ttactacaccctatagtgagtcgtattacagtatcaccacttttccatggatggttggagcgctgcgccactagatgctcgactcgtgaaggtgttaggcgatgttcgtcccattgggaatgttgcccgtgggtcgtctcgaggcatgcgtgagggatctcagcaggatcctcaggtgcccagaggggtctaagctcgcattaggactcgggcatgccgtctcgtgtcggttctattcgatggcggacgcgg

SEQ ID NO: 1550 - DNA, 386 bp, Triticum aestivum
  Clone ID: LIB103-037-Q1-E1-D11
attccctatagtgagtcgtaatagggatgccaaacgtgaggtaggccccggagccgaacgtgattccaaaggccaaccgaacccggtccttcaagggcgtttcttagagccctggagcatttcggctccaacagggcgacctctctggccaatgaggtccggaagctttgccggggtgccatgaccaatgtcctcaccaaggtggcgtactggaaccccaacctcgacttcgatgccgcgctggagagcttgccggaggatgcggaccttgcgacgctcgaggagcgtatcaagcccatcatcagccgcggcgacggagttcggagggtatagggccagcgctgagattatgcaccccatttctcatcgccgctgcaagttcttga

SEQ ID NO: 1551 - DNA, 429 bp, Triticum aestivum
  Clone ID: LIB103-037-Q1-E1-D2
ggtccagaattcacgggtcgacggcgaagtcggacgccaatgagggcggcgacaagaagggcaagaagaaggccaagaagagcgtggagacgtacaagatctacatcttcaaggtgctgaagcaggtgcagcccgacatcggcatctcctccaaggccatgtccatcatgaactccttcatcaacgacatcttcgagaagctcgccggcgatgccgccaagctggcgcggtacaacaagaagccaaccatcacgtcccgggagatccagacctccgtccgcctcgtcctccccggcgagctcgccaagcacgccgtctccgagggcaccaaggctgtcaccaagttcacctcctcttatgctgttcgtcttcctgtgtctcgtagttagctgttcgggtgtgtttgtggccgtgttaccctgtaagaat

SEQ ID NO: 1552 - DNA, 422 bp, Triticum aestivum
  Clone ID: LIB103-037-Q1-E1-D3
gggtcgacggctgttagaatcagcaatttgcgtaatgatgaaattgagaaatacttgtgttgaagttagcaagtcccgtagcatgcacatatggtaaaagttgtgtaacaaatttgtcgcatggggtgctcttttgattgccttccttatgtgtggaggtcgggggagcgcgatggttaactcctgccaacctcccccctaggagcatgcgtagtagtactttgcttcgagggctaatagaacttttgcaataagtatatgagttctttatgactaatgtgagtccatggattatacgcactcttacctttccatcattgctagcctcttaagtaccgtgcattgccctttctcaccttgagagttggtgcaaacttcgccggtgcatccaaacccgtgattcgatacgctctatcacacat

SEQ ID NO: 1553 - DNA, 408 bp, Triticum aestivum
  Clone ID: LIB103-037-Q1-E1-D7
cccgggtcgacggggtgccatatagaaccactgggaagacttggggaaagtcttgttgaacttgctgtaaaaaacagaaactttagcgctcacgaggactgctgtcatttttatttgggaagtgctatttagttaattatttttgcagatgattaatagataaatgtctcacgtccagaaatttattttagaatttttggggttccagatcttgcgctagctacagattactaaagactgttctgtttttgacagattctgtttttcgtgtgttgtttgcttattttgatgaatctatggctagtaaaatagtttataaaccatatagaagttggaatacagtaggtataacaccaatataaataaataatgagttcattacagtaccttgaagtgatcctttgtttt

SEQ ID NO: 1554 - DNA, 349 bp, Triticum aestivum
  Clone ID: LIB103-037-Q1-E1-E1
ggcacaccctaaagtgagtcgtattaacccgtggttaaggtaccactaagaagtccgtgcacgatgaaatctgccgtgactaatctatgacacttggatctcatcgtggagctaactcacgatggggtcacgatcgtggtcggcaagttcaccggaggcaaatgagatgtcgtgcggcgcatgaccaataatcttgcgcgaacgatggacaccaatcacgtatgatagagtcccgaggactattcgatctaatatgggtatcgggtccccgttgatggcatagacgtttccattgccaatacagcacagccttctgccaagccggacactcggacagacttcatccaca

SEQ ID NO: 1555 - DNA, 372 bp, Triticum aestivum
  Clone ID: LIB103-037-Q1-E1-E10
gggtcgaccggacccaaggacacaaatttgatttttgaaccaatttatatgcactggagcatgtgcatgtagttcaaatttgaattatgcacataaatgcaatgaaaactcagttaatgcataaaaatgtccaaacgaaccccgaaaaatcacaaaaattgacacagcactcttgtggttctaggttgacaccagaaattttttgaaagcaaaaaaaggcgatggaaatcctttccgccccaaaagggggacatttcccaacgaaaacaacaagcctgttgtgaaaaactctgggttgtgaaaaacatatacccaaacttgccccaaatgggacaaaaaatttaccaaggcatgttgatagcatgccaagtt

SEQ ID NO: 1556 - DNA, 342 bp, Triticum aestivum
  Clone ID: LIB103-037-Q1-E1-E5
cctatagtgagtcgtattaccacgcatgcgggcgtgatttgcttctctgctgccaaatgctccttaagatcatggttatactgcgcaccatggcttagggcggcgcttaattggtggaggggtcggtgatttgggtggaaggtgttgcgcctgcggtcggggcatgtgggatgtggaaggaggaggacgatgggggtctggtgtggattacctgcctggatagacgaggccgagcagcattagcgagggtcactggcgaggaggcggcgctgcaggcggggagtgagggttgcaacttggggaggtacgcagaggtaggggaagggtggcgtgtgaggtcgg

SEQ ID NO: 1557 - DNA, 281 bp, Triticum aestivum
  Clone ID: LIB103-037-Q1-E1-E6
ttacaacaccctatagtgagtcgtattattgccatgtcttcaggattcagtagctgttgtcgggtatcctcttggtggagatactatatctgtgacaaaaggcgttgtgtcacgcagtgaggtcagaccagatgcgcatggaagatcagatcgtcgtggggttcacattgatgcagtagtgaaggcaggaaacagtcgtggatcggcttttaatgagcagggcgaatgcgttggagtaccatttgacgtgttcaggtgagatgaagctgaaagtattggat

SEQ ID NO: 1558 - DNA, 402 bp, Triticum aestivum
  Clone ID: LIB103-037-Q1-E1-E7
cccgggtcgacggggatctgtatcataagtcgtctgatgcatctgctgttaagcatatggctctgggagttgctggcttgggttgtgaggatgctcttgtccatttgcttaactatatctggcccaacatattcgagacatctccccatgttataaatgccgtcatggaggctattgaggggatgtgagttgctctaggtgcagctgtggttctgaattattgcctccaaggccttttccatccagcaaggaaagtacgtgaagtatattggaagatctataactcgctgtatattggtgcacaagatgcacttgttgcttcttatcccgcactaagcgatgatggagacaatatcttcagccgtccagagctagccatgtttgtgtgatcaatatttacat

SEQ ID NO: 1559 - DNA, 397 bp, Triticum aestivum
  Clone ID: LIB103-037-Q1-E1-E8
acaccctatagtgagtcgtattacggtaaattgtgtgtaatgtctggattttgtgtggaggctatatatacccctccaccccttctccatttgagagagagccatcagaacgtgcctacacttccattactcattttctgagattgaaccacctacgcatgtgttgagaccaatatattccaatagtaccacaggattcctaatctctatccttccccgagttgatttccactcaaagaatctttccaccatatccagatctctgagagagagttgagtgttggggagactatcatttgaagcacaagagcaaggagttcatcaacaacacagcatcgattaccttttggagaatggtgtctcctagattgggtaggtgtcactttgggagctccgt

SEQ ID NO: 1560 - DNA, 426 bp, Triticum aestivum
  unsure at all n locations
  Clone ID: LIB103-037-Q1-E1-F2
cgggtcgacggggaacttcacgcattaactatgaagaaaggagttagcttggtacttcatggagcatctggcctccctcatgaacttgtaaaggagtgcatagatttgggggtgaggaaattcaacgtgaacacggaggtccgcaacagctacctgcagtcactcaagaagccagaaaaggacctggttcaggtcatggagtctgccaaggaagcaatgaaagttgttgtagcagagaagatgcgcctcttcggatccgcaggcaaagcctgaatatagcgatacaatgaaaactggagccagcaacactccatcattaagtgttgcatgcccattttagcgatcctgctangcttgtgacagcgaattgccggaaccagtttcttaataaagcactgatacagttgcctgaagaaattaagttgc

SEQ ID NO: 1561 - DNA, 313 bp, Triticum aestivum
  Clone ID: LIB103-037-Q1-E1-F5
atactacaccctatagtgagtcgtattaatacgcctgcgtctaacgaggtgaacacaacggggaatactacaggccgatacaaggcaagatggccagtcatgatgtgatcaggtacacaatttacatcagcaatgtgctcgacccagtgcacgcggacatctgcatctcctccaatgccacgtccagcaacaagtccatcatcaagcacatcatcgacaaactcacaggggactccgccaatctcgcccgctacaacaaaaatcccatcatcacatagctgtacatccagacctccgtcgtcctcgtcctccc

SEQ ID NO: 1562 - DNA, 301 bp, Triticum aestivum
  Clone ID: LIB103-037-Q1-E1-F6
caccctatagtgagtcgtattatctcccgcacatggagatcacgtcaaacatccggaagcctgagatggtcatgtgagcccagagcacagatatgcatttaggaaggatgttgtgtggcgtcattgttcgagtggacactgtggacatcttaatctatgtggaacttgcgggacttgttggtctgatgataatgtatgtgcattagtcactaccactgttggttcccattgagatccacgtccagcgttattacatcgttgtggggatatctgcctgttgacttcattttctcggttcgca

SEQ ID NO: 1563 - DNA, 376 bp, Triticum aestivum
  Clone ID: LIB103-037-Q1-E1-F7
accctaaagtgagtcgtattaggcttggtaagtaactatctcatctgaagggtgtagcagatggacggtcttagtggtgcaaacgattgaagcagtatgcgcttttaaccaattcattcccagaatgagatcaatgctacaggacttcagtacgataggagagacaagaaattccagcccttcaatttcaacagtaacatcgtgactaaccatagaggtttgacattggcccgcaggggtgtgtaccactagcggagtgtttatctcttcgtaatggatgccatgcaggaatgcaaattctgctgatatgaatgaatgggatgctcctgtatcagataaaacggatgcgggtactgaatttacgaagagtgtaccc

SEQ ID NO: 1564 - DNA, 316 bp, Triticum aestivum
  Clone ID: LIB103-037-Q1-E1-F8
atagtgagtcgtattaagctagcatctccagctatctcatgccagctgctgcagtttcaaaggagaaggagagtacgaaacggcgtgcgccaaagtctatgggatccgcgcgcaagaagcagcctgccatcgctaacccagcagcggtacgaggaaagggtgatgtcggggatgcaatggacttgtcacagtaggtggtttgtgtggtggtttgtttgggtacgagtgccctttgagatgacgagcatcacggattcgttgctctcacaagtttcagcgcatgcgatccaccagcggaggacggtaataggaagca

SEQ ID NO: 1565 - DNA, 439 bp, Triticum aestivum
  unsure at all n locations
  Clone ID: LIB103-037-Q1-E1-G2
ccggtccatgaattcacgggtcgacgctatgtactatatatacataagtgatcgagagaaccattcagtacagaagttcgtcatgcataccgagagaagtgatcgatcgacctctccttctccgagagattggtcgaacaacaagttttcgtatcatgtatccgacgctactggctacatacatgtacaatatgtataagatctcttaattacaaacccctagcatttgaaatcaacttccacatggtattctccggctttactgatgacgtgatcaagaaagaatcccgccaattcctcttgaattgctttcatgcgatctggttctaggagttcattccgcatctgccacgtctaatttgaagaaaggggctaattaatacatatatatgaatgaaactcaacaganatgatggtgtaataaaataaaaatgtgaat

SEQ ID NO: 1566 - DNA, 312 bp, Triticum aestivum
  Clone ID: LIB103-037-Q1-E1-G4
ggtcgagaattcacgggtcgacgacgacccctactacaccggaggtgcctactactacgtgcagcccgctgacgacgaccgggagtagtttaggaggatcccaggcaggaggcctgcgcctctttcgatctgtatcccattttgtgctagccttcttaaggcaacttgtttaacttaggtcggtacccaaatattgttccttcggctaaccctccaataattaaccacttgtatccaaccctccaaggccccggccttgaataagaatccttgaagaactaatttaattggtaaatttgtgttgtaaaacct

SEQ ID NO: 1567 - DNA, 399 bp, Triticum aestivum
  Clone ID: LIB103-037-Q1-E1-G5
ttcccgggtcgacgggaatgtggaatgggtgcagcgcaaagttatccagcacaagacgatgctccgcactcgtggcctctcgacaccacctgaggtcgttggcttcgcggacggccacggactcgttttcattaggacaggcaacacggtgttctccatggatctcaagtcaggccatgtccgtaaggtatacacctgcaggtcaagaaactacgacgtcaccgttgttccctacatgagcttctgcactccagatcgtgctatgggcagactgccatcgccatgaggacccactgtcatcctgtaacaaggacctgctgctcttggcttgttgcatagatgacgctccaagtgttttgcttccaagctggactgtctaagtagttaccatggtcaatg

SEQ ID NO: 1568 - DNA, 340 bp, Triticum aestivum
  Clone ID: LIB103-037-Q1-E1-G6
ccctatagtgagtcgtattactcttgtagcatacaagtcggcccaggacatcgcgcttgctgacttgcctaccacccacccgataaggcttggacttgcactcaacttctcagtgttctactatgagatcctgaactctccagaccgtgcttgcaaccttgccaatcaggcatttgatgaagccattgctgagctggactccctcggctaggaatcctacacggacagcaccttgatcatgcaacttcttcgtgacaacttgactctctggacctccgataactcagaggagggtgggtgatgggatcaaggaagccgcttcaaattcttgagggagagg

SEQ ID NO: 1569 - DNA, 330 bp, Triticum aestivum
  Clone ID: LIB103-037-Q1-E1-G7
ggtcgacgggcgaaccaactgttcatcgccacatttttgcttgtttctaagaatagcaggtgacagacaggggtgttgctgaatttcctttctgaatctcgtgtgcaaattttgctagtataacaaatctgcagccctgttttggtttgggtttaaaaaaaaaaaaaaaaaaaaaaaaaaaaaaaaaaaaaaaaaaaaaaaaaaaaaaaaaaaaaaaaaaaggaagcacaaaaagataaaagactaaaataagcatacatgaaacatcataacacttcatatagtgtgaccaaaattcaattcaggggccgatcattttacaaggtcttg

SEQ ID NO: 1570 - DNA, 422 bp, Triticum aestivum
  Clone ID: LIB103-037-Q1-E1-H1
ggtcgagaattcacgggtcgacggggtgaagaaagagaacgacaacatgcagatcgagctcaggcatatgaaaggcgaggatgtgaactccctgcagcccaaggaactgatcgccattgaggaagctctcacgaacggccagaccaacctcagggacaagatgatggaccactggaagatgcacaggaggaatgagaagatgctggaggaggagcacaagctgctggctctgaggatgcaccagcaggacgacctgagcagcggcatgagggagatggagctcgggtaccatcagggtagggatttcacttcccagatgccgttcaccttccggctgcagcccagccaccccaacttgcaggaagacaagtaggccaccgaatcctgccacggcctgtgtcaactgaagctcctctacctgc

SEQ ID NO: 1571 - DNA, 404 bp, Triticum aestivum
  Clone ID: LIB103-037-Q1-E1-H9
ccctaaagtgagtcgtattagaacaaaaacatcaatccttgtctgaggcagacttttcaagattagctgctatagtgaaagtattgagaaatacatcattttatcacacaagcaagcttgcagatgctgacatcgtgttgttactaaaaatattgaagtcttggccttcacagatgatgtttccagttgttgattttctgatggtgtttgtgttgcatcctgacggggctactttacgtcttaagaccatcgaaagtggaaacgatgtagccatggaaaccttccgtaaggctgtagcaatacctgtgcactcaccgaatgtgcttacaatcctcaaagcagttactaacttatttgacaactcatgcttacaccaatggttgaaaacccattgtgctgagatt

SEQ ID NO: 1572 - DNA, 475 bp, Triticum aestivum
  Clone ID: LIB103-038-Q1-E1-B10
taccggtacgaaattcccggggccacggggaagaagccaaaggcggagaagcgggcgccggcgaccaaggaggccggcggcgaggggaagacgaggggcaggaagaagggcagcaaggccaagaagggcgtggagacgtacaagatctacgtcttcaaggtgctcaagcaggtgcacccggacatcggcatctcctccaaggccatgtccatcatgaactccttcagcaacgacatcttcgagaagctcgccggggagtccgccaagctcgcccgctacaacaagaagcccaccatcacgtcccgggagatccagacctccgtccgcctcgtcctccccggcgagctcgccaatcacgccgtctctgagggcaccaaggccgtcaccaagttcacctcatcctatgctagtctgccgtgtccgtgaactgatggctgcattctgtatgtagtttagcagtaccatgttacaacct

SEQ ID NO: 1573 - DNA, 371 bp, Triticum aestivum
  Clone ID: LIB103-038-Q1-E1-C7
ggcttgctgttgatgtagctgttgctgttgttgttgttgttgttgttgttgttgttgttgttgttgttgttgttgttgttgttgttgttgttgttgttgttgttgttgttgttgttgttgttgttgttgttgttgttgttgttgttgttgttgttgttgttgttgttgatgtttgttgttgtagttgttgttgttgttattgtagttgtagttgttgttgttgttgttgttgttgttgttattgttgttgttgttgctgttcttgttgttgttgttggtgatgttgttgttgttgttgttgttgttgttgttgttgttgttgttattgatgttattgttgttgttattgttgttgttgttgttgttgttgt

SEQ ID NO: 1574 - DNA, 472 bp, Triticum aestivum
  Clone ID: LIB103-038-Q1-E1-D12
taccggtacgaaattcccgggtcgacgggaagactaccgatcttattaacaattgcctaagataattcctcacaccaatccatcattacccacactcgctatttataagatatagtaatatattctaaatttatgataacagcacctatttttatattttagttctatgatatcatgcgaagttatcctcttcatacccacaacgtagttttatttctcggttctagatggaagcaaacgtttggtgtatgtagagtcatatcagtggcagataggacttgagagaacattgatcttacctttagctccttgtgggttcgacactccatacttatcacttccacctttggaaatttctatgatgattccttgcacttagggattatcactatccaacatgcatcttaaagtattaatgtggagatattatatattatcttcaccctgcattcgaaggacaaatacacaatca

SEQ ID NO: 1575 - DNA, 347 bp, Triticum aestivum
  Clone ID: LIB103-038-Q1-E1-D8
ttgacggggttaggaagaagttgagtcgtagtgtcatcgtctccacatcacatgcgaagatcaaagccagataaatgcttatctcatatgacgctgctcagcggatgaactaagtttaacattgttgaaccatatctattcctcatccgtgagtactgttcagtcatactgtggctgtttggctccaattttggaagtcaattttgtttgtctgagacatcttggaaagaacagtgtaagaatgagctctaaaagatcaaagcttacataaaagtggacgctctataagatctaagcttacgtatccgtgcatgccacttcatagctcttcgatattgtcacccaaa

SEQ ID NO: 1576 - DNA, 281 bp, Triticum aestivum
  unsure at all n locations
  Clone ID: LIB103-038-Q1-E1-D9
taccggtacgaaattcccgggttcactagaggtggaagaatgaaagtagggggcttggttcgccggaatcgaagtgagcagaggcggcggccatggcggcaatggggggcacagagagctccgggagctcgggctagtggtcaaggaggggaagaggagggtggtgaggctgtggtgtgctcgancgaggcaggggatggctatttatagccggggcgagagggatgggctcgggtgctgtcgtgcgcatccggccgacacccgagctcggcctcgctcgc

SEQ ID NO: 1577 - DNA, 470 bp, Triticum aestivum
  Clone ID: LIB103-038-Q1-E1-E10
tacggtacgacattcccgggtccacgggccattcattataacctgaaggacggggcatatactcaatatcataacgttcccaagtcagacctttggataccatcctagtacccagacagaaagctgcatcagttcgcggtgaagccgccaatgggtaatatgagtaagctagtttggactgtctcgctcgccaaccgcgagggccgtagtcgagttcaccctttggtatacttatagctttaactatgggacagtcttggtcatcggagctaggttcatatagtttctgttgcttggctagctcgacaagggatagtcgatgtgagggaaccgtgggcgaattctgcgccatctctatacaagaaaaatatacgtgtgttggtacagttacaagccatgttcaaaacagcaaaaacaagtgaccatggtaaatgaatggaaattttaccacggaggcaatagtccgagcg

SEQ ID NO: 1578 - DNA, 485 bp, Triticum aestivum
  Clone ID: LIB103-038-Q1-E1-E2
taccggaccgagattcgcgcgtccacgggattcaattcacggtgggacgtatacacaggcagctcaagcagagggtctcggctaatggccgtgtgggtgccactgctgctgtgtactctgcagcaatccttgagtaccttactgccgaggtccttgagctggccggcaacgctagcaaggatctcaaggtgaagcgtatcacccctcgccacctgcagcttgcgatccgtggagatgaggagctggacaccctcatcaagggcaccatcgctggtggtggtgtcatccctcacatccacaagtcactcatcaacaagacctccaaggagtgaatgaaatgcaataacgggtagttgttgtgtgttgtatcttcgtgatcccttgttatgttgtgctatctgttacgtgttgctattatcacaacctgaataggttgtctgaatttgtgattgggctagctttcggtaacttgttattacgtaaag

SEQ ID NO: 1579 - DNA, 455 bp, Triticum aestivum
  unsure at all n locations
  Clone ID: LIB103-038-Q1-E1-E8
ggtccgaaattaccgggtgcccggcacaacatcaaaaacaagctgcagcttgtcatgaagagcggcaagtacacgctcggctacaagaccgtcctcaagaccctcangaactccaaggcanagcttgtgatccttgctaacaactgccctccgctccgcaagtctgagattgagtactatgctatgttggcgaagatcactgtccaccactaccatggaaacaatgttgatttgggaactgcgtgtggtaaatacttccgagtctgctgcctgagtatcatcgaccctggcgattccgacatcatcaacgcaacaccagctggccagtaaacctgtgtatgccattttcagtgtctcgtctgatgcgtcatctaaggtggttctagagtgtagttcttgctggacttgatttggtcttgtgtacatcatttatcagtcaatcaagtttgatggga

SEQ ID NO: 1580 - DNA, 456 bp, Triticum aestivum
  Clone ID: LIB103-038-Q1-E1-G10
ttcccgggtccacgggaactgccgccagaatgccttctccgcctcatggccctccaattggttgaagtgctatacaacctctgtcacactctccaggagatctgcgaaggcctctgcagaatgccacagttgggtgagcttgatgcaccctttgcagccaaacacacactacaataaatatggcttacccgcgggtatttgctccacttgctggtgcatctcacagtcggcccgggccacggtctggagctcggagtgcgctagctggagcttcttgagctcttctttcgcttgcttctccttggactgaagtttatcgcgtgcttagaacatgcctttcagggtctggtcgatctccaggacccacgctaggtccttctctcaaccaccttcttggcaacttgggccttctctgccttcgcggccgcaaccttttgctgctccacctcctaccga

SEQ ID NO: 1581 - DNA, 457 bp, Triticum aestivum
  Clone ID: LIB103-038-Q1-E1-G5
ggtccgagattaccgggtccacgggtcacttataatattttgagagtcctttagaagagcatggtaatttgatttggttataaatttcaaatactaagagaagttggatgcttgatagttgttttgagatataaaggtggtaatattagaggtgtgctagttgagtaattgtgaaattgagaaatacttgtgttgaagtttgcaagtcccgttgcatgcacgtatggtaaacgttatgtgaaaaatttgaagcatgaggtgttctttgattactttccttatgagtggtggtcgtggacgagcgctaccaatctacccccccccccaaggagaatgcgcgtagtgcttggttttgatgacttgtagatttttgcaataagtatgtgagttctctatgacaaatgttgagtccatggattatacgcactctcacccttccatcattgctagcgccttc

SEQ ID NO: 1582 - DNA, 482 bp, Triticum aestivum
  unsure at all n locations
  Clone ID: LIB103-038-Q1-E1-H11
acgcctgtcggtaccggtacgaaattcccgggtccacgggagctctgcaacttcccgttcttgcatggctgtgtcacactttctgtcagcgggcgtggttgctctgtctggactacagttttctattgcttgttttccttagcggttttctatattttcagcgtatcatccccatgtatgtagggtttgtggatgcacacacctcatttgtatttctgtcacctagaggaattgaataaaaggcttccgtttggggaaaaaacaacgtggctgctcccggaaatggttgtattgagggagatgattggtggccctgagcctcgaagtgaataaatgataagttcatggtgctaataacggggcaaagtctcatccatgctagagtaatcttgattagtaatagcaggagtctacgtggtgtttgatattgtntgagctagctctacgtgttgtagtagcattggagttgcctgtatgtgtcc

SEQ ID NO: 1583 - DNA, 474 bp, Triticum aestivum
  unsure at all n locations
  Clone ID: LIB103-038-Q1-E1-H3
acgcctgtcgngtacggaccgaaattcgcgggtccacggggattggtagaggtttgagaagacctggtgaggctgctctgtctggttttgcttgttggcacaccctacagcacttcacatagtgtttgacatgggttttcatcttaggccaggcaaacaaacaattaattcgacgataagtgactgggaacccggagtgactgcccatagcactgtcgtggaaggctgccatgatttgttgcagaagagaagtcaacccgcccaaccaaatctggccacggaaacacaggataccttgttgtaaggaaaaccgccccttggggtctgctcggatagctagtcgagtaagtaatttctgcgctcgaggattgctcttgtagctgttcagttcatcttccaaccaggctggctgacaaacagatacaagggtcaatgtctctgtcgctggacctctcgaaagagcatctgccgctg

SEQ ID NO: 1584 - DNA, 445 bp, Triticum aestivum
  Clone ID: LIB103-039-Q1-E1-F11
ggtccgtacttaccgggtccacgggcggctctctatctcctcctcgtttcctctcgtcaattgtgatcgagagggcagcgatagagaagaaaggcggggaggagaaacaaggattgcccaagaggttctttctgatcagttcatcgccaggcatcatcatcgtcatcatcatcattatttcttaatggccgtgagtacctatctcactacgcttacatctcctcttttgtggttaccgatgctttactactgtctactcagtgcatgcatgcacgcatgatttcgacactgttatggccgcttgatcatgtatttgttttgtttttataattttggctcatgattgctgcgtctgcgtaatggtttctctatatatttttcaagcactctgtaatacacgtatggccgtattgaattgaccatggtttggtgggtgtggaacgat

SEQ ID NO: 1585 - DNA, 139 bp, Triticum aestivum
  Clone ID: LIB103-039-Q1-E1-F2
ggggtcacaaaacaaacaaacccaaggaaaaaaaaaaaaaaaaaaaaaaaaaaaaagcggcggcccaaaaggtcaagcctaagttacccttgaaggcacgtcaaaactcctccaaaatgtcaccaaattcattcacggg

SEQ ID NO: 1586 - DNA, 371 bp, Triticum aestivum
  Clone ID: LIB103-039-Q1-E1-F6
ccggctggacgggttgctgatgatgttgttgttgctgttgctattgctgttgctgctgttgctattgctgttgctgctgctgctgttgctgttgttgctgttgttgttgttgttgctgttgttgctgttgctgttcttgctgttgttgttgtttgctgttgctgttgttgctgttgttggtgttgttgttgttgctgttgttgttgctggtgttgttgttgctgttgttgttgttgttgttgttgttgctgcagttgttgttgttgttgttgttgttgttgtcggtgttgttgttgttgttgttgctgtcgttgttactgttgttgttgttgttgttgttgttgatgttgttgttgttgtagttgttgttg

SEQ ID NO: 1587 - DNA, 408 bp, Triticum aestivum
  Clone ID: LIB103-039-Q1-E1-F9
ggatgaggacagtcagaagggggagtcgccttacacgatgctgctgagagcgatcgggaggttcgctgactggtacataccatgcgcagaccaggagacagacggaatcagtccatggaccaaccttgcctgcgagatgtacagcttgaagcgctgttctcctggcatcgatcatggaagcatggagtgctgttgcctgcttagttgttttttgctgagtggttaaatggaactatgtaatggtgtgtgcttcttgtggtgtcgagttcttctcgttagattcagagatctgcgaatgtatctccgtatgtatgtgtttgggaatagagttcttgaccactagtactattgtgtgtgtgtgtgtgtatgtgtgtgtgtgtgtgtgtgtgtgtgtgtgtgtgtgtgtgt

SEQ ID NO: 1588 - DNA, 415 bp, Triticum aestivum
  Clone ID: LIB103-040-Q1-E1-A1
cggtccaaaattcacgggtccacgggttcgtcttagttcattggtaactttacttggagctatatttttattcgccacatgatatgtgttttgctaggagcatcttgtatgatattagtatttgctttttagtttaacacaatcatcctttctatacacacctttttggagaagcccgcttgattgaaatttattagaatactctatgtgcttcacttatatcttttgagctagataatttttgctctactgcttcacttatatcttttagagcatggcggtggcttaattttgtagaaattgctactctctcatgcttcacttatattattttgagagtctcttagaacagcatggtatttgctaaggttataaaattggtcctagagtggtaggcatcaaagttgggtttaat

SEQ ID NO: 1589 - DNA, 423 bp, Triticum aestivum
  unsure at all n locations
  Clone ID: LIB103-040-Q1-E1-A8
gtaccgagtccagaattcncgggtcgacgggctccgccctcctttgcgcgtagaactcgcgctcgttgatgatgtcctacgggaagtgttggcgccacaacgccatggcttcctcgtccatcttgcgatgtcgagacggtgatctcgcctccggttgtcgcgacgatcctcgtcggtgctaagccacggcagaggcgcgagctcctgcgcccactcccgcgtcggcacgttggggatgttcaatgttctatgaggccaccggaggcgccacgccgccgcgtcgtacgcgcaggcagccttgttggaggtgttgaaattgccgaggctgaggcgcatcccacggaaccggatctcggcggagaagccgccggaggggcgcgtgccgcggtatcnccaagtttcccgatgacgcatcggcatggt

SEQ ID NO: 1590 - DNA, 404 bp, Triticum aestivum
  Clone ID: LIB103-040-Q1-E1-A9
taccggtccaaaaattccgggtccacgggcgcttgcacaggataccaagcgagtgtttaggatcccacacagggcatttcttgacatgctcctagcacaccttgggctaatcaccggctcagtatgatcgtgttgtacatgaggacggcaagatctgtgtgaccatctttttcaacacctgtacattggatcctggaggaccaatcagtatgaacgcgtcgtgtcatcattcctcctggtctacattatgcccagacatgcaaagttgtggatcgtctgtaagctaccatttgctttcgtatgtcctatgtctgtgatatttgctactaaacctattgtgctacgtgctttctatgttcgtacattgttaggtggctccttattgtgtgcatacaaacaaacct

SEQ ID NO: 1591 - DNA, 398 bp, Triticum aestivum
  unsure at all n locations
  Clone ID: LIB103-040-Q1-E1-B6
gtacaagtccagaattcncgggtcgacgggaagggcatacatcgtgccggcgcaggacagggccatgtgatgggcgcatgcaattgttgcggtatgattactttggttcagatcccggcggggccaaatgtcggttgtaccggtaccattggcttcaataccgttggcgttgaaaagcgaccacatgatctgtttgatattcggcatctcacgtggtgacatgagtacatatcttgaatagaaccaaaccaaacctatcttgttgacatgagtacatatgtaagcctatgtggttcagtagaggcagctgctcatctgataatgatcaccagctatgtgtaacctgttgacaataagacggcactgctcaaacagaccatcanctaaaggctggggct

SEQ ID NO: 1592 - DNA, 389 bp, Triticum aestivum
  Clone ID: LIB103-040-Q1-E1-B7
gggtcgacggggccacccaagacccaacagagccgcaccactccccacctcgacctctctctctccccgcgacccttctccgccgccgccacccacgccggtgattcctgcagcttccggcgattccggctgctgccgacgatgccaagcacactcgcatgatcgcctccgtccgctccgtcttcccttccgagcagattcgtcgctcgcgtcctctaccggttacccgcgaccgtcccctaagctagggtttcggccaccgcgtcgccggcgtggctccggcggctcagatcgagcacgccaatgtcgccgtcgtttcgcttgcgctggaacagcaaagggaaggccatggacgacgccgctccagcccttctccgacgccatcaagc

SEQ ID NO: 1593 - DNA, 374 bp, Triticum aestivum
  Clone ID: LIB103-040-Q1-E1-B8
taccagtccagaattcgcgggtcgacggggacctcctgaaggtgatggaccggagcgacctcaccggcgcgcgtgcagcggcagatgctgccccgcacttccccctgaaaggacctggctgggaggtcgtggtggccgccgggggcggtatgctctcagcgctcaccagctgagccccgggtccgctccagtgaccggcctgtcaacggcgaccgacgccttggtattctggtgcttcggctttgttcgtcgcctgtgttaaggccaatgtttttgtgaacatgatttggccatgacaccggaatcttacccccccaaattaataatggccaaccaaggctttccattttttctggtctggaacccctaaatta

SEQ ID NO: 1594 - DNA, 445 bp, Triticum aestivum
  unsure at all n locations
  Clone ID: LIB103-040-Q1-E1-C11
ggtccgagaattaccgggtcgacggggaagtccgccgccaaggagggcggcgacaagaagggcaagaagaaggccaagaagagcgtggagacgtacaagatctacatcttcaaggtgctgaagcaggttcaccccgacatcggcatctcctccaaggccatgtccatcatgaactccttcatcaacgacatcttcgagaagctcgccggcgaggccgccaagctggcgcggtacaacaagaagcccaccatcacgtcccgggagatccagacctccgtccgcctcgtcctccccggcgagctcgccaagcacgccgtctccgagggcaccaaggccgtcaccaagttcacctcctcgtagagtgctcctgctcctgtgtctcgtanttagctgtccgggtgtgtttgtggccgtgtaatcgtgtaagaatcgcaccgtgatgttt

SEQ ID NO: 1595 - DNA, 306 bp, Triticum aestivum
  Clone ID: LIB103-040-Q1-E1-C12
gtttggccgactacaccctatagtgagtcgtattaggaaacgttgggcgacatcaatgcaaacgatttcacgttctgatgtagaagatctagatcctcaacgtgctgatgtatgttctttgctagatcgacatctcgtccatcgtcatatcaagcattaagtcgttcatgatggatatcatcgagaacctcaccagcgttgtcatggtgcttttttcgtaagcaccgaatctagtatcagatcataggagattaaatctccgtgcttgttcatctttcccggtaatttccccaactacgtattctc

SEQ ID NO: 1596 - DNA, 450 bp, Triticum aestivum
  unsure at all n locations
  Clone ID: LIB103-040-Q1-E1-C2
gggtcgacgggaaagcggcggtgaacctgatgaagctcacccttttccgccagtactacgtggttgtcatctgctacatttacttcacgcgtgttgtggtgtatgcgttggtgaccatcacctcgtaccggtacctctggactagcgtcgtggctggagagattgccacccttgcattctatgtgttcactgggtacaggttccggcctgaggtgcacaacccatactttgcgattgatgatgatgaggaagaggctgcagctgaagcactcaagttggatgatgaatttgagctatgagtactataatttggcggcctattccctgccagtgctacacaggtgttatatgtgcttctacaggacaagtgcttttcacaagacanatgcgatagactggtatctagtccatacccttttgtttttcatttgaagttagttaacattttgc

SEQ ID NO: 1597 - DNA, 407 bp, Triticum aestivum
  Clone ID: LIB103-040-Q1-E1-C6
gggtccacgggcggagcagaagaaggagatggccactattgctgtcggctggcaggtgggccagcagacgacggtggcaacaacccaatggaggacgaggcggcgccaccctcctcgccggtgcatgcggacctccccatcggcgagtcccgtgcgcactacacggacatgccacaggaggaggaggaggccaagttccagcaggcgtaggccgaccaggcctactacctccgcctcctcgaggagccccggcgtgcggaggagctgctcaccgcccgcacatccatcatgcctgacgtggacgtgcccaagcaggagacgttgctcgagtcctaccgctccgcacgcgagattcgtcacgaccgctggtggtaccgccaacgtcaggcggagttagaagccgccta

SEQ ID NO: 1598 - DNA, 292 bp, Triticum aestivum
  Clone ID: LIB103-040-Q1-E1-C7
tggtggtggtggtggtggtggtgttggtgttgatggtgttggtggttgtggtggcgttgttggaatttgtgttgttgttgttgttgttgttgttgttgttgtggtgttggtgttgttgttgttgttgttgctggtgttgttgttgttgctgttgttgctgttgttgttgctgttgttattgctgttgctgttgctattgctgtcggtgttgttgttgttgttgttgttgttgttgttgttgttgttgttgttgttgttgttgttgttgttgttgttgttgtcgttgtcgtcg

SEQ ID NO: 1599 - DNA, 412 bp, Triticum aestivum
  unsure at all n locations
  Clone ID: LIB103-040-Q1-E1-D1
cggtccgaaattaacgggtcgacggggagtcggccaagctcgcccgctacaacaagaagcccaccatcacctccagggagatccagacctccgtccgcctcgtcctccccggggagctcgccaagcacgccgtctccgagggcaccaaggccgtcaccaagttcacatcctcctagactgacggcgtgcagttggtttctgcatctgcatctgtactcttgactctgcttatctatctatctgcaagtagtggtggtggtagtagtacctgtgctgggtgattgccaacgctttgttggcccgttggttgtaagagctgaagttgctgctttggcaaactgaaatctatctagaactgaagttgtggtcctaaaaaaaaaaannaannaaaaaaaaaaaaagcggccgctct

SEQ ID NO: 1600 - DNA, 408 bp, Triticum aestivum
  Clone ID: LIB103-040-Q1-E1-D11
gggtcgacgggtggcggaagcgtatacaatacaagtgaccaatatccgggatcgcgcaggactgactgggactcctctaggcgtcggacacgctatcaaactcttcatccaagagatcgccttcgtcaacatctggccaaatcaacaagccaggtgagtactatgaaagtactcgcaaggcagttcggacataagatataacaaatgcaaacatgaagcatatgaacaagttaaccagtgcgatcagacatagagataataaatactggatgccaagcgagggtctgaatgacgcctcgagcggaaactgcagaatagtaatactggtgccaaacgagtgtctgaaagactcctcgagcggaaaatgcggagtaataatacaggtgtcaaacgagtgtctgaaagact

SEQ ID NO: 1601 - DNA, 218 bp, Triticum aestivum
  unsure at all n locations
  Clone ID: LIB103-040-Q1-E1-D12
cggtccgaaattcncgggtccacgggtgacggtggtgtcgctcttgaatggtggcagcggcatggcgcagttgagcgtgcggccaacgacagcaaacagacgggaaaagatgtctaagaggtagagtgaggcgagcgaacttgtctggtagaaggaatttggagggggtgctcacctacggcgacggttggcgaaaaacagtagagatggggctgtat

SEQ ID NO: 1602 - DNA, 432 bp, Triticum aestivum
  unsure at all n locations
  Clone ID: LIB103-040-Q1-E1-D6
gggtcgacgggattctttacagactgtactattttggcagattgatgttatgtttgcattgtttgcatatgtttgcttgtttaatgattctattttaggataggagtattaaatatgcagaggcattttagtatgcaattttgaataataattttagtgatttgttacagtagataatgataaggttattgcgttgatttatactaacttatctcacgagttcttgttgagttttgtgtggatgaagtttttaagatgtagggaagccgtaatataaaaggaattaaggagacacaaaagctcaagcttggggattcccaaggcaccccaagataatatttcaataagtctcaagcatccaagcttggggatgccccggtaggcatcncacctttcttcttcaacaattatcggtcagtatcggttgagcct

SEQ ID NO: 1603 - DNA, 401 bp, Triticum aestivum
  Clone ID: LIB103-040-Q1-E1-D8
gggtccacgggcgagaagacgaagaatccccaggagatgatcacgacggtgatgctgtacacagtcatcatgtagaagatgcaggacatgatgatgaggaagatgccggagcagacgacgggcatgatcatgaagatgatgatgccggcggagcagacgacgctggaccatcgatgggctgggtgcaggaccctcatattcaagagctgcttctcaagcagacggataacgcaagagctgccgcccgagagaatgccaagatggatcaacttgagttagacgcggttactccattgtatgaaggatgcaggcctgaggatacccgcctgaaagtaacgctcatggctctggagatgaaggtaaaacacaaaatgaccgacgtatgcttcgatgagaacatg

SEQ ID NO: 1604 - DNA, 299 bp, Triticum aestivum
  Clone ID: LIB103-040-Q1-E1-E1
gggtcgacggcagagtgactataattaaatatttgaaatatatgatgcatgattacccaaatcaatacgaactaaatacaataagaaagcacgatagcgggagagccacccaacaagcaccgcggccacgccgccctcttccggactcccctctctccctcgccctgcggccaacatggccacgccaccttcgttcgacctcccgtctctccatgccctccagccaccgcggccaggaatgacacgtcaccctcgtccagcatcccctctctccctcgcctccaccttcctatgtcatt

SEQ ID NO: 1605 - DNA, 454 bp, Triticum aestivum
  Clone ID: LIB103-040-Q1-E1-E6
attcccgggtccacttccaccaaaaagatggccaccatctcatcgacagatcgggcccctcacctctgtcaagtggtatccaatttccaggttgctcggtgagattttacagctttttgtagtttagatcgactctgttcttcatacctatagctcacaaaaaagccaaaaaaattagggttcgttcatcctatccgaaccaatctgagcctttgcataatcttttctgtatttgctttgttgaatttgcggttgcatcatcgtgtcaagttgctcgtcttagcgtctagtcctttagagtttcgagttctgttcataggttgtcatgtcgccgctgccatatatcacaaccgcatcatcatcatcgatgctgccatataccacctccgcaccaacttcatcgccgctgccatataccaccaccacatattagtcgccatcacaccaatctgag

SEQ ID NO: 1606 - DNA, 442 bp, Triticum aestivum
  Clone ID: LIB103-040-Q1-E1-F1
ggtccaaaattaccgggtcgacgggtcgaatacttatggaaccccaaaaattctaaaataaatttctggacgtgaggaatttacctattaatcatcttcaaaaataattaactaaatatcactctccaatgaaaaatggcagcaaatctcatgagcgctaaagtttctgtttttttacagcaagatcacaaagactttccccaagtcttcccaaaggttctacttggcacaaacactaattaaaagcataaaaccacatctaaacagaggctagatgaattatttattgctaacctctattatcacgcaactttcaccggtaccataaacccaccatataccttcctcaaaacagccaccatacctacctattatggcatttccacagccattccgagatatattgccatgcaactttccaccattctgttagtatgacacg

SEQ ID NO: 1607 - DNA, 269 bp, Triticum aestivum
  Clone ID: LIB103-040-Q1-E1-G7
ttcgcgggtccacgggaaggacgcaaacccgaagaaggccgaaaagatgggttctgagttgttcagtctgtgtgctgtgtagtgttcgtctgaatgagcgcagttaacgtgttctgtctaattgtcgatgtaacctgtgttgtgatggaagaaatccaagtgtagttgaaacttgttcttatgcaataccggccgatctaaaggatccaaacttacgtacccttgcatgtcatctcatatgtcatctaaatcgtcatccaaattcaatt

SEQ ID NO: 1608 - DNA, 442 bp, Triticum aestivum
  Clone ID: LIB103-040-Q1-E1-H7
ttcgcgggtccacgggcaacatcaagctcagcgtgaccaagagcaagccggagaccggcgaggcgatcggtgtcttcgagagcgtgcagccgtcagacaccgacctcggcgccaaggcgcccaaggatgtcaagatccagggtgtgtggtacgcgcagctcgagtctaactagagcagagcagaagtgaagatactcatcttgtgtgcatgcgtacgtgggttgatcggtggagaggaaacaatcgaggcaacaaatgtgtttgtgtgtgtatctagtaatctaaacccagggtgtcggtttatattttagcttctgttattattgtttcttcctggacaactcatgatattgatcccccatgaatgttcacaaaattctttgttgataaaaaaataaaaaatgataatcaaaaaaaagcggccgctctagaggattcaagc

SEQ ID NO: 1609 - DNA, 380 bp, Triticum aestivum
  Clone ID: LIB103-041-Q1-E1-A10
aggtaccagtcaagaattcccgggtcgacgggagtgccaaccaaggggtcaactccggggaagatgagaagagggaacctggtcctcctggagcagcagcggccagtgctaatggattccaagaaagcggcgtggaggagcacaacctgcctgacagcccctttgcatctcccacatagacgaatgatgctgctgctgcttcttcctctgcaaaaccagcccacgctggtaccatcattggcaacaatagcagccctcatctggtggcctcgtctctgttccctcctatgccaactgcccttgagctgcccccatacaaatcctgcttcttccaagtgcccaggttctctcctggccatggatccatcgggctgtaaata

SEQ ID NO: 1610 - DNA, 407 bp, Triticum aestivum
  Clone ID: LIB103-041-Q1-E1-A11
aggtaccagtctagaattcccgggtcgacgggcactgtcatatttcttcgcatgatcatgtagttgacatcgtatttgtggcaaagccaccgatcataattctttcatacatgtcactcttgattcattgcacatcccggtacaccgccggaggcattcatatagagtcatattttgttctaagtattgatttgtaattcttgagttgtaagtaaaaaagaagtgtgatgatcatcattattagagcattgtcccagtgaggaaaggatgatggagactatgattccccacaagtcgggatgagactccggacgaaaaataaaaaaaaagaggccaaaagaaaaaaggcccaaaaaaaaaaaaattaaaaaaaaaaaaaaaagcggccgctctaaaggattcaagct

SEQ ID NO: 1611 - DNA, 401 bp, Triticum aestivum
  Clone ID: LIB103-041-Q1-E1-A2
cggtccgaaaatccgggtcgaccggtgagaagtggagagctatgtctgatgaggacaaagcaccttatgtggaaaaggctgaacagaagaagaaggactatgagaagaccaaagccacctttgataacaaggagagtgcgagctccaagaaggccaagactcagaacgatgaggaggtcaaatctgaggtcgaagatgagggtagcgatgaggaaaacgaggacgatgatgagtaaatagtgtatcagagtatgaggtatcaaattgggtgttgggtccccgcttagtgtactagtttgctatcctgctatcctcagtgttagatgatgagatttggaagtacatgttgtgtttgtgtgttaagggggcccttttaaacgtgtggactcatggtttgagaa

SEQ ID NO: 1612 - DNA, 406 bp, Triticum aestivum
  Clone ID: LIB103-041-Q1-E1-A5
attcccgggtcgacggggccctcgccctctccatcgagaggctccaggagatccaggacgagctcgagaaggttaatgaagaagcaagtgataaggttttggaggttgagcagaagtacagtgagattcgcagacctgtctatcttcggaggtgtgacatcatcaaaacaattccagacttttggctgacagcgtttctaagtcatcctcttctcagtgagcttttgactgaagaggatcaaaagatgttcaagtacttggaatctgttgatgttgatgactctaaagatgtcaagtcaggctactccatcactcttaacttctctgagaatccgtactttgaagacagaaagcttaccaagccatatgcctttgctgatgatggaacaaccacaataaatgccac

SEQ ID NO: 1613 - DNA, 459 bp, Triticum aestivum
  Clone ID: LIB103-041-Q1-E1-A7
attcccgggtcgacatcacctcgacagacgacgcctgaattcacagaccatggccatcgcccataataatttgtatgtatataagagaaatctgtcataaacaaaagggatttcacctttacacagttaatacaaaagaatgacctaaaatcaaatgcctctagattaaacaaaaatcgagaacagaattgttcacccatcagcatgaaaggaatggtgtgctttatacagaaaggaatgatgtgctttataaaagtgagcacactacatggatgcaatggtcgtgtggtgataatctgcatcgagattggtcattcatatttcatctatgatctgtaaatagtcgaaaaagaaattccacttcaagatgaaaaacacaatagcatgggtattgaattgcaagatgggccttgtttcaaaactaaatcacatcccaatggtggtaatggtttcccttta

SEQ ID NO: 1614 - DNA, 381 bp, Triticum aestivum
  Clone ID: LIB103-041-Q1-E1-B11
aggtaccgagtctagaattcccgggccgacggggatgaatgaatccattgtgagaagagcccttgtgatcatgcaccagagggacgaagtggagtacaagagggagcgccatgtgattgtccgcaaggcttgagctgaactgaaccgatggagctaccatggaaccctctggccatctgatgtgtgtgtataagtagtgctgacactgcagcccgtttcctgaggaaatttgttgggtcgttgaaattgagttgtagttgtactactttgagctgtagctgtagccctaaatcatattgtgtcgaactgaagatgtaccccagtaagttcattcatgaatgcaacattttggcgttctgcagctgagcagagtcaatgcct

SEQ ID NO: 1615 - DNA, 404 bp, Triticum aestivum
  Clone ID: LIB103-041-Q1-E1-B12
aggtaccgatcaggaattcccgggtcgacggggacgccaccagtcgatcccttccttctgccggtgcgcgtcgagatccgttaacaggcgcccccctccggctccggcgacagagagggaggccaccgacggcggccggcgaccgaagatgttccttgtggactggttctacggggtgctcgcgtcgctcggactgtggcagaaggaggccaagatcctcttcctcggcctcgacaacgccggcaagaccacgctcctccacatgctcaaggacgagaggttggttcagcatcagcctacacagtatccaacttctgaagagctgagcatcggaaagatcaagttcaaggcatttgatttaggaggccatcagattgcccgccgtgtgtggaaggattactatg

SEQ ID NO: 1616 - DNA, 450 bp, Triticum aestivum
  Clone ID: LIB103-041-Q1-E1-B2
ggtccgaaattcccgggtcgactatgtggccggtcagtagggtgcaatatggtgctctatgatgagctagtgatcgtataatcgccgcagaactatttctagtgaccttaaagagcgtattgttacatactttgaccttctgtgtatttttctcatttcaaattaagccatattaatcagaaaggacgcagtatggactactactactagtactagtactgctttgatgtgtcccgtcaactcgccgaacgaggagaagcttgcttactacgcctctccctcgcccacgcacgcggtggttcgcaggacgaggagagggttttgactacagcaccctctccctctccctcaccctcgccctcgccctcgcggtggacgtgcaacagttcaatcggtgtcagattgccagaagcatattgtactgtaatatcatcattgttggaccttccg

SEQ ID NO: 1617 - DNA, 360 bp, Triticum aestivum
  Clone ID: LIB103-041-Q1-E1-B5
tacggaccgagaattcccgggtcgacgggaggctcaaagcttaggctgcgacagatcttatcccatactgttaccagctttttttcttgctttgtggcagattgtttgggtatccgtttatgcattgcaattgcaactctgagctgctgcgaatgttccaactgatgaggtttatgcattttgaactttatagtaatgctatttgcatgccttcatgaataaagaactcacaaaacaaaaatacaatcaaaaaaataaaaacctgactaatattaaaaaacggacgccctagaggatccaatcttacgtacacgtgcatgcgatctcataacccttctaaatcgtcaccaaaattcaatt

SEQ ID NO: 1618 - DNA, 439 bp, Triticum aestivum
  Clone ID: LIB103-041-Q1-E1-B7
gtaccggacctaaattcccgggtcgacattcgcccgcaagaaagcaacgagcgcgctttcctatttggggtcaagagtggcgctgatggtgaaggtaccaccagcgctatcctccttgatggacaccttcttggtctcaggtggagctgccattgccttctttcgcttgccggtggagctcgacggtgcgtcctcgacggtagcgcagcactccgaagaggtgcgcttgccggagtgggcatcagagctcttgtcggacttggtcttcttcttccccccgggagcttcagcggcaagtatcttgcgttctgctgcggctgctgcttcccggtagatcttgtcggcacagataagagcatccttcttgtcgccagggacagagatgacacttattgggcctggcattttcagtacgttgtacacatagtgagaggctgcc

SEQ ID NO: 1619 - DNA, 423 bp, Triticum aestivum
  unsure at all n locations
  Clone ID: LIB103-041-Q1-E1-C1
cggtccgaaatacncgggtcgacttcttctcccccggctgcggtggctgccgcgctctccaccccaagattgcgcagttcgctgagcggaatccggacgtgctgttcctgcaagtcaactacgagaagcacaagtccatgtgctacagcctccatgtccatgtcctccctttcttcaggttctacaggggagcccagggcagggtcagcagcttcagctgcacaaatgcaaccatcaagaagttcaaggacgccctcgcaaagcactcgccggacaggtgcagcctcggcccggcgcgggggctcgaggaggcggagctcttggctctggcggcaaacagggacctggaattcacctacaacgagaagccgacgctgggtgccgatcgccgaggctatccagatggaagctgcctccattggc

SEQ ID NO: 1620 - DNA, 370 bp, Triticum aestivum
  Clone ID: LIB103-041-Q1-E1-C10
attcgcgggtcgacgggtttcctcatcttcttcgcctcctctcctcttttttcttctgcatcttcctcttcttcttttttcttctcgtcctcatcctcatcttcgtccgttcgtttttcctcatcttcggctactcatctcctggttacgtcttctacgtctttccgaaaattgaagtaaacggaaatgtaaagctaaaactaaaactatggctaaaactaaaacgaaatcgaaggtaaacatagaccgaacactaaaaatacagattgtaaggaaaaaacgaaatctaaagctaaaactaaagtaaaactaaagctaaatgtaaaactaaacctaaaactaaaattaaaaggaaatcgaaactagacat

SEQ ID NO: 1621 - DNA, 448 bp, Triticum aestivum
  Clone ID: LIB103-041-Q1-E1-C3
gggtcgacgggggtctgcaagaggggtttgaggagtacgcggagaaggccaagacgctgcccgacaccaccaccaacgagagcatgctctgcctctacagcctctacaagcaggccaccgtcgggcccgtcaacacagcccgccccggaatgttcgaccttaagggcaaggccaagtgggacgcctggaagtccgtcgaagcgaaatccaaggaggaggcgatggcggactacatcaccaaggtgaagcagctgctcgaggaggctgccgccgcatccgcttcttcctaggccacagaacctacttttatccatggtggtgcagacatatgtgccaataaacacaaataaatttgaagtgctatctgtctaagcttatcgtcgtattgggtgtaattacgttgaacaagccccgcctgtgatatttgaatttacgccaatgatgaatc

SEQ ID NO: 1622 - DNA, 462 bp, Triticum aestivum
  Clone ID: LIB103-041-Q1-E1-C4
cggtccgtaaaatccgggtcgacgggagagcttaaatagtagagttgggaaatccaaaacagtggatgctcctgaaaagccacgaatgagctcagatgacgttgacaagtttaggaggagaagatgcttggtttggtgatctatgatatgacgtctgcacagttcatggagtagtttccgaacaccatggaatgggattcaagcaactgtgtcatagtgtatagcgaggaacgacgctgacagttcccgcagtagagggataatagctgtgttaaatgtgggagaagaagaatcatgacgctggtgaataagctgttatttatcaaaagagggtacgtctcaacatggtaactttctcggttaattaacctgtatcgcaacccccagtggcggtaggatttccatcatgtaaaagtgttgtctgtaatcaccagggacaacgatagaacatttgctgccacc

SEQ ID NO: 1623 - DNA, 429 bp, Triticum aestivum
  Clone ID: LIB103-041-Q1-E1-C5
gtaccggacctaaattcccgggtcgacggggttgaatgaatccattgtgagaagagcccttgtgatcatgcaccagagggacgaagtggagtacaagagggagcgccatgtgattgtccgcaaggcttgagctgaaccaaaatgatggaactaccatggaaaccctctggccctctgatgtgtgtgtataagtagtgctgacactgcagcctgtttcctgaggaaatttgttgcgtcgttgaaattgagttgtagttgtactactttaagctgtagctgtagccctaaattatcttgtgtcgaactgaagatgtaccacagtaagttcattcgtgattgcaacatttgggcgttctgcagctgagcagagttaatgcctatgaaaccgaaaaaaaaaaacgggagaaagaaaaaaaaagcggccgctct

SEQ ID NO: 1624 - DNA, 397 bp, Triticum aestivum
  Clone ID: LIB103-041-Q1-E1-C9
aggtaccgagtctagaattcccgggccgacggggggcgacgagggtttctgcgctcgaacaacccgggacccggcggcgaggaagagagagcggcggagatggcggtgatggacacggcgttcaaggcgctgacggcggggctgggcgtggcgacgctctacctggccggctccttctccttcaacgtctaccgcggcctcgcctggcactccgagcaatccaagctagaaaaagaaaatgagaagagccaagattgagagggaaggacggcaagttagtgtcggacattaccaatcaaaaggatctgcaagaaatctcatcttttgatgatgagtggtcattcgtggttgattttcggacagttcctttgatgtaatatagattcagggatttgga

SEQ ID NO: 1625 - DNA, 436 bp, Triticum aestivum
  Clone ID: LIB103-041-Q1-E1-D12
ggtaccgagtcaggaattcccgggtcgacgggtttggagctctagtcttctcaggcttcatcgtctacgacaccgagaacttgataaagcgccacacttatgacgagtacatctgggcgtctgttgagctttacctcgacattctcaacctgttcctgaccatcctacagatgctcaggcagaatgacaactgatgggtcctgtctgaaccaccaggaaccctgtgccaacccaggcatatgtcctacatttatcaagtcttttgaattgctatctacataactcggaagacatggtagtgagtttttgccatcatccagagatgaggccaaagtacaaccatatgtataggcgttctattgtgagtttatgtgcctgagtgttgagtgttgttaaactgccaacaatcagtgatcgtatgaaccgttttaatgcc

SEQ ID NO: 1626 - DNA, 452 bp, Triticum aestivum
  Clone ID: LIB103-041-Q1-E1-D2
ggtccgaaatacccgggtcgacggggctggagttaattttggctttcccgcgaggtgataagttttgttatgtcctaaggctaatgtttccctgcactaacaatgcagctaaatatgcggcttgattccatggcctcaggatggctaaagagatgaacctaagctgggtcaggtgttttggcgattaagatctagtggcccagcaattctcaggaacttgggattccaaggacccgctcattgtggcttatcgctgggcggttgatgatattgttgggcatttcaagggttatcaggtggaacatattggtcgcaggaaaaaaatgacgcggctgatgctttaagccggttggggtctcagcgtaagccaatgccacctaatgtctttcttgatgttctgagtaatccttcagtttaattgcctacacaagaggatcttgctatccctgacc

SEQ ID NO: 1627 - DNA, 471 bp, Triticum aestivum
  Clone ID: LIB103-041-Q1-E1-D5
taccggaccagaattcccgggtcgacgggaagccaaaggtatctgtaccgaacggtgtcaatggagagaaacagcaggatgccgtcaatgggaagccaaagtcgcctgtggcgaatggtgttaacggggatgcgaaggttccggcagagaaagccgctgccaccgctgctcctccggccgttacctacgcggcgaaggtggcccaaacagcagcggccgagaagaagcctgtggcgaccgagaagaagcctgttgtcgccaacggtgctgtcaagaccggagtagctgcttgatcgcattacccgatcctcccagctagccatgaagaacaaacggacggtgctggcgaaccaggcgagacatgcgggttccaaggtactgatcatcaaaggtggcgtctggaaagcgggtcggatagttaggtttccctagctctctcctttttcttcttctgtcgtcgtcgtactatca

SEQ ID NO: 1628 - DNA, 401 bp, Triticum aestivum
  Clone ID: LIB103-041-Q1-E1-D8
ttcccgggtcgacggggggctaacaggcgatgaaggggagcaagagtgatcttccagctgttgatcgagccgtctctccagtcactaacctctcccaaggcttccccccagcccctgctgatatattgacaacatttttcaccaatggaaatggagtctcatcatagagcaatagctgtatacatacatgtttatagcctgtatctaatgtcccagcagccagccatcacccccccatgagcctaggagccttctttttctttcttattaatctagagatcccttttttgtttaacctaatcggacatgaagcttcctcaagcttgtttttcattggctcttgctaaggtttggtcaagttgtcagctccaacatgtggtagctatgaacttatgatgatg

SEQ ID NO: 1629 - DNA, 435 bp, Triticum aestivum
  Clone ID: LIB103-041-Q1-E1-D9
ggtaccggtcaggaattcccgggtcgacgggatcttcagccccatcaacgaatcagtaaccgcttacttcccctcatcagcaatatagtgcctgcaaagtttcgaccaactggtccatctgttgttaggcaggattttttgctcggttgaagctagcagtttaccacttcaaatttagagtcttgaatctcaaggcatgtgagaactgagtttggttctccatttagtacagttgaaaatgtttgttttggctgtgtggcaatgccgtagcgtgtttgataattaggtgcaacttttaagatgactgaatgccttgcctgattgtttttttacctctgttgttatcattgctctaaattttaggtctgctcacgctgcatatcttataagttttgtattgtctgtagtatttctcaatcaagatgttcgaaggaa

SEQ ID NO: 1630 - DNA, 393 bp, Triticum aestivum
  Clone ID: LIB103-041-Q1-E1-E10
aggtaccgagtcaggaattcccgggtcgaccaggctgagaaaatgggacttgactacatggatgttgaaagtctcaagaagatgaacaagaacaagaagcttgttaagaagctagccaagaagtaccatgctttcttggcatcagaggccataatcaagcagatccctcgtctccttggccctggtcttaacaaggcaggcaagtttcccactctggttagtcaccaggaatctcttgaagccaaggtcaacgagacaaaagctacagtcaagttccagctaaagaaggttctttgcatgggtgttgctgtgggcaacttgtcgatggacgagaagcagatccaacaaaacatccaaatgagtgtcaacttccttgtgtccctcctgaagaag

SEQ ID NO: 1631 - DNA, 401 bp, Triticum aestivum
  Clone ID: LIB103-041-Q1-E1-E11
aggtaccgagtcaggaattcccgggtcgacgggtatactacatgcatatatggctggtggaaagctctatgattacaatttttgcatcaagccaattttccctactgcaaaggaataaatttttatttaactatcatggtagttgttaaacattgagaagatagacatcctctcaatcctaattaaacatcatcattaaatcccaacaaaattaattagagtaacatgatgagattcacatgctaatccaattatccaagtactagatactcaagacgtccataactggggacacggctaaccatgattagtttatacactctgcagaggtttgcgcacttttacccataagactcgatctcctccattgtattttctcgcactacatgatgtttgagaaa

SEQ ID NO: 1632 - DNA, 432 bp, Triticum aestivum
  Clone ID: LIB103-041-Q1-E1-E12
aggtaccagtctagaattcccgggccgacgggttcccgattagtacaggtgagggctagcaaaagactgggaagcgaccaactagagagcgacaacagccatgtacatgcattaaaattaataaacattggatgcaagcatgagtaggatataatccaccatgaacataaatatcgtgaaggctatgttgattttgtttcaactacatgcgtgaacatgtgccaagtcaagtcattcaaaagaggataccaccccatcataccacatcataaccatcttaatagcatgttggcacacaaggtaaatcattataactcatagctaatcaagcatggcacaagcaactctgatctctaattgtcattgcaaacatgtttattcataataagctaataaagaacgcgggactcatcatatttacaaaaacaaaag

SEQ ID NO: 1633 - DNA, 110 bp, Triticum aestivum
  Clone ID: LIB103-041-Q1-E1-E2
tcaaaagaaggcggtcgctccagacgatccaagcatacgtacgcgtgacatgcgacgtcagagctcttcgaaagtgtcacctaagttcaaatcactggtcgtcggtttac

SEQ ID NO: 1634 - DNA, 390 bp, Triticum aestivum
  Clone ID: LIB103-041-Q1-E1-E3
gggtcgacctccaccaaagcgatatccatcatctcatcgaaagatcgggaccctcgcctctatcaagtggtatcagatttccaggttgctcggtgagattttacagtttttcgtagtttagatcgagtctgttcttcatacctagagtccacgaaaaagccaaaaaaaaatttagggttagttcatcccatccgaaccaatctgagccttgcataatcgtttctgtatttgctttgttgaatttgcggttgcatcgtcgtgttcagttgctggtcatatcgtctattcttttacagtttcgagttctgttcacaagttgtcacgccgtcgccgcatcatcatcatcgcgtctaacagctaccaacaacgttcagaatccgtaaccatata

SEQ ID NO: 1635 - DNA, 464 bp, Triticum aestivum
  Clone ID: LIB103-041-Q1-E1-E4
cggtccgaaaatcccgggtcgacgggcataggaagagagttagacttcgttgttgcatgctatatgttactttgtgctcaccactaaatcacaaatcattgttaattaaaattggctttgatataccttgggatccgggtggatctattacttgagcactatatgcctagcttaatggcgttaaagaaagcgctgccagggagacaacccggaagttttagagagtcatttatttctgttgagtgctttcatatagtttaaaaacaaaataaaataaagaggggaacccaaaacttttcaaaaaggaaagtgaaagtgagagagacaatcattgttgaagtgggggagctccttgaactttgttcatgctcacggaaactttgtgaatcttgattacagaaatttttcaacaaaaataattatccccttgtacaattacattgtactagacaaataatgtgcca

SEQ ID NO: 1636 - DNA, 454 bp, Triticum aestivum
  Clone ID: LIB103-041-Q1-E1-E7
taccggacctaaattcccgggtcgacgggaagaagcccaaggcggagaagcggctgccggcggggaagtccgccgccaaggagggcggcgacaacaacggcaagaagaaggccaagaagagcgcggagacgtacaagatctacatcttcaaggtgctgaagcaggttcaccccgacatcggcatctcctccaaggccatgtccatcatgaactccttcatcaacgacatcgtcgagaagctcgccggcgaggccgccaagctggcgcggtacaacaagaagcccaccatcacgtcccgggagatccagacctccgtccgcctcgtcatccccggcgagctcgccaagcacgccgtctccgaaggcaccaaggccgtcaccaagttcacctcctcgtacagtgctcctgctcctgtgtctcgtagttacctgtccgggtgtgtctgtggccgtgt

SEQ ID NO: 1637 - DNA, 419 bp, Triticum aestivum
  Clone ID: LIB103-041-Q1-E1-F10
aggtaccagtcaggaattcccgggtcgacgggcccgttcacgtccatcttcctcatcgtctactgcttcctgccggcgctgtcgctcttctcggggcagttcatcgtcaaggagctggacgtgaccttcctcacctacctgctggtgatcaccctgacgctgtgcatgctggcggtgctggagatcaagtggtcgggcatcaacctggaggagtggtggaggaacgagcagttctggctcatcggcggcaccagcgcgcacctggccgccgtgctgcaggggctcctcaaggtgatcgccggcatcgagatctccttcacgctcacctccaagtcgggcgccgacgacgagaacgacgagttcgccgacctctacatcgtcaagtggacgtcgctcatgatcccgcccatcgtcatcat

SEQ ID NO: 1638 - DNA, 392 bp, Triticum aestivum
  Clone ID: LIB103-041-Q1-E1-F11
caggtaccgatctggaattcccgggtcgacgggggtgaggacggtgacgagggcgatgagtactagagcctgcctcctggtgctttcccaaggcatgctgctgcaatcctatgatctgcccgagtggctttatctgttatctgtctgtttgaacatttgctttgtggtgtttgttttacaacctgttgtgttgtaagaaccttgtatgtttgaacctgttatgcaccttggttaatatgcatgctatctggttatctacaccatagcctctaaaaaaaaaaaaacaaaaaaaaaataaaaaaaaaaaaaataaaaaaaaaaaaaaaaaaaaaaatcaaaaaaaaaggaaaaaaaaaaaaaaatacaaaaaaaaaaaagcggccgccctaaag

SEQ ID NO: 1639 - DNA, 408 bp, Triticum aestivum
  Clone ID: LIB103-041-Q1-E1-F12
ggtaccagtctagaattcccgggccgacgggtatggtagacattggagcatgtgcttgtagttcaaatttgaattatgcacattaaatgcccagaaactcaattaatgtataaaaaaggcgaaacgaacgcggaataattccaaaatttagcacgatacttctatttggtctaatctgcctgtgcaaaaaaacttaaggcgggagaaggcagtgtacgtatgtcgtttcgcacatggaggtgacacgtcccctctcggaaccagtagccttcttgagggaagctccggtttgcaagaagcttacaccaaagcctgtcccaattcagccaaaaaattcaccacaacatgttggtgccatgtcatgagaccatgccaagtttcatgattttcaagcgtgttttggattta

SEQ ID NO: 1640 - DNA, 403 bp, Triticum aestivum
  unsure at all n locations
  Clone ID: LIB103-041-Q1-E1-F5
acgcctgcangtaccggacctaaattcncgggtcgacggggccacatcagatgagatcctcaaggagatcgcgaggatcgacgccgccggcgtccagcgccacgcggcgagcatcaagcaaatcaccgatctcgcgaccaaggtcatcggctacacggaggctgtggcgacgaagaaatacgagaagacggtcgaggttangcagacgtccctcaaggtccctttgctggtgctcgccgccgctggtcatcgggtcaacttcactgtccttgatccactaccccggaaggaccgccgtgaccgacaaggccaagaacctggtgaataagaagaccgctgagatcaagatgtccttggaggacaacctgatgaagatcctgacagaggacgaccaggtgggcat

SEQ ID NO: 1641 - DNA, 464 bp, Triticum aestivum
  Clone ID: LIB103-041-Q1-E1-F6
ctgcagtaccggaccagaattcccgggtcgacgggcaacaatgaccaagattattaaggagatgctaccgcctgatgttcgagtagcaagagatacacaagatcttcttgttgaatgctgtgtagagttcatcaatcttctttcttcggaatccaatgacgtgtgcagccgggacgacaagaagactattgttcctgaacatgttattagggctctgcaggatcttggcttcaaggagtacgttgaagaagtttatgcagcctacgaacagcacaagcttgaaactctggactctccaaaagcaaccaagttcactggtatagagatgactgaagaagaagctgttgcggaacagcagagaatgtttgctgaagcccgagcaaggatgaacaatggagctgccaaaccaaaggagcctgcattagaaccacagaatcaaccccaacagcccccacaacctcaac

SEQ ID NO: 1642 - DNA, 392 bp, Triticum aestivum
  Clone ID: LIB103-041-Q1-E1-F9
ggtaccgagtctagaattcccgggtcgacgggggcagcacctgctggaaaggcggcccagactgcggcggcggccaagttgccgacaaaatctgctcccccggcgcaggctgggagggatgcgaggagcggaggcccaccatcacgtggaggatttggccgtggtgaacctggccgcggcagaggtggcggccgatacggccagaaccgtgactttggcagtgagaacacgaatggctaccagggaggttatggtggggtaggttctggagatggcgctgtaactggaggcggggatggggagagaggccctcgaccataccgtggaggcggtggtagacgtggtggttaccgcaacggtgagtttggtgatgactctgagagaccacctcg

SEQ ID NO: 1643 - DNA, 427 bp, Triticum aestivum
  Clone ID: LIB103-041-Q1-E1-G1
cggtccgaaatatccgggtcgactgggccgcgacccagtacctgccgccagtgccggattccacccattggcggatgcacttcgacagctcaaagatgcgcaccagtttgggagccggcattgtcctcgcctctctcaaaggcgacaagctcaagcacacgccgcaaattcactttgccgcctccaacaacgtggccgagtacgaagcgctcatacacggactctggctggccaaggagattggcatccgccggattctatgctatggcgactcggacttggtgctccatcagtcgtcaggcgactaggtcgccaaggatgcaaacatggcgagctaccgcttcctcgtctagcagatcagtggacacttcaacgggtgcgagttcctccatgtgccatgggccgacaacgagcaagctgatgccct

SEQ ID NO: 1644 - DNA, 389 bp, Triticum aestivum
  Clone ID: LIB103-041-Q1-E1-G10
gtaccagtctagaattcccgggccgacggggaagacacccgcgggcaagaagcccaaggccgagaagcggctgccggcgggcaagacggcgtccaaggaggccggcggcgagggcaagacccggggccgcaagaagggcagcaaggcgaagaagggcgtggagacgtacaagatctacatcttcaaggtgctgaagcaggtgcaccctgacatcggcatctcctccaaggccatgtccatcatgaactccttcatcaacgacatcttcgagaagctcgccggggagtccgccaagctggcccgctacaacaagaagcccaccatcacctcccgggagatccagacctccgtccgcctcgtcctccccggggagctcgccaagcacgccg

SEQ ID NO: 1645 - DNA, 394 bp, Triticum aestivum
  Clone ID: LIB103-041-Q1-E1-G11
taccgatctagaattcccgggccgacggggaagtcaaccgccaaggagggcggcgacaagaagggcaagaagaaggccaagaagggcgtggagacgtacaagatctacatcttcaaggtgctcaagcaggtgcacccggacgtcggcatctcctccaaggccatgtccatcatgaactccttcatcaacgacatcttcgagaagctcgccggcgagtccgccaagctggcgcgatacaacaagaagcccaccatcacgtcccgggagatccagacctccgtccgcctcgtcctccccggcgagctcgccaagcacgccgtctccgagggcaccaaggccgtcaccaagttcacatcatcataggtttcgtcgtctgtttcatggattgatggcg

SEQ ID NO: 1646 - DNA, 362 bp, Triticum aestivum
  Clone ID: LIB103-041-Q1-E1-G12
caggtaccagtcaggaattcccgggtcgacgggagggcaggaggaagaagaaggcgagatcggctgtgcaattatttggcggcttgtctttagtttcctttgcgattctttcccttgtttaagtttaccctgtggtgtgtgtgtgtccttgcgagactatttcggctctctgtctggtctctgcgacttggtagcttctcatgggctccatggtgttggatgatgtggagggaggagggttcgtgttagctaagttagtccactccctctgttcgtgttttgtaagttaattagtagtatgtgtgctactagtatatggaactttaaatcggttcaaaaaaaaattaaaaacaacgtaaaat

SEQ ID NO: 1647 - DNA, 438 bp, Triticum aestivum
  Clone ID: LIB103-041-Q1-E1-G4
ggtccgaaatacccgggtcgacgggccttatctttctttcataaaaaggaatgaatggctcggctagatggaataaccgagccagaacagaaaaaaagtagaacaggtataaataagaaaatcttagttaagagggttcatgtaaagaacaggttccaaatcacgatcgattcccttttcaaaacctgctgcagcagctcgggctcttcctgcatgccataaatggcccacaaaaaagaagaatcctagaacaaaatgagaagttgataaccaacttctaggagagacataattaactgcattgatctcggtagctacgccacccacggaatttaaagagcctaaaggagcgtgggtcatatattctgctgagcgtcgttcttgccaaggttgtatgtcttttttcaacctactcaagtccaaaccgttggggcccct

SEQ ID NO: 1648 - DNA, 433 bp, Triticum aestivum
  unsure at all n locations
  Clone ID: LIB103-041-Q1-E1-G8
taccggaccagaattcccgggtcgacggggacgacgacgtggatgtggacgagtcggatagaaagctcttagatgatgaaaagagacccgatatcacgaaacgaccacacactcctattggagatgaggtggaatgcaagaagccaaagatagcagaaggctcaaggtgccaaggagaagaacctgaggctggagggataaagaattcctcctgggtctgatgacaggggaatgcagtaaacaccagaagcatcaaaactatgatctggaacagtatcctgaataaactattttctggattatgaatgaattctgaagcatggggctataagtgaattatgtaacatggatttgtaactatggtggatgttaagttaacgttctatcagtacaaaanaaaaaaaaaaaaaaaaaaaaaaaaagcggccgctct

SEQ ID NO: 1649 - DNA, 393 bp, Triticum aestivum
  Clone ID: LIB103-041-Q1-E1-G9
aggtaccagtcaggaattcccgggtcgacggggtttgattccttgcaatagttttgcgatataaagatggtgatattagagtcatgctagtcgttaattgtggattagtagaaatacttgcattgaggtttgtgattcccgtagcatgcacgtatggtgaaccgttatgtgacgaagtcgaagcatgatttatttattgattgtcttccttatgagtggcggtcggggacgagcaatggtcttttcctaccaatctatccccctaggggcacgtgtagtagtactttgcttcgtgggctaataaacttttgcaataagtatatgagttctttacgactactgtgagtccatggattatacgcagtctcacccttccatcattgctagcctcct

SEQ ID NO: 1650 - DNA, 334 bp, Triticum aestivum
  Clone ID: LIB103-041-Q1-E1-H1
gggtcgacgggttttatgtacatcgctagacaacttacgcaggacttcatagttttgtaggatttttaaagttccagagctagtcgaaagttacaaattgctacaaagtgttctttatttgacagattcagatctttcgtgtgttgattgctgagtttcacgaatctatgagcactaccagggggtatcaaccatagacaccttcatctatatcatgttcaacaccatcatcgataaatcatgcattcagtacagtaccttatgtggtggattatcattcctgcactaatggagcttacgatatttcccgtctacttctgtgatctcaaatttt

SEQ ID NO: 1651 - DNA, 388 bp, Triticum aestivum
  Clone ID: LIB103-041-Q1-E1-H10
gtaccagtcatgaattcccgggccgactggcagaggaagacaatcgaaaggggacataatgatcagatgcagttcgactctagatataacgtacaaggtctaacaggtgggagtcaaaaatgaagataccaacaacttggttatcgagctgctcaggcgcctcaattctcgggacggttactaaatatacagatctgttgagatatgtgggatattgtgtgaattaatgacacgtgacatcattgtgggttactacaaatcgagaagatgatgccatggcgggttatgagtgctcacacaaataaagaagggaagatattttctaaatgttgaagattgacatgaaccagttcaaatcaacatgggtcctaatgttggagatataact

SEQ ID NO: 1652 - DNA, 326 bp, Triticum aestivum
  Clone ID: LIB103-041-Q1-E1-H12
gacggggatagtaagccactttcatgcctataacgctgaccaaagccatggacacaagatccaacatgacgatcagtaaagcttgactatgtacgaccgcatgcttctgtaggacatgcatgatcgatccgtgcccgcaacaagttgattctcattcctcatctctcaacttgatgcttcactagtattgattactcagtacttatctggaaatcctagcattgacgatatatcaagcaggttgctcatctagagcaaactgggcattacttaaccgtaaaggataatcaggttgtccatcttcatccctcgaattgcatgggcca

SEQ ID NO: 1653 - DNA, 373 bp, Triticum aestivum
  Clone ID: LIB103-041-Q1-E1-H6
attcccgggtcgacggggagaagaagaaatccagcgagaacatcaaggtcatctacgcccgcgccaagcagtacgccgaggagtacgatgcccaggacaaggagttggttcagcttaagcgtgaggcccggatgaagggtgggttttatgtcagtcctgaggccaagctgctgtttgttgtcagaatcagaggtatcaatgccatgcacccaaagaccaagaagatcttgcagctgttgcgtttgaggcagatattcaatggagtgttcctgaaggttaacaaggccaccatcaacatgctccgcaaggtcgagccatatgttgcatatgggtacccgaacctgaagagtgtgagggagttgatctacaagag

SEQ ID NO: 1654 - DNA, 445 bp, Triticum aestivum
  Clone ID: LIB103-041-Q1-E1-H8
attcccgggtcgacgggaacccactatctcggatttcaaggaatttgattatgataatttttctttagaaggttgtatttccttgttgcaatccgttgttaattctcctcatgcttatagtcaaaataaagcttttaccaaacatattgttggtgccttgatgcaatcttatgatgaaaaacttaatttggaagtttctatacctagaaaacttaatgatgagtgggaacctactataaagattagaattaaagatcatgagtgttttgctttgtgtgatttgggtgctagtgtttccacgattcctaaaactttatgtgatattctaggtttccatgatcttgatgattgctctttaaatttgcaccttgcagattccaccattaaaaagcaatgggaaggatcaatgatgttctcaattgttggaatagaaatttggtgcccg

SEQ ID NO: 1655 - DNA, 375 bp, Triticum aestivum
  Clone ID: LIB103-042-Q1-E1-A11
ccgggtcgacggggagtctagtcttttagagtttcgagttctggtcataagttgtcacgccgccgccgcaccatcatcatcgcccctgccatctatcaccaccgctccgaatccgtatccatataccaccaccaatccgtgtccatataccaccaccgatccatatccatatactaccaccaccgctgccatataccatcaccatatatctaccaccaatccgagttccttgattactagggttgttttcgagatccatctagttttcaattcgtgtttccttgccggagtcaggtagccacgctccgtttaggcccaaaatttttcgaaaacgcatttttcgaaaaattttccagctatcctacttttaagtgt

SEQ ID NO: 1656 - DNA, 403 bp, Triticum aestivum
  unsure at all n locations
  Clone ID: LIB103-042-Q1-E1-A12
caggcaccggtccagaaatcccgggtcgacgggaatgttactgtctactgatacgtctccaacgtatctataatttatgaagtattcatgctattatattatccatcttagatgttttatatgcatttatatgctattttatatgatttttgggactaacctattaacctagagcccagtgccagtttgtgttttttccttgtttttgagttttacagaaaaggaataccaaacggagtccaattgacctgccaatttttgttgattttttatggaccaaaagaagcccctggagcaaaagagttgggccagaagagtcccgggctgtccacganggtgggggcgcgccctcccccctgggcgtgggcccctgcctcatggacgactcggagacccccctgac

SEQ ID NO: 1657 - DNA, 449 bp, Triticum aestivum
  unsure at all n locations
  Clone ID: LIB103-042-Q1-E1-A2
accggtccagaattcncgggtcgacggggacaacatcaacaacaagctgcagcttgtcatgaagagcggcaagtacacgctcggctacaagaccgtcctcaggaccctcaggaactccaaggcaaagcttgtgatccttgctaacaactgccctccactccgcaagtctgagattgagtactatgctatgttggcgaagatcactgtccaccactaccatggaaacaatgttgatttgggaactgcgtgtggtaaatacttccgagtctgctgcctgagtatcatcgaccctggcgattccgacatcatcaacgcaacaccagctggccagtaaacctgtgcatgccattttcagtgtctcgtctgatgccattttcttgctggacttgatttggtcttgtgtacatcatttatcagtcaatcaagtttgatgggactatggtttttcc

SEQ ID NO: 1658 - DNA, 389 bp, Triticum aestivum
  Clone ID: LIB103-042-Q1-E1-A3
cgggtcgacgggggactacacctacaacacactgggtcaaaatgcagtgccaccgcagtgagaagcttatgtgcgacaggtgatgaaggaagagcatgcatggctttgttggaagcacctgtgcagcatatttgtagtatctggttatattccatggtgtaatgcgcactatataatttgtgcatccagccaatctcgaactcattgtacatagttccatcattagtgaagatcatgtatgtgtgaccctggctggctagttggaaaggacttgttgtcaacatttcgttggatgtttgttaagctagctggtgatagcagtttatgatgtaaaaaaaaaaaaaaaaaaaaaaaaaaaaaaagcggccgctctagaggatccaagctta

SEQ ID NO: 1659 - DNA, 449 bp, Triticum aestivum
  unsure at all n locations
  Clone ID: LIB103-042-Q1-E1-A4
gggtcgacggggattgtgcgtgtgtatgcttgtgagaggaagagtgcttgtgataaaggttagtgaaaacagtcataactggttacgagaaggagggagggttatatcgggagcatgtctgcgagagagacacctcgggagagagtgcgtgagcatgtgcgagagaccaccgatggagagtgaaactacacataaaatactgatgtacgcattgattaaagatataaattgtatccaaatattaggatgggatcatgatattcgcaattcgcgtaaggaacggtcattgatccattagacatctagattatatcgaatttgagcatgtctatgtcattattcgacataattgatccacatagttagtattttgaactccagacaatgcatcgctttagcaatcgagtataaacatgagtatagttcatgttgtgtgtatanagcacatt

SEQ ID NO: 1660 - DNA, 303 bp, Triticum aestivum
  Clone ID: LIB103-042-Q1-E1-A5
gtacggaccagaattcgcgggtcgacggggagttccaagagtttagtcaacatgtcaggtgacatatggatgccaatgttgactgtcagtaagatggactttgtgctcgtcaggatatatgaccgtcctccctggtctgtcaaagcagggtgtatatcctgtgatcattttggaaacgcatatattactacaaaaactaccatgaaatatactttcgttcatgctatatattggagcctgagatagtgcagagtgatggtaatgcagtgtcagtcacacagaggccgctgaacggcacctatc

SEQ ID NO: 1661 - DNA, 464 bp, Triticum aestivum
  unsure at all n locations
  Clone ID: LIB103-042-Q1-E1-A6
gtaccggaccagaattcccgggtcgacggggagactcaagtcacaactcaaataaccactaatgctatggggatcaatatgggttaggttgcggaaggctatggtggttttgcggaagttatggcggaagccctaggcaaagatgccaaagtgccaaaatttgatggagtaaaatggcgttgaaacctatctagatggatagaggatgtcaatagctactcaacgagctaaagaacgcgaaaatcagactccggatgtgaaagttacgaccaaaacggtgaaacaccgaaggctgaaatgccaggggccggacatccgggggtgggggccggatatccggggtcagtgttcagaaccatgcagatttggtgctccaggagccggattgatgaggacatgactaccttggatatgaacaaaaatattgcatataagcatatttgtcanggtgattctagtgcaaa

SEQ ID NO: 1662 - DNA, 408 bp, Triticum aestivum
  Clone ID: LIB103-042-Q1-E1-A8
gtaccggtccagaattcccgggtcgacggggtcagaattatcttggccaatttccgatagcgatacactgtcatcttaggaagtacaatcgcgtcacattgttggtgtaggcacacataacactggttctaagcaccttaaatgatagcactatttatgctacacacgtatgggcaatattcttgatgtggccaccgtgcccctatgtatttaccttcatgtagaatctcttgatgattcaagtcaagcttcagctgaagctcccggggggaagaagaagacagcgtccggtctaaacgatgaaacctaatctagccatcgaagctatttcgaatgccgtccaaactttcatcacgcttcatctagctcgacgtccttttacaacatcatgattgcaactccactcga

SEQ ID NO: 1663 - DNA, 404 bp, Triticum aestivum
  Clone ID: LIB103-042-Q1-E1-B1
gggtcgacgggagtgctggaggtggtcaaagttctctgggttacctgtttggagatggtgagcctgcaaagcctgctgcagcaccagctgcgaagccagcacctgctgagaaaccagcactggcagctgccgatgtaaccaagcagattccagctggcattccaggtagccgggcgaacaactactaccgtgcagatggccagaacacgggcaacttccttacggaccgtccttcaaccaaggttcatgctgctcccggcggtggctcgtccctgggctacttgtttggcgggaagtgatctctgttaatgatgctgcgatgaattggcctgtatctctgttatccatgtggtgaaaactggaagtgtttggtttcagcagtttaccacctgcgtcgatgtact

SEQ ID NO: 1664 - DNA, 397 bp, Triticum aestivum
  Clone ID: LIB103-042-Q1-E1-B11
cggtcaagaaatcccgggtcgacggggagagagtgtgggccgagagcgaccgtacgtatgtagcaagtggcggggggcgacgggagggcaggaggaagaagaaggcgagatcggctgtgcaattatttggcggcttgtctttagtttcctttgcgattctttcccttgtttaagtttaccctgtagtgtgtgtgtgtgtccttgcgagactatttcggctctctgtctggtctctgcgacttggtagcttctcatgggctccatggtgttggatgatgtggatggaggagggttcgtgttagctaagttagtccactccctctgttcgtgttttgtaagttaattagtagtatgtgtgctactagtatatgggactttaaatcggttcaccggcgat

SEQ ID NO: 1665 - DNA, 358 bp, Triticum aestivum
  Clone ID: LIB103-042-Q1-E1-B12
ggtccagaattcccgggtcgacgggaagatcaagaggttatggctttgtttccttcaggaatcaacaggatgcacagagtgccataaatgacttaaatggtcaatggcttgggaatcggcagattcgttgcaactgggcaacaaaaggtgccaacagtggcgaggaccagctaacatcagattcgaaaagtatagctgatgtaaataacgattttacagaaaatgcaaagcagaagtcaaatgaagatgctcctgaaaataatccactgtacagaactgtttatgttgggaaccttgctcacgaggttactcaagacgtgcttcatcgtttcttccatgcacttggtgctggagccat

SEQ ID NO: 1666 - DNA, 420 bp, Triticum aestivum
  Clone ID: LIB103-042-Q1-E1-B2
gggtcgacgggtacctccatatctcaaaacaatcatcaagcatcaaacttctcttagtattcaacacactcataagaaagtttttactagtcttcaatacctagcatattaggattatttaagaaaattaccttgctgttttaagactctcaaaataatctaagtgaagcatgagagaataatagtttctataaaacaaaaccaccaccgtgctctaaaagatataagtgaagtactagagcaaaaactatataactcaaaagatataagtgaagcacatagagtattccaataatttccgaatcatgtgtctctctcaaaatgtgtgtacagcaaggatgattgtggtaaactaaaaagaaaagactcaaatcatacaagacgctccaagcaaaacacatatcatgtggtgaattaaaa

SEQ ID NO: 1667 - DNA, 443 bp, Triticum aestivum
  Clone ID: LIB103-042-Q1-E1-B3
cggtccagaaatcccgggtcgacggggaagtggattcgggcggagagcgaagaagcttctcctcgtgtggccgagaagtgagcggggggatatggtacgcgcgagctaccaaggaagatggcgcgggcgggcgagcagtgagtgagggtaaatggtgtgaggccgacgatggggaagagaggaggaagaagaagagaggaggaagaagagtggaagacggggaagaaagtgcattaaatctcaattctactagtactactaccaggatataccggacttcggagtgtaaatagttactccgatgacatgtgggtctaccacaagagggtccatatgtcaattaatggaggacagaggtgcgtaggcgtatttgcggaagcgtgctctactggcaaacatgatggcagtactaggttacgctgatttagtaacaccaacacact

SEQ ID NO: 1668 - DNA, 394 bp, Triticum aestivum
  Clone ID: LIB103-042-Q1-E1-B4
gggtcgacattcgcccgtaagaaagcaacgagcgcgctttcctatttggggtcaagagtggcgctgatggtgaaagtaccaccagtgccgccctccttggcggacaccttcttggtctcaggtggagctgccattgccttcttacgcttgccggtggagctcgatggtgcgtcctcgacagtagcgcaacactccgaagaggtgcgcttgccggagtgggcatcagagctcttgccggacttggtcttcttcttccccccgggagcttcagcggcaagtgtcctgcgttctgctgcggctgctgcttcccggtagatcttgtcggcacagataagagcatcctttttgtcaccagtgacaaagatgacacttatcgggccatgcattttcagta

SEQ ID NO: 1669 - DNA, 465 bp, Triticum aestivum
  Clone ID: LIB103-042-Q1-E1-B6
taccggaccagaattcccgggtcgacggggatgcgtgtgcatctggattctgtatacgtggaaggagaagagacaacatgtttgatgagagagcaggaaaaacatggatgagaggggaatgatctcgtgggttgagggattgacaattttgtgcgggggagagacggattggtaattttgtgcaagagagagagagagggtggggggaggagtcagtcagccgttgtcacatcaccctgcttccaaatgaccccgcattctctagtgcggtgtggtcaccgtctttgatctgctcgttgtcctctttgaagattgaggtgttgtgcatgttggggtgcaaagaagcacaagcgagagtggtcgccgtataaccttggatggggatgaattgtgtgctcgggggagtgtgtgtgtgttgtgctgcatgtgtctctctctatgtgtgcgtgtgcgtgtgtgtgtgtc

SEQ ID NO: 1670 - DNA, 443 bp, Triticum aestivum
  unsure at all n locations
  Clone ID: LIB103-042-Q1-E1-B7
gtaccggactagaattcgcgggtcgacgggaatattaattggtttgcaacagaacttagagtggtgattttctttattatactaacggatcttaccgagttttatgttgaagttttgtgtggatgtagtgtctaatcgaggatgtttcgatgcgagaagaaggaagagaggcaagagctcaagcttggggatgcccgaggcaccccaagtaaatattcaaggagtctcaagcgtctaagcttggggatgctggggaggcatcccctctttcttcaacaagtatcggtatgttttcggattcgttttgttcatgcattatgtgcaagtcttggagcgtcttttgcaattaggtttttacttttctttttatgcaccatgctggtatgagatagtccttggttgatttatagaatgctcattgcacttcacttatatcntttgag

SEQ ID NO: 1671 - DNA, 410 bp, Triticum aestivum
  Clone ID: LIB103-042-Q1-E1-B9
cggtctagaaatcccgggtcgacggggatacagtgaggctcagctgaaggagtgcctggaggagtatgcatccttgaacgtgtggcagatccacccaagcaccttcgacatccacttcatcgacgcctgatctgggaagtgaacattccatcataatcagatgattgtgatgcgcgactagggtgtctgatgcccttgtctgggatataacaagattgaaagacttcagtggtagcgtgaaatgtactagtctagtagagctgttgctatttgttcctgtgaaccatgcaggagcctttctccttcagcaatttcattggttgacactggagtgtagtaaatgtaactctgttatgtttgtttacccattagttgtacgctttccgacaatgatgaatttgttctgctcc

SEQ ID NO: 1672 - DNA, 361 bp, Triticum aestivum
  Clone ID: LIB103-042-Q1-E1-C1
ccgggtcgacggggtagcgtaactactgtaccctctgaccctcgccgtcgtctacgtcctcgacttcgtcttcggctggtcataggctcatgcttctagtctggacacacgcttgagtttgaccctgtcgtgatttttgactcattgtaatttatctgtctagacttggaggtgtttattgtgttcatatccacggtgtgcattgtgtatccatgaatctatcttaaggtctcgtctgggcgtagcgtttttgtgtgttctcttctcttcggtaatggtgtattaaacatatccggaggatactgggagctacatgctagaaataagcttgagattattaacctattttatctggataaaa

SEQ ID NO: 1673 - DNA, 377 bp, Triticum aestivum
  Clone ID: LIB103-042-Q1-E1-C12
gcaggcaccggtccagaaatcccgggtcgacggggaagcggccgtcgatcttaggccactgacgatggaggacctgaggcaggccaaaaatcaggtgagctgcttgctgccctgacttgcattttcgcatgttggcattgatagaaacggggccactgaaccgtttgtgatggtttgcaggtcgccgcgagcttcgccgcggagggcgctgtcatgaacgagctgaagcagtggaacgacctctacggcgaaggagggtcgaggaagaaggagcagctgacctactttttgtagaaccggaaggatggtggatgtgtcgtgttgggcaaatcgctgaagccttggcagagcatgagcatacatatgtgggtgggaaa

SEQ ID NO: 1674 - DNA, 389 bp, Triticum aestivum
  Clone ID: LIB103-042-Q1-E1-C3
ccgggtcgacggggcagagaaagtgaggagggcgctgtgctacccactcaaattgatcgccaagaatgctggtgtcaatggcagtgttgttaccgagaaggttctttctaacgacaacttcaagttcggctacaacgctgccactgggcagtacgaggacttgatggctgctggtatcatcgaccccactaaggtggtgagatgttgcctggagcatgccgcgtcggtggccaagaccttcctgacgtcggacgtcgtggtcgttgagatcaaggagcccgaggccgcgcccctcgccaaccccatggataactccggctttggatactgatgagcaacacaggccgagtttctcctgaggacgtggtttaaatttttggtagcatgaa

SEQ ID NO: 1675 - DNA, 414 bp, Triticum aestivum
  Clone ID: LIB103-042-Q1-E1-C5
attcgcgggtcgacggggcatgccaatttttgtgggaaacatgacatgctatttagggacttctatccaggcacagcacagctggtcggtagatacctatgctagagcctagagcctagagcaatgcccgtctgcttctgctgacttctctcgcctggtgctggtggtgaactgatgatcgctactggccatgcgtgatccctaacctgtgtcctgccaggtgcccgaaaaatcacgtacgtacgtgctactctcgcgtaggacctgtaccgcgcatgccgttccctcgctattgcgcaacagcagagtttttggtcgcacatgtcactgatataaaagttgcctcgctattgcgcaacagcagagtttttggtcgcacatgtcactgatataaaagttgttcgttccgttgcc

SEQ ID NO: 1676 - DNA, 428 bp, Triticum aestivum
  Clone ID: LIB103-042-Q1-E1-C6
taccggactagaattcgcgggtcgacggggtgtattgcttggagcgtcatgtattatattagtctttgatttttagtttaccacaatcatccttgatgcacacacctttttggagaagcctatttgattataatttgttagaatactctatgtgcttcacttatatcttttgagcttgatagtttttgctctagtgcttcacttatatcttttagagcacggtggtgtcttaattttgaagaaattgctagtctctcatgcttcacttatattattttgagagtgttttagaacagcatggtattttctatgatcataaaattggtcctagaatgatgagcatccaagttgggtataatacaaactatcatagaaagtcaattggatgctatgataaatttatgcctgataattgttttgagatatgg

SEQ ID NO: 1677 - DNA, 449 bp, Triticum aestivum
  Clone ID: LIB103-042-Q1-E1-D1
cggtccagcaatcccgggtcgacgggggcctctaaaaaaaaaaaatatccgttctcctacccgtgagctcgtggccttcccaaagcgctcgtcactttccccaatttggccggacggcagcctccaaatctccgattcgtcgtcgcctttgcctccggccaacaccaccacttctcggcggctcgccctctccgtgtccagttaatcactgctcgtccccaactcgtagaagccacagctcgcctcccctctgccatggacgacatggcacacgcgcgacgccggcggtcgatttccctcgatgcctaggttgccgcctctatctccacttcgtccgttcttgcataggctttgtacggctttggtagtcagcccgccggagcccaaaataaggacacggacatcggtctcgcctgcgtcgtcgtcaagcgcaagctcctggtggatgc

SEQ ID NO: 1678 - DNA, 253 bp, Triticum aestivum
  Clone ID: LIB103-042-Q1-E1-D10
cggtcaagatatcccgggtcgacgggaaagagcttaacttttttactctgaatttgaccggtgatgtgtgtgtatatatgctacatgctgcttttcaaaagaccctgacatgactaatggtgggtcctaagatggctgagactgtttctggatgtttgttccgacaatgttgttgaattagtatgtgataaacaacgtttaccttctactaaaacaaaaactaattacaaaaaaaagaaaaaatattatttac

SEQ ID NO: 1679 - DNA, 316 bp, Triticum aestivum
  Clone ID: LIB103-042-Q1-E1-D11
cggtctagaaatcccgggtcgacggggttaggaagaagtggggtggtggtgtcatgggctccaagtcgcaagcgaagaccaaggccagggaaaggcttatcgcaaaggacgctgcgcagcggatgaactaagtttagcattgttgaaccatatctattcctcatccttgagtagtgttcaagcatactgtggctgtttggctccagttttggcagtcatttttgtttgtctgagacatcttggaaagaacagtgtaagaatgaagtatttctgtttaatgccagttagtatttttgtcgaataaaatccgttgatg

SEQ ID NO: 1680 - DNA, 350 bp, Triticum aestivum
  Clone ID: LIB103-042-Q1-E1-D12
caggcaccggtcaagatatcccgggtcgacgggggagaactctacaagaaaagctctaccggagtacttcaaagatatatctctgatgaagaagggcggcatctcttggctcgtacttctctgctttgatacctgcgggcctgttgttgataaaattcggaacgagctttcgcaatgtcgcgcttctcctccagggcatctaatctatcctgccgatcaagctcggtctctcactccacacacatgtccaatctatgtcaattcttttgaattgctaacgatataactcggtctacatggtactgaatttttgccagcatccagagatgatgctgattgggcgtagtccg

SEQ ID NO: 1681 - DNA, 424 bp, Triticum aestivum
  Clone ID: LIB103-042-Q1-E1-D3
gggtcgacggggagcgtcaccccattcagcaatggtggcatgaagcgtgcgaaaacaggccagtagggaaggagccacccctcatcgttaccggtattgtccaggtgccttatgtgccccccaatggggacgccatgtctccgggcaacgtttgccgcgggcgcacttgaaggaagcgacgccctgcatttcgctagacgagtcagtatgagtctgcggtctctcctgcggacaaggagaagccgctgggacagtggaagtagtagagtcctgggtcggtgggtcggcccagctttggttgctgtaaggtcctagaacattcgctttatttgttaattgactgttaaccctagtaatgtggtgctatgatggtaggtgatctccatgacagacagactatagaggcccgagtatgtgagctttc

SEQ ID NO: 1682 - DNA, 391 bp, Triticum aestivum
  Clone ID: LIB103-042-Q1-E1-D4
gggtcgacggggacggcaacagccctcacgtcgattgaggttgcttaggaataggctctggaagagaaagaactttggtcttcagtttcaaagattgtgcacttgcctgcgatacctcacgcaaaaccatcaggctttcttgtctcttagttttcaggacctaacaatttgtggatcatcattgttaataagcttatgggctgggagccgcgaaacagacatccgagagatgaaaactggttgacattgtcggtgtgtatattgttgcattgtatgtataagtggatctcatcaccaagtagtggtgatgaaatggcgcctgtgtggctgtgtactcgaaagtcgaaatgcagttccagatttcatttgaaatgtctgccttcgtgtgtgc

SEQ ID NO: 1683 - DNA, 379 bp, Triticum aestivum
  Clone ID: LIB103-042-Q1-E1-D5
cctgcaggtaccggaccagaattcgcgggtcgacggggaggatgaataccaggattaacgcgaagaccaagcccaccacgaggactaaacatgacgagcgaagcgagtatgatgaatgactacgttatgacgcacgcatcagcatggacagtgcatatgacgttcttttggattaatgcttctgcctgataaattcatcacctttataggtcgcaggctgtaaaatctctgcatgttgctgcttgcttgttctgccactcgatatgctcaaatcctatttcaacttagcatactacattctattccttacaaagtgtcatcaaagttcattacattggactgcgtttaaaatcatgatttctgacaaaattctgttcta

SEQ ID NO: 1684 - DNA, 462 bp, Triticum aestivum
  unsure at all n locations
  Clone ID: LIB103-042-Q1-E1-D7
gtaccgtaccagaattcgcgggtcgacggggaggaagagcccgaggaggagctaggaactgaatatctggtgcagccgcttggccgtgctgacgacgaagagcattccagtgacttcgagccagaagaaaatggtgatggtgctgaggacgaggagattgaggatgacgatgctgaggatggtgaggatcctgtcaaggcgcaatcctcatcaaagaggaagaggtctggtggggaggatgaagatgatgacgacggtgatgatgatggtgatgatgatgagaagcctccatcaaagcgatagtcaatttgttcgtgctgatctgtgatcttctctgcttgggccaagaaggaaaataatcctcatggagaggattgttggtaaatgctgtagctttaggacatctgtggtaggtgtancagctcanacttgagtctacccatgttagttgttagtgcatac

SEQ ID NO: 1685 - DNA, 440 bp, Triticum aestivum
  Clone ID: LIB103-042-Q1-E1-D8
attcgcgggtcgacgggaaaagagtaagtggctcattattttgcttgtcacatgcttattccggttgttatttattttgcttatcacatgctaatagttcattcttttgcagcaactggatatattctaaaggggtccgtattcccaacggcctcatcaccgtcttgctgaagttatactggccggggttgtactgtccggatccagtcaggcagccggctcgtcgggttttggccacgagctgggaccactgggaagcggcccgccacgcggaccatgagacccatgccaaggtcgtgatcactactttctgggtgagttctcttcagaagaacaagtccattctagtttcatgaaaattatttaactcatggcttcttccattcttgtttcatgcatgattgtagaaattctatcgagttcttccggagcacagggct

SEQ ID NO: 1686 - DNA, 463 bp, Triticum aestivum
  unsure at all n locations
  Clone ID: LIB103-042-Q1-E1-E1
cctgccggcaccggtccagaaatcncgggtcgacgggatgacgtagcgggattctcgagagatgaactacgatagcaagctccaaaacatgagctggttctgctacaaacgtgtgaacacgttgtcccagacaagcatgaccacgtggtagtcttataataaaacactaccgagttcaggagggggaaccatcaacgagggtatcgaagttctttcataagtccggattagctcttatgaaggaactccttctccttgaacaaatcaatcagtggcttggtgtgctcgggacacatatggaatgaaggttgcaagtctccagaccacagaatacttcgcacgtgtgcatgactgatttgggatgattccaaggaaacaagacaatcttcctcaaattcatggcggcaacttgcatcatatgcacatgaattanggaaagtcactactttcatccaaacatata

SEQ ID NO: 1687 - DNA, 429 bp, Triticum aestivum
  Clone ID: LIB103-042-Q1-E1-E11
cggtctagatatcccgggtcgacgggaagcgtcacaatacacttcataatctttgtgttgatctggtagaatcaacactggtgatgtaaccaagcgtcttttcaactcctgaaaactggcctcacattcctcagtccaattgaatttggtgtccttcttcaacaattccgtcataggctttgcaatctttgagaaattctcaatgaacctccggtagtatcctgcgagtccaaagaaactccggatctctccaactgtcgtgggtgactcccaatttgtcacagtgttaaccttggtgggatctactgctattccttctccggatataacatgtccaaggaatccaacttcctttaaccaaaactcgcacttgctgaacttggcatataactaatgttctccgagcttttcaagttccaaacgcaaatg

SEQ ID NO: 1688 - DNA, 427 bp, Triticum aestivum
  Clone ID: LIB103-042-Q1-E1-E2
ccggtccagcattccgggtcgacgggttatttcaatcattattaactatatctcggcctatttagttcgtcatttcctgatatgaactatttttaataacccctttattaattttctttgccggcggacagggcttgggcaaagtacatcaaggtgactccaggaaaatggcgacaaaagctatgttggtatcgacccaaggtaagtaattaagtagtactagctagctaccatctctttaattcttgtttcaataccattaattaattaacatgcttgattaattattatctgattaaattctattgtcgtaaaggccctcaagcaggcgccggggactaaagtgtgtgcatactacgtttgcgagaacattagcatgatggcgtccgaaaggagcagatctaatagacaggactgggtacgtttg

SEQ ID NO: 1689 - DNA, 421 bp, Triticum aestivum
  Clone ID: LIB103-042-Q1-E1-E4
ccggtccagcattcacgggtcgacgggggattataacacttttacctttccatcattgctagcctcttcggtatcgtgcattgccctttctcaccttgagagttggtgcaaacttcgctggtgcatccaaaccccgtgatatgttatgctctatcacacataaacctccttatatcttcctcaaaaaagccaccatacctacctatttatggcatttccatagccattccgagatatgttgccatgcaactttccaccgttctgttcatcatgatcatgacatacattacttttgccacattgtcattgcatggtcatgtacttgacatcgtatttgtggtaaagccaccatgcataatttttttaaacatgtcactcctgattcaatgcgccatccccgtacgtcgccgtgggcattcat

SEQ ID NO: 1690 - DNA, 456 bp, Triticum aestivum
  unsure at all n locations
  Clone ID: LIB103-042-Q1-E1-E5
gtaccggaccagaattcccgggtcgacgggtctttaaaagattgtatttccttgttgcaatccgtgctaaattctcctcatgcttatagtcaaaataaggcttttaccaaacatatcgttgatgatttaatgtaatcttatgaagaaaagcttgaattggaagtatctatccctagaaaactttatgatgagttggaacctactattaaaattaaaattaaagatcatgaatgctatgctttgtgtgatttgggtgctagtgtttccacgattccaaaaactttgtgtgatatgttaggtttccgtgaatttgatgattgttctttaaacttgcaccttgcggattccaccattaagaatcctatgggaagaattaatgatgttcttattgttgcaaatangaattatgtgcccgtagatttcattgtcctcgatatagattgcaatccttcatgt

SEQ ID NO: 1691 - DNA, 360 bp, Triticum aestivum
  Clone ID: LIB103-042-Q1-E1-E6
taccggaccagaattcgcgcgtcgacgggggtttaccacaaccccaacccgcacctcgggagctccggatccagccaccagaccaaccactaccctgcgccaacgcggacatgaggcccccacgccgtctcaccacggcatcgcggagtgaggacagtgtcacgcccaatatgcgatactatcctaaagagactcgaaggtcccaccaaggatagaaccgcatattaaaacgctttggcaaggtggatatcattacatcaacattacataatagatggggatacatacagaaggcatacaatgccacacgaatacaacatcatcttacataagagcaccatcttactacggatgagacac

SEQ ID NO: 1692 - DNA, 431 bp, Triticum aestivum
  unsure at all n locations
  Clone ID: LIB103-042-Q1-E1-E7
gtaccggacaagaattcgncggtcgacttccaccaaagcgatatccatcatctcattgaaagacgggacaccttagcctctatcaagtggtatcagatttccaggttgctcggtgagattttacagtttttcgtagtttagatcgagtctcttcttcatacctatagtccacgaaaaagccaaaaaaaattagggttagttcatcatatccgaaccaatctgagcctttgcataatctttttagggttttgctttgttgaatttgcggttgcatcgtcgtgtctagttgctggtcttagagtctagtcttttagagtttcgagttctggtcataagttgtcacgccgccgccgcaccatcatcatcacccctgccatctaccaccaccggcttatccgccagcgcttcgaatccgtatccatataacacca

SEQ ID NO: 1693 - DNA, 451 bp, Triticum aestivum
  Clone ID: LIB103-042-Q1-E1-E8
attcgcgggtcgacttccaccaaagcgatatccatcatctcatcgaaagacgggacacctttgcctctatcaagtggtatcagaattccaggttgctcggtgagattttacagtttttcgtagtttagatcgagtctgttcttcatacctatagtccacgaaaaagccaaaaaaaattagggttagttcatcccatccgaaccaatctgagccttgcataatcttttctctatttgcttggttgaatttgcggttgcatcgtcgtgtccagttgctggtcttagcgtctagtcttttagagtttcgagttctgttcacaggttgtcacgtcgccgctgccatatatcaccaccgcatcatcatcgtcgctgttgccatataccaccaccacatattcaccgccaatccgaatccatatacgccaccacatatccgccgccatcacgccaat

SEQ ID NO: 1694 - DNA, 385 bp, Triticum aestivum
  Clone ID: LIB103-042-Q1-E1-F1
gggtcgacgggggttgatatggcagatatgacttctttgaaaaagacaactacggagcacgatccggtgttgaagtttaaatcggccacagacactaaggtggttgactttgttcccggcgattcatccaagcagttcaacatcagcactaacctggatcccaaataggaaagtgcgctcatcgagttcatccgtgagaaccaggacatctttgcatggatgccttctgacatgctaggtgtaccaagggaactcgttgagcacacacttaatattgatcctatgtttaaaccggtcagacaatttctccgccacttcaacgaagaaaggcacaaggctattggtgaagaggtagctcggttgttggctgcaaggtttatcgtgg

SEQ ID NO: 1695 - DNA, 359 bp, Triticum aestivum
  Clone ID: LIB103-042-Q1-E1-F11
ggtccagaaatcccgggtcgacgggacctttatgataagaggatctcccaggaggtagttggtgatcttcttggtgaggaattcaagggttatatcttcaagatcatgggtggatgtgataagcagggcttcccaatgaagcaaggagtgctaacttctgggcgtgtccgccttctgcttcacagatgcacaccttgcttccgtggttttggcatgcgtaatggtgagcgcaggaggaagtccgtccgtggttgcattgtcagccaagacctatcagttatcaacttggtgattgtcaagaagggtgagaatgatctgccaagccttaacgacactgagaagcccaggatgaggggacc

SEQ ID NO: 1696 - DNA, 376 bp, Triticum aestivum
  Clone ID: LIB103-042-Q1-E1-F2
gggtcgacggggagtccgcaaagctcgcccgctacaacaagaagcccaccatcacgtcccgggagatccagacctccgtccgcctcgtcctccccggcgagctcgccaagcacgccgtctctgatggcaccaacgccgtcaccaagttcacctcatcctacgctagtctgccgtgtccgtgaactgatggcggcattctgtatgtagtttagcagtaccatgttacaacctttgtaagaattgtgctgctgcctacggttctgaagaaacagtgatgtcgtttgaatcagaccggatcaaacaatttctccgccacttcaactaagaaaggcacaaggctattgatgaaagaggtcgctctataggatccagcctt

SEQ ID NO: 1697 - DNA, 403 bp, Triticum aestivum
  unsure at all n locations
  Clone ID: LIB103-042-Q1-E1-F3
cggtccagaaatcncgggtcgacggggggggacatggaagagcgcggcagacgtcttgtgctggacgaggagtagcggaccctgcgaggcgagggttgaggaagacagcggggggcgagcccggtatgcgcggcaggcagcgcggagggcgaagatgtcctcgagggtcgtcaagcggcttgcgatcaacgggatcagctccggtaggaagtagggcgatggcgaggtggtttcttcggggtttgtggaggatgacgacgaggacgtggtgattgtggacgcgagggcagtggccgcaggcaagcaccttgtccggcgcttccccgacttccccaacgaacccattcctcgccgccgcatcttcaccgagtgcgacgctgcgtgcggtactggaggtgaatgt

SEQ ID NO: 1698 - DNA, 413 bp, Triticum aestivum
  Clone ID: LIB103-042-Q1-E1-F5
gtaccggaccagaattcgcgggtcgacccaacgggtgcctcggtcatagacaagcgtggcctggccgttgctgctgccaacataaccgcgcacagtgtgacatccacattgtatacgttgagccacctagcgatggagctcaattctttcatcgattactacaagtatatggttgatttgatagtgagcgtcattcatgacttgcacgcgggatgagatgctcaagtgatataccaaaagttatatgatgcctcattgtctcattgatgcccctaagttgccatatggcattgttgcagggatccgggaagaatcctgtgtgggaagagaacatagaaaacgaagagttggcccaaatagccagtagcatcacatttttcgaaataggctttcaccctgcttttaagtctcgg

SEQ ID NO: 1699 - DNA, 458 bp, Triticum aestivum
  Clone ID: LIB103-042-Q1-E1-F6
taccggaccagaattcccgggtcgacggggctccagtgcggcgtacgaggtcgtcgatgaggcagatgcgctgcggtggacaacatgctcaaactcacataatcccagtcaaatgagaatctaaatgcatttcatagttattactttgtaggatgcaacaaaaacaaccataacgctacatcagccattatataagcaacattttgacatatcccaatgtgtgaatgaaacgtgcagagagagcttttgaagatggagcagatagggcgggaaagattgtatgtatgtgggcgagagagtacgagacaaacctaacgagacagagagagagatacagtagagaaagagagaggaagaagttaggtctgtgagacagatggatacatgtaatagacatgagatgcgtgtacatctggattctggtagacgtggaaagagaagagacgacatgtttgatg

SEQ ID NO: 1700 - DNA, 406 bp, Triticum aestivum
  Clone ID: LIB103-042-Q1-E1-F7
gtaccggaccagaattcgcgggtcgacaatgatgcgtagcttgaaggcgtccctcgcgacgacgaagtgtggatgtcatgtcgcgccggataagtcaatgaagaattgctcgctttccacgccgacctggttgtgttgatgccgcaagagctcgatggagtcggcctggtggagatcgcatccgtgcgcgtgcagtgtagtcgatgcacgtcgcttgcagatggttctatcgctcggtgcagtctgccggcgccgcgccgatcgttgttggcgtagtcgcgaaaactgaagaagtcgatgtagcgactcgagtcacagctgacgagggcagatctgatcgatcgcgatcgaagccgccggtgcgtctgtagacgcgtacgtgtaagctcatattgatgcatgcacg

SEQ ID NO: 1701 - DNA, 396 bp, Triticum aestivum
  Clone ID: LIB103-042-Q1-E1-F9
cggtctagaaatcccgggtcgacgggattggaatgcttaagttcccctctcgacttattaatcaacccgatctctgtccaggagttgcaactagtttctgttgtttgtaggttatgttagtagtctatcacgtggcacccggtacaggtgggcttgggacagactatgcaccatggcacggtgtaccaagtgtagatccatccgtcgaggtgggcttgggaaccctgcacacatcatttagggccatgagcgacaccccggccggatctccttgcggattgatgtgaccatagaccgtgctattccatgtacactgcagattgggtgtttctgtattaaggcgccatcgacacaaccatagaagcaagagatcaaaccaacctttagaacaccatg

SEQ ID NO: 1702 - DNA, 415 bp, Triticum aestivum
  unsure at all n locations
  Clone ID: LIB103-042-Q1-E1-G1
gggtcgacgggggactgatacgtctccaacgtatctatagtttttgattgttccatgctatattatattctgttttggacattattgggctttattatacacttttatattatttttgggactaacctattaaccggaggcccagcccagaattgctgttttttgcctatttcagagtttcgcagaaaagaatatcaaatggagtccaaacggaatgaaacctttgggaacgtgatttttggaacgaacgtgatccagaggacttggaccctacgtcaagacatcaaccaggaggccacaaggtanggggcatgcatatccccctgggcacgccctccaccctcgtggggcccctgttgctccaccgacgtactccttcctcctatatatacctacgtacccccaaactatcaga

SEQ ID NO: 1703 - DNA, 370 bp, Triticum aestivum
  Clone ID: LIB103-042-Q1-E1-G11
cggtctagaaatcccgggtcgacgggttagtataagaaaataaatcaccacttaggtactgttatgaactcattctaaattcatattggtgtaatatctactgtattccaacttctctatggttcataccctccgatactactcatagattcatcaaaataagcaaacaacacaatgaaaacagaatctgtcaaaaacagaacagtctgtagtaatctgtatcaaacgtatacttatggaaccccaaatattctgaaataaattggtggatgtgagtaatttgtctattaatcatctgcaaaaataatgaacctaaaatcactctccagtaaaaaaatggcagctaatctcgtgagcgctaaagtttctg

SEQ ID NO: 1704 - DNA, 414 bp, Triticum aestivum
  Clone ID: LIB103-042-Q1-E1-G3
gggtcgacgggagaggcctagcagctggtcggcacgtgcaatggcctcctctgcctgtgcaacaactaggagaggctcggtggcgctctcaccctgttcaacccggccaccggcgaggcgctgtcacttcccccgatgccgtacgccggcctcttctctgagagctctcattggcggaactggaacgagacttacaccttcgcgcaccatccgacgtccgggtggtacaagctgttgcgcgtcccctgcattttcgaccgggtgtttgagccggaagccgtgcacgtgctcacgctgggggaggcgtcatggcggaaggtgctcaccggcatcaacggctgggcggggtgccgcctcggtccgggcatcgtcagcattgacggcacgacgtactgggtcacgcgtgatgctccg

SEQ ID NO: 1705 - DNA, 460 bp, Triticum aestivum
  Clone ID: LIB103-042-Q1-E1-H6
gtaccggaccagaattcgcgggtcgacgaggaggaagagcccgaggaggagctgggaactgaatatctagtgcagccgcttggccgtgctgaagatgaagagcattccagtgactttgagccggaagaaaatggtgatggtgctgaggatgaggagattgaggatgatgatgctgaggatggtgaggattctgtcaagccgcaatcctcatcgaagaggaagaggtctggtggggaggatgaagatgatgatgacggtgatgatgatggtgatgatgatgagaagcctccatcaaagcgatagtcaatttgttcttgctgatctggtatcttttctgcttgggccaagaaggaaaataatcctctgggagaggattgttggtaaatgctgtagctttaggacatctgtggtaggtgtagcagctcgaacttgagtctaaccatgttagttgttagtgcat

SEQ ID NO: 1706 - DNA, 405 bp, Triticum aestivum
  Clone ID: LIB103-042-Q1-E1-H7
tcgacgggggagacatgtgatgacaactacaatgagtcaccttctgcagaagactggaaaaagttggaagctgcctgcaactatttgaaattactgtatgattctgcacatagcatcatggttgcggcaaatccaacttccaacttatttttccatgaggcgtggaaacttcagctggaactgtcaaatgccataacccatgaagatccagttttcagtagcatcgccaaagaaatgcatgagaggtttgacaagtactggtaggattgcaaccttgttctatccattggtgttgtcatggaccctcgtttcaagatgaaacttgtataattcagttattctaaaatctatggtgtggaggcatcaaagtatcttaatgtggtggattatgctcttcatgacctt

SEQ ID NO: 1707 - DNA, 455 bp, Triticum aestivum
  Clone ID: LIB103-042-Q1-E1-H8
attcgcgggtcgacgggcaagaagaaacaatctctagggctagacacaaagagccggtttaccggcgactccctcgtgatcataatgagacctagcctcaaacagtatgtagggttgttacgggatgatgtttcccagggcccgaagctgtctaaatccttgtcttgtgttgcgtctctcgattccgctcaacccctctcaagctaccacatagatgtgttagcctcgcgactaagtcctgacaaaaccacgacattacttgcttatgctaaccatcatgacatcactttatatcaaatggatgtgaaaagtgcgttcctcaatggtaagcttgaggaagaagtatatgttgctcaacccccaggttttgaagatccaaagcatcctgatagagtcttcagacttaataagggcctctatggcctcaagcatgcccctcgggcgtggtatgatac

SEQ ID NO: 1708 - DNA, 432 bp, Triticum aestivum
  Clone ID: LIB103-043-Q1-E1-A10
gtaccgatccagaattcccgggtcgacggggagacgcacggaggtcgggccggcaccgccacccagaacgggtcacggatgttcacgtccccgaatttcttgggcgaacatgccgctgcggccggcgcaggcagccggagaaaggaagccacccactgagctgagccggagatgactatttaacgggacatcaatggacggtgagatgtgcgacttggggaagatcgacggtggtcatatcagcttgaccggtcagagtcaatgctctatttcttttccatttccgtctttttaaacagtttcccttagatttctgggatgccgttggacagccgcaatgccatggcgactgccaggagctcccgacatggaccgccaaagcgaacgcgaccgcttgccaaccagccattaattttgcattgctcgctacac

SEQ ID NO: 1709 - DNA, 440 bp, Triticum aestivum
  unsure at all n locations
  Clone ID: LIB103-043-Q1-E1-A11
attcccgggtcgacgggcaagctcacaccaatgaggttagcaagggcaaaccactagattgggtttcaggacaaccagtcacagatgagcatggacgccttcagattataaagaatgatgacctcgaagagctccaagaactcggttctggaacttttggaactgtatatcatggtaaatggaggggctctgatgttgcaataaaaagaatcaatgacagatgttttgctgggaagccatctgagcaagaaaaaatgcggaatgacttctggaatgaagcatctaaccttgctgatctgcaccaccccaatgttgtggccttttatggtgttgttctagatgggcctggggggtccattgcaacggttacagaatacatggttaatggctcacttangacggctttgctgaagaattccaagagcctggatcgacgcaaa

SEQ ID NO: 1710 - DNA, 467 bp, Triticum aestivum
  unsure at all n locations
  Clone ID: LIB103-043-Q1-E1-A12
gtaccggaccagaattcncgggtcgacggggagagcttggatgtaacatcggtgagccaggtcccggccactcccagcgtggccacggcacgcgctcagagagcaagcaagactgcggccctgagcaagttcaagtcttctgtgaagccttctctcgaggctgcttctgacagtgaacaagacgagatgtccggactgacaactgatgaggatccgtctgatgattccgacgaccctgacgaggaggagtcttaagttcttgggagctgaggtatctgctggcgttcttgaccggaagaacccagcaattgttatttgaggtatgcagggtgacactgccactatgtattgtttcttttgaaccagtagattatgtattcatgtgctcttcagcttgcaaagctgcaaagattatgatttgattgtgtgcgtagattcgattcaaggatcaatgagattgtataaag

SEQ ID NO: 1711 - DNA, 422 bp, Triticum aestivum
  Clone ID: LIB103-043-Q1-E1-A8
ttcgcgggtcgacggggggaaagaaggcttgaggctggtgccatggttcttgctgatcgtggcgttgtctgcattgatgaatttgataagatgaatgatcaagaccgagttgctatacatgaagttatggaacagcaaactgtgaccattgccaaggcaggaatacatgcatcgctaaatgcaagatgtagtgtaattgctgcagcaaatccaatatatggatcttatgatcgttcaataacaccaacaaagaacattgggcttccagattcactgctctctcgttttgatttgctttttattgttctggatcaaatggatgctgagatcgatcgccagatttcagaacatgttgcacggatgcatagatactgtgctgatgatggaggagcaaggtcttttgataaagcaggatatgctga

SEQ ID NO: 1712 - DNA, 405 bp, Triticum aestivum
  Clone ID: LIB103-043-Q1-E1-B11
gggtcgacggggagggcgagtacgaggacgaggaggacgatgccgacctccaggactagagatcaaccgagtaccgcgtatgattattggttttcttatgttaatttgatgattgttttaggcttgtgtagtgctgtttctgtctttcttggtgggtgctgttgttgaggagcagaaaactcatggaagggtggttgctggtgagatagcttggtataacctctggcacaattgctgtgtgcaagcaacgccctgttgcgttctactggtaatggtgtgtgttgtctggtgtccagtgtccaactatcatgttcaaatctaatgtaatttgaagttgcttgcgtctaaaaaaaaaaaaaaaaaaaaaaaaaaaaaaaaaaaaagggaaactccacaagactcaaa

SEQ ID NO: 1713 - DNA, 468 bp, Triticum aestivum
  Clone ID: LIB103-043-Q1-E1-B12
gtaccggaccagaattcccgggtcgacgggggctctacccgcttctaacaaacgcgcgcacactccctctcgctctcgcggcgcaggtcggaggctaaaaccctagacacaggcgactatgacggcgccggcggacaaggggaagaaggccaagaccgacaccgacgtcggcgaggagaacgagcagatcgacggtgccctcgtcctctccatcgagaggctccaggagatccaggacgagctcgagaaggttaatgaagaagcaagtgataaggttttggaggttgagcagaagtacagtgggattcgcagacctgtctatcttcggaggtgtgacatcatcaaaacaattccagacttttggctgacagcgtttctaagtcatcctcttctcagtgagcttttgactgaagaggatcaaaagatgttcaagtacttggaatctgttgatgttgatgattctaaaga

SEQ ID NO: 1714 - DNA, 402 bp, Triticum aestivum
  Clone ID: LIB103-043-Q1-E1-B2
gggtcgacgggtccatagatattgtcatcaattaccaaaaccaaacatgggggcaccgcatgttctttcaatctttccaccgttccgtttattatgacactcttcatcattgtcatcttgatttgcatgatcatgtagttgacattgtatttgtggcaaagccaccgttcataatttttcatacatgtcactcttgattcattgcacatcccggtacaccgccggaggcattcacatagagtcatattttgttctaagtatcgagttgtaattcttgagttgtaagtaaataaaagtgtgatgatcttcattattagagcactgtcccagtgaggaaaggatgatggcgactatgattcccaaaaaaaaaaaaaaaaaacaaaaaaaaaaagcggccgctct

SEQ ID NO: 1715 - DNA, 459 bp, Triticum aestivum
  Clone ID: LIB103-043-Q1-E1-B5
taccgatccagaattcgcgggtcgacacagtgcatagagtgatggaccatgacatcaaagaatgacgatgggaaagacatctctatgttgcacaatattcttgcaatatcatcttgcatatgatccaactcttcatgatttaacctttctgccatagatggttgaagaaatcatacaggtcattgactgtgtttcttatatccttgtcaatcagattcatgatggctagcaaggggatttgtgtcaacattacgttgcagtcatgtgacttcatgtgtcacaacttcatttaagctgagctcatatcgaccggacatgtgatgtttgcgcattaggaagacggtgtcttaactgataacaatgttgtgtagacctgtgtcgcttctcttgtactgaaatttgtaatctggggagctttcatgaattttggatcaacttctgcttcagtcatgtgttttg

SEQ ID NO: 1716 - DNA, 467 bp, Triticum aestivum
  Clone ID: LIB103-043-Q1-E1-B6
gtaccgatccagaattcccgggtcgacggggagctcggttttgaaatagagataaataatattttgagcggcatactttcattgtcaacaaaacaaccgagagatggcgatatcttccatgctacacacattataggcggttcccaaacagaatggtaaagtttatactccccctccaccaacaagcatcagtccatggcttgctcaaaacaacgagtgcctccaactaacaacagtcccgggggagttttgtttgcaattaatttgatttgatttgcataaagcatgggactgggcatcccggtgaccatccattttctcgtgagtgaggagcggagtcaactcctcttgagaataacccgcctagcatggaagataccgacagccctagttgatacatgagatattcgagcatacaaaacagaatttcatttgaaggtttagagtttggcacatacaaatttact

SEQ ID NO: 1717 - DNA, 438 bp, Triticum aestivum
  Clone ID: LIB103-043-Q1-E1-B7
taccgatcgagaattcgcgggtcgacgggtgaagaaaacgcatcttgtcaaggctgctccggcggacaagtcgggagctgctgtgcgagaacggacctgagctgtgtgcggtggtgtcataaggagcctatccatctccactagaattatcccaagtttcacttcacatcgtgatgttgttttacctttttcctgtcattgtcctgctataacggatagcgctccctgttggcgccgccgccggcggggatgccctagtggtggagggtgtatgtcctcttccgcggggtgcccctgcttgtacctagatggttactctttccgtccattgtcgccggctaacattgtgataatatcagtctgggtaatgttagattaagctgttgtcctcacctgacaaaaaaaacttacaatccaaaaaaaaaaagcggccgctct

SEQ ID NO: 1718 - DNA, 458 bp, Triticum aestivum
  unsure at all n locations
  Clone ID: LIB103-043-Q1-E1-B8
taccggatcgagaattcccgggtcgacggggtgtgtgtgattcagggcatacggtttagttaaattaaccgttttcgatgaggaggaacaaaagaaacgggcagccagatgaaggtgtgtgcgatgtacaacatatggttcactcggatgaactgtttgtgattaggcaacacaaaagaaacggtaagccagatgaaggtgtttgtgatatacggcatgaggttcactcggacgaactgtttgcgttgacacaagagaacagaaacggttcaacttaacaagacatgtgtgttgtgcgatgggattgcatacagaacaacaacatacacacacacacacacacacacacttataaggacatgcttgcataaccaaattaaacatccacttagataggtggctactacaaccatggcatttgcacacaccanagtanactattacatgcataattacat

SEQ ID NO: 1719 - DNA, 359 bp, Triticum aestivum
  Clone ID: LIB103-043-Q1-E1-B9
tccgggtcgacggggacgggatgccgccggttcgaagaatggataaaggcctcgactcctgcgagtgctgcaggcagtaggtccgggtcggcggttgccggagacgtcgtcgggcggagcagttgcaggctgtttgggttctccctgactgatcagaaagtgctgggaagagcaggtgagggtggtgcgaaggaagggggcgcggatgatgaggcggcggattgcgcggacccgcgggtgctcgacctgtttgggcgcggccaccctgcccctgctgcgctgcatgccatcttcgctgctcccctgggaatttgatggtaatcctcacctgcttgcttccaattaccggacatttggtt

SEQ ID NO: 1720 - DNA, 457 bp, Triticum aestivum
  unsure at all n locations
  Clone ID: LIB103-043-Q1-E1-C11
attcccgggtcgacgggggtctgccctcatttcggtttcccccattccccttcgcacccccgcggcggcggagccttcccgggcgctcaccggacacgcgcaacaacactatgaggaggtacagccccccacaccgtagtcccccgaggaggggatatggtggcagccccgcgcatcgtagtcccccaaggaggggatatggtggcagccccccgcaccgcagccccccaaggaggggatatggtggcagaggaagaagcccccctaggaggggtggatatggaggacgaaaggagcagggttctggaagtctcttggtccgcaacatcccattaagcgccagagcggaggatctccgtgttccttttgaaaggtttggtcctgttagggatgtttaccttccaaaggattattacagcggggagccccgnaggtttgcctttgtggagtttgttga

SEQ ID NO: 1721 - DNA, 460 bp, Triticum aestivum
  Clone ID: LIB103-043-Q1-E1-C5
gtaccgatccagaattcgcgggtcgacgggatatctcataactgaaaccatgaacaacaagtgctttggttctggtggtggcgatccattgcttgaggcgacatcgtgtgcaagattatccttgtggaggccgttggcacggtggcaccctcctcgacctgctgatcccattacccaggttgcctgttgcgcctaaaggttggatatatggtgatatggtaatgccgatttgggaaagcaggtgtacagtgtgtgtaaattaagaaaacaatttataatctgtgatgtgatcattgcattttaatttagtatatgcgactcaagtagggaagtattgagtgcacctctctggcaagtgcacgcataaggtaccattttttactcaatcgatttcaaaacaaggcatgagactgacatacactcttttattgcatcgtgtaaagatatgtggtgtgaaggg

SEQ ID NO: 1722 - DNA, 450 bp, Triticum aestivum
  Clone ID: LIB103-043-Q1-E1-C7
taccgatctagaattcgccggtcgacggggcagatatagtgaggagggcgctgtgctacccactcaaattgatcgccaagaatgctggtgtcaatggcagtgttgttaccgagaaggttctttctaacgacaacttcaagttcggctacaacgctgccactgggcagtacgaggacttgatggctgctggtatcatcgaccccactaaggtggtgagatgttgcctggagcatgccgcgtcggtggccaagaccttcctgacgtcggacgtcgtggtcgttgagatcaaggagcccgaggccgcgcccctcgccaaccccatggataactccggctttggatactgatgagcaacacaggccgagtttctcctgaggacgtggtttaatttttggtagcatgaaccaagttttgagagattgatgatgatgatgatggtaattttgagat

SEQ ID NO: 1723 - DNA, 427 bp, Triticum aestivum
  Clone ID: LIB103-043-Q1-E1-C8
gggtcgacgggaggttctacttggcacaaacactaactaaaagacaaaaccacatccaaacagaggctagatggattatttattcctaaacacaagcaaaaacagaaaacacaaaataaaattgggttgcctcccaacaagcgctatcgtttaacgcccctagctaggcataaaagcaaggatagatctaggtattgccatctttggtacgcaatccataagtggctttcatgatagattcatatggtaattttattttctttctagggaagtgttccatgcccttctttaagggaaattggaatctaatattcccttcctccatatcaataattgcaccaattgttctatggaaaggtctatcaagaataataggacatgaaggattgcaatctatatcaagaacgattaaatctacgggcacata

SEQ ID NO: 1724 - DNA, 406 bp, Triticum aestivum
  Clone ID: LIB103-043-Q1-E1-D10
attcgccggtcgacgggttgaatggattcattccttgttcgtgtattacgccacaatatgcaccatgttgacttaagtgttccgcaagctgggttgtgataacccacaagtgtacgggattgcaatagttttcgagggtagagtattcaacccaaatttattgattcgacacaaagggagccaaagaatattctcaagtattaacagttgagttgtcaattcaaccacacctggataacttactatctgtaccaaagtgtttagtatcaaagtactatggaagtaacggtaacgatagcaatagtaatatttttgggttatgtagtgattgtaacagtagcaacggaaaagtaaatagtcagagaacaatatatgaaaagctcgtatgcattggatcggtgatgga

SEQ ID NO: 1725 - DNA, 424 bp, Triticum aestivum
  Clone ID: LIB103-043-Q1-E1-D12
cgggtcgacggggaggaagagcccgaggaggagctaggaactgaatatctagtgcagccgcttggccgtgctgaagatgaagagcattccagtgactttgagccggaagaaaatggtgatggtgctgaggatgaggagattgaggatgatgatgctgaggatggtgaggattctgtcaagccgcaatcctcatcgaagaggaagaggtctggtggggaggatgaagatgatgatgacggtgatgatggtgatgatgatgagaagcctccatcaaagcgatagtcaatttgttcttgctgatctggtatcttttctgcttgggccaagaaggaaaataatcctctgggagaggattgttggtaaatgctgtagctttaggacatctgtggtaggtgtaacagctcgaacttgagtctacccatgt

SEQ ID NO: 1726 - DNA, 437 bp, Triticum aestivum
  Clone ID: LIB103-043-Q1-E1-D4
cggtcctaaattcccgggtcgacggggctctccatggcgtccaccttcgttggcaactcgacctccatccaggagatgttccggagggtgagcgagcagttcactgccatgttcaggaggaaggctttcttgcattggtacactggtgaaggcatggacgagatggagttcaccgaggcggagagcaacatgaacgacctcgtctcggagtaccagcagtaccaggatgccactgctgacgaggagggcgagtacgaggatgaggatcaggagcctgaggaggacatgtaaggtgggatgtccatgtcgtgctttgctgggtgggggttctgggggcagagtttgatctgtttggtgctttgttataaatctgtttatcatcgcaactaccgcttgtacgccaccgccattcttcctgcctttcctaagctctgtat

SEQ ID NO: 1727 - DNA, 445 bp, Triticum aestivum
  Clone ID: LIB103-043-Q1-E1-D5
attcgccggtcgacggggggaaaacgtaatcgtttgtgcagttcactgggagaaaaaattgctgaacttaagaatgaagcagaaggtattcaaagaacaatcgtggaaaagaacggtcagaaaagcaagttagttaaagatcgatgcgaccttgaacagaaaatagcagattcgaagagaaaacgagaacctgaggagtattgtttagagaaaaaaatactggaacttgatgacgccaagagagcttttgctgaaattaatagatatggtgctgtggataacactgaactagaggaggacataaagaaagagaagaatatcattgtggagagggaactattacttaataagattaatacaaagttagcagcagcttcacgagaagtgaacgatagaagagaagcttacaagacctttatggattctgtgaatgaggagacagggg

SEQ ID NO: 1728 - DNA, 450 bp, Triticum aestivum
  Clone ID: LIB103-043-Q1-E1-D9
attcgcgggtcgacctgtactctcccttgcatccctcgcgaggggcctgaacaggtaccctcgtgagcttcctccttctgtcttttcatgaggcaccctcgttcgagccaacaagccggcgcacctctcctggtccgggccccacgggtatcgtgacgagaagcatgctgctactttgaagcacaagtgtggaaaaaaaggatagtagcattgccccttttttgggacaatgctctattaatgatgatcatcacacttctatttatttacaactcaatgattacaactcgatactagaacaaagtatgaatctgtatgaatgccttcggcggtgtatcgggaagggcaatgaatcaagagtgacatgtatgaaaaattatgaacggtggctttgccacaaatacggtgtcaactacgtgatcatgcaaggcaatatgacaatgatgatgt

SEQ ID NO: 1729 - DNA, 416 bp, Triticum aestivum
  Clone ID: LIB103-043-Q1-E1-E1
gggtcgacctctctgccttcaggaacatccttgagatcgaccccgagaggatggttgccaaggtcgagccgctcgtcaacatgggccagatatccagggccacctgccccatgaacctctccctcgccgtggtggcggagctcgacgacctcaccgtcggtggcctgatcaacggctacggcatcgaggggagctctcacatctacgggctcttctccgacacggtggttgcgctggagatcgtcctggctgacggccgggtcgtccgagccaccaaggacaacgagtactccgacctcttctacggcgtgccctggtcgcagggaactctcgggttccttgtttcagctgagatcaagctcatccccatcaaggagtacatgaggctcacctacaccccggtgaagggccccctg

SEQ ID NO: 1730 - DNA, 441 bp, Triticum aestivum
  Clone ID: LIB103-043-Q1-E1-E2
ccgggtcgacgggtgtgcttcacttatatcatttgaagtttggattgcctgtttctctttacatagacaaccgccatttgtagaatgctcttttgcttcacttatatttgttagagcacgggcatatcttttgtaaactctcttgcttcacttatatctatttagagagatgacaggaactggtcattcacatggttagtcataaaatcctacttaaacttgtagatcgctggatatgatatgtttgattccttgcaatagttttgcgatataaagatggtgatattagagtcatgctagtagattaattgtgaaattgagaaatacttgtgttgaagtttgcaagtcctgtagcatgcacgtatggtgaaccgttatgtaacgaagttggagcatgacgtgtttattgattgtcctccatatgtgtggcggtcggggacg

SEQ ID NO: 1731 - DNA, 461 bp, Triticum aestivum
  unsure at all n locations
  Clone ID: LIB103-043-Q1-E1-E5
taccggatctagaattcncgggtcgacggggcggctgaactgacgggacggtgagatggacaacggatcctcatacggggaggtggacgagggacgtcgagctgttgcaatggatgatgtcatcggggaagaggctccggctgggcagcggtgacgtggcagacgaaggagggtggggtttcgcggctggagcggagaggttatggcggcctgggatttcgaatggcgaaaagggggcgatgggagggggtgaagcatgacttaaggacacgcttgtccaaaatgtagagtgtgttacaaaagtaccccccaccgatttgaactagcggccctttcggctcagggttagaagggggatttcacgtttcgggatttggcagctggagggagttttcacgcgcgttgtaatttgggatagcaaggcgcgggttgtgaaggcgccagttttgagagcacgatat

SEQ ID NO: 1732 - DNA, 336 bp, Triticum aestivum
  Clone ID: LIB103-043-Q1-E1-E6
attcgcgggtcgacggggacgacgaagaggaggatgaggaagatgaggaccagccgccggccaagaagaagaaatgatctgctttcctgctgtcgtgtttcagtcccttagtttatctgctgtctagatgatgattgagcgggtctggtacacaccgacctatgtagcttctgtgtcgtggtggtttgatgtctcatagggtagaacattgaacttctaatgttgtttcctgcgttgtgcaagtagtcttaacatttcggtgttgatgtctgtgtttattggagctgtgataccattcaatctaattcttgttactccaaaaaataaaggttagaa

SEQ ID NO: 1733 - DNA, 382 bp, Triticum aestivum
  Clone ID: LIB103-043-Q1-E1-E9
ggtcgacggggagcattttggttttcttccgaccaaattctcagttctgcctggtgcagtagatttcttcagctagaccgctgtgctatttcttcctgtaggatttcgacgaacagaagacgcatgatccttggcagacttgctctgtccacctagtcaatttgttgtgacatagatcaccacgttcgtcctcctgttacgctagcttaagatggcacgacaatcgggttgctcgacttactcatcttctggtcaggtagtacgtacatgaaacacagtagttgctgcgcggaagcacccaccatgtaaattctatgcctgtacgcacgcagcatataatagtcagtcgttggtgttcatacacaagctgtagaatcacagc

SEQ ID NO: 1734 - DNA, 443 bp, Triticum aestivum
  Clone ID: LIB103-043-Q1-E1-F10
attgccgggtcgacgggacattattcatagccaaatttatcttttttgaatctctaactgtagatcgagttttgagttgatttttttaagttatagacctaccccgcaggtatgttgtacattttttcatatttttttaggattacctaaatatgaaatgtttgggttgattctacgatcttaccgtggcccagtgtcttttttagggacgtgccatcattcccctcatgatcgttgttctgcctaacaatttatttcttgtttaatttggctaccccacaacgtggttacgtaataatcatggcttacatgattccgttcaaacacatagccttttgctaataacaagtccagtaatctaacccttacacttacacgttcaacccatatccaatatggtttgatgcaacctttagaacaataaagaccgggaaattaccttt

SEQ ID NO: 1735 - DNA, 437 bp, Triticum aestivum
  Clone ID: LIB103-043-Q1-E1-F12
gggtcgacgggttgacatgaaactttccaccgttctgttattatgacacgctccatcattgtcatactgctagcatgatcatgtagttgacatcgtatttgtggcaaagccaccattcataattctttcatacatgtcactcttgattcattgcatatcccggtacaccgccggaggcattcacatagagtcatattttgttctaagtatcgagttgtaattcttgagttgtaagtaaataaaagtgtgatgatcatcattattattgcattgtcccagtgaggaaaggatgatggagactatgattcccccacaagtcgggatgagactccggacgaaaataaataaataaaagaggacaaagaagcccaaaaaaggccataaaaagagaaaggcccaaaaaaaaaaaacaaaacaaaaaaaaaaaagcgggcgct

SEQ ID NO: 1736 - DNA, 440 bp, Triticum aestivum
  Clone ID: LIB103-043-Q1-E1-F5
gtaccgatccagaattcgcgggtcgacggggatggaggcgcaggctcgccatggcgtcctgccaacagggaggcagcagcacctccatggccatggccaggctcaccatcaacctcccgcgggagaagatgagtggtgggagtacttcccatgccccttctgctacattgaggtggaggtccccttcctctgtgaccacctgcaggaggagcactgcttcgacatgaggaatgctgtgtgcccgatctgcgccgacaacctcggggccaacacggccgggcatttcagggaacggcactcacaacaactcaagatgaggaagtcttcttcttccagggcaggagcagcagatgacaaggaagcgtatgaagatgatgactcctactatgaagaatcatcatacatcatgggcaggccagtacctgatgatcattcacctg

SEQ ID NO: 1737 - DNA, 442 bp, Triticum aestivum
  Clone ID: LIB103-043-Q1-E1-F6
aattcgcgggtcgacggggacatctcatctgcaattacccaccatctcctccatatcctccggcgaaacccagccccagtccaccccaccgtccgtatccatggcgcccaaggccgagaagaagccggcggcgaagaagcccgcggaggaggagcccgcggcggagaaggccgagaagactcccgccgggaagaagcccaaggccgagaagcggctgccggcggggaagtcggccgccaaggagggcggcgacaagaagggcaagaagaaggccaagaagagcgtggagacgtacaagatctacatcttcaaggtgctgaagcaggtgcaccccgacatcggcatctcctccaaggccatgtccatcatgaactccttcatcaacgacatcttcgagaagctcgccggcgaggccgccaagctggcgcggtacaacaagaag

SEQ ID NO: 1738 - DNA, 439 bp, Triticum aestivum
  Clone ID: LIB103-043-Q1-E1-F8
aattcgccggtcgacgggggttctaaaccctcccctctcccacttctccactcctctccctccccaagaaaaaccgccgccgccgccgccgcagcagcagcaggcgagcgagatggtgtttgtgaagaaccagaagaccagggcgtactccaagcggttccaagtgaagttcaagagaaggagacaggggaagaccgattacagggccaggctcaggctcactaaccaagacaagaacaagtacaacacgcccaagtaccggtttgttgtgcgatttaccaacaaagatgtcactgcccaaattgtgtacgccaccatcgctggtgatatcgtgatggctgctgcctattcccatgagcttcctcggtatggtcttgaagttggccttaccaactatgccgcagcgtactgcactggtctgcttttggcccgtcgtgtg

SEQ ID NO: 1739 - DNA, 436 bp, Triticum aestivum
  Clone ID: LIB103-043-Q1-E1-G2
gggtcgacgggagactcttgaaaaacactttgagtcctcttcatttaacattggcagctctggtgcgacacctgaagttactgattcctcggttgctccaagcacgaaagttgaagagttgagctccagccagcaggacgtattccttcttccattaagatcacatgataactcagcaaagttagagtatgggacatactcatccatgctaggaaagcttcgtgatcaggtcctggcgaggccgttgaggccgttctcgaagaacctcacagagcgcgactggctgaggagctcggccaagatgtgggacatggtgaggagatctcccgtcgcctcggactactgcaaggcgctccagagttcaggattgttcaggaagtagccacatgtgcgttgtaatgtcctcgattcaaccgacctgagacacaatttgaat

SEQ ID NO: 1740 - DNA, 391 bp, Triticum aestivum
  Clone ID: LIB103-043-Q1-E1-G5
gtaccgatccagaattcgcgggtcgaccgtgtggaacaattcgctgcggtacgggatcagtgagggaagcgacgtcttcctgctggtccctgacaagctgcccggcgtcgagaatggctgtgccgtggaggtgtgcattcgcaaggtggtggctggtaactagctcaagctgtgcgccgatctggaccgtcattgtcgttctggctgcagcattgcctgcgagagttctgctcatatccgagtaaacttgaacggcatccgtattggtgaattccttagtcgttgatgggtcttctggtactgagatggaagcataggcatctcgcgcatcgctgatgcatgaaactgtctggatatcgtcttttctgaggagggtgaatttggatatgct

SEQ ID NO: 1741 - DNA, 430 bp, Triticum aestivum
  Clone ID: LIB103-043-Q1-E1-G6
aattcgcgggtcgacggggagtcggacaagctcgcgaggtacaacaagaagcccaccatcacgtccagggagatccagacctccgtccgcctcgtcctccccggcgagctcgccaagcacgccgtctccgagggcaccaaggccgtcaccaagttcacctcctcctagactgatgaactgatgatgcgtccgtcgcctctagttggtctctgtatctgcatctctgttaactctgcttatccctctgcaagtagtgctggtagtctgtgctgggtgattgccaacgcttcgttggctcgttcctcgttgcttgggaggaccgaagcttctgcttttgacaagctgatatctatctagaactgaagttgtggtggtaaaaaaaaaaaggataagatgaaaaaaaaagcggccgctctagaggatccaagct

SEQ ID NO: 1742 - DNA, 437 bp, Triticum aestivum
  Clone ID: LIB103-043-Q1-E1-G8
attcgcgggtcgacgggctcatagggttcagtggcatcaacatgtggaaggccaccttgacgtaatcggtcaagcattgacaggtcatctgcagcagtaacatcttcttgttccagctcttcttgttcctcctctagggtgatgtgggattcactatcactgtctacttcaatgttttggggtgaagtatagcggttcttgaaatgctttttgaaaagacgtgtctcttggaagaactctccttcatatgtgtctgggttaatgtgaggttcataatcctcttcctttgggggagatagtctagcacgtggcgacacttcataaacgacgtcccaacctttcagatttggattagtttggcaggcccacggtagatagaatacttgggtcgcctgttgaaccgtaatatagacatccggaacatctaaatgggtgct

SEQ ID NO: 1743 - DNA, 369 bp, Triticum aestivum
  Clone ID: LIB103-043-Q1-E1-H1
gggtcgacggggcgctagacttaccgcaggtttagggaggggagagagctctagtttcgtcgctgctcctgaattgatcgttcttttttctctctctctacccgcgccaccttgctgcatcggagggattgctaacagagaaattagtagccagcaagaacgcggatcatgaacgcgaatcatgcgcccggtcggtagatttctttgatccgtcttgtttgttcaccttgctgtatagaaagatgagagatcagtgatcggaaccgatgcattctgagttagagagtatctgttcatctgcacggggtgcaaatatcagtttctgtaccaccatggagattactatctgaaatggagtctgcttttctc

SEQ ID NO: 1744 - DNA, 306 bp, Triticum aestivum
  Clone ID: LIB103-043-Q1-E1-H10
tccgggtcgacgggtcaattcaaatcaactcagcggaagatcgggaccctcgcctctatcaagtggtatcagaattccaggttggcccgtgagattttaaagtttttccgaggttagattgaatccggtccgcaaaactaatgtccaagttagagccaagaaatagaatatgggtaggtcaacacatctgaagtaatccaagccatgcacaatccagtacgtacacgctttgcagaaggtgctgttgcaacgacgggttcacttgatggccttaccatcaattgcgcaacctgaatggctaatggg

SEQ ID NO: 1745 - DNA, 160 bp, Triticum aestivum
  Clone ID: LIB103-043-Q1-E1-H11
cgcctgtcgatgctactcactaaagtgagtcgtattataaaggggatgggaaccgtgggctcggtaaggcttccagatcaagtggagcaggggatcgtatcgcaaatgactcaatatagaaaaaaaaagcggcccttctaaacgatacaagcatagtttc

SEQ ID NO: 1746 - DNA, 404 bp, Triticum aestivum
  unsure at all n locations
  Clone ID: LIB103-043-Q1-E1-H3
gggtcgacgggtcctcctcaccggcgtgctggagcacacgctcgtcctattcttcgtacgctacatgcatagacacggctccaccagctgctcgcgtgcttggcagcgctgcggcatggcgaggtcggactgcagatgacgtgagcgggcgagccttcagcttcaaggcacanggatggcggcgacacggcggtgatgggcgagaaattgttggccggagcaggctggtgccgacatgcgcaacggtggcggcggcatgttgatgagtgcgtgtatgggagcttactttagttttatataaggttggtcaaccctttttttcctagtacacgtaaacattagacttaggcaacccttttttttgaagttagtaccacaaccacgatacggaaatcctgtgcaag

SEQ ID NO: 1747 - DNA, 407 bp, Triticum aestivum
  Clone ID: LIB103-043-Q1-E1-H5
attcgcgggtcgacggtggcgtctggctcctgaactccgacatctgattgcgacaatccggtatagaaaggggaaaagagggagaaaagcaaccgtgagtactcatccaaagtactcgcaagcaaggagctacactacatatgcatgggtatatgtgtaaagaggcatatcagtggactgaactgcagaatgccggaataagagagggatagctagtcctgtcaaagactaagcttctggacatctccatcttgcagcatgtagaagagagtatattgaagtcctccaaatagcatcgcgtagcataatcctacccggtaatcccctcctcgtcgccctgttagagatcgatcaccgggttgtatctggcacttggaacggtgtattttattcaatatccagttcta

SEQ ID NO: 1748 - DNA, 428 bp, Triticum aestivum
  Clone ID: LIB103-043-Q1-E1-H6
attcgcgggtcgactccatcgtctcaaggttcgacatgatccaagccgaggcgacacctagccactccctcggagccctggctgtgccaggctgccagcggccagttggaaaaggaggaaggcgccgcaccatccctgcatgcgacgtcttggggctggagccggcaaccgcgcgctgcgacccttggctttctatcgagttggtgggctccgtgatggagatgggggccgatggaggcgccgcgtgagggctcagcagccgcgagctttacgatgctccgttgtactgtagcagcgatgtactagtgctatccagtggaatccagctttacgatgctgctgcagcactgtggggacgtacgacggtacgagcaatatctatttgctaggaataactgtgctatccagtggatgttaaccttttgcgc

SEQ ID NO: 1749 - DNA, 288 bp, Triticum aestivum
  Clone ID: LIB103-044-Q1-E1-A1
attcccgggctcgacgggatgtgctacaagttatagaacatgcatttatagatggatatgattcttcgcagtatatccggctgtcaatgatcggctcatcatggtctgcgcttctgcattcaactagtaccctacgatatgttgctgttgtaagatgtctagcctgagtattactatggtaaccttgtggtatacattttgtaacctgtaaggcaatttcatacctggtccattgccgggtatttggtcgccaagatgctgctggaggatccttcgcatcttggtatg

SEQ ID NO: 1750 - DNA, 412 bp, Triticum aestivum
  Clone ID: LIB103-044-Q1-E1-A11
attcccgggtcgtctgcaacattcagatccatatgtacttcgcaaatttctatgtcatcttgtagatgcaactactacgctacatttggagctattccaaacaactgttctactatatgaatccagtttactattcagaataatctagattagtgtcaaagtttgcatcggcgtaaccctttacgatgaactcttttacacctccataatcgagaaaattccttagtccactagttactaaggataactttgaccgctgtcttgtgatccattcttggatcactcttgtaccccttgactgactaatggcaaggcacacttcaggtgcggtacacagcataccatactgtaaagagcccatgataaaagcataggggacgaccttcgtccttcgtctttcttctgccgtggt

SEQ ID NO: 1751 - DNA, 308 bp, Triticum aestivum
  Clone ID: LIB103-044-Q1-E1-A2
gggtcgacggggagtcggacaagctcgcccgctacaacaggaagcccacgatcacgtccctggagatccagacctccgtccgcctcgtcatccccggggagctcgccaagcacaccgtctccgatggcaccaaggccgtcaccaatttcacctcctcctagactgacgacgctccgcttgttgtgacagatgtggccgtctgctgtatctgtagtcgctgttgactctgcttatctccatctgcaagtagtggtagctgtagtgcgcatgctgggtgatgattgccaacgcattgttggctggttgga

SEQ ID NO: 1752 - DNA, 392 bp, Triticum aestivum
  unsure at all n locations
  Clone ID: LIB103-044-Q1-E1-A4
gggtcgacggggtaccagacttcattactcaggccgaggagctcaaagccaagggtgtagatgagatcctgcttgtcagcgttaatgacccctttgtcatgaaagcatgggcgaagacatacccagacaacaagcatgtgaagttccttgctgatggagcggcagcatacacaaaagcacttggtcttgagcttgatcttacggagaaaggattgggtcttcgttcgaggcggtttgctctccttgctgacgacctcaaggtcaccgtcgcaaacgtcgaggaaggtggccagttcacaatctctggtgccgaggagatcctcaaggcactgtangagcttcagcgcttcggaatcgcagcgatcacccaaaccttgtgtcatatcgatgta

SEQ ID NO: 1753 - DNA, 429 bp, Triticum aestivum
  Clone ID: LIB103-044-Q1-E1-A6
gtaccggaccagaattcccgggtcgacgggagtggcatactttcgctgtcaacacaacaactatgagatggctgtatcttccatacaaaatgcattataggcagttcccaaacagaatggtaaaggtttatactcccccaaccaccaacaagcatcaatccatggcctgctcgaaacaacgagtgcctccaacatacaacatccctgggggagttttatttaattattttgatttgctttgctctttttggatcatgggcctgggcatcccagttaccggtcctttctcgtgaatgaggagcggagtccactcctagtgagaataacccacctagcatggaagatataggtagccctagttgtaacatgagatgctcgagcatacaaaatagaatttcatttgaaggtttggagtttgcaacatacaaa

SEQ ID NO: 1754 - DNA, 381 bp, Triticum aestivum
  Clone ID: LIB103-044-Q1-E1-B1
gggtcgacggggaacgccaggagttactgagcaggcatggatggatggatgtttggagcgcgagcatcaactgtggttgtgcataattatggttatgtcagacgtgttaattgtcgcaatttccaattggtggtactatatatatgtttgccaaataatgtgtgcaccgtgtgcaactatggaacagcgaagtggtaatcattttgtgagctttggaacagtgaagtgacacatatttgtcctaaaaaaaaaaaaaaaaaataaaaaaaaaaaaaaaaaaaaaaaaacaaaaaaaaaaaattaaaacaaaaaaaaaaaaaaaaaaaaaaaagcggccgccctaaaggatccaagcttacttacccgtgcatgcgacttcaa

SEQ ID NO: 1755 - DNA, 58 bp, Triticum aestivum
  Clone ID: LIB103-044-Q1-E1-B11
gtaccgagtccagaattccgggtcggatgggacatgctcaaccctgttggcatcacct

SEQ ID NO: 1756 - DNA, 395 bp, Triticum aestivum
  unsure at all n locations
  Clone ID: LIB103-044-Q1-E1-B2
ccggtccagaattcccgggtcgacggggcangatatacatcgatgatgcaggatggggtcccgaggccgattcgatcgagtatgggtaccgggtccccttgggcagcatacacgtcttcatcggcaagatcggtgagcctaagcctgagctggacatctacaccgaccccgtcgagacggctcagcgtgcgagatctacccaggttaaaccggccatgaagcgtgccttcgttggagtcatctacggaggagagcgtgaggacgaatcagagcacggtaacgagaccgtcgtctattccggcgacgagtcttcgaccggagagaccgagtcgctataccggatgcaagacgatcaggtgaggggttgttccgatggcgacagtattccggacccc

SEQ ID NO: 1757 - DNA, 389 bp, Triticum aestivum
  Clone ID: LIB103-044-Q1-E1-B3
ccgggtcgacgggcctgggcaacacttagaattggtggccggggacaaccaatggcctttcccaaccaaccaatcccccaaggaacatgcgcgtaattacttaaatttttgaggacttcaaaatttttgcaataagtatatgatttcttttgactaatgttgagtccatggattatacgcactctcacctttcaatctttgctagcctcatcggtaccgtgcaatgccctttctcaccttgagagttggtgcaaacttcgccgatgcatccaaacaccatgatacgatacactctatcacacataaacctccttttatcttcctcaaaacagccaccataccctactatcatggcatttccatagccattccgagatatattgccatgc

SEQ ID NO: 1758 - DNA, 413 bp, Triticum aestivum
  Clone ID: LIB103-044-Q1-E1-B7
aattcgcgggtcgacgggaagtccattttggcttcgtgaatactcaaattgaagatagcaatgagccgcatctaaatagttgcagaagctagttcaatatttgacacctcaaaatcggcttctaaataggtctttttgccctccgaagttcgtgaacacagcttgttccaattttttaggccagttttagaattctttgactcctcatatcaactcggaattgagtgattctttttgcattggaaagcttgagttagtagcattctttgaaagaatttatcagaaaattgtctcaaacttttcaagaggaaagttggagagagagttgttgtatatcctgcttggcagttgtttttcatcattatcttcactgccgttgtgatcttcacttatatcttgctgtcaagagctac

SEQ ID NO: 1759 - DNA, 387 bp, Triticum aestivum
  Clone ID: LIB103-044-Q1-E1-B8
aattcgcgggtcgacgggatgcacacaagtggcagaatgtcgaactccgctctttcgcccactctgaagggcagcgaggtgtgcacggtttcgccgagcgtgggcgagtggagcccggagctggtgaaccctcacgtggtccgcgcgatgaaaggtcgcatcgaatggccccagggcgcgaagaagcagagcctgaagtcaaagcctctggattcgagattcgacggctgcaaggtccagctgcgccaagcattgaagcagaagatataggatggcccgtccacacgctgtatccaatttctgaatataggaccatcttgccttggaagggtgcctggtctgtaagacgaactgacgtgtagtaacattggtccctgacatgggtgc

SEQ ID NO: 1760 - DNA, 405 bp, Triticum aestivum
  Clone ID: LIB103-044-Q1-E1-C1
ccgggccgacgggatgaattacatcgcatttccaaagttgaccttctccccttctgcatactgaccttcttcctctcgcagcacacgcggggagcaggatacagagcggcatctcctccacgccggtgttcgcacaaaaccgaactaccccagtctcctcctcaacaccgctgtttcgccctcaatttccatcggcctcttctacatcggcgtcagctctctccgaccttcctcgtcaactctctctgaccttccccgcacctttcctctgctgccgcgcatggtgcttcgtggcatcccaagtgcctctccaaaacagtcgtgtgtagtgctcccctgaaatcctcatgtgtggaaagctatggcatccagctactacggctgtttctaattaacaattttcct

SEQ ID NO: 1761 - DNA, 368 bp, Triticum aestivum
  Clone ID: LIB103-044-Q1-E1-C3
acgggcaagtaaaataccgatgacaaagggaacaacgtatgttgttatgcggtttgaccgataaagatcttcgtagaatatgtgggaaccaatatgagcatctacgttccactattggttattgaccggagatgtgtctcggtcatgtctacatagttctcgaacccgcacggtccgcacgcttaaagttcgatgacgatttatattatgagtttatgtgttttgatgtaccgaatgtagttcggagtcccggatgagatcggggacatgatgaggagtctcaaaatggttgagacgtaaagatcgatatattgaacgactatatttagacatcagaaaggttccgagtgattcaggtattttcggag

SEQ ID NO: 1762 - DNA, 401 bp, Triticum aestivum
  Clone ID: LIB103-044-Q1-E1-C5
taccgatcaagaattcccgggtcgaccaaacatcctcggacgacctccccgacgccgacttagaaagctccaaagcaaccccgagcggcatcatcaaaaccgatgaaggccctgccgaagatgatgatggagattcccaccatttctgggtaatggcataactcgtgtttcctcatttaacatggatatactcttggctgactcgttcactgaccgactaatttgtgaaatcgtagtgcttctacttctgagacctcagccagacatgaagatcaagaaatggaggatgctgccacttgcaaccctggtatgatctaaatagtttcgctttcggtcgataggatcctcatttttaactttgaatcttttctgtagctccacctagtatcatcattgatctc

SEQ ID NO: 1763 - DNA, 399 bp, Triticum aestivum
  Clone ID: LIB103-044-Q1-E1-C6
aattcccgggtcgacgggtttgtcacttcggtggaaggtgaggcgggcttgttttcttcttcagcccttacatgcgtcttcagccatctctatctccgagacgccggcttcgacttctcctctgtcctcactcccgtggactctgactctgagggcgatgctgctgccgccgtgaagagctccatggacgccatgatgagcaggttcctggtcgtcagtcctccgatcgggaccgaggggacgggcgacgcgcctggcgatggggctccgctggcgggtgatggcggcacccaggtctgaagaggtggcttcgtaacgatgcaccttcatgtttgtcctgtatcatgtagcatgcctcacagaggcatttaaaattgtttgcttggaacaatatgtttt

SEQ ID NO: 1764 - DNA, 412 bp, Triticum aestivum
  Clone ID: LIB103-044-Q1-E1-C7
aggtaccggatctagaattcgcgggtcgacgggcagcggacgctcgcttggcaaagctactggttccagcaccctatgtggtgccagaaaagaaggccaagaagaaggcctcggggactcagaagagtgcccagcgcctaggggtgtcggattcatcatccggtgactccaagacgtactcctcccgtgaagacgaggaggaggaagaagagacctctccccctccagcggggggagagaggaaaaggaaggccgccccacctagggaggccgaagggtccaagaaggggaaaacccttcctccggacggctccaccaacgccgacgacggcgaagaggattggccgcacatggccaagcccctagcgagatcgtaagtgtctggataccagaatgattcatagtattcttc

SEQ ID NO: 1765 - DNA, 403 bp, Triticum aestivum
  Clone ID: LIB103-044-Q1-E1-C8
attcccgggccgacctagggactagctgccttgtactatgaaatgcttcctgcagccggacaaataatgagttgcagctcgcagagcgactgttcggtctgcaggagttaaggctgaagggatgtctgcctaaaaaatggctaaggacccaaggcgtacacatagtccaagtcggcttcccgcctcaccgaccaactgtcaagcagccgaccagccggcccctacttaacttgctagaaaactccaatcggctaagtactttccttcccaaaagtggctaagtacttgacccagccacagtccgtggaatggctgctcggctggcaaggtggcaaccgagggaaggcggcaaaggaaaaaagccaaagagcagaagcaaggaaagatattacttggcaaaaat

SEQ ID NO: 1766 - DNA, 394 bp, Triticum aestivum
  Clone ID: LIB103-044-Q1-E1-C9
gggtcgacgggaggtagaggcgaaagtgaggctggtcatggagtccgagcatgggaagcagatcagggagaggatggcgatagcgaaagtgattgcagccgatgcgctggagaccggtgggtcctcagcggcagcatttgttgacttcctggatgatctcaagatttccatgctagatgttatttaacctttagtgttcgccttgttcagcttggtggaatttgttttctaaatgtttaaaaacatccggctgattacagcgcggtgtaaacctcctccaatgcgcgccacgcctccagtacagagccaccaccgcttttgcttttcacttagagcatgggtaataatatgctcccctcgtggttaaatagactcgactcaaccttgtactaac

SEQ ID NO: 1767 - DNA, 440 bp, Triticum aestivum
  Clone ID: LIB103-044-Q1-E1-D12
gggtcgacgggccagagaggcatatatctcaccaagatggatcgtaaaacggaccaagaataatccaccttggtcgtacaacctctctcttgttgttggtcaaagtgatggccgtccatgcgaccccgaagatgggctagctcgccaataatcacgcaagtagctagtgcccgaagacaaccactgcatgcgcgtggcccaaacatatgtatggagaggtgtggttttgagtaacaatggaacaactttgatgtggcaccgtgatttcaaactagaaatccccacagagagtgagggttaggtgacgatgcatatgtatgttacaccacacttcaagccaacgacggggattcatatatgcatgcatgcgtgcatagtatatgcgatcaaacttaattaggtctgaatctcaccatgacctatactacggtaacacgaac

SEQ ID NO: 1768 - DNA, 401 bp, Triticum aestivum
  unsure at all n locations
  Clone ID: LIB103-044-Q1-E1-D2
ccggtcaagaattcncgggccgacgggggcgccaaaacgcgcagcacgcgcgcctcgcatgcggtggacgtcctcgctccactcccgctttgtccacgccgtggagcttctcggcggccacgagagggcgacgccaaagtcagttcttgaactcatggatgtgaaggatctcaccctagctcatgtgaaatctcacttgcagatgtacaggactgtgaagaataccgaaaggccggcagcttcgtcaggttgatggcttcgagaacgggtcggctggcgagatctgcgacgacaacttgcttgacctgcgaggcggcggtaagcccgaggcagtggcaccggccacacggaatggaacgttanctgcaaacgacgatgacaggagcatcggcgccggtgcc

SEQ ID NO: 1769 - DNA, 414 bp, Triticum aestivum
  Clone ID: LIB103-044-Q1-E1-D4
accggtcctagattcccgggtcgacgggcgagccaacccgcgagctacaacccctgggagaccaccggtgccgccccggccccgatgatgcaacagccagcagcaatgcaggacccgttctacggctcaaacgggtatgcggcgccccatgcggtgcagatggccgccatggcccagcagcagcaggctttcatgcttcagcagcagatgatgatggccagccaccaccctcaggcacaacaataccaccaggcacaggcggccccagcgaacccattcggcgcgaacccgtttgcgcccgccggcgcccaacacccttatggcggcgctggcaccgggatgatgcccctccacgccgtccacggcaatgcgtacaccgggctgatctaaccggtggttcacagatgaaaactt

SEQ ID NO: 1770 - DNA, 411 bp, Triticum aestivum
  Clone ID: LIB103-044-Q1-E1-D8
aattcgcgggtcgacggggacaggactccaagggccaagcccctggcgagatcgtaagtatccggactcccgaataacttcatggtttttcttttcgccacataatgtctttctaatgtcgcatgtaaccctgcagtccgcccaaggatgatcttcctgcttcgtcgagcgggtccttaggtgcgtcggacatggattccttttcgactgcctccactcctcgtgatgcggacgatgctgaggtgggatcccgggaagggacccaccaggaggaggaggccccggaggtgtcgcaggacaacctcccggactttgcaccggactcggccccggagcctaaagtggctctggaatccggcgggcgaccccttcgtaagaagggcaagaccgtgacgctggcagcctccgttc

SEQ ID NO: 1771 - DNA, 396 bp, Triticum aestivum
  unsure at all n locations
  Clone ID: LIB103-044-Q1-E1-E1
ccggtccagaattcccgggtcgacgggaagacgcagcagtggatgcccacgcggagaggagtacgagggttcactggttcggctgtggtgtgaggctgccgtcgccgcagggcctggctagcggtgggagtagtanggggcggtgaggcctccgcggcagcccagcaggtcacgggaagcacgagtangcgacatgaccgacgctgcttcgggcggctggagcaagaagaccagaggttgaagaaacactacggcccgttggatggacatcataccgtcactggagctagaatcgtttatactgactaagttgacacagccctccgtccccgtcaacttagtacgcccacaggtcagcctcccactatgcgggtcccagctagcagggggagtatt

SEQ ID NO: 1772 - DNA, 442 bp, Triticum aestivum
  Clone ID: LIB103-044-Q1-E1-E12
gtacggtccgagaattcacgggtcgacgaggaagaatatttggaagatgaagaagatgacgaatttctgaaaggtttcaaggttgcgaacttcgagtacatagatgaagctaaagctttagcagcaaaagaggaggcacgcaaaaaagcggaagctgaagccgcatccaataaagcaaactattgggaagaattattgaaagacagatgcattgagcaagaagtagaagaaattgctatgggaaaaggaaaaagaagccgcaagcagatggctgctgctgatgaggatgacattactggcctgcacgagttaagttctgaagacgaggattactcctatgatgatgatgtgtcggataatgacacgagtttaccagcaaatgtttctgggaggaaggctcagtattctaagaaaaactcacgtaatgtagattcactccctt

SEQ ID NO: 1773 - DNA, 414 bp, Triticum aestivum
  Clone ID: LIB103-044-Q1-E1-E2
ccggtccagcattccgggtcgacgatcaaggcaacatactactccctgaagacatttgtctgtcgtcttcaggcgaggttgaagacctggagaagcttatcgaccacgtgttcccgagtctagatgacaacatgtccaattcaaattacatgacatctcgagcaatcctttccactacaaaggaacaatgttgacaagataaacatccgcatgatagagcgttttcatggtgatgaagtaatctaccatagctttgacaatgcggaggacgacccgtatggctactacgctcaggagtttctgaatggattgaatcctaacggtcttcctccacatgcactcaagctaaagttgaactgccctgtcatactgctaaggaacattgatccagctaatggattgtgtaacagcact

SEQ ID NO: 1774 - DNA, 396 bp, Triticum aestivum
  unsure at all n locations
  Clone ID: LIB103-044-Q1-E1-E4
acggtcaaaattcccgggtcgacgggaaatgcaaaaagctggcaaataaattaaataaccaagctcactcaagaaaaacaaatcgatttgcgcacggagaaggactgctcattacatatcttacacgcgggcggtaattatacaatacatcactcagatatgcgtacataatcctgacatgtcatttaggctagtgcacttctcccagttcctacatgatgcgcaaacaggctacttctcacaacctatgtacatataaacatatcgtacaaagcggtacattgcatggcggctaagcgtactcaggcggagatgttgacgatctcctttgccctgccgagggtgaggcgtancgaggctggggactcgacttcctccttgctaataggctccata

SEQ ID NO: 1775 - DNA, 411 bp, Triticum aestivum
  Clone ID: LIB103-044-Q1-E1-E5
aattcgcgggtcgactagaaaaattgatcggtcgaagactccatgatatccgctccagcttcatcaacatagtcatcatcgccatcgtcggggtccgagtcggtgtcgtcgatgatgatgtagttctccgggcaagtggaaccgtcatctcctcctctgggcgcggggtctcccatgaacactcctagcttccttgtcaggtcgtcattcttctccactaatacgacgctttcctcctcataatctttgcgtgcaaccttgagttcttcctccagttccgtgatccttgtcatcgccttcttcaaatctgtcatgcctgcgcacatctggttctcctggcgtcgaatgtgctagtttaactcctggatgaaagctgcaatcgatctatccttcctggtgctgatcatctcc

SEQ ID NO: 1776 - DNA, 420 bp, Triticum aestivum
  Clone ID: LIB103-044-Q1-E1-E7
gtaccggactagaattcgcgggtcgacgggcatgacaacatgatctccatcatcttgatctatatcaatgtttcgtcacatggtcgtctcgccaactattgctcttgcaactattgctatcgcatagcgataaactaaagcaattatttggcgcttgcatcttatgcaataaagagacaaccataaggcttctaccagttgctgataacttcaacaaaacatgatcatctcatacaacaacttatatctcatcacgtattgaccatatcacatcacaacaagccctgcaaaaacaagttagacgtcctctactttgttgttgcaagttttacgtggctgctacgggttgagcaagaaccgttcttacctatgcatcaaaaccataacgatatttcgtcaagttagtgatgttttaaccct

SEQ ID NO: 1777 - DNA, 403 bp, Triticum aestivum
  unsure at all n locations
  Clone ID: LIB103-044-Q1-E1-F1
ggtccagcattcccgggtcgacgggtcgatgaatgatttgagatatggaggcagtgatattaaagttatgctagttgagtagttgtgaatttgagaaatacttgtgttgaagtttgcaaatcccgtagcatgcaggtatggtaaacgttgtgtaacaaatttgaaacatgaggtgttctctgattgtcctccttatgagtggcggtcggggacgagcgatggtcttttcctaccaatctacccccctaggagcatgcgcgtagttcttggtttttgatgacttgtagatttttgcaataagtatgtgagttctttatgacaaatgctgagtccatggattatacgcactctcacccttccatcattgctagcctcttcggtactgtgcattgcnctttctcac

SEQ ID NO: 1778 - DNA, 247 bp, Triticum aestivum
  Clone ID: LIB103-044-Q1-E1-F11
gggtcgacggggaagtccgccgccaaggagggcggcgacaagaagggcaagaagaaggccaagaagagcgtggagacgtacaagatctacatcttcaaggtgctgaagcatgttcaccccgacatcggcatctcctccaaaggcatgtccatcatgaactccttcatcaaccaaatcttcgagaagctctccggcgaagccgccaagctggagcggtaaaacaagaatcccaacaatcagttcccgg

SEQ ID NO: 1779 - DNA, 226 bp, Triticum aestivum
  Clone ID: LIB103-044-Q1-E1-F2
cggtccagaattcccgggtcgacggggttaggaagaagtggggtggtggtgtcatgggctccaagtcgcaagcgacgaccaaggccagggaaaggcttatcgcaaaggacgctgcgcagcggatgaactaagtttagcattgttgaaccatatctattcctcatccttgagtagtgttcaagcatactgtggctgtttggctccagttttgggaatcaattttggt

SEQ ID NO: 1780 - DNA, 319 bp, Triticum aestivum
  Clone ID: LIB103-044-Q1-E1-F3
accggtccagcattcccgggtcgacggggatagtaataaatgacctgcagtacgtggtgcagctggatgacacgaccctgatcgagcactatgccatctacaacttggtgcgcacggctcccatggccagctacatgcatgggtgggacacgctcgtgaccacctagctcgacaagcgtgaacatccggccgcacctcggctgcgtcaagaacactttcctccacgcgctcaagatgctgccgcacggcatggacaattagtacagctccctttagttcaccctcgtcgcgatcatcgtgggagcttgagagctgctgg

SEQ ID NO: 1781 - DNA, 402 bp, Triticum aestivum
  Clone ID: LIB103-044-Q1-E1-G1
ccggtccagaattcccgggtcgacgaccttgtttggaccgaggaggacacatgcatactagcttggaggaaatgacaaacctgtttgtgtaattaaaattacatgaaccattttttaaacctacgcaagctttttaaaattatgtggacatttttcttaatacgtgaacattattttacaatacatgaatattttaattatttaaacatattgtaatctataattttcatcgaaattacaaaacacaaatctgtactgggtcgcagtgatcccagacgggagctcctatttggcaccatgtgtgttgggaaaccagccaacgcaccccatcgcttcccgtgcgcaattttgggctggcccatgtgtatggtaggaacaccagtttcattcatttcatttttt

SEQ ID NO: 1782 - DNA, 463 bp, Triticum aestivum
  unsure at all n locations
  Clone ID: LIB103-044-Q1-E1-G12
gtaccggtcctaaattcncgggtcgacggacaatcatgaggatgtggacccatttgcgatggaaagtgatgacgtggatcccatgcaagaggatttgctaaatgaaatatacgaaaagacagccgatgaacctgtactaagatctggcgatggaggcgctgaacaacccgtggctccaagagaggcagagaagcatcaagatggagaggatggtggcggaagcaagccaagcaaagttgagctgacggaggagcagaaggcgcgcatggaggctaacaggctcaaggcgctagagagagcggcagcagctcgggctcgcgcgtcccagtcgctgcctactactgaaactaccacctgaaagcgtgcagggttttgaatcactccgccttgcatgtttgggcgtgtaagcatagatggtgtgtttcatggagatggtgttcgttgaaattgaggtgttaaatcc

SEQ ID NO: 1783 - DNA, 316 bp, Triticum aestivum
  Clone ID: LIB103-044-Q1-E1-G3
cggtccagaattcccgggtcgacgggcgtacgaacatgcgaaagctatggtccaatagccacaatacgccagggaaaagttggtaaaataaaaaagttaataaccaaccaaaacgaaccaaaataaaattaaaattaaaattccgccggatccttttcggcaattcaagggtaacaagggaaacggcaaattcgggggccccccaaaaaaaaggccgcttggggatcaaaaacttctcaaatagcagctagctaaattgagtccttcatgtttcacaaacaaaggaaaattcaatttcgagacatgtgcttaaaca

SEQ ID NO: 1784 - DNA, 425 bp, Triticum aestivum
  Clone ID: LIB103-044-Q1-E1-G5
aggtaccggactagaattcccgggtcgacgggttgtcctaagcttgggggtgctatgattaatgaagataatcttgttagtacccgtacttttaatgaacaaatttgttatgatgacatcatgcctcctatttatgatgatcacaatgatgaaagtgggtttcgaagagtataaaatctaggtattaatgatcccactaatttggagggtgttgaatcttattacaataatgacaaaagtggatttggagaggtcttgactttatacagtgatgaatccactactttggaagaggtttcaattgattatgacaacaaagttgctatctatgatgattatggtaatgatatgtatgctataaagagtaataataaccatgaaacttgtcaccatgattttaatgttcaatttggttatgtcaatca

SEQ ID NO: 1785 - DNA, 452 bp, Triticum aestivum
  Clone ID: LIB103-044-Q1-E1-G6
aattcccgggtcgacgggcatgcccaaagaaagttatccctataaaatcatatagtctggctatgctctatcttcaccacacaaagtatttaaatcatgcacaaccccgatgacaagccaagcaattgtttcatacttttgacgttctcaaactttttcaatcttcacgcaatacatgagcgtgagccatggacatagcactatatgtggaatagaatggtggttgtggagaagacaaaaagggagaagatagtctcacatcaactaggcgtaccaacgggctatggagatgcccatcaatagatatcaatgtgagtgagtagattgccatgcaacggatgcactagagctataagtatatgaaagctccacaaaagaaactaagtgggtgtggatccaactcgcttgctcaagaagaactaagggaattttgaggaagcccatcattggaa

SEQ ID NO: 1786 - DNA, 404 bp, Triticum aestivum
  Clone ID: LIB103-044-Q1-E1-G8
agaattcgcgggtcgacgggcactacagggtctggggcagcacgaaggactccctggtcgaactcgcctcggccatcatcgacccctactacgaaaagatgaagcaggatgcccagagaacaagtcccctatcctggcacagggcctggatgtggcaactggatgaacccacctcaggttcgaggccaagtgcgtgtacacatgctacgaggtgcacaggcagatcgttgacatgaggaagtgcctcgtaaccaaaatcgatgagcccagatcaagccacaagcagagcaagcgtcacaagaagtagatgatgatcagatgatcgtttatgctagttaatcatgcatgtaatatatagtttactttattggtgtgttgaaatgtcatgtgtgtagtatccacct

SEQ ID NO: 1787 - DNA, 363 bp, Triticum aestivum
  unsure at all n locations
  Clone ID: LIB103-044-Q1-E1-G9
cgggtcgacgggtctaacaagctttgaggtaagaattttaatatttataaaatagtaccgcatagacagtagcccctgatgcttggttcggtgtttggaaagaaaagccggactgaggatctaaaaagatatacgcaggagtcttaaanaaatatttcaatatgggattgcaagcttccctgctgaacttcaacggccctaactgcgaaggcaattgctttgaaccaaaccctcaagcggtccgaaaacaacccctccgttgcaaaaaacaacttcaaggacaaggaaggtaattaaaaccttattaaatttgtaccttacaaaaaaggatttggttgcaaaaggaatgacaaggataacttg

SEQ ID NO: 1788 - DNA, 390 bp, Triticum aestivum
  unsure at all n locations
  Clone ID: LIB103-044-Q1-E1-H1
ccggtccagcattcncgggtcgacggggatatggaacagtgatccagatgcctcccaaaatgtagccgtgtgcgatgcagcacacactaaattctttcgcacatgtggtatcggtgattaagcgtttctaatgacgtagtgaaaccatacggtttgttgttacgaaccgtttaggaaatagtatgtaaggcacacgggccaacatatgaactgtgtgcgatttgtgcccgatcgcacacaagttttctatgtaacccgcctgccatgctagactccatcgcacacgttttccaacaattaccgtccgcgataatgttctatcaaaaatggttcaggagccccttcgcacacatacaagtgttgcagaccgaaaaaaaacacagaagaacc

SEQ ID NO: 1789 - DNA, 299 bp, Triticum aestivum
  unsure at all n locations
  Clone ID: LIB103-044-Q1-E1-H3
cggtccagcattcccgggtcgacggngtcangaagnaatggggcggtggtgtcatgggctccaagtcgcaagccaagacaaaggcaaggaaaaggtcaacccaaaggaggttccccaaaggatgaactaagccaacccttaaatttcaaaacatatccaatgtattttccctttcagtgtgtcctaattttgacaaggaactcaaacccttttaccacaactgtggaacctaattgtggttttctgattctctgttccgttcgcaagactatatcaaagataagatgaggtttacccgg

SEQ ID NO: 1790 - DNA, 416 bp, Triticum aestivum
  Clone ID: LIB103-044-Q1-E1-H5
gtaccggatcagaattcccgggtcgacggggggggggggcgccacctccccttggcctgcctcctcctttcccgtatggtctaataaggcccattacttctctcagtgaattcccgtaactccccggtagtccgaaaaatacccaaatcactcggaacctttccaatgtccgaatatagccttccaatatatcaatctttatgtctcgaccatttcaggactcctcgtcatgtccgtgatctcatctgggactccgaacaaacttcggtcatcaaaaacataactcataatacaaatcatcattgaacgttaagcgtgcggaccctacgggtttgagaactatgcaaacatgatcgagacacatctccgatcaataaccaatagcggaacctagatgctcatattggctcctacat

SEQ ID NO: 1791 - DNA, 426 bp, Triticum aestivum
  Clone ID: LIB103-044-Q1-E1-H9
cgggtcgacgggagatggtgatattagagtcatgctagtgggtagttgtggattagtataaatacttgtgttgaggattgtgtttcccgtagcatgcacgtatggtgaaccgttatgtaacaaagtcggagcatgaggtatttaatgattgtcctacttatgggtggcggtcggggacgaacgatggtattttcctaccaatctatccccttaagggcatgcctagtagtacctttgcttcaagggcaaataaacttttcaataagtatgtgagttccttatgactaatgtttactccacgggttataagcaatcccacccttccatcattgctaacctctctagtaccgcacaactttcaccggtaccataaacccaccatataccttcctcaaaacagccaccatacctacctatcatggcatt

SEQ ID NO: 1792 - DNA, 329 bp, Triticum aestivum
  Clone ID: LIB103-045-Q1-E1-A1
taccggtcttgaattaccgggccgacggggatcagtaattcctctcctgcttctccacaaatcgcctcggactctcgcgagagcaaccaacctactcgcgccggatccacaccggcgcttcgaggcccaatgggcgagaatctcttcgaggagatcttcaacatgcatgaggatcgaacccagaagggaagagattcaacacagtgactcgcattgacgccacaagtggatacttgcttatgtacacgtacatacaaagtccaaccgctgtcaaactatcgcatatgggtaactcattcaccatcgttttacatcctacacagagtcag

SEQ ID NO: 1793 - DNA, 399 bp, Triticum aestivum
  Clone ID: LIB103-045-Q1-E1-A12
attcgcgggtcgacgggtatgacggtcctactttcagatgttcagtgcagaaggtttactcttatatattacagtttgaccagtagaaaagagacattgttatctctatgggttggggtggcactctatccattccactgattagcaagttgagcgtcagacatatggtttggcttttacggatggtggatgatgtcagacaagccattatcttggggccgaataaggtatttaagttcaacgagagcgacgttgagaagatatacggaatcccggcagctggaacagatgtgatggacaaaacccatgaataatggttatatacgcgtacaaagaaccgattaatggtatatgaatccagaaactcattatattacctatcatgtttgcaagcacctg

SEQ ID NO: 1794 - DNA, 440 bp, Triticum aestivum
  unsure at all n locations
  Clone ID: LIB103-045-Q1-E1-A2
ggtcaagaatacccgggtcgaccggcggggcaaaggccgcccgaagaaaactgagagcccggctgaaagctcgggacgaggtgggaagaggggccgaggcagaccccggaagtcttagacctctccggcgagcctttttggtgaaatcaggtcaagcgatatctaacacctgatatgatgtgatccagcccggccattcgacagtactctctgactgcctgctattcgagagattttttccgtgtagtggtaatcttgtgattgtgagcctgtaatgttagcatgcgcaaccgtattattcattggtgaccgtgagtgaatttttctgctcaaaaaaaaaaaaaaaaaaaaaaaaaaaaaaaaaaaaaaaaaaaaaaaaaaaanaaaaaaagaaaaaaaaaaaaaaaaaaaaaaaaaaaaaagggggcgccccaaagggt

SEQ ID NO: 1795 - DNA, 392 bp, Triticum aestivum
  Clone ID: LIB103-045-Q1-E1-A6
aattcccgggtcgacgccgatgaaaattgggtggatcttggcaggaccgcgaggcaagagatcgagggaaagcaaggaagtacctaagctacacatgacgctaggaccgaacacgggatgaccacctctgactccattgggaccgggagaatgcacatactccctctgtttacaaatataaaatgttttgaatatttcaatatagactatacatggatgaaaatgagtgatcaaagacaccaaaacatgtctatatacatttaattcagaaaaaatctagaagatcttatatttgtgaatggagggagtactatcggtgtccctccttaagttagaggtgcacgtgaatccctttcctcctcaagatttttgttcacctcgtgatcctcatg

SEQ ID NO: 1796 - DNA, 394 bp, Triticum aestivum
  Clone ID: LIB103-045-Q1-E1-A8
attcccgggtcgacggggatctaaacttgtatccattcctcaatacgcgagggcgtgcaactttcagtttgcttctgtggcgtgtgaaggcttgtgccaccgcagcaattaaccaaggaaaggaaggaaattggatcccgagaatgctgtagactgatctatgggttaattagagattccaaacggagctgctgatgtttgaaggattgatttgattcatcatgcctgcaccggaggagatcaagatccacgcacaaaacatcgatgctgcagcaagagagataattggcattttggaggatacaagcataggaaatgtgatcttcgtccgtggttggcgtggatttggggcatcagcggcactcaaggcagtagcacaacgcctgaaatcatc

SEQ ID NO: 1797 - DNA, 416 bp, Triticum aestivum
  Clone ID: LIB103-045-Q1-E1-B10
ttcccgggtcgacgggggtccgtatacgaccccgttctcgggatctgctgccatttctgcaggcagaagaaactctgcggcgaggagggctgcaagcgctgtggggaaggagactttgagcagcaatgcatagggaagacggagtgctcctcttgccattcctcctatgggatcctctgccgtgcttgccttaaagttaggtacggtgaagagatggaagaggtcaggaagaacaagaagtggatgtgccctcactgtgttgaggagaagggtaccaagaaattctggatatgcaacagctccatctgcttgaagaagaggaagatagcaccaaccgggatcgccatattccaagcgcgtgagcaaggatatgcgtcggtcgcacaccttctcatggaccagctgaagagccgcgg

SEQ ID NO: 1798 - DNA, 418 bp, Triticum aestivum
  Clone ID: LIB103-045-Q1-E1-B11
gacggggaaacgaaagaacaaaagagcttgcgcaagaacacgttaaccttgcggtcaaagccatcgaatctctcccaggcagtgacgatgaagatgttctgatttcaaggcgcgctcttattgatatcacacagagagtcatcacaaggacaaaatagcatgattatacacagggtggagaagataaggcggagtttcaccacaggtgtagtgttccgcttggaaatttttggtcgccttggtcattgcattctttccattgcccgggttttgtgtaacatttgatgagacttcagggtaaccattcctgggaatcatcctaagtcgcagctgtagtggttttagttactggtggcagcagaatctgtgtattaatatcacgattggcgattgcacgatgacctgatcataagactgt

SEQ ID NO: 1799 - DNA, 414 bp, Triticum aestivum
  Clone ID: LIB103-045-Q1-E1-B7
attcccgggtcgacgggatatctatcggagtagtttgtcatttgctctagtgcttcacttatatcttttagagcatggtggtagttttattttgaagaaatagatgaactctcatgcttcacttagattattttgagagtcttaatagcatggtaatttgcttaaaatcctaatatgctaggtattcaagaataacaaaactttcttatgagtgtgttgaatactaagagaagtttgatgcttgatgattgttttgagatatgggggtaataatatcaaagtcgtgctagttgattagtgtgaaattgagaaatgcttgtgctgaagtttgcaagtcccgtagcatgcacatatgataaatgttgtgtaacaaatttgaaacatgaggtgttatttgattgtcctccttatgag

SEQ ID NO: 1800 - DNA, 340 bp, Triticum aestivum
  Clone ID: LIB103-045-Q1-E1-B8
gacgggctagtggatacagaaagttgcaacggtggaattaggtttttggctcctgttctgatcgtttgggggtacgtgtgtatatctaggaggaagaagtacgccggacgagcaacaaggggcccacgacgcaggggggctctcaatttgcttgggatcctaatatgctatgtattcaacaataacaccactttcctatgactgtgtcgaatacatctagaactttgatacttgatgattgttttgaaatattgcggtaataatatcaatgtcatgctccttgattactgtgaacttaataaatgcttgtgctgaaatttgcaagtcccgtaccattcac

SEQ ID NO: 1801 - DNA, 298 bp, Triticum aestivum
  Clone ID: LIB103-045-Q1-E1-B9
cggggatatggatggtgacttccccggtggcgaatccgaaatctccgaagcgagcgattctaataatcgcaacgctattgacaccacttcgaatcacagatgtgattggtgatgagaatggcgaggataataaagagtatgcagacgatcaggccgctgcatcaggtgacaacaattataactatcaccacagtcactatgattctggggactactactatcattactatcatctctctgctgtcgacgatagacatcgagtcttataggaggatgattactatgaggatgacgacga

SEQ ID NO: 1802 - DNA, 402 bp, Triticum aestivum
  unsure at all n locations
  Clone ID: LIB103-045-Q1-E1-C1
ggtccagaatacccgggtcgaccgggaagaagaccaaggccgagaagcggccgccgaagtccaaggagggcggcgccgacaagaagaagaagaaggccaagaagagcgtggagacgtacaagatctacatcttcaaggtgctgaagcaggtgcacccggacatcggcatctcctccaaggccatgtccatcatgaactccttcatcaacgacatcttcgagaagctggccggcgagtcggccaagctggcgcgctacaacaagaagcccaccatcacgtcncgcgagatctagacctccgtccgcctcgtcctccccggcgagctcgccaagcacgccgtctccgagggcaccaaggccgtcaccaagttcacctccgcctgattcggtcctgtccctgtgt

SEQ ID NO: 1803 - DNA, 396 bp, Triticum aestivum
  Clone ID: LIB103-045-Q1-E1-C10
attcgcgggtcgaccacgtattcgacgaaaaaaatatatgcggccaatgcatggctatgaacgtcttcttgtgtggttaaatatgtgcacgtgtactctataccgaggagcattttcgcacaggatcttccttgcgtgaggtacagaaggtggccaagcacaagacgacgcgaagcactcgttaaaaagaaaggaaaaacgagctgggttccgcacctgactgctctaggttcgttcggagctagcggtcagatccgtcacgatggatgtacagaacctgcatcgacgagccgactggtgtcaggtgaggttgaaacagcctgtaacgtggttagtacctcgaggaaccggcgcgtgtgcttttcgaaagaagtggaacctgtggtagacgtgatc

SEQ ID NO: 1804 - DNA, 425 bp, Triticum aestivum
  Clone ID: LIB103-045-Q1-E1-C11
attcccgggtcgacgggtcggtgaatctcatgatctggaactgcaccacccccggaaagcaggggactgattgggaaagtggatactacccacttactctccatttcagtgaggactaccctagcaaacctcccaagtgcaagttcccgcagggttttttccacccaaatgtctatccttcagggacggtctgcctctcgattcttaatgaggatagtggttggagacctgccatcactgttaagcagattctagttggaatacaggatttgcttgatcaacctaatccagctgatcctgcccagactgatggttatcacctctttatccaggatccagcagagtacaagagacgcattcggctgcaggccaagcagtaccctgctctggtttgaggattcatgtaacagtctaaaatcataaat

SEQ ID NO: 1805 - DNA, 228 bp, Triticum aestivum
  Clone ID: LIB103-045-Q1-E1-C2
ggtccagaatacccgggtcgacctcatctcccacggctgcggtggctgccgcgctcacgatcacaacattgcgcaatacacggatcggaatccggacgtgctgttcctgcaagtcagctacaataagcagaggtccatgtgctacagcctcgatgtccatgtcgtcgcatgcgacaggctctacacgggagctcatggcagggtcagcagcttcagctgcaccaatgc

SEQ ID NO: 1806 - DNA, 415 bp, Triticum aestivum
  Clone ID: LIB103-045-Q1-E1-C6
gtaccagtctagaattcccgggtcgacgggtctcacaatgtgtacggttcgtgtagagagagcttgccaacatggagcagataaggcaggacagatcgtatgtacgttgacgaaagcgtcggatacagccctaatgacacatacagagactgataaagagacaccgagagaggaagaagttaggtctgtgacatagatggagacatgtaatatacttgagatacgtttgcatcggtattctgttcacatcgacggagaagacacaccaggtttgatcacatagctcgacacgcattgacgagaggggaaggatctcgtgggttgagggattgataattttgtgcgggtgatagagggataggtaattctgtgcaagagacagatgagggaggagtcagtcagctgtcgtcccatc

SEQ ID NO: 1807 - DNA, 424 bp, Triticum aestivum
  Clone ID: LIB103-045-Q1-E1-C7
aattcccgggccgacgggaaaggtgagatgagaagtttgcttgagagaagttaatgagtaatgccatttctaagaagagcaccagctgtgacgctactgctcaccgtcagaagatgggtcgatgcagaagttggaaaggtggatgagaggctttaattactttgcaactctgcctcatgagctccatcagcccaacaagtcggttcctgcctttcatcgctcgctttagcagcgaccctgcttgatggccagacctcatgcggcagcagggcagggcagcacgggttctcggtagattgtgatcgagggcctagcacgaagattcccagtcgccggtggttgtaaagggcaaaacccctggagcagattttgtcaatggacaagtggagactgctatgctagttcatgggaaaatacagaatga

SEQ ID NO: 1808 - DNA, 401 bp, Triticum aestivum
  Clone ID: LIB103-045-Q1-E1-C8
aattcccgggccgacgggacaagataaacaacaagctgcagcttgtcatgaagagcggcaagtacacgctcggctacaagaccgtcctcaggaccctcaggaactccaaggcaaagcttgtgatccttgctaacaactgccctccgctccgcaagtctgagattgagtactatgctatgttggcgacgatcactgtccaccactaccatggaaacaatgttgatttgggaactgcgtgtggtaaatacttccgagtctgctgcctgagtatcatcgaccctggcgattccgacatcatcaacgcaacaccagctggccagtaaacctgtgtatgccattttcagtgtctcgtctgatgcgtcatctaaggtggttctagagtgtagttcctgctggacttg

SEQ ID NO: 1809 - DNA, 398 bp, Triticum aestivum
  Clone ID: LIB103-045-Q1-E1-C9
attcccgggtcgacggggaagaagcacaaggcggagaagcgggcgccggcgtccaaggaggccggcggcgaggcgaagcagcggggcaggaagaagggcagcaaggcgaagaagagcgtggagacgtacaagatctgcatcttcaaggtgttgaagcaggtgcacccggacgtgggcatctcctccaaggccatgtccatcatgaactccttcatcaacgacatcttcgagaagctcgccggggagtcggccaagctggcccgctacaacaagaagcccaccatcacgtcccgggagatccagacctccgtccgcctcgtcctccccggggagctcgccaagcacgccgtctccgagggcaccaaggccgtcaccaagttcacctcctcctagacaac

SEQ ID NO: 1810 - DNA, 438 bp, Triticum aestivum
  Clone ID: LIB103-045-Q1-E1-D11
gtaccgatccagaattcgccgggtcgacggggatcaagaaaccactttgacaaaactctgtttgggttaaatccttcgaagaaccactttattagacgcctgaccctcgctccattgtatgggcatcggcatggttctgtctgccgtggtcatgctcagtgccgagagctgtacatcgccgctagcggcgcctccatgtccatggagcatcgtgtcactgctattggtgttctagctagtgccacaagctgcggcgttgtgcctctcggaaggcgttcaatcagctgagccagatggcgttccgatacaaattgttcatgtagaacatgcccagcattgccagctcgctactgttctgtggccaggcgctatcaaaactaccaaagcaggctcctgtgcacttgaggagggtcaggtggaccaaaccggcttggttta

SEQ ID NO: 1811 - DNA, 410 bp, Triticum aestivum
  Clone ID: LIB103-045-Q1-E1-D4
cgggtcgacgggcaagctcacaccaacgaggttagcaagggcaaaccactagattggatttcaggacaaccagtcgcagatgagcatgaatgcctccagattataaagaatgatgacctcgaagagctccaagaactcggttctggaacttttggaactgtatatcatggtaaatggaggggctctgatgttgcaataaaaagaatcaatgacagatgttttgctgggaagccatctgagcaagaaaaaatgcggaatgacttctggaatgaagcatctaaccttgctgatctgcaccaccccaatgttgtggccttttacggcgttgttctagatgggcctgggggatccattgcaacggttacagaatatatggttaatggctcacttaggacggctttgctgaagaa

SEQ ID NO: 1812 - DNA, 406 bp, Triticum aestivum
  Clone ID: LIB103-045-Q1-E1-D7
aattcgcgggtcgacgggggagatcagacaggcagcctttgaatgccttgtggcaattgcatccacatattatgcgcacttagatccttatatgcaaaccatattcaacctgacagctaatgctgtcaaaggagatgaggaaccagttgcactgcaggctgttgagttctggagtactatttgtgaggaagagattgaactccaagaggaatatgagggatctgatgatgctaactcaactgtaaattatcgcttcattgagaaggccctcccttcacttgttccaatgctgctagaaactctgttgaagcaagaggaagatcaagagcaagatgataatgcttggaacatttccatgagtggcggaacatgccttggactcattgctagaactgttggtgatgca

SEQ ID NO: 1813 - DNA, 439 bp, Triticum aestivum
  Clone ID: LIB103-045-Q1-E1-D8
ggtaccagtctagaattcccgggccgacttccaccaaaacgaaatccaccatctcatcgaaagacgggacacctttgcctctatcaagtggtatcagatttccaggttgctcggtgagattttacagtttttcgtagtttagatcgagtctgttcttcatacctacagtccacgaaaaagccacacaaaaaaaatttagggttagttcatcatatccgaaccaatctgagcctttgcataatctttttagggttttgctttgttgaatttgcggttgcatcgtcgtgtctagttactggtcttagagtctagtcttttagagtttcgagttttggtcataagttgtcacgccgccgccgcaccatcatcatcgcccctgccatctaccaccaccgctccgaattcatatcgatatacgaacacgcgctacaacaacggc

SEQ ID NO: 1814 - DNA, 290 bp, Triticum aestivum
  Clone ID: LIB103-045-Q1-E1-E10
aattcccgggtcgaccagcacctgcagcatagtggtgacaccgacactgtcgtcaacagaggtcagctgcttcacaaaccaccgcttgatcgcaaaaggcaacaccgcgaatcagattgtgaaaaccatcacgatccagtgctacctcgtgctaaggcacgtccacccgcaggtgcacactctcgctgaaggttctctgcatcacctctccactgattccgcagacctgctatatgctccccggtgagtcgtccaacctagactcctccaacaggtcacggagcatcaac

SEQ ID NO: 1815 - DNA, 387 bp, Triticum aestivum
  Clone ID: LIB103-045-Q1-E1-E11
attcccgggtcgacggggtacgaggatgagcctccagaggctgatattgaggaaggggttgaagaagatcctgagaacaacgaggatgcccctgatgacgtggtagggggtgaaggtgaagaaaaggaacaggaaaagactgcccgtccacgcaatacaacaaaatatatgaccaagtatgagcgggcacgcatccttggcacacgtgctttgcagataagcatgaatgccccagttatggttgagcttgagggtgaaactgatcctcttgagattgccatgaaagaactgagagcacgtaagatccccttcacgattaggcgctacttacctgatggaagctacgaggactggggagttgacgagctcattgtggaggactcgtgg

SEQ ID NO: 1816 - DNA, 403 bp, Triticum aestivum
  Clone ID: LIB103-045-Q1-E1-E5
aattcccgggtcgacggggactcgagaccgtttcctaggcaacctgcagagaggcatgttggagaaggtaccgtgaagaagcccaatgagaatgagtactcagaattcggtagccagataactgatgtgtaacaagctacagtcgtataacatgccttgttggagctgaagcctgagaagtgtgtttcgctgggtatctagggtactaaagtggtttctcttttggactcatcattatggttgtaatagtcgatgaagaatcatattttactaattttatctgcagaacgttttttgcgcgaaatacaatggccgtccgttgggtccctgatacgtctccaacgtatctataatttatgaagcattcatgctatttgattatctgttttggatgtttatgggc

SEQ ID NO: 1817 - DNA, 400 bp, Triticum aestivum
  Clone ID: LIB103-045-Q1-E1-E6
gggccgacgggcaagggcgggttcaaggcggcgagcctcaggttcgtggccgccggagtccgcaccagggtcaccttctacagctcctactaccacaccaaggtcaccgacggcgtctcgctctgcggccccgtgctcgaccaggtcaagatcatgccgctcaagctctagtcgtccatcggagtagaccagaagctcagatcaatcctgtcgcgttgattcggcatcgtcctctcgtctactatgtagtagtagtgggtatgtaatttgtgacattgatggacctctctctaatcgtgtgccagcgtggtggaatgaattgcctgtgctgtgcgtgaaacagaagaaagagagggacggatgaaaaaaaagcggccgctctacaggatccaagcttacc

SEQ ID NO: 1818 - DNA, 403 bp, Triticum aestivum
  Clone ID: LIB103-045-Q1-E1-E8
aattcccgggtcgacgggggacgctagttcttcccttctctcccggacgctagttcttcgccatccacctccccaaggatcctcaccagcatggacccaacagcaccagcgtttaatcgggttgctgctccaacagttgagcatctcgaccagcgcgcactactaataagggataaattcagtgctgatggttggctttgtccgcgttgttatcaagtacacaaccccatagacaatctactctatagggttccagctttcgagtgtactaatcccgagaagtgcaatgctaagtgccctgagacagttgaattgagcattactgactgcataatgaataccgtcaggaccaattttctgattagaagtcaaggctataaccggaactgcacagcacatgcag

SEQ ID NO: 1819 - DNA, 418 bp, Triticum aestivum
  unsure at all n locations
  Clone ID: LIB103-045-Q1-E1-F1
acggtccagaatacccgggtcgacgggataacgtagcgagattctcgggaaatgaactatgatagcaaactccaaaacatgagctggttttgctacacacgtgtgaacacgatgtcctagacaagcatgaccacgtggtagtcttacaataaaacactatcgagttcaggttgggaaccatcaacgagggtatcgaagtccttacataagtccggattagatcttatgaaggaactccttctccttgaacaaatcaatcagtggcttggtgtgctanggatacatatagattgaaggttgcaagtcttcaaaccacagaattcttcgcacgtgtgcatgcctgatttggaatgattccaaagaaagcaacattgactttctcgaaatcacggcggcaacttgcatcagacgcacatga

SEQ ID NO: 1820 - DNA, 397 bp, Triticum aestivum
  Clone ID: LIB103-045-Q1-E1-F12
aatgcccgggtcgacgggcaggattgacgagtgggcaatggaaatgtcgagctttggcctcaagtttgagagcacttcgactatccaaagcagagcattggcaaagttcatagcagagtggacgccaacacaagatgaagaaattccagaaacaagcatccccgtcaaggaagcaagcaaagagtggctgatgtacttcgatggtgacttttcgctgcaaggcgccggtgtgggcgtgctacttgtcgcacccaccggagaacacctcaagtacgtagtccagatgcactttcccaaggagcaagcaacgaacaatactacagagtatgaaggtttgcttgccggtctcaggatcgcagcagaccttgggatcaagaagctcattgtaagggtgact

SEQ ID NO: 1821 - DNA, 382 bp, Triticum aestivum
  Clone ID: LIB103-045-Q1-E1-F7
gggccgacgggatacggtagtcagaccaagcccgttttccacaagaaggcaaaaaccaccaagaagattgtgctgaagctgcagtgccagagctgcaagcactactcccagcgcgccatcaagcggtgcaagcattttgagatcggtggagacaagaaggacaagggaacgtctctcttctagattgctttcacctatctggagtcgttgtggtcaagaactattactacttgtcttgatgtttttgatgttatgagttgaattgaccagaccttctaatgtatccaaacccctttatctggcatttgagcaaggaccgacttggcgaaaaaaaaaaaaaaaaaaaaaaaaaaaaaagcggccgctctagaggatccaagct

SEQ ID NO: 1822 - DNA, 411 bp, Triticum aestivum
  Clone ID: LIB103-045-Q1-E1-F8
attcccgggccgacgggcaaatctacagcattgtccatttcatgctccactaaagcaagtactatgtgaaaagttttgcttgccccactgttaacttaccacaatcagtcatcatcaatttgaacgccgcacttaatacattacgcgatcttcgacaaacccgtcggctaagcacacactctctgctaaaacacatacacatatcagcattcgatgagttgacgttctatgatcactaataaagcagatgggtcaagtattcattgatataacaaaatgcactgctttgtggagactgtattggggggcaatacaccatcgtttaacatgacatgtgcttaattagctgcacgcttggctgcaaattacgcgcgaaagtatgggggatcaatacgatacactcaactttta

SEQ ID NO: 1823 - DNA, 399 bp, Triticum aestivum
  Clone ID: LIB103-045-Q1-E1-G10
attcccgggtcgacggggggggggaggggcaggggcgttgggagcatctttctcctacctttagccctaggttacccgattgttgagagcggcgacccggtgggaaaaatctgcagcgactaggcgactgcgtgctagggtaggcatggagttcttgatgcagcccgtaaataggcagcaggactctaatagaagaggtcaacgagaacaagatgaacatggagcctcttcattaccctgtgagtctatgacgacgcggccggtggtggagttgccggccaacacggaatcaagcgccaacgaccagatttgcactgagggcgctgttccaagggcaggcagtgcagacaacctcaagcttcagagcactccatcgaacagggtccgggttggggcaac

SEQ ID NO: 1824 - DNA, 421 bp, Triticum aestivum
  Clone ID: LIB103-045-Q1-E1-G3
cggtccagaaatcccgggtcgacgggctcgaccacaacgccgtcgttgcgccgccggtgagccaagttgccccagccccagatcgcccttcccatgtcagtgtacaagaattccgagctcgtgtccgtaccttggagagtgctttttctgatgcggattggtttttaagggatattcaaggtgaaatacagcagatgagggaggaggggcatgagaaagacaggcaaatccgatctctcgttgaagatgcaatgaagaaacgtcggtcaagccacattagaatcaagcaattcgaccatgataaagagctgatgcgtcgattctttcagggatgcaaagaaaaacttaagaagtcttctgatgcatttcgggagtataagaagatgtgtgaaggaagtggcgtgtcatcttcgggtgttgt

SEQ ID NO: 1825 - DNA, 392 bp, Triticum aestivum
  Clone ID: LIB103-045-Q1-E1-G7
gggccgacggggaaaaagatcgaatgcatgagacgaacacgtatgcaaatgcaatgcacatgatgacatgatataagatgcataacaacgacaacaacacacggagagaaagacccgaacccgaggaaataaattaacttaacgccggaaacggcaagagttggagtacaaattgggaaagttatatccggggtgttacaacactccaccactacgaaaggatctcgtctcgagatctaggactgaaagaacaccgggtactcagaacggaggtgatcctcgcgttcccaggtagcttcacggtcggaatggtgtgaccacttgactttgagaaatttgattgacttgttgcgagtcttgcgttcagtctcttcaagaatagcaactgggtg

SEQ ID NO: 1826 - DNA, 405 bp, Triticum aestivum
  Clone ID: LIB103-045-Q1-E1-H1
cggtccagaattcccgggtcgacgggggtcgtcaatcagcgccgcggctcacccccatgcgaccctagcttcgctcgctctccggcgtagcttctcccttttccctgccgcggcggatctgcgtcggcatttgacggcggggagctgacattacaggcctggtctgcaccaatggaggcaatgcgcaaaaaggaggcaacagcaacggcttgttctgaagacaaccgtaaaggtgtacatggtgtatccatgaatgggctatacgatccttggaatcctgcctaccctccacgtgatcctagtccatgcgatgctgacatggctgctcatatcgcatcagtcaaggagtggatggacaaaacacaggctatacttgctaactccagagcaaccaatataatcata

SEQ ID NO: 1827 - DNA, 325 bp, Triticum aestivum
  Clone ID: LIB103-045-Q1-E1-H10
cccgggtcgacggggaagaggagctgtacgaggacgaggacgacgccgacctccaggagtaggggcgtgcgaggtctgggttcttctgtgatcgcgtgcgtgctcagtcgggggctatttctgatggctccatgttgctgctactagtagtgtgtgtgtgtgtgtttcgcgcttgctggcccccatcttcggggtgtcgtggacttgttgcttgtgtagtttgtctgtgtcgggttaattcggtagtcagtttgttgcgcgtgcgttacggtgaactagaggtcttagtagcaggtttgcaatatggctggctcattgtttcttc

SEQ ID NO: 1828 - DNA, 385 bp, Triticum aestivum
  Clone ID: LIB103-045-Q1-E1-H11
gtcgacgggcccaatgaaggcaagagcctcgtgcggtccttcctgctcgcgatgaaggaggacagcctcgaggacattctggacccgagcatcgtgcgcgcagggacggagacgctgctgggagaagtggccgagctcgggaggatgtgcttgggtcccatgggtgaagagaggccttccatgacccaggtggccgataggctgaaggctctgcgaagcacctggagggaagagctggtgttggaccgtgccgtgacggaaaatatggtcgtgcacatgccacctgcagcagctccagtgcccggggatctcgcgtcatcgtcatcgggagccccctcgacggtgccggacatgtccggaatgagcatggaggcacccagatgat

SEQ ID NO: 1829 - DNA, 403 bp, Triticum aestivum
  Clone ID: LIB103-045-Q1-E1-H3
ccgggtcgactaggctgtgtacgatcatcacttgagacggactagtcatcatcggtgaacatctccatgttgatcgtatcttccatacgactcatgttcgacctttcggtctcttgtgttccgaggccatgtctgtacattctaggctcgtcaagttaaccctaagtgtttatgcatgtgtaaaactgttttacacccgttgtatgtgaacgtaaggatctatcacatccgatcatcacgtggtgcttcgaaacgacgaactttagcaacgatgcacagttagggggaacactttcttgaaattattataagggatcatcttatttactaccgccgttctaagtaaacaagatgcataaaacataataaacatcacatgcaattatataaagtagtgacatga

SEQ ID NO: 1830 - DNA, 361 bp, Triticum aestivum
  Clone ID: LIB103-045-Q1-E1-H7
gggccgacggggaacttgggcgccgtccacaagggttccaggggctcagatattggccgtggcgagcgggaagcgttgacagttggtctacgcagaaacatagagttgtgctgcctagccttgattcatatcctactaccagagacctttgtcaatttattaacccgccctcttgagtttgcaccttacctcagtggctgtctggcgttacagtcttggactgccgtgatgagtttaattatattgaatggttcatacgttgggtcttatcacaacggcttctggagctgctgagattcgctcatcagcgagatgcctgagatacgactgatccagacggtctaggcgctccatctttacc

SEQ ID NO: 1831 - DNA, 395 bp, Triticum aestivum
  Clone ID: LIB103-046-Q1-E1-A9
tcccgggtcgacggtgatcgctagatccaacgctccaacgactacgaggggctgggcagatgcaacaggacgaggggctggtactagcataggaaccataagtagggctgggaggtgaacacgaggaggtgccgcaacaagggcaactgcatcaactactataggagcacatgcaaatgctacaagatgaccaagtccaactattgctagacgatcactagcagcatctccttgcatccatcagctccctcctgtcgatcaccttgttagtgttactcgatcaagatcctcaagatgaccacctcatgtcccatcaccagaccacgttgtgttctcacatcatgcaccattacattatgattggcaacactttccctcactatacttcaagtcga

SEQ ID NO: 1832 - DNA, 403 bp, Triticum aestivum
  unsure at all n locations
  Clone ID: LIB103-046-Q1-E1-B10
cgggtcgacgcggaagaagcacaaggcggagaagcgggcgccggcgaccaaggaggccggcggcgaggggaagacgaggggcaggaagaagggcagcaaggccaagaagggcgtggagacgtacaagatctacatcttcaaggtgctcaagcaggtgcacccggacatcggcatctcctccaaggccatgtccatcatgaactccttcatcaacgacatcttcgagaagctcgccggggagtccgccaagctcgcccgctacaacaagaagcccaccatcacgtcccgggagatccagacctccgtccgcctcgtcctccccggcgagctcgccaagcacgccgtctctgagggcaccaaggccgtcaccaagttcacctcatcctaggctantctgccgtgt

SEQ ID NO: 1833 - DNA, 418 bp, Triticum aestivum
  Clone ID: LIB103-046-Q1-E1-B4
cggtcaagaaatcccgggtcgacggggggtcttaaggatgacgaaagcgtcagtgacgacatcaggcgagagagatatcgagactgcaaatcgctttcctgtttttgcatttcttactgtttatgtaactttgtcagtattcagatcatatagcctatggggagcagtgtaaaacataatttgttgatgcttaaaatttggagtgatatgtttgatacatctgcactgttgacatggtcttctttaatgaataacaaggtggtccagtagaattgtaactttagagccctgcaaattgtctgtgcaaattatgatgctggtttatagaactaaatttgtggcgtgcctctattttatctttagttgtaggtttctccgaagctttattgtgggttgtgttacttgccaaacaagttct

SEQ ID NO: 1834 - DNA, 389 bp, Triticum aestivum
  unsure at all n locations
  Clone ID: LIB103-046-Q1-E1-B5
aattcccgggccgacgggatcatggcatttccatagccattccgagatatattgccatgcaacttaccaccgttccgtttactatgacacgctccatcattgtcatattgctttgcatgatcatgtagttgacaccgtatttgtggcaaagccaccgttcataattctttcatacatgtcactcttgattcattgcatatcccggtacaccgtcggaggcatccacatagagtcatattttgttctaagtattgagttgtaattcttgagttgtaagtaaataaaagtgtgatgatcatcattattagagcattgtcccaagtgaggaaatgagatggagactatgattcccccacaagtcgggatgagactccagaaaaaangnnnaa

SEQ ID NO: 1835 - DNA, 405 bp, Triticum aestivum
  Clone ID: LIB103-046-Q1-E1-B6
ggtaccgagtctggaattcccgggtcgacggggaagaagcccaaggccgagaagcggccgcccaagtccaaggagggcggcgccgacaagaagaagaagaaggccaagaagagcgtggagacgtacaagatctacatcttcaaggtgctgaagcgggtgcacccggacatcggcatctcctccaaggccatgtccatcatgaactccttcatcaacgacatcttcgagaagctggccggcgagtcggccaagctagcccgctacaacaagaagcccaccatcacgtcccgggagatccagacctccgtccgcctcgtcctccccggggagctcgccaagcacgccgtctccgagggcaccaaggccgtcaccaagttcacctcctcttagatacgccgttcctgt

SEQ ID NO: 1836 - DNA, 412 bp, Triticum aestivum
  Clone ID: LIB103-046-Q1-E1-B7
attcccgggtcgacgggactgtggaaaccagatcgaagcagagtggataagagaacggaactggcatcgtagaagaaaagctggattgattatcacgagttgcaatcattgtggtaaaaaagaacctggctcgatacaatgttaggaaaatatacctcttcgtattatcatataagtaggctgaagccatcatatataaatataccgaaggaaggccgaagatcataatgcaaaaggccaaaggacactataaatataactctaacagataccacttctcttaaaatgtacattgaaaataccaaagccgccggcccgagggggtttacatactaaccacgctaatggaaattactgaggtactcaacacacagaatagcctagaaaacaaaatttagaaatcacagacaca

SEQ ID NO: 1837 - DNA, 405 bp, Triticum aestivum
  Clone ID: LIB103-046-Q1-E1-C10
ggtccagaatacccgggtcgacggggtgctctcaagcgggtgctttttaataagaggctgatagctcaacataaaagtaaatagataggcccttcacagagggaagcagggatttgtagaggtgccagagctcgattttaaaatagagatgaataacattttgagcggcatactttcactgtcaacgcaacaactatgagatggcgatatcttccatgctacatacattataggcggttcccaaacagaatggtaaaagtttatactcccccaccaccaacaagcataaatccatggcttgctcgaaacaacgagtgcctccaactaacaacagccccgggggagttttgtttaattattttgatttgctttgatcttttttatcatgggactgggcatactagt

SEQ ID NO: 1838 - DNA, 437 bp, Triticum aestivum
  Clone ID: LIB103-046-Q1-E1-C11
ggtccagaatacccgggtcgacgggaacttctacggattgcctggcgcgttgatggagatagggtagttttgcagtagagctactgttttgttgttctgaatgtttcctagctctgctgctcttctccctggttggagctgaaaatgttctgttaatttctgagggacttgctgaacctttagtttaaattctcccttataataatttctgctgcagctactgttctggctggaccgagagctgtaaacagtatagtctggtttggccttggctttttaataaaagttgggtctggggggcaacccctctcatttaattcagttctgtatttctcctatggctgttggccgctttcatttgtttatataatttcccagtggcttttagtccacgagtgcttcctgaatatgttatttcttcggaaatgttaacgccc

SEQ ID NO: 1839 - DNA, 413 bp, Triticum aestivum
  Clone ID: LIB103-046-Q1-E1-C12
ggtccagaatacccgggtcgacgggcgaggcgaagcggcggttccagcggatccaggaggcctactccgttttgtccgacaaggggaagagggccatgtacgacgccgggctctttgatcccctcgacgacgacgaccaggatttctcggacttcatgcaggagatgctggtgatgatggatagcgtgaaaaacgagaagccggacacgctcgaagacctgcagaagatgctggatgacatagtcaacggcgacggcggtagccgcgccactgctggtgctggtggtagcggcggcggtggtggtggctgcggtggtcgcgttccaccggaggccaaccgcagaactcgtgtcgccccttacccgcagccttcgcgaaggtgatggacgcgccggtgctcgtgacgtgcacgc

SEQ ID NO: 1840 - DNA, 365 bp, Triticum aestivum
  unsure at all n locations
  Clone ID: LIB103-046-Q1-E1-C2
ccgggtcgacgggatgtcgcaaggtgggcggcgggaggccggatctgcccacactacggcagcgaggaagaaggggtgggaggccctccctcgccagtgatgcttgggagagaacaacaaggcacgctgatcgagacgcgccggcagtgggtaagagccgtcgccgaggatgaccgcgtgaacgttgcaccttctcaccttccccggcggagaggatctggctggatctgtgaccagcggtgagtagagagagagagtgtggccaccgctgtcgtgtttagatctggagaggacgagatagtgtgaagagagcancactagcaagcaagcgcagaggctcctgcctatatagtggagtactagtt

SEQ ID NO: 1841 - DNA, 437 bp, Triticum aestivum
  Clone ID: LIB103-046-Q1-E1-C5
ggtacaaggtcagaattcccgggtcgacgggcacataattcgtatttgcaataataataacatcattaatccttaccataggtttcttaatggtggaatccgcaaggtgcaaatttaaagagcaatcatcaaattcacggaaacctaacacatcacgcaaagtttttggaatcgtggaaacactagcacccaaatcacataaatcatagcattaatcatatttaattttaattttaattttaatagtaggttcccactcatcataaagttttctagggatagaaacttctaattcaagcttttcttcataagattgtattaaagcatcaataatatgtttggtaaaagctttattttgactataagcatgaggagaatttagcacggattgcaacaaggaaatacaatctatcaaagagcaattatcataattaaat

SEQ ID NO: 1842 - DNA, 408 bp, Triticum aestivum
  Clone ID: LIB103-046-Q1-E1-C6
ggtaccagtctggaattcccgggtcgacgggggtgtgcaggtccggatgcgtccgctccccctcctccccctttccccggccgagtgcgggccgatgtagctccggcgttgttcgaggcgggacgtatgctgcggtttggcggtcgggtgcgtcctttggggcaaagccggtgactttggctggtcttgggggtgtctggatgcagggcggcggccttggcggtgggagacgcgacgtttgtgggcggagctcgcgtctcaggtgctggtgtgcagccatatccacgcgggtggtttggttgcgggtggttggcggaggtagggtgcgttggaggggtgtgagcgccgggtacaccacttgctcatgggccgacggtggcgacgtccgtggacgccgtatccttcatc

SEQ ID NO: 1843 - DNA, 403 bp, Triticum aestivum
  Clone ID: LIB103-046-Q1-E1-C7
aggtactagtcaggaattcccgggtcgacggggtactacatcaggtccgggatcgtggtgatccagaagaacgcgaccatcaaggacggcaccgtcgtgtagagcgccgccgggccggcgcgacggggttccgcgacaacctctgcgctgcgctgatcgttgtcgtcggcttctcggggccgggactggaggagtgacccggggacgggggccgtttgaagctttgaatggctgagactgaaagtggaggcgcgcgcaggcagcatcagtagtaagtagtaagtagtaagtagcagtggaacaaagtaatagtcgttcgttttgcccctgtaataaataagaagaggctgtgtgttgaggtgaaaaaaaaaaaaaaagtaaaaaaaaaaaaagcggccgctct

SEQ ID NO: 1844 - DNA, 412 bp, Triticum aestivum
  Clone ID: LIB103-046-Q1-E1-C8
gtacctagtcagaattcccgggccgacgggatacagtacccggtgggacgtatacacaggcagctcaagcagagggtctcggctaatggccgtgtgggtgccactgctgctgtgtactctgcagcaatccttgagtaccttactgccgaggtccttgagctggccggcaacgctagcaaggatctcaaggtgaagcgtatcacccctcgccacctgcagcttgcggtccgtggagatgaggagctggacaccctcatcaagggcaccatcgctggtggtggtgtcatccctcacatccacaagtcactcatcaacaagacctccaaggagtgaatgaaatgcaataacgggtagttgttgtgtgttgtatcttcgtgatcccttgttatgttgtgccatctgttacgtgttg

SEQ ID NO: 1845 - DNA, 426 bp, Triticum aestivum
  Clone ID: LIB103-046-Q1-E1-D10
ggtccagaatacccgggtcgacgggaatgagataaatggtatatttgctaagtaaagattctgtctaaagtgatgataaatcataaccagaggggtgttatgaggtattgatgtctatgcttagtgtggatatggttgacccagttatttctgttgatatatgatgcatatgtttgtggtgcattttcatggcatataatgccacaggttattttcaccttaagtagaatctgataataactcaacttgaacatatcgttgatcgggtcatggtgccactgaatcgagttttcccagtgcaaccacatttgcctttatgggaaggcctttattcagtccgttgtcatgcctctggtcggtgcctccaacgattgaaggttatgggcatgtggtaccctggcccggtaagcagacataaccttgtgt

SEQ ID NO: 1846 - DNA, 413 bp, Triticum aestivum
  Clone ID: LIB103-046-Q1-E1-D12
ggtccagaatacccgggtcgacgggatatgtttgattccttgcaatagttttgcgatataaagatggtgatattagtgtcatgctagtgggtagttgtggattatagaaatacttgtgttgaagtttgtgattcccgtagcatgcacgtatggtgaactgttatgtgatgaagtcggagcatgatttatttatttattgtcttccttatgagtggcggtcggggacgagcgatggtcttttcctaccaatctatccccctaggagaatgtgtgtagtactttgtttcgatgactaatagatttttgcaataagtatgtgagttatttatgactaatgttgagtccatggattatacgcactctcacccttccatcattgctagcctctttggtaccgtgcattgccctttctc

SEQ ID NO: 1847 - DNA, 115 bp, Triticum aestivum
  Clone ID: LIB103-046-Q1-E1-D3
ggtcaagaaatcccgggccgacgggcagcccaacctcctccagttcggctccagcacctccgagatccttgagactgaatccagaaaggaactgtccggccaattaccaaggaac

SEQ ID NO: 1848 - DNA, 415 bp, Triticum aestivum
  Clone ID: LIB103-046-Q1-E1-D4
ggtccagaaatcccgggtcgacgggcaggattacaaaatgggccattgagctcttaccattcgatataacttacaaacctcggcgagctataaagtcacaagttttggctgactttgtcgctgaatggaccgaagctgaactccctaaagagtacggcgcatactccaattggattatgcagttcgacggctctaacatgttggccggactgggggctggtgtcgtattgacgtccccgaccggggacacagtccagtacgtacttcaaataatatacacggactccaacaacgcagccgaatacgaggcccttttacatggtctccggatggcaatctccatgggcattcaacgcctagaggtgcgcggggattcaaaccttgcaatatcccaaataaatggagactttgacgc

SEQ ID NO: 1849 - DNA, 391 bp, Triticum aestivum
  Clone ID: LIB103-046-Q1-E1-D6
ggtacctagtctgaattcgcgggtcgacggggacgatggtgatggtggtggagcagaagatcttgatgacgacgatgatgaggaagacaccgatgacgatgatgaggattcggaggatgatgatgtgcgagaagagacggaagaggaattccttgcaagatatgctgctgctgctggcgagtcaatcgaggttgttgaggaaggagacatagatgaagaaacccaagacattgaactgggttccctggacgaaatggacatacaacaagtggttctttcactgattcagaaacatactgctctcctccaagcgcaggttttgccagatgacctaattgagagaattgcagaaacatttcctgaatatgagcagctgttgcatgctcaccaa

SEQ ID NO: 1850 - DNA, 431 bp, Triticum aestivum
  Clone ID: LIB103-046-Q1-E1-D7
ggtaccagtctagaattcccgggtcgacggggcacgactgacccttattgtgttgctaagtatgggcagaaatgggtgcgtacaaggactatcattgatagtttcactcccaagtggaatgaacagtacacttgggaagtgcatgatccatgcactgtgatcactattggtgtatttgacaactgccacttgaatggcggggaaaaggctaatggtgcacgggataccagaattgggaaggtccgcatccgcctctcaacgctagagactgatcgggtgtatacccactcataccctcttattgttttgacacctgctggcgttaagaaaatgggtgaggtacagcttgctgtccggttcacatgctcatcactgctcaacatgatgactctgtattcacagcccttgctgcccaagatgcactatataca

SEQ ID NO: 1851 - DNA, 419 bp, Triticum aestivum
  Clone ID: LIB103-046-Q1-E1-D8
ggtaccagtcaagaattcccgggtcgacggggtgacgatgcgcgtcgggaatggttccaaggtcgatgtgatcgccgttgacacgctacctctagatttacctatgggattagttttaaacctcaataattgttatttagtgctagctttgagcatgaacattgtatctggatctcgtttaatacaagatggctactcatttaaatcagagaataatggttgttctatttatatgagagatatgttttatggtcatgccccgctggtcaatgtttattcttaatgaatctcgaacgtgatgttacacatattcatagtgtgaataccaaaagatgtaatattgataatgatagctccacatatctgtggcactgccgccttggtcacattggcgtcaaacgcatgaagaagctccatac

SEQ ID NO: 1852 - DNA, 346 bp, Triticum aestivum
  Clone ID: LIB103-046-Q1-E1-D9
cgggtcgaccggaggccatccagcagctcgaggggatggggttcaaccgtgagcttgtgttggaggtcttctttgcatgcaacagggatgaagaactggctgccaattatcttttggatcatggccatgagtttgaggaacaacaatagatgttagattggtcttgctgttgaaagacagaagagtcagtgacagaagcatttcagtttggtgtcgttcctatatcttgctgctgaatatcactgctacttgccattagtgccttgttgctgactttcaatttcttgtatcctggaaatgctttctaagtacataatatcatatgcaaaccttaaattgtgtgtgc

SEQ ID NO: 1853 - DNA, 382 bp, Triticum aestivum
  Clone ID: LIB103-046-Q1-E1-E1
cgggtcgaccggccgtacaatgtggtacgacaagtacgctaggggcttctgtaccctttaatatggtgtgagaagtccgtacactttcacaagtgcggcaccccgaacttatagcactatatgcatcagctccgaatcatgatttgggccaatagttgggtttgcctggctcctatgttttggtgccttatgttccgctatatcggctaaggtagcactaggagaaccactgcgattgtgccccggttgagctgggttaagcacctcagtggagaaagctaaaactgactgtcatgatgaggcgagagaccggtcgctgttcgagaggtttttcaagtccctaaagacttatgccgcttcgagcgaggagctggataaccct

SEQ ID NO: 1854 - DNA, 399 bp, Triticum aestivum
  Clone ID: LIB103-046-Q1-E1-E10
gggtcgacgggggggtcaagcaactgacagccatagccttgcagaaagggcacggcgtgagaaaataaccgagcggatgaaaattctccaagatcttgtccctggatgtaataaggttattgggaaagcatcagtccttgatgagataatcaattatgtccaagctttggaacgccaaattgagttcctgtccatgaagctcgaggcggttaacgcccatgcccatgctcacaacggagttgaaacatttccaactaaagacttcgctgcgccggcatacaacacagctccagggttaacatttgacccgcaaacaccaagggagtacgcccagggctcgccggctgcagaatggcttcacatgcagattggtggcacctacgaaagagtgacgtgagc

SEQ ID NO: 1855 - DNA, 418 bp, Triticum aestivum
  Clone ID: LIB103-046-Q1-E1-E11
cggtccagaattcccgggtcgacgggattgtatattgtcgtatttatgttgtgtcagttttgtgatatactttacaattaaaacaatttctgaagaaatctcactaaatttcttaactttttttgaaatgaaaagatagatcattttctatgttatgcattcaaaacaggcaaaagcgcctggatgaccggagtcatttacatgaaggtgatgtaagcgccgcacagctggccatcaccaggccatcagaaagacgtttcagaattacatgggaaggagatgggggggttgtatggaggtgtgtaaactatgcagaaccaataagattagcccaattcactagtacttccctggttggttctccccgagcccgcacagtgcagagcttgatgagatcggcaatctccttgtagacacg

SEQ ID NO: 1856 - DNA, 412 bp, Triticum aestivum
  unsure at all n locations
  Clone ID: LIB103-046-Q1-E1-E12
ggtccagaatacncgggtcgacgggacagggcacgaatacctgcagcacgagaatttcatggaatgagcagtcagttagtcaaggcaatgccgagtcttatttttacaaaagtccaggaagacaattgtacttcgtcaacatgtgccatttgcttggaagactacagtgttggtgaaaagataagggtgctgccttgtcgtcacaagttccatgctgcttgcgtggacctgtggctcacatcatggaggacattctgccctgtatgcaagcgagatgcaaatgctggaatgtcaaatttccctccatcagagtctacccctttgctttcttctgctattcccttgccagctgaatcgacagctttgtcttcttttcgttcaatggtagcagcatctcctccaaggacaataa

SEQ ID NO: 1857 - DNA, 303 bp, Triticum aestivum
  Clone ID: LIB103-046-Q1-E1-E2
gggtcgacgcggtttttatgaagggaactatttggggtcgcgcggaagcaaaattagctagggtttattagtgctgctctagttccgcttgctattcctttcgcttgttcgtttgtttctttaaggattttattatcaaggttgtaaggctggggatgtgcagctagcttcagtttcaagcctgccgtctcgcctgctggtacattgtaaaacagaaccgctgctctccagtgactgaatgattataagcagctactgtagtagtatttggggaaaaaatatgtaccaaactgttctgatctg

SEQ ID NO: 1858 - DNA, 237 bp, Triticum aestivum
  Clone ID: LIB103-046-Q1-E1-E4
ggtccagacatcccgggtcgaccggtcatcaacacgcatcgtgtcatagctgctggctccgtgcggccaaaagcgggagctgctgcagccctataaccgacttaagctgtgtgcggtggtgtcataaggagcctgtccatcaccactatagttatcccaagtttcacttcatatcgcacatgttgtattacctttcatttttcttgacgtcgtcaacgtccgcctgtctataacgtg

SEQ ID NO: 1859 - DNA, 392 bp, Triticum aestivum
  Clone ID: LIB103-046-Q1-E1-E5
taccagtctagaattcccgggccgacggggacgataacaactatgtgccccctgaatacggtgatgctgcaacgggggaagctgctgaagatcaagaggaaccagacgatgtgcccaatgatgctgcaacgggggaagctgctgaagatcatgaggaaccagacgatgtgcccgatgatgatgatctccgccgggtcattgtcgatgcaaggacgcaatgcgaaagtcaaaaggagaagctgaagtttgatcgcatgttagaggatcacaaaaaaagggctgtaccgcaattgcgaagatgacaatacaaagctcggtaccgtactggaattgctgcagtggaaggcagagaatgctgtgcctgacaaaggatttgagaagctactgaaaat

SEQ ID NO: 1860 - DNA, 427 bp, Triticum aestivum
  Clone ID: LIB103-046-Q1-E1-E6
gtaccagtctagaattcccgggccgacgggaatggattgagtttcccctttgaagttatcttatcggattgagtctttaaagatttgagaacacttgatgtatgtcttgccgtggatatctatggtgacaatgggatatcacgtgattcacttaatgtatgttttggtgatcaacttgtgggttccgcccatgaacctatgcatatgggttggcacacgttttcgtcgtgattctccggtagaaactttggggcactctttgaggtcctatgtgttggttgaatagatgaatctgagattgtgtgatgcatatcgtataatcatgcccacggatacttgaggtgacattggagtatctacgttacattaaggttttggttgatttgtgtcataaagtgttattctactacaaactctaaggctgttt

SEQ ID NO: 1861 - DNA, 401 bp, Triticum aestivum
  Clone ID: LIB103-046-Q1-E1-E7
gtaccagtctagaattcccgggtcgacgggaaaggcactgaactagtttgcaacaaagaagagagaaaatgtctaccgctgaggcaacccgtgaggagaatgtgtacatggccaagctcgccgagcaggctgagcgttatgaggaaatggtcgaattcatggagaaggtggccaagacctctgatgtaggtgagctcactgttgaggagcgcaacctgctctctgtggcttacaagaatgtgattggtgcccggagggcttcctggaggatcatctcctccattgagcagaaggaggagagccgtgggaacgaggcctatgtcgcatcaatcaaggagtaccgtaccaggattgaaaccgagctcagcaagatctgtgatggcatcctcaagcttctggac

SEQ ID NO: 1862 - DNA, 399 bp, Triticum aestivum
  Clone ID: LIB103-046-Q1-E1-E8
aattcccgggccgacgggagcatgcgacgcgaccggcgctggtttgggcggctggagcaagaagaccagaggttgaagaagcactatgaccgttggatggacatcgtacggtcactggagctagaatcgttcatattgactaagttgacaaagccctcagtccccatcaacttagtaggcccacaagtcagcctcccaccaaggtgggtcccagctaacaggggggtattcatttttttgtgcgtaataaggaggcacttccggtgggtccgagctgacagcaggggaacgttttttgcgcgaaatacgatggcccgtccgttgggtccctgatacgtctccaacgtatctataatttatgaagcattcatgctatttgattatctgttttggatgttt

SEQ ID NO: 1863 - DNA, 427 bp, Triticum aestivum
  Clone ID: LIB103-046-Q1-E1-E9
cggtccagaaatccgggtcgacgggtaaaaacaaagatggtagtgaagtgtttgattggtttgagaaatatgttctgcgttcgaaattggatgttagcattgatcacctagagctgtgctcactgttatcacatggtggtgatgcaagagataaacatatcaccttattgatgaatgctggtctcctgacacgccaactaatagatccaaacatgtactggttttctattccaagtattggtcctatcccaggttcacacaaaagattggtgaccatggcatcagtatacaaattaactctacaagccttttccatgtccacatcatttccctcgatgcagtccaaaagaacaatttgtaatgattctatagttagcaattaccaatgtaaaggaaatctattatttgcagcagctcctactgagct

SEQ ID NO: 1864 - DNA, 438 bp, Triticum aestivum
  Clone ID: LIB103-046-Q1-E1-F10
ggtccagaatacccgggtcgacggggcaaatgacaggaagtcactacaacgagctctggataataagatatatcttctcctgtatggcaaaacttttggggctcctgatggcaaacctgtttggcatttcccagaaaaagtgtacgaaaatgaagactctttgcgtttgtgtgccgagtcagccctaaaatctgttctcggcggacttgacaatacatattttgttggcaacgctccaatggctcacatggtaactgaacaaaaagaggattccagtgtttcaccattcaagcggttcttcttcaagtcgcaagtgatcggcaccacgcatttggacatcaggaggtgcgaagaccacgcgtgggtgaccaaagctgagttgctggaatattttccggagcacaaggatttctttaataagatgattattcacgttag

SEQ ID NO: 1865 - DNA, 404 bp, Triticum aestivum
  Clone ID: LIB103-046-Q1-E1-F11
cggtcctaaatacccgggtcgaccacagctgggacctcaacttcagtcgaatccgtgacactttttggttgcggggcttcttcagtgaaaggttcctattgaactgatggtgtgtggatatgctccaaaaacgcattactgggaatggcttctctcttggaacctatttttgccaaatcatcatccgcttgatttttcagtcggggtatatgatggagctctaacccctcgaatttcttctctagctttctcactgcattgcagtaaccagtcatggctggaattctgacgtcccactccttcatcacctgattaaccaccaaatctgagtcgccataaaccacggggcgacggacgccgagtgaaatggccatacgcaacccatacaaaagtgcttcatattc

SEQ ID NO: 1866 - DNA, 389 bp, Triticum aestivum
  unsure at all n locations
  Clone ID: LIB103-046-Q1-E1-F2
gggtcgacgggcattaagcagttctccgaaatttcatcaataaaccagcgaattttattatctggtccatcgggttctgagatttatcaggaaacattgataaaggcacttgccaaacattttggtgctagactacttgttgttgattcactcctgttgcctgnggtgccttcaaaggacccagaaacccagaaagatgttggcaaggctgataagtcaggggacaaggcangtggtgagaaattgacaattcttcataagcatcgctcttccttggcagacacaatgcacttcagaagaccagctgcaccaacttccagtgtgaatgctgatattgtgggtacatccactctacattctgcaactttgcccaaacangagtcctcaac

SEQ ID NO: 1867 - DNA, 298 bp, Triticum aestivum
  Clone ID: LIB103-046-Q1-E1-F3
ggtctagaaatcccgggccgcccgaggattgaagcttacgtgcaccatcttgctaaattctatctcttccacagtgtcttataaatccatgtcataggacgtcgatttcctgtctctagaatgatgagtactgactttcatacaagtgtagcctcgctgtcgtaaattcgtctctcgacatctgtggtcatatcctataagcacccaaagattcgtcttgtgttgctttgcactgcccctatggagaatttgacacccactgtcgtggcacatcaaccacttcagttattgcgattac

SEQ ID NO: 1868 - DNA, 408 bp, Triticum aestivum
  Clone ID: LIB103-046-Q1-E1-F6
aattcccgggtcgacgggcacggggctagggtttggggggggttccggctgggcctccccagcttataaagccggacgagccttagtgtccgggtcggacacggcccgtaggtcggttgcgcatttttttaaaataattacgctcagaaaaaaaacaaaaagactactaaacggactccaaaaatcctgaaataaattttccccggcttctaaaatcaagccgcacatgatgaacatttatttggggcctaaatgaaattttgaaaaatgcacattttcctaaattcaaataaaatagcaaataaaaccaaataaaaatcttgtttgacttttttattaaatcctcaatgtttctttatttttgggaaagtcattttattccctctctcatatttttatattagaaat

SEQ ID NO: 1869 - DNA, 402 bp, Triticum aestivum
  Clone ID: LIB103-046-Q1-E1-F7
ggtaccggtcaggaattcccgggtcgacgggggggaccatgtggtggtgaatgtggacggttttgcgaacaccaaggatgatggcgttgctgagaagccatctgaggctgtgtcggtggctgttgttgatatggcggaggatggtggcgaggatgagccactcatccaggctgcagagtgccgcatatgccaggaagaggacagtatcaagaatctcgagaagccgtgtacgtgcaacggcagtctgaagtatgctcatagagcgtgtgtgcaacgctggtgcaatgagaaaggagacattacatgtgaaatttgccatgagcaatataagcctgggtacacagcaccaccacgtgttcaaccagatgagaccagcatagatataagtggggattggaccat

SEQ ID NO: 1870 - DNA, 443 bp, Triticum aestivum
  Clone ID: LIB103-046-Q1-E1-F8
aggtaccagtctagaattcccgggtcgacgggtgaagcaggttcatcaatctcagcgcctccgactacccgctcatgccccaagatgacctccttcatatcttctcatatcttccaagagatctgaactttatcgaccacacaagcaatattggttggaaggagcatcaaagggctagaccaatcatcgtggatccagcattgcagatctcaaacaaaactgaggttctgacaacaaaggagaaaagaagcatgccttcagctttcaaaatatttgtaggttcgtcgtgggtaatattgagccgatcattcctggagttctgcatattgggatgggacaaccttcctcgcacgctgctcatgtacttcaccaatttcctgtcgtcctcggagggatacttccacacggtgatctgcaactcacaagttcaacaagaacacaac

SEQ ID NO: 1871 - DNA, 427 bp, Triticum aestivum
  Clone ID: LIB103-046-Q1-E1-F9
cggtccagaatacccgggtcgacgggaggggttaatcataagtgggatgcttgtccaagtaagggtagtacccaagcaccggtccacccacatatcaaattatcaaagtaccgaacgcgaatcatatgactgtgatgaaaactagcttgacgataattcccatgtgtcctcgggagcgctttcctttatataagagtttgtccaggcctgtcctttgctacaaaaaggattgggccatcttgttgcaccttatttacttgcattacctgttactcgttacaaattaacttatcacaaaactatctgttaccgataatttcagtgcttgtaggaaataccttgctgaaaacagcttatcatttccttctgctcctcgttgggttcgacactcttacttatcgaaaaggctacgatagatcccctacac

SEQ ID NO: 1872 - DNA, 416 bp, Triticum aestivum
  Clone ID: LIB103-046-Q1-E1-G3
cggtccagaattcccgggtcgacggggaccaaaaaaatacttaggatttcttattgtactgattgaactcgacaaattcttgccccgcataagcaaaggaaaagaactaggcctgtcgatactggattttaccatagttctagttctaaaaaagactgtcaatttcttcttaaaaatagggctctggcagggttctgggtagtggcccaaaccgataccaatagggatgagggatatatacttatgaatttcataattgattctattccgcaattcataactacgaaagtaagaggtcggaaatctttttatccaaaggtccctaaaggacattccttttttgctcctaagattgaagaagagattatacgaaagactatcaagacttcctaattatctgacactacctacactaa

SEQ ID NO: 1873 - DNA, 427 bp, Triticum aestivum
  Clone ID: LIB103-046-Q1-E1-G5
aggtaccagtctggaattcccgggtcgacgtcctgagaggctggcggcggcaccttggcggggtccttctcatgatctccggcctgcttccgggacatgtccgtgaactgcgtcacgtagagcttatggcccatgacggggcctgtctccgtgacgcgctggcggccatgcaacatcatcatcgacagcaggcatgcgcggagagccctcaaccccattcccgagctgatcaactcgatgagcttatccagctgggccctgaggatgtcaatcatggagttggaccgctcaagttgaaggttgttcctggcttccaccagcttgttattggctccttggaggcccacactgtctgccagtgtaatcgcctgccgtaagtcctctatgtagatttgacggacttgctcggtgagcacgggctccgaaa

SEQ ID NO: 1874 - DNA, 388 bp, Triticum aestivum
  Clone ID: LIB103-046-Q1-E1-G6
aattcccgggtcgacgggagacagcaggtgtctaaggtggagtagaaggatgcggctgctggagcttttctccctccgtgcacccaagaagcctttgtgcaaaatttgaaccagacattgcttttgtacaattgttgttgcttagtattacgattctagcaataccgctcgctttatagatcccctacttctacatgtactcaattgtacatatcacgcccccatttgtactcgtactatcttaaagaataatcgtcagagctaaattggaccgctcaaattgaaagttgttcctggcttccaccaacttgttaatggctccttggaagcccacactgtctgccaatataaaccggccgctctaaaggatccaagtttactttaccgt

SEQ ID NO: 1875 - DNA, 396 bp, Triticum aestivum
  Clone ID: LIB103-046-Q1-E1-G7
gtaccagtccagaattcccgggtcgacaccggcatctatgcggcgcatccttcctttgatgacagtggcatcccgccacctccatcaaagtggaagggttcatgccatggtactgctgctgcccattgcaataacaaattgagtggtgcgaagttcatcaccgtcaatgactctggagatgtcatagggcatgggacacatacctcgtccacggctgctgggaactttgtcagtggtacctcggcccagggtctcggcagggccacagcagccgggactgctccacatgcacatctggccatgtacagcatgtgtacgcttcgtgggtgtgactccgctgacatcgttgcggggatagacgaagctatcaaggatggggttgatgtgctctctcgg

SEQ ID NO: 1876 - DNA, 422 bp, Triticum aestivum
  Clone ID: LIB103-046-Q1-E1-G8
aattcccgggtcgacatatcatagacatgtctcctccaatggacgggtgacatctggcacaccgaggagcagacacgtgtttcctcccgccaatgagaatattacacatggaaaatcaccattggtctgggctgttaacgggttatcagatccaaaaccggacacgatagcttaatggcattccattacggtggatgccacatgtcggtcacccttgatgaaagcacttccatgacgcgcgatttatcatcatggaactggacacttccgtgatgataattttggtaatgtcatggaacacttctacggcagcacaggtatgactatcttgattctgtcataaaatcgtcatggatgtacatgcatgacagaaaacgtgacctactgtgacaaacacgtaacatcacggaagtgtccttttt

SEQ ID NO: 1877 - DNA, 97 bp, Triticum aestivum
  Clone ID: LIB103-046-Q1-E1-H1
gggtcgacgggatgactaatgttgagtccatggattatacgcactctcaaccttccatcattgctagcctcttcggtaccgtgcattgccctttctc

SEQ ID NO: 1878 - DNA, 362 bp, Triticum aestivum
  Clone ID: LIB103-046-Q1-E1-H10
gggtcgacgccgtcgagaaagcgcctgatgcgggacttcaagcggctgcagcatgacccaccggccgggatcagcggcgcgccgcacgacaacaacatcatgctctggaacgccgtcatcttcgggccggatgatacgccatgggacggaggcacgttcaagcttaccttgcagtttacagaagattaccccaacaagccgccaactgttcgttttgtctctaggatgtttcacccaaatatttatgcagatgggagcatctgcttggatattctacagaaccagtggagccctatatatgacgttgctgccatattgacttccattcaatccttgctgtgtgattcaaaccccaactctcc

SEQ ID NO: 1879 - DNA, 408 bp, Triticum aestivum
  Clone ID: LIB103-046-Q1-E1-H11
cggtcctaaatacccgggtcgacggggacctggagacattttgactgcttctaacgggatgacaattgaggtaaataacactgacgctgaagggaggcttacacttgctgatgctttggtctatgcttgtaatcaaggtgttgacaagattattgatctggcaacactaactggtgcctgcgttgttgcacttgggcctagcattgctggaatcttcacaccaagtgatgaactagcccaggaagtcgccgctgcatctgagttatcgggggagaagttctggagattgcccatggaggaaagctactgggagcagatgaagtctggtgtggccgacatggtcaacaccggtggtcgacagggaggctccatcaccgctgccctgttccttaaacagtttgtcgacga

SEQ ID NO: 1880 - DNA, 380 bp, Triticum aestivum
  Clone ID: LIB103-046-Q1-E1-H2
gggtcgaccgggatgaatgaatccattgtgagaagagcccttgtgaccatgcaccagagggacgaagtggagtacaagagggagcgccatgtgattgtccgcaaggcttgagctgaactgaaccgatggagctaccatggaaccctctggccatctgatgtgtgtgtataagtagtgctgacactgcagcccgtttcctgaggaaatttgttgggtcgttgaaattgagttgtagttgtactactttgagctgtagctgtagccctaaatcatattgtgtcgaactgaagatgtaccccagtaagttcattcatgaatgcgacattttggcgttctgcagctgagcagagtcaatgcctaagaaactgaaacttgctcgt

SEQ ID NO: 1881 - DNA, 395 bp, Triticum aestivum
  unsure at all n locations
  Clone ID: LIB103-046-Q1-E1-H3
ccgggtcgacgggcaagggtaggaagaggggctcgtccgcggccgaggacgagcagtccacggcggcggtggcggtgcagctcgccaaggagtggagcacgtggacgatgaagacggcgaaggtggtggcgcactggggcttcatcccgctcattatcgtcgtcggcatgactaagggagacgagcccaaacctagcttgttccagcttctgtcccccgtctgatcccatccccggcgagccctagactggatcgatccagctccttttagttactactagtagatgtttttgctgtttattgaatcctggtggttgagttcttgatccctgngtggtgatcttctatctgatctgtgtcgaataatgttatgtcggtggatcgatcctggattg

SEQ ID NO: 1882 - DNA, 88 bp, Triticum aestivum
  Clone ID: LIB103-046-Q1-E1-H5
tcgacggcgttacaggcagccccgggaacaatctcggcgtgctggtgacaattgatgagtgacatgttgaagattcctgtagcacgtg

SEQ ID NO: 1883 - DNA, 358 bp, Triticum aestivum
  Clone ID: LIB103-046-Q1-E1-H6
aattcccgggtcgacgggtaccataaaccttcctcaaaacatccaccatacctacctattatggcatttccatatacattccgagatatattgccatgcaactttccaccatctagttcatcatgacacactcgtcattgtcatattgcatatcctggtacaccgccgaatgcattcacatagagtcatattttgttctaagtatcgagttgtaattgttgagttgtacgaataataacagtgtgatgatcatcactattagagcattgtcctagtgaggaaagaatgatggagactatgattcccccacaagtcaggatgagactccaaacgaatgaagagaggccaaagtagccca

SEQ ID NO: 1884 - DNA, 423 bp, Triticum aestivum
  unsure at all n locations
  Clone ID: LIB103-046-Q1-E1-H7
gtacctagtcagaattcgcgggtcgacggggatgggtgttgcccccatgatcacattggttagtttcctgagaacaaagaagaatgggtcacacgttgcctcgtgaggactggaagccccatattctggccatgagcccatgatcatgctcctgggagaagcaaaagttgtttctttaggttttgcttaggatgtacacagatgtaaattaattaccaatttactatgcttcgtctaaagaggtgacaaggcatgcaagtgatgagtcacttcgcagccaagcaagtactgtacctgtttcgcgttaaacctcaccttactgccagcttactggtggtggtgccaaacaatggttttcaactgacttctgatttacatggtacaaaananaaaaaaaaaaagaaaaaaaaaagcggccgctct

SEQ ID NO: 1885 - DNA, 295 bp, Triticum aestivum
  Clone ID: LIB103-046-Q1-E1-H8
ttcccgggccgacggggagtgagacgctgtactgcttgctccctttcggcatttcctttttaccaccactactgcttaagtgtcttttgaagtttgtttgaagtgttcctcgtcgttgtggatcagtatttggagtttgagtcagttgagtgtgttgcgtctgatgtatttcaaagcacagtggatcagtatttggagtttgagtcagttgagtgtgttgcgtctgatgtatttcaaagcaccgtgtgatggtagactcgttatattatgaaatgatgtggtttttttgtctgtt

SEQ ID NO: 1886 - DNA, 367 bp, Triticum aestivum
  unsure at all n locations
  Clone ID: LIB103-047-Q1-E1-A1
taccggtccagaattcncgggtcgacggggacctccagaaggtgatggaccggagcgacctcaccggcgcgcgtgcagcggcagatgctgccccgcacttccccctgaaaggacctggctgggacgtcgtggtggctgccgggggcggtatgctctcagcgctcaccagctgagccccgggcccgctccagtgaccggcctgtcaacggcgaccgacgccttggtattctggtgcttcggctttgttcgtcgcctgtgttaaggccgatgtttttgtgaacatgatgtggacatgacaacggcatcctaccccccctaagtaattatggacgaccgaggcgttgcattgtgtactgtactgcacccc

SEQ ID NO: 1887 - DNA, 351 bp, Triticum aestivum
  Clone ID: LIB103-047-Q1-E1-A10
gggtcgacggggacgacatccacaagttcctacactttattgatcgtcttgaggtccttgtggggtgtttcaatggtggaaggctacgtgggatatgtgtgccactgctgcacacgttgaacaagtccaactgtgtcgagaaacttatggtacgagctgttttctgttatatattttgttcataaactctttcttatacacagttttacagctttgatcttcttgaaatagaaactgcccagttgtattgttcctatacagatgcctgaccattgccgggtcagacttgcacttggtcacaacatgatgtttatgtcaacctactccattccccttggaggtgaaaatata

SEQ ID NO: 1888 - DNA, 419 bp, Triticum aestivum
  Clone ID: LIB103-047-Q1-E1-A6
gtacggtagagaattcccgcgtcgacgggatctacgaccccatcaacgaatcatatttctcggtcaagatgttcgagggagtcattgcaacatcttacaatgaaggtgacaagttcttcattgatcccatgaagctgctgcccctttcacgcttcctgccgcagccaaagggctctactccaagaggtggttgtcgcggtggaagaggtgctggtcgcggtggatttggtggccgtggtggattccgtggaagaggtgcaccaaggggtcgtggacctcccaggggtggagggcgtggtttcagacgacgaggcagattctaggatgtagttttaagttggctgtttgttgaaacacgatgttctacagtatccgttcagctggaaacattatgctaagtcaactgtgagcgctctttc

SEQ ID NO: 1889 - DNA, 374 bp, Triticum aestivum
  Clone ID: LIB103-047-Q1-E1-A8
attcccgggtcgacgggccgcgagatcaagttgcttaggctcctaagacaccctgatattgtggaaataaaacatattctacttcctccgtcgaggagagagttcaaggatatatacgttgttttcgaactcatggagtctgatttgcaccaagttataaaggcgaatgatgacttgactccagaacattatcagtttttcttgtatcagttgctccgaggattgaaatacatacatacagcttcttgcagcaaatgtatttcatcgagatctcaaaccaaagaatatcttggctaatgctgattgtaagctcaaaatatgtgacttcggtcttgcaagggtagctataagtgatactccaaccgccatatttt

SEQ ID NO: 1890 - DNA, 446 bp, Triticum aestivum
  Clone ID: LIB103-047-Q1-E1-A9
taccggtcctaaattcacgggtcgactgtccggacacagaagccttagcagctttcaaacacaacttccgattcaaatggctcgccaggcacctcgtcaaagaaaagccaagaacaatggccgcattaacaagcctcatgaccctcttttgcgcgggagaggatagttggctggcacgatgcagtaccagcgacccaagtacatccgaagtcaggaatggaaacgggaaaccatgacgcagcaaggaccagcgccggaccaagggaaacagcccgaagagcacggcagtcaaccctggattcaaaagctctcggcagaatcataaaaaactaccccttaaggataacagggacgagctatctagcttaaacaaaatcttggacaagatatgccaaatccacagtactcccggtaagcctacaaaccatacccaacaagattgttgg

SEQ ID NO: 1891 - DNA, 447 bp, Triticum aestivum
  Clone ID: LIB103-047-Q1-E1-B10
gggtcgacgggaggcggctacgggtgttggcttacgaagctcggatgactgtcgtctcagcttgttttgtaatcggatacggcggccgatacgcgtcagttataagcccattgagcttgttgcttccgtgcaaaacatggaaagcccatgacccgtaaagaaactaaccaatacgacgcttattaaatagagtatatatatatatatataaaaagagtatatatagaaaaaaactataggccgcttattgcgagcgagatagcctagcatcggtcaaagcgcttccttgattctgctcactataaattagagcaatttttcattctttgaaattgcggtaacattacatatataaataattatgatcagtttaaataataaataagtgaaaactatcgcaaaacagtgaaacattcacgtgttaaaaagttatagcatatatcgaat

SEQ ID NO: 1892 - DNA, 448 bp, Triticum aestivum
  unsure at all n locations
  Clone ID: LIB103-047-Q1-E1-B2
cctgcgcgtaccggtccatgaatcncgggtcgacggggagagggagtggttgcggagctaggggtgttggatggtgtaggagtgcgttgtgaggaaggaaaaatgtgctcaacaaacatgacatgacgaaagacataaacgtgtccggtgtgaaggtcgagacagcgatagcctttgtgctcgtcagagaagccgagaaaagcacatgggatagagcgtggtgacaatttatttgcagaagtggcgtaggcattgggaaaacagagacggccgaaaacacgaaccgcggagtagtcggggtgggaaagaaagaggaaataatagggtgtattgttgggtttagttttagaaggtcgaatatttagaaggaaggtggccatgtggagggcttcagcccaaaacttgagaggcatagatgattgaatgaggagagtgcgaactatatcat

SEQ ID NO: 1893 - DNA, 397 bp, Triticum aestivum
  Clone ID: LIB103-047-Q1-E1-B3
gggtcgacgggacatgttcagataaaagagagagttgtcttgtgctcacaagcacactagggcagttgccatgtaaaagaaagagttaccgtctgcttacgtgcacgctagggcagttgccatgtaccatgcaaaaacacatggcaattcgggtaaaagagagttgccatctgcttacaagcaaagctagggcagttgccatgtaccctgcagaaacacatgtcaactgacagctttgggtgtggcgaggagacgggcgtgtgggcgaagtgataaacacccacacaccagccccctctgcgtgcgtgaaaactgatgtgtgggcgaattgctaaacgcccacacaacagcccccgtgtggtgaaaaagaacggtgggcgaccggatgaatgcccac

SEQ ID NO: 1894 - DNA, 410 bp, Triticum aestivum
  Clone ID: LIB103-047-Q1-E1-B5
attcgcgggtcgacgggcgagaataaatatgctaaggagtccaataaataaaccgatgatattttgtagatgtttggggatgttctggacccaatggtgatgactatccgagtcgggtccgggacagctttcggacgcgcgcgtggagagccgcgggctactgagagaggttaggttgggcctggcggtgaatggtagtggactgtggagagtgggttggtgtaggagaagaggggagagaagcaggccggcacggtttccggagaccgaaaatgtccgacgaaaagaccgactaatattgccgctatagtttaacggttgggctatcgaacgaactccgaatgcgatgaaacttggcaggcggcctacctacactaaaaccacaccgcatgccaactttcatcctaatc

SEQ ID NO: 1895 - DNA, 429 bp, Triticum aestivum
  Clone ID: LIB103-047-Q1-E1-B6
gtaccggtacagaattcgcgggtcgacgggatcatctttgttgacgcgaagtctctcatgacatcctttaatatttctggagttgcgttccaaactttagggtttcaacatccttggcatgagccatggtactactgtccttcagtccctgatgaatctcctgtatcataagatttttctcctccaacttggctactttcagtttctggctcctgatttcttcacgaattgcctccttgtcaaatatgatttcctaagggtccacctaaaattcttcatgtaatactccagatcccggcgatacaccagctaaggttaaagttgcatcctttgctgacagatgctccatcagccttctaccatccaatccttccatgcatacgcttgcttaactccgcacgatgacaataacataagaggtcgataaca

SEQ ID NO: 1896 - DNA, 453 bp, Triticum aestivum
  Clone ID: LIB103-047-Q1-E1-B8
gtaccggtacagaattcgcgggtcgacgggcagggcttgggcaaggttcatcagcatcacggaaggcgaatggaaaccaaagctgaaatggtttctagccaaggtaagtaattaagtagtactagctagctagctagctgccatctctttaattatcatgcttgattaattattatctaatcaaattaaattccattctggtaataaaggccctgaagcaggcgcaggggactgatctgtgtgcattctgcatttgcgagaacattcgcatgatggcgtccgaaaggagcagatctcaaagacaggaatgggtacgcttgtcagaacactattcacaatttttacaccattattgatatctagtcacacaactaatacacatgcatattgatctccttaatagttcaaagaggtgcgggacaagctcctaacaacgaagcgcgtagaagcact

SEQ ID NO: 1897 - DNA, 437 bp, Triticum aestivum
  unsure at all n locations
  Clone ID: LIB103-047-Q1-E1-C1
tacggtcaatatttccgggtcgacgggagctagcagtggcgctagggttttgacgaggtggagaggtggaagaaggttttcttgacggcaggggacatgtatttataaagaagtgtgcggcacagtgcaattacgcaggtacccctggctgttcacatctgaggggcatgtggcaagcacgcaacatactcagagttgtcccacgttcccacgcccgccaggtttgtcggatggttgttccggcttctccggatttcaacaataaggatgaatcatttaaaacaaacttaatgtttgtctctgtgtcttctgctgacaaggatgcagagaagacatttgacagtttcaatagtatgcatatgatttggacagatagagtttgagatagaaagcatagagagattanggtccgatcacattcacttagttcaaaagtt

SEQ ID NO: 1898 - DNA, 232 bp, Triticum aestivum
  unsure at all n locations
  Clone ID: LIB103-047-Q1-E1-C11
gggtcgacggggtcaccatcctgcggtccgagaaggtcaaggatgagatcgtcctcgacggcaacgacatcgagctcgtctcccgctccgccgccctcatcaaccagaaatgccacgtcaagaacaaggatgtcaggaagttcttggacggtatctacttcagcgacaagggcgccatcaaggaggagtanattgcgaaaaaccgtcccaccaaaacccttgtttctgcctg

SEQ ID NO: 1899 - DNA, 413 bp, Triticum aestivum
  Clone ID: LIB103-047-Q1-E1-C12
gggtcgacgggggtatctcctcagaggaggagataaacttgttcaattggcatataccaaatctggagtacgccaatgcaggattatcttcaaggcttagccttgcattctgggaccaggatgatccgtatgacatgggtggggatcactgcttcctgcctggtggcaacgggaggcttgtgcaggccctggcagagaatgtgcccattgtttacgagaggacagtgcacactatacggtatggaggggatggtgtgcaggtggttgtcaatggtggtcaggtgtatgaaggggacatggcgctgtgcactgtgccacttggggttctgaaaaatgggggtatcaagtttgttactgagctgccacaaaggaagcttgatagtatcaagaaactaggctttgggttgttaaac

SEQ ID NO: 1900 - DNA, 435 bp, Triticum aestivum
  unsure at all n locations
  Clone ID: LIB103-047-Q1-E1-C2
accggtccagaattcncgggtcgacgggagctaacacgtcgcgatggctccacgaataagtcctttctctaggacatctgccgtgacaaacccacaacatatggctagtaaaagagtttataaaccatagagaagttggaatacagtaggtttaacaccaatataaataaataatgagttcattacagtaccttgaagtggttttttgttttctttcgctaacggagctcacgagattttatgttaagttttgtgttgtgaagttttcaagttttgggtaaagatttgatggattatggaacaaggattggcaagagcctaagcttgaggatgcccaagtcaccccaaggtaaaatacaagggcaccaaaaagcctaagcttggggattccctggaaggcatcncctcttttgtcttcgttcatcggtaacttta

SEQ ID NO: 1901 - DNA, 392 bp, Triticum aestivum
  Clone ID: LIB103-047-Q1-E1-C6
attcgcgggtcgacggggtgtaggtgcgtgggtcttttgaggagcctcctactggattgatactttggttctcaaaactgagggaaatacttacgctactattgctgcatcaccctctcctcttcgaggaaaaccaacgcaagctcaagaggtagcaagaaggatttctggcgccgttgccggggaggtcttcgctcaagtcaagacataccaagtacccatcacaaacccatctcccttgcatttacattatttgccatttgcctctcattttcctctcccccacttcacccttgccgttttatttgccctctctttaacaatcttcttctcctttttccgtttgccttcccgttgccatggccgaatcaaaaagaactaagggccctttc

SEQ ID NO: 1902 - DNA, 409 bp, Triticum aestivum
  Clone ID: LIB103-047-Q1-E1-C7
ggtaccggtaccagaattcccgggtcgacggggaggaagagcccgaggaggagctaggaactgaatatctggtgcagccgcttggccgtgctgaagacgaagagcattccagtgacttcgagccagaagaaaatggtgatggtgctgaggacgaggagattgaggatgacgatgctgaggatggtgaggatcctgtcaaggcgcaatcctcatcaaagaggaagaggtctggtggggaggatgaagatgatgacgacggtgatgatgatggtgatgatgatgagaagcctccatcaaagcgatagtcaatttgttcgtgctgatctgtgatcttctctgcttgggccaagaaggaaaataatcctcatggagaggattgttggtaaatgctgtagctttaggacatctg

SEQ ID NO: 1903 - DNA, 418 bp, Triticum aestivum
  unsure at all n locations
  Clone ID: LIB103-047-Q1-E1-D1
acggtcctagaattccgggtcgacgggggaaacaatgcttcttcagagaactcttgatgcaatggttgatgtcgtttattgtccgagatgtcaaactgcttgcttggaagatgcaggtgatgaagccgtgtgtccaagttgtttgttcagcttctgcgcactttgtagagggcgacgtcatgttggggttgaatgtttatctgcagaagaaaaacttcaaattttggaggaacgtcaaaagtctgcacgaacaaagggagacatccagaagcttatggatgaagtatgcagtatcaaggaaattttgaaggatgcaaagcagtgcccgcattgcaagatggctatatctaagattgagggatgcaataagatgacctgttggaactgcggtggatttntctgctaccaatgcaacgct

SEQ ID NO: 1904 - DNA, 463 bp, Triticum aestivum
  Clone ID: LIB103-047-Q1-E1-D10
cggtcctagaatcccgggtcgacgggttatgcacaaaaatgcatcgaaaactcatataatgcataaaaatgtccaaacgaaccccgaaaaatcacaaaaaatcacacaacactcctgttgttctatgttgacacgagaaaaaaaaattgaaagcaataagaggcaatggatatcgttccctccccaaagctggggcgttccctatcgaaaaccatcatgcttcttgtgagaagctccggtttgtgagaagcatatacccaaacctgccccaaatgggacaaaacttttgtaatggcatgttgatgctgctccatgatagcatgccaagtttcatgaattttagacgagttttggatttactagaatttaaaaaacaggcatctcaatgttttgccggcaatcaacggtgccctggtgtttgaaattcattcccatttcttgcatgggaactaagcatgcaccg

SEQ ID NO: 1905 - DNA, 257 bp, Triticum aestivum
  unsure at all n locations
  Clone ID: LIB103-047-Q1-E1-D11
ggtcctagaatcccgggtcgacggggccgccgcggcagtcccccctccccgagtacacgctcgccgccgtctggatccaagcaggttattgtgtgaagtgccacgtgtccacatggcttcagcggcgcaagatttccagccccggacattctccatcanactgtggccaccgagtgaaagcactcgtctgatgcctgtaaaaaaggataacaagaaactgtcctccgaattcaacctttccccccagttatggcctt

SEQ ID NO: 1906 - DNA, 443 bp, Triticum aestivum
  unsure at all n locations
  Clone ID: LIB103-047-Q1-E1-D12
ccggtcaagaaatcccgggtcgacggggtcaccatcctgcggtccgagaaggtcaaggacgagatcgtcctcaacggcaacgacatcgacctcgtctcccgctccgccgccctcatcaaccagaaatgccatgtcaagaacaaggatatcangaagttcttggacggcatctacgtcagcgacaagggcgccatcaaggaggagtagagagccggaaaccgtcccgcccaccagaagccgtgtttctgcctgccgtgtttgtttcatcgtgtntgtgtctgtctgtcgtcgtcgtcttcgtgattttgaactttctctagactgaattttgtagcggagttaaatttttaaggatgtgccgtggaacatgctatctttaatgttatcctgcatatcgtcgccgccgcgagaaccggtgccacgcttatctacccctaaaggct

SEQ ID NO: 1907 - DNA, 461 bp, Triticum aestivum
  Clone ID: LIB103-047-Q1-E1-D2
accggtccagaattcccgggtcgacgggggagagagagagagagagagagagagagtccactgcccgtcttcccctgagctccttcgccggcgaacgcccaaagccccgcatggagatcctccaacaaggcactatgttgatgttcccggggatggatcttacgaaaatggatcctccaactcttacccttcttggagcagcttgttgtgtaatgttgtctatgcatttcacagtacagctggtatcacagcatcttttctattggaaaaatcccaaagagcagaaggctatactcattatagtgctgatgcctccgttatatgctataacttcctttgctggtcttctggatattaagggaagcaaaacgttttttacatgtttggagtctgttaaagaatgctatgaagcactggttattgctaagcttctggcattgatgtacagctacttaaatata

SEQ ID NO: 1908 - DNA, 384 bp, Triticum aestivum
  Clone ID: LIB103-047-Q1-E1-D3
gggtcgacggggaagaagaccaaggccgagaagcggccgcccaagtccaaggagggcggcgccgacaagaagaagaagaaggccaagaagagcgtggagacgtacaagatctacatcttcaaggtgctgaagcaggtgcacccggacatcggcatctcctccaaggccatgtccatcatgaactccttcatcaacgacatcttcgagaagctggccggcgagtcggccaagctagcccgctacaacaagaagcccaccatcacgtcccgggagatccagacctccgtccgcctcgtcctccccggggagctcgccaagcacgccgtctccgagggcaccaaggccgtcaccaagttcacctcctcttagatacgccgttccctg

SEQ ID NO: 1909 - DNA, 442 bp, Triticum aestivum
  Clone ID: LIB103-047-Q1-E1-D5
gtaccggtaccagaattcgcgggtcgacgggaaactgtgtggttgtgcgctgctgcgtgggataaggcggatggataactggcgcgtggggcctaggacacgtgtcgatcgctagacgcggcttacaatcgcgtgagatcagtcggttggaaagaagcgttttccgaattttatagatattgggtcatttagaaaataccatcttattctgccatattcattataatttttatggcatgagcatctacaaaaatgctcaggtagtatgccgttgaacaacatttttttgttgtgaaccttgttacatgtctcatttgtgatttctgagaggttggtaggcaagatctgaaaaaaaaaaacttctatactgtttttcttgcagtttcttcacctggttcactgatacagagcacaagagccttgccggatggggtgcaagatg

SEQ ID NO: 1910 - DNA, 432 bp, Triticum aestivum
  Clone ID: LIB103-047-Q1-E1-D7
gtaccggtacagaattcgcgggtcgacgggtctcaataagtattttattgaaaaaccggtcgtgacagtgggtctcattcaattttaaagccgagggctcctggaaaagggaaagggtgtgtcctggggtggggtttttgtgttgggatcgtgtgcgagagataacatgccagataatccagacaatcacatttctcccccacatatgggctcgatttgaaggagttcagattatccaaatagttgaattttggagagcctgcaaggcgcccgtttgacgtcctagcgcatctggatgtatgagggagaaagacgttttgaccttggtgatgaccttaattatttgtttgattcatttatatgtattgtagctcgtagcaacgcacgggcgttctcctagtatacttggtattcaagatatgtgaaactttc

SEQ ID NO: 1911 - DNA, 413 bp, Triticum aestivum
  Clone ID: LIB103-047-Q1-E1-D8
gtaccggtacagaattccgcgggtcgacggggccactcacagtgatgaccatagtttgaggagttcatgtattcaccatgtgttaatgctttggtctggtactctattaaaaggaggccttaatatcccttagtttccgctaggagcccgctgccacgggagggtaggacaaaagatgtcatgcaagttcttttccataagcacgtatgactatattcggaatacatgcctacattacattgatgaattggagctagttctgtgtcaccctatgttatggctgttacatgatgaaccacatccggcataattctctatcactgatccaatgtgtgcgagctttccatatattgttcttcgcttatttacttttctattgctattgttgtcatcactataaaacaccaaaaata

SEQ ID NO: 1912 - DNA, 446 bp, Triticum aestivum
  unsure at all n locations
  Clone ID: LIB103-047-Q1-E1-D9
gggtcgacgggttgctataaaatgatagtaaagcatccaagaatgataatatagcagcatgaatacttcataaattatcgatacgttggagacgtatcagcatccccaagcttaattcctactcgtcctcgagtaggtaaatgataaaagaaataatttatgaagtgtgaatgctagcaaagtgcataagtttgatcaatgacaatttcaatcacttttcctagcttcataacaacaattctttcctataaaatttcacatgttaaagtagcaaccaattcacatgttaaggttcanacaacaaattctcttaaaaacccacaacctatgttatcagttcacaagcaattgtaattcaatttattcaacggaatttaactaagagctccacatactcaaccatcatatagttttctaggattgctaacactcaccgcatacacatg

SEQ ID NO: 1913 - DNA, 445 bp, Triticum aestivum
  Clone ID: LIB103-047-Q1-E1-E10
cgggtcgacgggcaaggatgatgtttccatattaggaggtgagagtgatgatgtgccatcttcggccttcatccacggcgatgatgacgttcccttcgaccacggcgacgtatgatgatttgagtgacttgtgccaccatattgagagtgagagtgacttcaccactagccccatatttgatgtgttgccatgattcccatgtaaggagagccacaaccccaccacttgagtgagatgagtgactccaccatatgtgacattgagtgcacctaccttgacggagtgagtgaaccaccacatagagagagtgaggtagctgatagggcatgtgaggccactatgatttctaacaacttaatctctacttctattgtgtcctctcatttggtgctaggtcccatgtatgatgacacgccgattcacgacgacttcgccctccatttg

SEQ ID NO: 1914 - DNA, 197 bp, Triticum aestivum
  Clone ID: LIB103-047-Q1-E1-E11
gggtcgacgggtgaacatggtgcagcactgcctgcccagggaggtggtgaacctgatcgcgtgccatggccctgagctggtggagcggcacgacgtgttcggcaagtggaacgcgcgcctcaccatggccggcttcaggccgtcgccgctcagctcgctggtgaacgccatcatcagcacgctgctgcacagctact

SEQ ID NO: 1915 - DNA, 415 bp, Triticum aestivum
  Clone ID: LIB103-047-Q1-E1-E12
ccgggtcgaccttctggtggcagagcttctgcggattcttcatcatcattatattcgctttctctgaacctttcagcacgacatgggcgatgctgaacgaatcccctttctcaagcgcgaattgccattcattgggtgtgatgtggaaccagtcctagtttgaagtcacggtcgccttcacctccacatactctgcggcgccaccctcgggagtgatgacaatgtcatagggaagccccgattccttctcttcgttcacccacttgacattgctaggtcccagctgcccggcaaggtattggtgtaccgcagcttcaccaagcctgccggttcttgaccgctcatctggcttttgaactgtggctttacaaggtgtgccagctcctagctcgctttcatcttctgcaacatcagc

SEQ ID NO: 1916 - DNA, 441 bp, Triticum aestivum
  unsure at all n locations
  Clone ID: LIB103-047-Q1-E1-E2
cggtccagaattcccgggtcgacggggaggaagagcccgaggaggagctaggaactgaatatctggtgcagccgcttggccgtgctgaagacgaagagcattccagtgacttcgagccagaagaaaatggtgatggtgctgaggacgaggagattgaggatgacgatgctgaggatggtgaggatcctgtcaaggcgcaatcctcatcaaagaggaagaggtctggtggggaggatgaagatgatgacgacggtgatgatgatggtgatgatgatgagaagcctccatcaaagcgatagtcaatttgttcgtgctgatctgtgatcttctctgcttgggccaagaaggaaaataatcctcatggagaggattgttggtaaatgctgtanctttaggacatctgtggtaggtgtagcagctcaaacttgagtctaaccatgt

SEQ ID NO: 1917 - DNA, 450 bp, Triticum aestivum
  unsure at all n locations
  Clone ID: LIB103-047-Q1-E1-E3
acggtccagaattcncgggtcgacgggcaggatcatgatgctgtcaagagaacttattttcctggacttaaaaatcttagtactaaaaacgtgcgaccaatagtgttcgtattgaactacggtcacatctatttaggaaagatggtaacatttttactatttgtcctcggtgcatcttttgcatacattatttttaagctaaacttcattgctaattatgttactatacgatgttcttcaacagggactctcgatgatagttgtgccttagtggatcgatactaaaggtcacatgtcaatggttagattacgaccaagacatcctacattgcacatgagtgcatttaggatttctaaaaccgaggaatgcttaatagtgaaagactagagcagaattgtgaatgatcgcagagaagtactaaggggcaacaatcaaaagcccaacccaag

SEQ ID NO: 1918 - DNA, 434 bp, Triticum aestivum
  Clone ID: LIB103-047-Q1-E1-E4
tacggtccagaattcccgggtcgacgggaccgcagattgtgtggggtgcgaggaagaggaggacgagaagcgagacactgcccattgatgccgccaccttgctgccaggagaaggagagaagaggatgcggggacctggaccagatgcacaggaggacgaggctgttcaagcggttgaagccgctccagcaaagcgggctcaccggttcaaccccaagtacgatgcgaccctgtggatcacctgctgaggtggtctgagaagccacatcggcgccgggcacactgacaaaacaatggttgttcgactttggcaacatcaatgcacatagtatcgtttcacctatgacccccacaactcaaacacattacacatgtacaccatagatgtccagggaggtaaagtccctttttttttaaccatttcaactgttgtt

SEQ ID NO: 1919 - DNA, 451 bp, Triticum aestivum
  unsure at all n locations
  Clone ID: LIB103-047-Q1-E1-E5
gtaccggtaccagaattcgcgggtcgacgggaaacaatatgggggttaacccatgaatgggcataagattatctctcgagttgaacatatcgaatacatcaagagtaaggtacgaaggtacaataagaggttccaagtggatagatagttgctcgaagtctgaaccagagtgagaaagggtttcagagcagcgagagtaagtattgcgtctgttaccagaatatagcattaggaaggtggcccgtgaattaaatacgaagccaagcgcgaggaataacttcgacaacagggggtataggagagtcaggttttgatcctgtggaactgtgggttatgggcccaccatgtgggttagaagtaggaagggcggaggcgtcttgcgtgatcatgcaagcagtatgtcangggggtagcctgtcgattatgtcggcgacaacgtccataccaagag

SEQ ID NO: 1920 - DNA, 397 bp, Triticum aestivum
  unsure at all n locations
  Clone ID: LIB103-047-Q1-E1-E6
attcgcgggtcgacggggaagtcggccgccaaggagggcggcgacaagaagggcaagaagaaggccaagaagagcgtggagacgtacaagatctacatcttcaaggtgctgaagcaggtgcaccccgacatcggcatctcctccaaggccatgtccatcatgaactccttcatcaacgacatcttcgagaagctcgccggcgaggtcgccaagctggcgcggtacaacaagaagccaaccatcacgtcccgggagatccagacctccgtccgcctcgacctccccggcgagctcgccaagcacgccgtctccgagggcaccaaggctgtcaccaagttcacctcctcttaggctgttcgtcttcctgtgtctcgtanttagctgttcgggtgtgttt

SEQ ID NO: 1921 - DNA, 398 bp, Triticum aestivum
  Clone ID: LIB103-047-Q1-E1-E7
gtaccggtatagaattcccgggtcgacgggtttgggtacaaccttgggtttcttcactagagcaccaactgatttgccgtttcatgaagtatcccttcttgcccttgcccttcttgaaactagtggtttcactaaccatcaacaattgatgctccttcttgatttctactttcgcggtatcaaacatcgcgaatatttcaaggatcatcatatctatccctgatatgttatagttcatcacgaagctctagtagcttggtgcaatgactttggagaaacatcactatctcatctggaagattaactcccactcgattcaattgattcttatacccagacaatctgagtacaagctcaacgattgagcttttctcccttagtttgtaggctaagaaaat

SEQ ID NO: 1922 - DNA, 388 bp, Triticum aestivum
  Clone ID: LIB103-047-Q1-E1-E8
aattcccgggtcgacgggcgaggcggacttggccgagtccatgctttcctggttagggagagcctccaacacaagagagagagagagagagagcatcgtgactgccatggcttgaactattttgctgagatcctggaaaaattgaatggtataattctgttaattgggaaccttggaattgattttcacctgaaaaggttgatcgagggtcggataatggacgtaacacagctgctagagaagatattataatatggaaaatagcagatgaggagcaagctgaagttggtagatcaattgagcaagagttccagacccaggttacaccaagaacaagtgcctcagattattcatttttcaggcagcggaaggatcactccccctccac

SEQ ID NO: 1923 - DNA, 411 bp, Triticum aestivum
  unsure at all n locations
  Clone ID: LIB103-047-Q1-E1-E9
ggtccagaaatcccgggtcgacgagctcgactgctacagttttcagcaggagctccatgcccgtggaggcccatggcattggcaccatcccaacaaaattgatggacgaagtaaccaactgccaagtacttcaaggaaactaaatgctttacaatactccaaatagccaatgcgactctgtttttaagaccttttgcacatttataagaccctgtttttatacatctgtgtaaacagtccaatgtgattctaactgatgatagttcatctagaagaaaaaggagaaggggcaacatggagaaagacgcggtgctggtgtgcatgatcttgggctttctaggctccgtcgcggtcacnctcggcttcgtcgccaacaactatagctccaagcgtaaagagctatgtgagccc

SEQ ID NO: 1924 - DNA, 409 bp, Triticum aestivum
  unsure at all n locations
  Clone ID: LIB103-047-Q1-E1-F1
accggtccagaattcncgggtcgactggtattgaggataaagaattgagaagaacactgcagtcacttgcttgtggcaaagttagggttctccaaaagacaccaaaaggacgagatatagatgataaggacgaattcgtatttaatgaagattttagtgctcccctttatcgcataaaggtgaatgcaattcagatgaaggaaacagtagaagaaaacacaagcaccactgagagagtatttcaagatcgtcagtatcaggttgatgcagccatagttcgaattatgaagacgaggaaaactctcagccacacccttctaataactgagcttttccagcagctcaagttcccgattaagccagcggatatgaagaagagaatagagagcctaatcgacagggagtacct

SEQ ID NO: 1925 - DNA, 361 bp, Triticum aestivum
  unsure at all n locations
  Clone ID: LIB103-047-Q1-E1-F11
cggtccagaatatcncgggtcgacgggatgtgccactttgggttcacgactagccatgtcagcccgggctccttatcatatggatgctagtgacactatcatatacgtgtgccaaaagacgcaaacggtcccgggcaaaggtaaggcgacacccgtgggaataccgtgcgtgaggccgcaaagtgatatgaggtgttacatgctagatcgatgtggcattgagtcagggtcctgacattgaattggaagcatcattgtgtgcttgaattttcctgacggccttctaaattttcattgatagagtagtaatctccggggccgggttatttttccctccaatgacccggagttcttgaatgca

SEQ ID NO: 1926 - DNA, 370 bp, Triticum aestivum
  Clone ID: LIB103-047-Q1-E1-F5
taccggtacaagaattcccgggtcgacggggtcaggaagatttctcgtgttaatctcatgggctccaagtcgcaagctattcctactgccacagaaaaggttatcgcactggaagcgtgcttcagccgcagaactaatgtttagtaatgtcgatgtagatctactcctcatccttgccatagtgttcatccatacagaggctgtttggtaccagtttctggaactcatttttgtttgactgatacatcttggtcaatatcagcttctggaattaacgtatatctgtataattcctagttactatttttgtcgagctgtaattccctttgttttttctacattacggtgttactacttgatgaaaacttac

SEQ ID NO: 1927 - DNA, 403 bp, Triticum aestivum
  Clone ID: LIB103-047-Q1-E1-F6
accggtcgtacagaattcccgggtcgacgggacaacggatgcctccaactaacaagagtcccgggggagttttgtttcaagttattttgatttgatttgcataaagcatgggactgggcatcccggtgaccagccattttctcgtgagtgaggagcggagtccactcctcttgagaataacccacctagcatggaagatacagacaatcctagttgatacatgagctattcgagcatacaaaacagaatgtttatttgaaggtttagagtttggcacatacaaatttacttggaacggcaggtagataccgtatatagacaggtatggtggactcatatggaataactttggggtttatggaattggatgcacaagcagtattcccgcttagtacaagtgaag

SEQ ID NO: 1928 - DNA, 406 bp, Triticum aestivum
  Clone ID: LIB103-047-Q1-E1-F7
gtaccggactagaattcgcgggtcgacgggcaattagatttgttttagattcatcttcagcatgaggaaagaaagaaagaaaggacgaaagaaagaaagaaaagatgcgcacgcacgcttgaggtcggcgacggtggtggcggaggcggggaatgagacggcgaggcgggtgcccaggctcgtctccaggaacaccgtcgccacctccattcgatcccctcgttgccggaggcggaggaggcggagcggcgtcccgaaatggaaagctctcctctgctttggggtttctccaggagcaagaggccaagagcagaggaggggaggccagcggaccacgtgacgtgacggcgctccctctcctctcctctcctctccggtcacactacttctagactcttgttgactg

SEQ ID NO: 1929 - DNA, 433 bp, Triticum aestivum
  Clone ID: LIB103-047-Q1-E1-F8
attcccgggtcgacgggcacatatgaagataaggaagaaagagatgtttatttgctgtccaaaaagttctctcacgtcacttttggcccaagagaagatagagtccaagtctctcacgttctggattcagattcggactgcacagacatacctgactcaaaacgcacacaagtttttcatacggactccaaattgggtgattctttttttgttggaaactagattttgtccactttccaacccaattggaatcacattcaaattcgtccggagcgttgagttgtggacgaaacaatctgatgctgcagcagaatccgagtcaaactacaagtccaaaggtgttacatcacctccacttgggcccattggccttgtacgacctagatttagttttaggctgccttgggacgtcctcccaactccttggcggcaa

SEQ ID NO: 1930 - DNA, 305 bp, Triticum aestivum
  unsure at all n locations
  Clone ID: LIB103-047-Q1-E1-F9
ggtccagaaatcncgggtcgacgggtggaacgatgaactaatcatatttacaaaaacaagagaggtcgagttcatatcagcttttctcatctcagccagtccatcatatatcgttaaaattgcctttcacttgcatgaccgaacgatgcggataataataatagtgcacatgcattggactaagctggaatctgtaagcattcaataaacaggagaagacaaggcaatatgggttctttttgggttttctcctatcgacccctaaaaaaaaaaaaaaaaaaaagaaaaaaaaaaaaagcggccgc

SEQ ID NO: 1931 - DNA, 362 bp, Triticum aestivum
  unsure at all n locations
  Clone ID: LIB103-047-Q1-E1-G1
accggtccatgattcncgggtcgacgggatctacatgtgaagtggagtacatggcagcctcggaggcagcacatgaagctatttgggtgaaggagttcatcaccgacctaggagtcatacccaatgcgtcggggccgatcaaactcttctgtgacaacactggagctattgcccttgccaaggagcccaggtttcacaagaagaccaggcacatcaagcgttctttcaactccatccgtgaaaatgttcaagatggagacatagatatttgcaaagtacatacggatctaattgtcgcagatccgttgactaaacctctctcgcgagcaaaacatgatcaacaccagaactctatgggtggg

SEQ ID NO: 1932 - DNA, 449 bp, Triticum aestivum
  unsure at all n locations
  Clone ID: LIB103-047-Q1-E1-G2
cggtccagaattcncgggtcgacgggttcctatatataattctttacctccggaccattccggacctcctcttgacgtccgggatctcatacgggactccgagcaactttcgggttaccgcatactaatatctctataaccctagcgtcaccgaaccttaagtgtgtagaccctacgggttcgggagacatgcagacatgaccgagatgactctccggtcaataaccaatagcgggatctagatacccatgttggctcccacatgttccacgatgatctcatcggatgaaccacgatgtcaaggacttaatcaatccctatacaattccctttgtctatcggtacgacacttgcccgagattcgatcgtcggtatcccgataccttgttcaatctcgnttacggtaagtctctttgctcgttccataacacatcatcccgtgatcagct

SEQ ID NO: 1933 - DNA, 419 bp, Triticum aestivum
  unsure at all n locations
  Clone ID: LIB103-047-Q1-E1-G3
cggtccagaattcncgggtcgacgggagccaagaagaccaaggccgagaagcggccgccggcgtccaaggagggcggcgagaagaaggggaagaagaagtccaagaagagcgtggagacgtacaagatctacatcttcaaggtgctgaagcaggtgcacccggacatcggcatctcctccaaggccatgtccatcatgaactccttcatcaacgacattttcgagaagctcgccggcgagtcggccaagcttgcgaggtacaacaagaagcccaccatcacgtcccgggagatccagacctccgtccgcctcgtcctccccggcgagctcgccaagcatgccgtctccgagggcaccaaggctgtcaccaagttcacctcctcctaggctangatggttttctgtaatantcagctgtt

SEQ ID NO: 1934 - DNA, 427 bp, Triticum aestivum
  Clone ID: LIB103-047-Q1-E1-G4
gggtcgacgggcaataatatcaagtttcctctttatgtgctcaaagtttcgaagctatgcttgttttgccttcctatgctagttgattattgttcctataagttgttttctcacaaaatccctatgcataggaagtgggttagacttaaattttctagtcatattcttcatgatgctctctttatgttacaattcctatcttttatgtgagcatcattgaaattatcatgcctagctaggggcgttaaacgatagcgcttgttgggaggcaacccaactttatttttgtcccttgatttttttctcctgtttattaataaataatttatctagcctctgttatgattgagtttttatgttttaattagtgtttgtgccaagtagaaccgttgggaagacttggggaaagtcttgttgatcttgctgt

SEQ ID NO: 1935 - DNA, 425 bp, Triticum aestivum
  unsure at all n locations
  Clone ID: LIB103-047-Q1-E1-G5
gtaccggaccagaattcccgggtcgacgggggtcaccaggggcttccgctacaagatgcgcttcgtgtatgctcacttccccatcaacgcctccatcaccgccgccaaccgcggcatcgagatcaggaacttcctcggcgagaagaaggtgaggaaggtggacatgctcgacggggtcaccatcctgcggtccgagaaggtcaaggacgagatcgtcctcgacggcaacgacatcgagctcgtctcccgctccgccgccctcatcaaccagaaatgccatgtcaagaacaaggatatcaggaagttcttggacggcatctacgtcagcgacaagggcgccatcaaggacgagtagagagccggaaaccgtcncgcccaccagaagccgtgtttctgcctgccgtgtntgtttcatcgtgtttgtg

SEQ ID NO: 1936 - DNA, 422 bp, Triticum aestivum
  Clone ID: LIB103-047-Q1-E1-G6
cggtcgagaagtattcgcgggtcgacggggacgaaaggatcgttagttcatcgaaagtagttgttttcttcactggtacgttaaataaagagttttgtttcgtagatacacaatttaaaatgattgttatggagagaataagaaaaccactccattatatattagtagtatacacgagtactatatggacgcagcttcattgacttagtgcacttgcctttgggtgtatgataggtgggcccaaaatgtggctggcccacctgtcatacaaccaaaggcaggtgcagttaaggtaccggagctcagtccgtaatacactatatatgcagtacactatataagatggagcctcagcgcttgttcgctagggtttgcactctccacactctcaccgtactatacacgctggaggctcagtgttc

SEQ ID NO: 1937 - DNA, 396 bp, Triticum aestivum
  unsure at all n locations
  Clone ID: LIB103-047-Q1-E1-G9
ggtccagaaatcncgggtcgacgggaccttcaaactgctcaggcattcaaaaaagatgaccttctcttctttggtcagagcgtacctggcacgaccttgaaaccattccggatgccggtcatcagggtctttcaaacgttgctggtcctgccgtgcttcctttgtatcatttgtcttcccatacacgcccaagaagcttatgaggttcacgcaaatattcttcttaacgtgcatcacgtcgattgcagagcggacttctaagactttccaatattctagctcccagaatatagatttcttcttccacatggctgcgtgcccgtcagctcccttcggaactgattgtccgccaggaacctttcgaaagatgactttcaaatccttgaacatatcaaa

SEQ ID NO: 1938 - DNA, 448 bp, Triticum aestivum
  Clone ID: LIB103-047-Q1-E1-H12
aattcccgggtcgacgggtattttgctagtatacatgttagcagtacatacaaggtggtgaattcaaaccgcacgcggtcgattaggaagaaggtgaattcaacaaggcggaccggctcaaactcatggaaccacaactcggagtcagattccgagatagaccggatatacgccatatgagggtgatctccggtcttctatggatcttcagtgttttcggcggcgccacacgacacggatgtaaaaaggaaggtgggatggcactcaatatgaacagctttcaccctccaggtgccaagggttttaccgtatacattccaataagctggtgttcctggatcggcaagaggagccaggacgcgacggtcgtgttgtatacatcttctacagatagattgtgatcatcagaatatgcatgcagcctgtgctgtgctccctatgcatggct

SEQ ID NO: 1939 - DNA, 430 bp, Triticum aestivum
  unsure at all n locations
  Clone ID: LIB103-047-Q1-E1-H3
accggtccagaattcncgggtcgacgggcgtgagaggccggattcggttctatattggagggggagctccggtctatgcagaggaggcagcccagcagcggtctgatctggccagggcattgctgacggttggaggatgagatcgatccagaggaaaattaatcgaaatgagaccgaaaatatattgatcgtccaagaccgatctgaagaaaccgatagagagaggaggacgagtcgcggtgtctggaataaactctaaaccttgactcttgataccatgctagaggagcaacttgattgtactaaaccttgactcttgataccatgctagaggagcaacttgattgtattaccatagcccatggggagaatatatggtacaagagacttggggtacacgtaaggaaacctagaccaatgagtacatata

SEQ ID NO: 1940 - DNA, 280 bp, Triticum aestivum
  Clone ID: LIB103-047-Q1-E1-H5
taccggtaccagaattcccgggtcgacggggacgtcgaagacagcggcgacttcgtgtgcgcgttgtgacgagcaggcgtggcggttccccttggtggtgtggcctttgtgtttgtaatgtgttcatccttctgttgtgtcgtttgtttcagagggttgcgctgtgctgttgtatgattacatctgttttctgtaaccgttgttggtagtgacgctgtggataaaatataagtataactacacttccatatgtgtttggtgtcctcagctggattcaatt

SEQ ID NO: 1941 - DNA, 471 bp, Triticum aestivum
  Clone ID: LIB103-047-Q1-E1-H7
ggtaccggtaaagaattcgggggtcgacgggttccataaatcatgataaatgtttattattcatgctagaattgtattaaccggaaacttagtacatgtgtgaatacatagacaaacatagtgtccctagtatgcctctacttgactagctcgttaatcaaagatggttaagtttcctagccatagacatgtgttgtcattttatgaatgagatcacatcattagataatgatgtgatggacaagacctatccgttagcttagcataatgatcgtttagtttttctgctattgctttcttcgtgacttatgcatgttcctcagactatgagattatgcaactctcgaataccggaggaacaccttgtgttctatcaaacgtcacaaggtaactgggtgattataaagatgctctataggtgtcttcggtggtgtttgttgagttggcatagatcgagattaggatttgtca

SEQ ID NO: 1942 - DNA, 259 bp, Triticum aestivum
  Clone ID: LIB103-047-Q1-E1-H9
gggtcgacggggtacctttaatagcctttgttgacagtggagctcagtcaaccatcatatcaaaagactgcgctgaacgttgtgggttactcaagcaccttgatcaacgttacaaacgggttgctaatggtgttggtcaaactgagatacatggaacaatacatgtatcagctacaaacatatgccatgctttctaaccctgtaccttcagagtattggatgatccaaatatggaaatccttttcggacttgagatgct

SEQ ID NO: 1943 - DNA, 424 bp, Triticum aestivum
  Clone ID: LIB103-048-Q1-E1-A10
gggtcgacgggctctcatgacttcacttatattattttgagagtcttttataacatcatggtatttgctatgatcataaagttggtcctagaatgatgagcatccaagttgggtattaataaaaactatcatagaaagtgaattggatgctatgatcaatttgatgcttgataattgttttgagatatggaggtagtgatattaaagtcatgctagttgggtgattatgaatttaaagaatgcttgtgttgaagcttgtgattcccgtagcatgcacgtatggtgaaccgcattgtgatgaagttggagcacaattttacttagtgattgtcttccttatgagtggtgatcggggacgagtgatggtattttcctaccaatctatcccctaagagcatgcgcctagtacttttgtttttgatga

SEQ ID NO: 1944 - DNA, 425 bp, Triticum aestivum
  unsure at all n locations
  Clone ID: LIB103-048-Q1-E1-A12
cgggtcgaccggcgcaagttttcgggtcatggctgactatccacgtccgagtccaccttcagatcgtggagctgttgtgctgtttaactgaactttccttgtcaacaaacaacaggtctcttgggactttcccttgtcgtggagtactagtcgaaacttcttactcttccctttcccttttttttccaatccaatcctcaatactcacggataaccaacctggccgtagctttaggtgagatgtagcaaaagtactacttggtttaacacagtatatcagacaaaatagcagatcgcttcttctcgtaacttgccgcaatgcctgatcatctaaaaacttgaggagactattaatcttgccttggtttctaatgacagaaattgacccggattcgacggatcatatggtcgtancaacgctcaac

SEQ ID NO: 1945 - DNA, 387 bp, Triticum aestivum
  unsure at all n locations
  Clone ID: LIB103-048-Q1-E1-A9
taccggtccagaattcncgggtcgacgacctcaacggagaccagcaccactgctaactcaatgatggttgctatctctcacaatatatatattacttttatatgtgtcaactttaaggtttatatgtttgggctgtgcttttgtgatattttggactgtcagtgctttgactgatttttaccatctcaatgtttggcattcatgtaggttttagcattacttctgcgctcgtggtatgttaccttgccatgtcgcatcattagtttgtcttgtatgtggtgtttgtccatctgctgagttgtatacttattactcgttttgtctgcgccttttcttcattgagtttacctagtgatgctgttctgttgccctctatgctgttgtttg

SEQ ID NO: 1946 - DNA, 445 bp, Triticum aestivum
  Clone ID: LIB103-048-Q1-E1-B12
ggtccagaatacccgggtcgacgggggttttgatttctttcactaacggagcttataagatttcctgttgagttttgtgttgtgaagttttcaagttttgggtagagattttttggactatggaataaggagtggcacgagcataagcttggtgatgcccatggaaccccaagatattcaaggatagccaaaagcctaagcttggggatgccccgggcatcccctctttcgtcttcgttcattggtaactttacttggagctatatttttattcgccacatgatatgtgttttgcttggagcgtcgtgtattatattagtctttgctttttagtttaccacaatcatccttgctgtacacacctttttagagaagcctatttgattagaatttgctagaatactctatgtgcttcacttagatcttttgagcttaatagattttt

SEQ ID NO: 1947 - DNA, 415 bp, Triticum aestivum
  unsure at all n locations
  Clone ID: LIB103-048-Q1-E1-B9
gggtcgacggggaaagtggctatgaaattctcccaacatgatgctgcgggtccttcaagctgatgtgcggcaaactccaccttttccgcattcatgcatcctgctgtggtcaactctctagctgtcttgtggagccaatcatctactactatcggctcggtgctactggaaaacaccggtggattcagcctaagaaaacgggctaagtgatcaataggtggtggtggtggtgggttgttgttgttgttattcccttggttctaattctggactagtaactgcatcaatgtgttctgctgctggattaactgagtgagctccggtgggaaggtaaatccggggtcacgtctcggaggcatctganggtttagaaaagatgagatttaagaatagagggggcctaaagagaaaacac

SEQ ID NO: 1948 - DNA, 396 bp, Triticum aestivum
  Clone ID: LIB103-048-Q1-E1-C11
gggtcgacgggggagtttagtagcatctcctaaagtgatttcaataaacttgcgtcccgcacccgaacctaaaagatttcaaaaaccataattcatcccggaataaaatttttgtaaaatcatcaacacattcaaaccatgagtagggcacctacgtagcattagtttcatcctctcacaagcttgtgcaacatgttcatgatcaggttgtttaaagttcataatatcgtttctaagagagatgatcttagcgggaggaaaatacttagagataaaagcatctttgcacttgttccatgaatcaatactatttttaggcaaagacgaaaaccaagttttagcacgatctctaagtgaaaaaggaaatagcttcaatttaacgatatcattatcgac

SEQ ID NO: 1949 - DNA, 416 bp, Triticum aestivum
  Clone ID: LIB103-048-Q1-E1-C9
gggtcgagggggatccataatatatgagactgtaaggttggttctcttccagtatgttatcatggttgagattaggactaatttttagtacaagagaagaatgctatgttggtggttgttctcaaaaaaaaaaaaaaaaaaaaaaaaaaaaaaaaaaaaaaaaaaaaaaaaaaaaaaaaaaaaaaaaaaaaaaaaaaaaaaaaaaaaaaaaaaaaaaaataaaaaaaaaaaaaaaaaaaaaaaaaaaaaaagggcccctcaaaaggttcaaaccttattttgccataaaggcaaattaaaaacccttcaaaagggaccccaaaattaatttaatgggccatcttttaaaaatgtcgtaatgggaaaaaccctgaggtacccaaagtaaacccccttgaaaaaaatcccctttttac

SEQ ID NO: 1950 - DNA, 418 bp, Triticum aestivum
  Clone ID: LIB103-048-Q1-E1-D9
cgggtcgaccgggaagaacacaaggcggagaagcgggcgccggcgtccaaggaggccggcggcgaggggaagcagcggggcaggaagaagggcagcaaggccaagaagggcgtggagacgtacaagatctacatcttcaaggtgctcaagcaggtgcaccccgacgtgggcatctcctccaaggccatgtccatcatgaactccttcatcaacgacatcttcgagaagctcgccggcgagtccgccaagctggcgaggtacaacaagaagcccaccatcacgtcccgggagatccagacctccgtccgcctcgtcctccccggcgagctcgccaagcacgccgtctccgagggcaccaaggccgtcaccaagttcacctcatcctaagcttcatcgtcgtccttttaacgaatccatg

SEQ ID NO: 1951 - DNA, 445 bp, Triticum aestivum
  Clone ID: LIB103-048-Q1-E1-E12
ggtccagaatatccgggtcgacggggcccgtggtccacgaaccatttcccaaaatttccccactcgcgaaccctaacttcgaccagcctctcgccccagatcccctccccctactctcaccaggagcagaacccacccgctcggaccgctccgcgtaatcgccatgtggggcggacgaggaacccgttgatcccaagaagtatcttgaggagcggtgcaagccacagtgtgtaaaaccactgtatgagtatgagaaatgtatcaagagagtcgaggccgatgatactgggcacaagcactgcactgggcaatattttgactactggtcatgcatcgataaatgtgtagcaccaaagctctttgaaaagctgaaatgatattggggcgctactttcagtgagtgagcctggtcattggccagaactttgttcaagttgaaataatt

SEQ ID NO: 1952 - DNA, 405 bp, Triticum aestivum
  Clone ID: LIB103-048-Q1-E1-F11
gggtcgaccggggggctgggggcatccaggaaccgcgtgctatcgcctgcatcttgggcggagcccaggccccagcctcgcagcgtatctaaaagcagtttgctcgtgaagtgaatgcagccctccccaagctcgaagccacacgcccgctcagatggtcccagtgccccatcacgttcaactcggcagatcagctcaagtgcgcagctaccgctggcgccctcccatgctttgctccccaatcatcagcagcgtgcaacttaccaagaccatcatcgacgtgcgaagcgagaacgacaaggccaaagccggcgtgccgcagctcccctccaacgcaaagaacaagatcatcgctctgccgctcgaagaacttccgaacaagataaagggaatggtgcgcaatgc

SEQ ID NO: 1953 - DNA, 421 bp, Triticum aestivum
  Clone ID: LIB103-048-Q1-E1-F9
gggtcgacgggtaaaatacaaggacaaccaaaagcttaagcttggggatgccccggaaggcatcccctctttcgtcttcgtctatcggtaactttacttggggctatatttttattcaccacatgatatgtgttttgcttggagcgtcttgtatgatttgagtctttgctttttagtttatcacaatcatcctcgctgcacacaccttttgagagagacacacgtgattcggaatttgttagaatactctatgtgcttcacttatatcttttgagctatatagtttttgctctagtgattcacttatatcttttagagcaaggtggtggttttattttatagaaattattgatctctcatgcttcacttatattattttgagagtcttaaacaacatggtaatttgctttaattttgaaat

SEQ ID NO: 1954 - DNA, 430 bp, Triticum aestivum
  Clone ID: LIB103-048-Q1-E1-G9
ggtccagaatacccgggtcgaggggatgccatagtcaacggcgacggcggtagccgcgccactgctggtgctggtggtagcggcggcggtggtggtggctgcggtggtcgcgttccaccggaggccaaccgcagaactcgtgtcgccccttacccgcagccttcgcgaaggtgatggacgcgccggtgctcgtgacgtgcacgcaccgctgcgcttgtaggagagagatcagagcaagaagagagcaaccagcgtgaaaaaaaacattagcaaatcagaattgttgctcgatccccttgttggggtggttacaacttagtgtttagatcatctttgatgacaattgacgccgtcgatctgtttaattgtgttcctttggctggttggtgcttcagtcgcagccaagaattggcgtggatgcgcggccgct

SEQ ID NO: 1955 - DNA, 427 bp, Triticum aestivum
  Clone ID: LIB103-048-Q1-E1-H9
ggtccagaattccgggtcgaccgggtaccaatctacacaccctagggtcatgcgtagtagtactttgcttcgagggctaatgaactttcacaataagtatgtgaattctttatgactactatgagtccatggattatacgcactctcatctttctgccatttgctagcctctccagtaccgtgcattaccctttctcacctcgagagttggtgcaaacttctccgatgcatcgaaaccccatgatatgatatgctctatcacacataagcctccttatatcttcctcaaaacaaccaccatacctacctatcatggtatttccatagccattttgagatatattgccatgcaacttccaccactccgtttttatgacatacacattcattgtcatattgctttgcatgatcatatagtggacatagt

SEQ ID NO: 1956 - DNA, 246 bp, Triticum aestivum
  unsure at all n locations
  Clone ID: LIB103-048-Q1-E2-A1
tcccgggtcgacggggcgtgccaatgtgaaggtaaaggtgggttccttgctggcccgggtgttccttttgaactggcttgctggggcctggaaagagtttcaaaatccaaaaatgggggtcaaccccccattggatgatcaggtgtctgctctggacaaaaaaaaaaaaanaaaaaaaaaaaaaaaaaaaaaaanaaaaaaaaaaaattaaaaaaaaaaaaaaaaaaaaaaaaaaaaaagcggccg

SEQ ID NO: 1957 - DNA, 330 bp, Triticum aestivum
  Clone ID: LIB103-048-Q1-E2-A12
atgcccgggtcgacgggcgaaagtattcgggtcatggctgactatccacgtccgagtccaccttcagatcgtggagctgttgtgctgtttaactgaactttccttgtcaacaaacaacaggtctcttgggactttcccttgtcgtggagtactagtcgaaacttcttactcttccctttcccttttttttccaatccaatcctcaatactcacggataaccaacctggccgtagctttaggtgagatgtagcaaaagtactacttggtttaacacagtatatcagacaaaatagcagatcgcttcttctcgtaacttgccgcaatgcctg

SEQ ID NO: 1958 - DNA, 428 bp, Triticum aestivum
  Clone ID: LIB103-048-Q1-E2-A4
cgggtcgacgggggataaaaacatttacagttggtggaacggtccttgcctttttgaaattctggacaaaatcgaagttcctttgcgtgatcccaaaggtccagtaaggctgccaattattgataaatataaagatatgggcacagtcgtaatgggaaaattagagaatgggactatcagagagggtgatagtttgttggttatgccaaacaagacccatgtgaaagtcactggtataaacttggatgagaagaaagtacgacgtgctggacccaatgagaatgtacgtgtcaaagtgtctggaattgaagaggaggatatcatggcaggtttcgtactttcaagtgttgctaatcctattggtgctttcactgaatttactgcccagctgcagattctagagttgcttgataatgctattttcactg

SEQ ID NO: 1959 - DNA, 374 bp, Triticum aestivum
  Clone ID: LIB103-048-Q1-E2-A6
attcccgggtcgacgggaatgaaaagaaaaacgattctcccatcaacatgccatcccaagagctgggtctgaagatatcggaaacaactagatgtgaaactgaaatccatgatgaacgaagtattccgaaaagatcaaatctgtcagcattcaccaggtaccatactcccatggcttccgatcaaggtggggcaacatttcggggaagctgttcacctcaagataacagctcagaggctgtgaaaacgaactccacctgcaagatggagtcaaattcagatgctgctcaaataaagcagggctcaaatggcagtagcaacaacaatgacatgggctccagtacaaagagtgccatcgcaaagccttgttcagac

SEQ ID NO: 1960 - DNA, 421 bp, Triticum aestivum
  Clone ID: LIB103-048-Q1-E2-B10
cgggtcgacggggcattcaaatacatccgggaggtgctcaagtgggaggaggacaaggacgagaactactaccaggaggagtccttctacagcaccaccgagatgagctcctcccccttcatccgagccgaatgagaccgcgtcccctgcccccgccgaaggccggttcctatactaatgatgcgccgtttcgttttcgccgccagtcgattccgttttgcgccgtacaaaaaatcattcattgattgttggtctgtaaaaagttaatctgcaggtttttgttcttctgatggatgggatgtttttcatgtttgtgtctcttggtccttgagatagagatgaagcatgattgatctgttggtgtgtatttagtgagtggtactagcagtttttctctagtcagtgcacagattgacctgtt

SEQ ID NO: 1961 - DNA, 364 bp, Triticum aestivum
  Clone ID: LIB103-048-Q1-E2-B12
atgcccgggtcgacgggggatttgatttctttcactaacggagcttataagatttcctgttgagttttgtgttgtgaagttttcaagttttgggtagagattttttggactatggaataaggagtggcacgagcataagcttggtgatgcccatggaaccccaagatattcaaggatagccaaaagcctaagcttggggatgccccgggcatcccctctttcgtcttcgttcattggtaactttacttggagctatatttttattcgccacatgatatgtgttttgcttggagcgtcgtgtattatattagtctttgctttttagtttaccacaatcatccttgctgtacacacctttttagag

SEQ ID NO: 1962 - DNA, 366 bp, Triticum aestivum
  Clone ID: LIB103-048-Q1-E2-B6
gtaccagtccagaattcccgggtcgacgggtatcttttatgaagaccgtgttgttactcccttagatactgccatcaccctctccaattcaaatggctgataaacaagaaaagtaattgaaagtatagatattgtatgatagacaagtcaatggatagtggggaataaaagagggcatgaaataattcatatttatgttgtctaaccaaacaggatagcatgacacaatttcacatatatatatgatggctaactaaacaggatagcatgacacaatttcacattatgatggctaactaaaaaagatggaaagacatagttcaaaatatgagactatgtaaacaggatgacatgatataactatat

SEQ ID NO: 1963 - DNA, 354 bp, Triticum aestivum
  unsure at all n locations
  Clone ID: LIB103-048-Q1-E2-C10
cgacgggggacgtaatgggccatacgggaaaggatagaggggcctcaaggagtggccacgcgcaccccaagggctggtccgaattggactaggagggggtggcgccccccaccttccttctcccctcttcctccttccctccttctcctactaggaataggaaagaggaggggaatcctacttggactggggagtcctantaggattccccacacctggcgtgccccccttgggccggccacctcttccctcccctcctttatatacgtggccagggggcaccccatagacacacaagttaatccttagccgtgtgcggtgcccccttccatagttttccacctcggtcatatc

SEQ ID NO: 1964 - DNA, 450 bp, Triticum aestivum
  Clone ID: LIB103-048-Q1-E2-C11
attcccgggtcgacgggggagtttagtagcatctcctaaagtgatttccataaaagtgcctcccgcagccgaatctaaaagatttctagaagcaaaattcaatccggcataaaatttttgtataatcatccacaaattcaaaccatgagtagggcaattacgtatcattaatttcatcctctcccaagcttgtgcaacatgttcatgatcaggttgtttaaagttcataatatcgtttctaagagagatgatcttagcgggaggaaaatacttagagataaaagcatctttgcacttgttccatgaatcaatactatttttaggcaaagacgaaaaccaagttttagcacgatctctaagtgaaaaaggaaatagcttcaatttaacgatatcattatcgacatcttttttcttttgcatatcacataaatcaatgaagctattcagatg

SEQ ID NO: 1965 - DNA, 373 bp, Triticum aestivum
  Clone ID: LIB103-048-Q1-E2-C12
ccgggtcgacggtgtacggcagtgaagaaggggaacacgggaggaaggaggcggtcacaccgttaggcgtaccatgcgcaatcgtcgcgctgtagcacttccctttgataatccatgccaagcaaggttcatgcacctggtgagacatgttgtagtaccctgtaattctacaaccacacatcctgattttatgtactactactaggtcaaacaaaaagaaatgggttgggtcatctcttaagaacatctttgcttgtttagtggatgaggggactcgattttccaagccaaacatcttgtcacgaattattataggcttatgaggacgacttgagaaatcagatgtcaagctgaacagctgataacataggtc

SEQ ID NO: 1966 - DNA, 464 bp, Triticum aestivum
  unsure at all n locations
  Clone ID: LIB103-048-Q1-E2-C6
gtaccagtcaagaattcccgggtcgacgggggaggagcattaactggctatacctatcacgacttgcggccctaaaggaatttgcttttatgaaggctttaggagaccatggattccctgttcccacagcggtggactgcaatcggcactgtgtcattatgtcacttgtgccgggatatccacttgttcagataagagaattgcaaaatccagatgatgtttttgacaaaattcttggtcttgtaattcgtttggcggagcatgggctgatacattgtgattttaatgaattcaatatcatgattgacgatgatgaaactgttacgatgatcgacttcccacagatggtatctgtttcgcaccggaatgcccagatgtattttgatcgagatattgggtgtatctacaagttcttcaacaaanagttcaatcttacananaaaggtggacaagatggttctgaa

SEQ ID NO: 1967 - DNA, 316 bp, Triticum aestivum
  Clone ID: LIB103-048-Q1-E2-C9
acggggatccataatatatgagactgtaaggttggttctcttccagtatgttatcatggttgagattaggactaatttttagtacaagagaagaatgctatgttggtggttgttctcaaaaaaaaaaaaaaaaaaaaaaaaaaaaaaaaaaaaaaaaaaaaaaaaaaaaaaaaaaaaaaaaaaaaaaaaaaaaaaaaaaaaaaaaaaaaaaattaaaaaaaaaaaaaaaaaaaaaaaaaaaaaacgggcccccaaaaagattcaaagctaaattccgcataaaagaaagttaaaacccctccaaaagggccaccaa

SEQ ID NO: 1968 - DNA, 450 bp, Triticum aestivum
  Clone ID: LIB103-048-Q1-E2-D10
atgcccgggtcgacggggaagaggaccattgttggaatatacaagccaagttctataatgaaaatttcccactagtatatgaaagtgacaaaacaagagactctatatcatgaagatcatggtgctactttgaagcacaagtgtggaaaaaaggatagtagcattgtcccttttttatttggcctttctttttttggcctttttttggcctttttctttttttgggacaatgctctattaatgatgatcatcacacttctgtttatttacaactcaaagataacaactcgatactagaacaagatatgactctatatgaatgcctccgacggtgtaccgggattgcgatgaatcaagagtgacgtgtatgaaaaattatgaaggatggcttggccacaaatacgatgtcaactacatgatcatgcaaagcaatatgacaatgatgatgcg

SEQ ID NO: 1969 - DNA, 414 bp, Triticum aestivum
  Clone ID: LIB103-048-Q1-E2-D11
cgggtcgacggggaagaagaccaaggcggagaagcgggcgccggcgtccaaggaggccggcggcgaggggaagacgaggggcaggaagaagggcagcaaggccaagaagagcgtggagacgtacaagatctacatcttcaaggtgctgaagcaggtgcacccggacgtgggcatctcctccaaggccatgtccatcatgaactccttcatcaacgacaccacaagcatccgcatccgcatcccacctcacatcccatctccccacacgctcgaaccaccagcagcagcagcacccatggcacccaaggcggcggagaagaagcccgcggagaagacgacggcggggaagaagcccaaggcggagaagcgggcgccggcgtccaaggaggccggcggcgaggggaagacgagggg

SEQ ID NO: 1970 - DNA, 446 bp, Triticum aestivum
  unsure at all n locations
  Clone ID: LIB103-048-Q1-E2-D2
gggtcgacggggtccattaatttcgggcccaatgcatggtagtagctgattcttaaatcacacatacagatctcagtgcttaaggtcggcttcaatgaaacaacccaccatgtactcctacatggcctctcatcgatacctttaccaaatcgtgttcactacaccactctcattaccgacataatcatttcgctctagcccatcacccagatgaaccagacctgacacaactctaagcatagcaggcatagcaaggtaggaacaacacatacatatggctcaatcaactcctacacatgctagtgggtttcatctagttactgtggcaatgacaggtcatgcanaggaaatgggttcaactaccgtagcacgcagcagtttgaatcgcgttgtcttaatgcagtanaagagagcaggagcgagaacatgggattgtatcgatatga

SEQ ID NO: 1971 - DNA, 361 bp, Triticum aestivum
  Clone ID: LIB103-048-Q1-E2-D5
aattcccgggtcgacgggggagaagaggaacatcttcaagcagaaggcgccagaggctgatgctgcggcgagcggctgctgttgatttcattcacgcacgctaatcccgggcatctatctatgatctatctttatctttgtggaggatggatgaaaacgtttgttgtttgacgaagtgacatctaagcagctcgtttgtgtcgttttcaaaaaaaaaaaaaaaaaaaaaaaaaaaaaaaaaaaaaaaaaaaaaaaaaaaaaaaaaaagaagaacaaaagaataaaaaataaaaataaaaataaataaaaaataaaagatcataaaaaattgttttttaaattcaattgaatggaagtagtt

SEQ ID NO: 1972 - DNA, 324 bp, Triticum aestivum
  Clone ID: LIB103-048-Q1-E2-D6
aattcccgggtcgacgggccaagaaacgcacaagcgagctgttaccctcagactgcaagagatcgaagccactgtaactgtttaaactgttaacatggtctgttgtgccagtctatttgatgcttgggaactgatatttttcttaattcttatcggatgggacttgccagagtttaaggtgaagaatacgaagctgtttcatggaataaaaaagaaaaaaaaaaaaaaaaaaaaaaaaaaaaaaaaaaaatattaaaaaagataaaaaaaataaaaataaaaaaaaaaaaaaaaataaataaaaaaataatataaaaaaaatta

SEQ ID NO: 1973 - DNA, 444 bp, Triticum aestivum
  Clone ID: LIB103-048-Q1-E2-D7
attcccgggtcgacctctccgtatgatgggagttcaacccgaaaggaccgcgaactattcagcaattcttcggcatgacgctcgaagggatgtatggattgttctttggatcacgaataaagtgtccggacaccaccgaggatgcgggtctaaactgcaaccgtccagatacccacataagtaatctacggccgaacacgctgtcttttcatttgtcctaacatcattctgaaaaaattgctcttggccaggactggataagaaaggcgaaaatgatcaggtgttcggccccccttcctgaaggctcactggatcccgtactagccaggatgcttgagctcgtaccttatcaagcgccatcaggggaagatagagggaggaataaagaagctgaaagcgggcctcgcgcattactcatccaaaccaggggaattagcgtctccg

SEQ ID NO: 1974 - DNA, 428 bp, Triticum aestivum
  unsure at all n locations
  Clone ID: LIB103-048-Q1-E2-D9
ccgggtcgacggggaagaagaccaaggcggagaagcgggcgccggcgtccaaggaggccggcggcgaggggaagcagcggggcaggaagaagggcagcaaggccaagaagggcgtggagacgtacaagatctacatcttcaaggtgctcaagcaggtgcaccccgacgtgggcatctcctccaaggccatgtccatcatgaactccttcatcaacgacatcttcgagaagctcgccggcgagtccgccaagctggcgaggtacaacaagaagcccaccatcacgtcccgggagatccagacctccgtccgcctcgtcctccccggcgagctcgccaagcacgccgtctccgagggcaccaaggccgtcnacaagttcacctcatcctaggcttcaccgtcgtcgttttaacgaatcgatgatgatgtt

SEQ ID NO: 1975 - DNA, 416 bp, Triticum aestivum
  Clone ID: LIB103-048-Q1-E2-E12
atgcccgggtcgacggggcacgtggtccacgaaccatttcccaaaatttccccactcgcgaaccctaacttcgaccagcctctcgccccagatcccctccccctactctcaccaggagcagaacccacccgctcggaccgctccgcgtaatcgccatgtggggcggacgaggaacccgttgatcccaagaagtatcttgaggagcggtgcaagccacagtgtgtaaaaccactgtatgagtatgagaaatgtatcaagagagtcgaggccgatgatactgggcacaagcactgcactgggcaatattttgactactggtcatgcatcgataaatgtgtagcaccaaagctctttgaaaagctgaaatgatattggggcgctactttcagtgagtgagcctggtcattggccagaac

SEQ ID NO: 1976 - DNA, 435 bp, Triticum aestivum
  Clone ID: LIB103-048-Q1-E2-E5
attcccgggtcgacgggcagccgggcctcctccagttcggctccagcacctccgagattcttgagactgcattcaagaaggaaactgtcggcctagttacgagggagcagtatgttgagaagagggttaacatacgaactaagattgaggaggaagagaaagagaagcttcaaaaattgcaacaagaagaagaagaactgcaaatgcagaaaaggaaaaagaggagagtgaggggagatccacgcttgtcattctatgatgacattgggaacggaagtgacgaggatgagtttgagaaccaagaaactcagaagaaacaacttggaaaggatcccacagttgagacaagttttctacctgacagagatagagatgcagaggaacaagcagagcgagaacgcttgaagatgcagtggtcgcgtgagcaagaattga

SEQ ID NO: 1977 - DNA, 446 bp, Triticum aestivum
  unsure at all n locations
  Clone ID: LIB103-048-Q1-E2-E6
aattcccgggtcgacgggattatcaaaaaacgaagtcgtgtgcaacttgacaccactgacgagggatatcatatgcgtattgcatctagttagtacaaaaccatggtgcattataggtctttttgagtattgtgcgacctgttagatttgacggcatcatcctcactaaaattaaatattctccttttgctctgtatttgatttgaatgtacaatatagatagtaaagcaagtttgactagaggaattcaataagcatgggggttctacgaagattattcatacaccaacatacaaaacatgacaatcatttgatttaccaaacaaagttctaaagagaaaatgaatatatgaaatatattgcactttataatagcattacatggcatcgangagcagacacagctcatatatttacatttttgcttgcattattcatgtattgtg

SEQ ID NO: 1978 - DNA, 448 bp, Triticum aestivum
  Clone ID: LIB103-048-Q1-E2-E7
attcccgggtcgacgggcgtggacgagtaatatcatcgtctatgaagctcgacttgtggcgaagagtttttcacaagttcaaggagttgactacgatgagatcttctcatccgtagcgatgcttaagtccgtcggaatcatgttagcattagctgcatttatgaaatctggcagatggatgtcaaaacgagtttccttaccagtcttcgtaaggaaaggttgtatgtgatacaatcaaaaaggttttgtcaatcctaaggttgctaaaaggtatgctagctccagcgatccttccatggactggagtaagcatctcggagttggaatatacactttgataagatgatcaaagattttgggtttatacaaagtttatgagaaacttgtatttccaaagaagtgagtgggagcaccatagaattactgatgagtatatgttgttgacata

SEQ ID NO: 1979 - DNA, 451 bp, Triticum aestivum
  Clone ID: LIB103-048-Q1-E2-E8
cgggtcgacgggataccccccgcaagtgcggacggtgaacatgatatacgcaacccacatccccaaaagggagcggaagcatgctctcaaggacgtctatgtgttggagccagtcgccccaaagttcaacccatggtcctcctgcccgatcacttttgatcgaagggaccaccccactagcatccgtcatgatggattcgccgcattggtcctagacccaattatcgacggatttcacctcaccagagtcctaatggacggcggcagcagcctgaacctgctttatcaggatacagtgcgaaaaatgggtatcgatcctcaaggattaaacccacaaagacaacctttaaaggcgtcataccaggtgtagaagccagctgtacaggctcggttacactcgaagtggtcttcggattcccggataatttccgaagcgaagagttaatcttcg

SEQ ID NO: 1980 - DNA, 377 bp, Triticum aestivum
  Clone ID: LIB103-048-Q1-E2-F11
atgcccgggtcgacgggggagctgagggcttccaggaaccgcgtgctatcgcctgcatcttgggcggagcccaggccccagcctcgcagcgtatctaaaagcagtttgctcgtgaagtgaatgcagccctccccaagctcgaagccacacgcccgctcagatggtcccagtgccccatcacgttcaactcggcagatcagctcaagtgcgcagctaccgctggcgccctcccatgctttgctccccaatcatcagcagcgtgcaacttaccaagaccatcatcgacgtgcgaagcgagaacgacaaggccaaagccggcgtgccgcagctcccctccaacgcaaagaacaagatcatcgctctgccgctcgaagaac

SEQ ID NO: 1981 - DNA, 425 bp, Triticum aestivum
  Clone ID: LIB103-048-Q1-E2-F5
attcccgggtcgacgggcggcggcgagcgccggcggcggcgggaaggacaaggacagggacagggacagggccaggggctccgcggtctccttcacggagggcgagaaggtgctcgcctaccacggcccgctcctctacgaggccaaggttcaaaaaactgaaaatcgggaggacgagtggcggtatttcgtccattatcttggatggaataaaaattgggatgaatgggtcgcaagtgatcgtttattgaagttgactgaagagaatgttcgaaaacaactagagctgaaaaaccagtcaggggacaagaccgtcaggactggtggacggtcagcacagcataacccaaaaggctctaatgtggatgcaaaagccgataaagatgacaccaaaggtcttgtcaaggggaagaagcgcaagaatc

SEQ ID NO: 1982 - DNA, 444 bp, Triticum aestivum
  Clone ID: LIB103-048-Q1-E2-F6
attcccgggtcgacgggtcacctaacgccttgcttctagatactgaccttgtaactctagataccctacctggcgtgtatataagacaaaggttttatcctgtaggggggacatcaatgcaacatcattcaccttgccctagagtttgaccacatctcacgatctggaggtagatcaactctatactcgatacattccattaatataaacgagagaaggatgtagggttttacctccatcaagagggcccgaacctgggtataacaccgtctctttgttcttgtcaccatccggctgagatccatagcacggtcagccccctgcgggctttcatgttttgtccagtccatgcatctataacttaaaagatatggttctagtcctatgattaatcatgttagattggcactagtggcaagtatacagttttgttatcaatgatgc

SEQ ID NO: 1983 - DNA, 437 bp, Triticum aestivum
  Clone ID: LIB103-048-Q1-E2-F7
attcccgggtcgacctgtcatcgcaagttcaacatgtgggtgccatggagagcatcagcgtgacgatggcggaggacggagctttgcacgagcctgaccacgacctctccgacgtgtcgatgagcagggttttctcacagctgatcaaagccgaggggaggtgaaaacgcgccggatgatgtgtagggtaccggtagaggtgtgagcaagccttggatttttcttttcttgttgaagtttacctgagatgtgtcacgtgtaattggttgtttcatcccttgtaattgtactgaactacggtttggatttctgatggccttacctcacccacttctgggggcacacgatttatcagatataggtatcttcttgtaaaaaaaaaaaaaaaaaaaaaagaataaatgggaaaaaatgaaaaaaaaaaaagcggccgctct

SEQ ID NO: 1984 - DNA, 359 bp, Triticum aestivum
  Clone ID: LIB103-048-Q1-E2-F9
gggtcgacgggtaaaatacaaggacaaccaaaagcttaagcttggggatgccccggaaggcatcccctctttcgtcttcgtctatcggtaactttacttggggctatatttttattcaccacatgatatgtgttttgcttggagcgtcttgtatgatttgagtctttgctttttagtttatcacaatcatcctcgctgcacacaccttttgagagagacacacgtgattcggaatttgttagaatactctatgtgcttcacttatatcttttgagctatatagtttttgctctagtgattcacttatatcttttagagcaaggtggtggttttattttatagaaattattgatctctca

SEQ ID NO: 1985 - DNA, 449 bp, Triticum aestivum
  Clone ID: LIB103-048-Q1-E2-G11
atgcccgggtcgacgggtatcttaaagtgaccaggcggtggggctctgggccttcttgctatagtgctgcggtgagctgggatggcccgaaccgcttttcccccttcatctcgaatcatctccaaatcctggataaatcaaaccacaaaagaatgtatagcatggggactttggaatataccctcatgtatggcctttctcttagccgcccagattgcccatagcgtgacggatagcttgatgaacagctcatgagataatgactgcatatgtgtaaataaccattgtttcgcattgggttctgaggtggctgcgatttgctgtccaagctcttcatcaaccagcgcccatgtacacctcgacatggtgcaatctactagagagtgcttccatgagtcgggcgccccacatattccacatgcacttgagtcaaacatgtgcctgtgtga

SEQ ID NO: 1986 - DNA, 438 bp, Triticum aestivum
  Clone ID: LIB103-048-Q1-E2-G3
cgggaaccagctaatgtatgtaagacgtctgagctggagagataatttaaaaggatcatctgatgattacttgcattcgccacatattgagtcaacagactcaaaatgataatgacaaggaatgttaataagatttctatacttatgggattattcataatgaaagaaaacaagaaattccagagcaataggttgctgaggatttttggaatatcgggtggtatttcaaagacttttgtgtaacacataaacaactgggggatgagcggatattctataaatgcgagaattaaccgtaggggtattcaagtgacaagaacagcaaggcagtaagctcaagggattatcgaaaccacgacgagtttttcagggtatcttgtaataacaagaccaactggggatgatataagaataacaactgtaagtagttatccatac

SEQ ID NO: 1987 - DNA, 449 bp, Triticum aestivum
  unsure at all n locations
  Clone ID: LIB103-048-Q1-E2-G7
attcccgggtcgacgatgtcagggtgcagcgatacgtcgccgctggtgacggcaagctctgtctccatgtccgcgccgtgctccggtgcttcagcagccccagcgtcgccactccctccgatggggcgctttggcggcatcctcatacactgacggcttcgaggactgagagcggcattgaggatgcaagcagacagagaggattgtgtgtgtgtgtgtgccgaggatggggggtgcggccgcttgggcacgccattaatatggagtagtgggagagaggcgggtcgcggtcaaaccgctggctcgcctcccagtgagcctgtgcaccggactgctggcacgcctaccatcgtttcacacagctactcgcacgcctcccgatgacactgtgcagcgagcatgcctcncatcaattcacacacctgcacgcatgcctcctggtctgcctg

SEQ ID NO: 1988 - DNA, 417 bp, Triticum aestivum
  Clone ID: LIB103-048-Q1-E2-G9
gggtcgacgggataccatagtcaacggcgacggcggtagccgcgccactgctggtgctggtggtagcggcggcggtggtggtggctgcggtggtcgcgttccaccggaggccaaccgcagaactcgtgtcgccccttacccgcagccttcgcgaaggtgatggacgcgccggtgctcgtgacgtgcacgcaccgctgcgcttgtaggagagagatcagagcaagaagagagcaaccagcgtgaaaaaaaacattagcaaatcagaattgttgctcgatccccttgttggggtggttacaacttagtgtttagatcatctttgatgacaattgacgccgtcgatctgtttaattgtgttcctttggctggttggtgcttcagtcgcagccaagattggcgtggatgccccggcgctct

SEQ ID NO: 1989 - DNA, 413 bp, Triticum aestivum
  Clone ID: LIB103-048-Q1-E2-H2
aattcccgggtcgacaagaaaaaatccagcgagaacatcaaggtcatctacgcccgcgccaagcagtacgccgaggagtacgatgcccaggacaaggagttggttcagcttaagcgtgaggcccggatgaagggtgggttttatgtcagtcctgaggccaagctgctgtttgttgtcagaatcagaggtatcaatgccatgcacccaaagaccaagaagatcttgcagctgttgcgtttgaggcagatattcaatggagtgttcctgaaggttaacaaggccaccatcaacatgctccgcagggtcgagccatatgttgcatatgggtacccgaacctgaagagtgtgagggagttgatctacaagagaggttatggcaagctcaacaagcaaaggattcctctgaccaacaa

SEQ ID NO: 1990 - DNA, 463 bp, Triticum aestivum
  Clone ID: LIB103-048-Q1-E2-H3
gtgacggtcctaaattaccgggtcgacgggattacatcatgtagttgattactatattgtttatttggtggaagattatatgttcagatccgatatgctatttaatacacctctaatcttgagcatgattatcatttgtgggtagttactttagttcttgaggtcatgggagaaatcatgttgcaagtaatcatgtgaacttgatatgtgttcgatattttgatagtatgtatgttgtgattcccgtagtggtgtcatgtgaacatcgactacatgaaacttcaccatatttgggcctaagggaatgcattgtggagtagcaattagatgatgggttgcgagagtgacagaagcttaaacccgagtttatgcgctattccgtaagggaccgattgtatccaaaagtttaatgctatggttagaatttattcttaatacttttctcatagttgccgatgcttgc

SEQ ID NO: 1991 - DNA, 469 bp, Triticum aestivum
  Clone ID: LIB103-048-Q1-E2-H5
ggtaccagtccagaattcccgggtcgacaaaactgagaaagctgaagctgtacagccatcatcaggtgaacaagttgagactgtcaagaaaacatgccaagctgaacctgtaaagcaatcatcaggtgcacaagttgagactgtccagcaagcatgccaacctgaagctgacgctgttaagaaagcagaaaaattgctgctgagctaactgggccatctgacccaattgcaacagctgatgtagctgagcaaacaatggaaaatcaagctccaaaagatgcagttgaaattccttgtgatgtgaagctggaggatgaagcattgactgaagaatctgtagatcaagttgtaactgagcaagtcaaagttccatcagatgctgtacctgacacttcaaaagttcaaccagaaacaccagtcgaacacgtgggaacagaagcagaagcggacactgctcaagacctaactg

SEQ ID NO: 1992 - DNA, 467 bp, Triticum aestivum
  Clone ID: LIB103-048-Q1-E2-H7
gtaccagtccagaattcccgggtcgacgggttctcttgattacaagaatttgatttacatatcattgatagaaaaggagctgagaaccccgtagctgataatttatctaggcttgaaaatgtgcctgatgacccactacctattgatgatagttttcctgatgagcagttagctgcaataaatgttgctcatagtactccttggtatgctaactatgctaattacattgttgctaaacatttaccacctagctttacataccaacaaaagaaaaaattcttctataatttaagacattacttttgggatgacccacatctttataaagaaggaatagatggtattatttgacgttgtgtacttgagcatgaacagggacaaatcctacggaaatttcactccgaagcttatggagggcatcatgctggagatagaactgttcacaaggtattgcaatctggatttta

SEQ ID NO: 1993 - DNA, 343 bp, Triticum aestivum
  Clone ID: LIB103-049-Q1-E1-A1
gggtcgacggggaagaagacatatgtgcaacagctagaaagcagcaagctgaagcttgcacaactagagcaggagctccagaaagctcgccagcagggaatcttcatttctagctccggagaccaaacccatgccatgagtggaaatggagcaatgactttcgatctagaatacactagatggcttgaggaccaaaacaagcaaatcaacgagttgaggactgccgttaatgctcatgcaagtggcagtgacctgcgccttatcgtagatgggataatggcacattatgatgaaatatttaaggtcaaaggtgtcgctgccaaggctgatgtgttccatatac

SEQ ID NO: 1994 - DNA, 374 bp, Triticum aestivum
  Clone ID: LIB103-049-Q1-E1-A10
gtaccggatttacaattcgcgggtcgacggggcagcggacggcgttgagcgggccggcgattccggggtcgcgggcgtcggcagaggggttggtgagatgcggtggcgcgagggggtcgtcggggtggtgttggagagtgttggtggcagctatcgtgagcgcaacaagctcgagaacctccggttatctccccgtgctccggcgatgcggacgagctcgttgacaaagctggagcatacatacgaggatggaacattgtcaaaacgatgggccacggcgagggcaagcgatttggtgaaagaagaagtcgcggagggctcagcggtgaagaaaaaatgatggtgaactgcgaatggccacagatggcaacact

SEQ ID NO: 1995 - DNA, 351 bp, Triticum aestivum
  unsure at all n locations
  Clone ID: LIB103-049-Q1-E1-A11
aattcgcgggtcgacgggaggaccgggctagcccccttctgtaagaccaacccagccccagcggtaagccgctgatctgaacattttatcttcttctgtagacacccttcacctgaatctttaagaaatcatcattgtatttttcaggctgatgacaaattctggaaggtcaaatatgaccatgaggtggccaagaaggccaggaaggctaagaaagccgccaagagagccgctccccgcaagaaaggaagtangcctactgcttcagagctgctgcaactaagcgacagctccgattcagaggtaaccccccaaaaaaaaaaaaggacaacaaaaaaaaaaaccggccgc

SEQ ID NO: 1996 - DNA, 462 bp, Triticum aestivum
  Clone ID: LIB103-049-Q1-E1-B10
taccggtcaagaattcccgggtcgacgggtccaagaaagaatgtagaaatgaagttatccatccacacaatgtttatattatcagtttgtcacaatccatatgaatccaaacaccttatctttagatgataggtcgttttggttgtttttttggctgttagttcatatcttggcacgccgtgcctgggagtgttccttgtctgtaataagtccatatggaatcgttgacctggggtatggttctaacacttgcaatatctaaagagtatctctgtaaactctgcaagtctgatgcatgatcagcagataatcatagtttgtagtttacaggcaaactgcgattctaggaagtgatacgaacataaatgacgcatgcatgcgagaatcaatgctactcatgagctacacaccatttagcagcatcatgcttatcgtgctactaatgcaacctatgttttgaac

SEQ ID NO: 1997 - DNA, 460 bp, Triticum aestivum
  Clone ID: LIB103-049-Q1-E1-B12
ggtaccgatccagaattcccgggtcgacgggaaagatcataagtgctacttatgaattaagtgccaaagatggcactacttagatctatcctcgcttttatgcctagctaggggcattaaacggtagcgctagttgggaggcaacccaattttatttgtgttttttgtttttgtttctgtttagtaataaattttgtatctaccttctgcttagatgtgtttccatgttttatttagtgtttgtgccaagtagaacctataggataacctatggtgatagttaatttgattctgctgaaaaacagaaactttgtgctcacgaaaaaaattcaataaatcacagaaacatgattttgcattgattcattttgctgtagattaatagaaacattttacaggacgtcctattttggtaggatttttagagttccataagtgttcgaaagttacggattgctac

SEQ ID NO: 1998 - DNA, 376 bp, Triticum aestivum
  unsure at all n locations
  Clone ID: LIB103-049-Q1-E1-B6
attcgcgggtcgacgggcaagctcacaccaatgaggttagcaagggcaaaccactagattgggtttcaggacaaccagtcacagatgagcatggacgccttcagattataaagaatgatgacctcgaagagctccaagaactcggttctggaacttttggaactgtatatcatgggaaatggaggggctctgatgttgcaataaaaagaatcaatgacagatgttttgctgggaagccatctgagcaagaaaaaatgcggaatgacttctggaatgaagcatctaaccttgctgatctgcaccaccccaatgttgtggccttttatggcgttgttctagatgggcctgngggatccattgcaacggttacagaata

SEQ ID NO: 1999 - DNA, 393 bp, Triticum aestivum
  Clone ID: LIB103-049-Q1-E1-B8
attcgcgggtcgacgggcctcaggagattggtttagcgattgctaaggcgcaacatcgtgcacgtttgtagtcggattgtcaaagtcgtctccaccaaatcgatagttatcatctcatcgaaagatcgggacaccctcgcctctatcaagtggtatcagttttcaggttgctcggtgagaatttccagttttcctagattagatttattttcttacctattgtccaagaaaaagccacaaaaaagagttagatctattcatccttggtccaagccagtctgagcctttgcaattttcttttcattgcttgcatagttgaattatcggttgcatcgtcgtgtaagttgctggtcttagcgtctagttcctttagagtttcgagttctgttcaca

SEQ ID NO: 2000 - DNA, 444 bp, Triticum aestivum
  unsure at all n locations
  Clone ID: LIB103-049-Q1-E1-C10
gtaccggtccagaattcccgggtcgacgggccatccaatatatggtttctgtttgccgatcaaatgatgtacgtgttcccttctgctcacaagatgattctggcctgtctccaaacatcacagaaaggtaattgtgttggtaagctgatgatgcgcatgcgaggacgtgcgtattgtacaacttgatgtaccaatacattggtagggtaggacggcctttgccatgtcgggtgcgctcgcttggcaggccacaagacaataaaaagtatatttggtggtgtttgcggggtggagatcgcacgggaacaatctatttgttctattttgcccgggttctccaccctgccatggtgtctctgtccttctcctgtgttgttgattccaccgcatcatctgaagtacaccgcgatcctacatagctaatatgtgaacaagcctgngcgc

SEQ ID NO: 2001 - DNA, 462 bp, Triticum aestivum
  unsure at all n locations
  Clone ID: LIB103-049-Q1-E1-C12
aggtaccggtccagaattcccgggtcgacgcctgccctcagcttgatgccatcaagagcccggtctgcagcgaaggtgcgcagctggccttcgctcgtgtcaaagttcagtgggcgaagatggacgctgtcaagctcgcgaccgaaggaccgcccgcgggcaaggagcaccgcacgcccgagcagtattttgatgatgtcctgaagggatcccgcattgtagagggccagtgtgcaaaagacattatttttgaatgaagacgttcatgttatcccgtcctgtattatgaaacaaagctgatttgtaatataatgcttgttgtttgtttaagtttttgcctcctgtgcggccattttattaagtctgaaagttggccactcgccggcttcagcctccacgtaggtagtacggnggtgttcgggttggaacctanacactccttgaccaagagtttggtccttg

SEQ ID NO: 2002 - DNA, 412 bp, Triticum aestivum
  unsure at all n locations
  Clone ID: LIB103-049-Q1-E1-C6
gtcgacgggcgacagtgagaggcgcccacatcaacctcaaggtcaaggggcaggatggcaatgaggttttcttccgcatcaagagatccacacagctgaagaagctgatgaacgcttactgcgaccgtcagtctgtggatctcaactccattgctttcctttttgatggtcgtaggctccgtggtgagcagacccctgatgagcttgagatggaggaaggcgacgagatcgacgccatgcttcaccagaccggagggtgctttcctggcccttagaaggagcttgctgcagcctggctgttctatgtcgtatgctacctttagaactagagtaaaatgtaagaagtgaaagaacttgtgaggctatggttctgtgccatagcctganggggggtctggaggtgaaacaacat

SEQ ID NO: 2003 - DNA, 388 bp, Triticum aestivum
  Clone ID: LIB103-049-Q1-E1-C8
attcgcgggtcgacggggaggagatggtgatggccgtcagggtcgccatcgtgtgcctctcggagctgcccgccgatcggccatccagcgatgaactcgtcgcgatgcttgcccagctccacagcttctagccacctccatcatcgttctagcagaaagtttcttcagaacatcttccatcgcgccagacgacgccgaatggagctggatcggaccccggccggccatacagtcccaccatttcagcttcttgagctgaattcagtttgtccagatgggaaccagcaatgtagaggccgaacaacaagtgtggcaaaatagcttcatggcacatgctggtggttgaggttcatgtaagatgatgatggtgatgttctggccatgaatg

SEQ ID NO: 2004 - DNA, 390 bp, Triticum aestivum
  Clone ID: LIB103-049-Q1-E1-D10
ggtaccgatctagaattcccgggtcgacgggcattgggacgttcaaggagcagttgatgtggacattggagccaatccctctgctgagggtggtggtgatgatgagggtgtcgatgaccaggccgtgaaggtggttgacattgttgacaccttccgtcttcaggagcaacctgcttttgacaagaagcagtttatctctcacatgaagcgctacatcaagaacctctctgccaagcttgaaggggatgatctagatgttttcaagaagaatgttgagtctgccacaaagtatcttcttagcaagctcaaggaccttcagttctttgttggcgagagcatgcatgatgatggccgcgtggtgtccgcctactacaaagagggaccggctga

SEQ ID NO: 2005 - DNA, 292 bp, Triticum aestivum
  unsure at all n locations
  Clone ID: LIB103-049-Q1-E1-D11
ggtaccggaccagaattcncgggtcgacggggtacttcaagatgaagaatttgtgctggaggcacacaactatgagatggaaccattgcttgtaccggaagggtatgtgtttgtgctgggagacaaccgtaacaacagcttggactcccataactgggggccgctcccggtgaggaacatacttgggagatctgtgttccggtactggccaccgtctaagataaccgatacaagatactaccaacccgacgcggcactctacgcggtggggatgtcgtgacgactcgtgcct

SEQ ID NO: 2006 - DNA, 446 bp, Triticum aestivum
  Clone ID: LIB103-049-Q1-E1-D12
ggtaccgatccagaattcccgggtcgacgggggcacaaaagctggctgattttgcgttggaccgggactttgaagttagcttctcaacctatgacagagtcctggaagccctgtacactgaggagaagacgttgccagcctactccatgctctgcaagatcaagcacaaagggggcattgtagaccagaagggttgcgatgctttgatgggtagcttaaaagctggaggatactcaaagcaagctgacattttgtctaggatcttggtggagaatggatcgtcaacatccaagaggggcaagaagtctgccatgggtgcatagggaggtttctgggtttatgaaatggtcctattttcctttctgaattgaagaaacagtggtttgttttgttttattaatgcttgttgggccatctgtcagattgggattttcatcctagaagac

SEQ ID NO: 2007 - DNA, 402 bp, Triticum aestivum
  Clone ID: LIB103-049-Q1-E1-D7
gtaccggaccagaattcgccggtcgacggggaccctaaaaagaaatcctctttcccattcacgctttcacactcactcatcttgctcttgctcttccccttgccttatcccctttcccactccaaaattgctgccgccggtagctcccatcagcttgattccctgattcagtgccttgagcttgctcgtcctcacctacagccagccccgcagcttgattcatttgtgcggccatagcgtgaccttcgacggcggctggtttgtctcttgatctcctcgtacgcctcctcggtctcctcctaggctggtaaacgtcgatggagtggtaggagggcccaaggtgcagctgctcaagggaggaggcgagatcatcaatctgcacgatgttgttgctgtcaatgt

SEQ ID NO: 2008 - DNA, 390 bp, Triticum aestivum
  Clone ID: LIB103-049-Q1-E1-D9
taccgatccagaattcccgggtcgacgggaagtgcgactaggacgagtgggcgtggatcgttagttcatcggaagtagtactagttttcttcactgtacattaaataaagagttttgtttcgtacttacacaatttaaaatgattgttatggagagaacgagaaaaccactccactatatattagtcgtatacacgagagtactatatggacacagcttcattgacttagtgcacctgcctttggatttatgacaggtgggcccaaaatgtggctggctcacctgtcatacagccaaaagcaggtgcagtgaaggcaccggagcttagtccgtactacagtagtacatatataagcgggagcctcagcacttgttccctaaggttttgtc

SEQ ID NO: 2009 - DNA, 365 bp, Triticum aestivum
  Clone ID: LIB103-049-Q1-E1-E1
gggtcgacgggtcattacaaacatatactacctccttaaccaataaaccatgcatattaatggatgattagttcgcaggggcagccatgttctcgcgcctcgtctgattcatgcacacaggggactgatcacaagccaactgattccattaatttgctggctcgtcctaaatcagaaaataaaataaaaaaatagcactccaatacattgtggagttcaactcgtcgaggccagggtgccgcttctcccataatacgcagggcaccccatcgatccattttttagagcttgtgaatcatctgagcttatatatagttagctgaatgaagaagcatcatgcatatgcatgcaacgtaccggcagct

SEQ ID NO: 2010 - DNA, 395 bp, Triticum aestivum
  Clone ID: LIB103-049-Q1-E1-E11
aggtaccgatccagaattcccgggtcgaccttgaacttgatttcatgcccatggaaacgatgtagatcttatcattaaagcttctcttacattaattattcccttggtataagttcatctcatatctgggatctggccttgtcgcaatcgtggttccgaccacattttctccttgattccatttctcagacaagttgaaatacttgtcttctgttgatcgatacatctccgcaacctctattttgatattccttcgagtattgccctccggtatctcgagaatatcgaagaactgtgttgcttcccatgagtcttcatctagtattgcttctcaacgttttcaaattcccccaagttttgagttaatagtcactccagaacaccgataagtgaat

SEQ ID NO: 2011 - DNA, 411 bp, Triticum aestivum
  Clone ID: LIB103-049-Q1-E1-E5
taccggatcgagaattcgcgggtcgacgggaggaggtagccaggcgggctgggcttgtggtgggcgctaggtaagttccaggtgagtctctgctttttccctttttctttctcttttctaattctgacatttgtttctggacttagtaaaaatggctaggcactttcaaaaatcatgcaactaactgaggtcactgtttggaatatttccaacagtaaacatttcagtttgtgattatttggacatttaaaatattttataacattcaaatgcccaaatgcaaatggagtatgatttaatttagagcccaaatatgtcatgaaaaaatgcgcatcacctctggttactgtttccagcattttccaaaaatgatgaacatttttgaaagccatttggatttactgaaaatat

SEQ ID NO: 2012 - DNA, 420 bp, Triticum aestivum
  Clone ID: LIB103-049-Q1-E1-E6
ccgccggtaccggacaagaattcgcgcggtcgacgggagggcaaacggagatcgttgaaagatcttgctgctcaagaactttgtgttaagatacaacagcaggagcactgcccgattgaggatgctcgcgcagcaatgttcatttacaagaagcacaagaaaggttgggagaagaacaagaaagagcaattcaggttcaagaacaagcagaagaagcgaggtaataagaaatctgccgaagccaatgagaaggaccccaatgtcccaatagttctactgtaggaaatatagatgtaggggagctagggccaagcagtgtcgttcttaacatggatttcacgacgccaaagggtatgccgtcgtgtgggaatttcagatggaccctgtcaagaactcaagatcagcacgccaacctggaaa

SEQ ID NO: 2013 - DNA, 465 bp, Triticum aestivum
  unsure at all n locations
  Clone ID: LIB103-049-Q1-E1-E9
ggtaccggtccagaattcccgggtcgacgggactcttgatcccatatttgggttcatctagggaggcgctcaacacaacgaacaaggcaaccggacttataatccttgaacactctcacttagccatagaattctataattttaaatttcggcgaagcccctagtctttggaaggccgaatttggggcgctatccacgcctgggccggacaaagtcggctccccactctaagcggcataagtctttaaggactcgcaaaaaacctctcgaacagcgaacagctctcgcctcatcatgacggtcagttttagctttctcaaccgaggcgctcgcccagctcaaccggggcgcaatcccagttggttctcccggtgcaaccttacccgatacaacggaacgtaaggtaacanaacatgggagccgggcaaacccaactattgacccaagacatgattcagagacgat

SEQ ID NO: 2014 - DNA, 443 bp, Triticum aestivum
  Clone ID: LIB103-049-Q1-E1-F10
attcgcgggtcgacgggttcactgatatttgggttttgtttggccaacttgatctatttatcttgcaatgggaaggggttctttgtagtgggttcaatcttacggtgcttgatcctagtgacagaagggaaaccgacacgtatgtatcgttgctactaaggataaaacgatgggatctatctctacatatatagatcttgtctacatcatgtcattgttcttattgcattactccatttctccatgaacttattacattagatgcatgttgtattgtagttgaacttgaaagacaatttgttcatatgcatccttctatacaaaggatctttctagagttttctaatattgagcattcttttgttaagcgtgcttccactatatttctagctcatgagtttagatttattatgaaagaagctagtgaaacttttgcacattat

SEQ ID NO: 2015 - DNA, 452 bp, Triticum aestivum
  unsure at all n locations
  Clone ID: LIB103-049-Q1-E1-F11
gtaccgatccagaattcgcgggtcgacggggcttcggatcttcggggtcgcaaggaagaagaagagatgaagaggcaaggggagaatggaaaggacccccggtcttatttataaggacaaagggataaatgacaagcgcgagaatcgaggagccaaaaatcgaatatctgatacaggtgtcgccttggtcttcggtaattaattaataaaagaagtatttataggttttttatacagagatgatgtcatgacgatttgctgcaattttagaagatgacgtcatggcggtttaccaagctcatatggaagagacgtcatggtggtttaaaagggttaaaagaagatgttcaaggaaattttccaagtaatgaagattgacatgaacaggttcaaatcaatctggggcctaatgttggggatantactactaagtttaaaccgccaggaggggc

SEQ ID NO: 2016 - DNA, 419 bp, Triticum aestivum
  Clone ID: LIB103-049-Q1-E1-F5
attcgcgggtcgacggggcatcccatctttcgtcttcgttcatcggtaactttacttggagctatatttttattcaccacatgatacgtgttttgcttggagagtcattttattttgttagtttttgctttctgttagttagaatagtgtttttcttctttagtttcaataaaaagtcaaggatagcctttgccatgcttattttgctagttcgaatgttgctgttgaaaacagaaagtttaccgctgttgcaacattccctagaaaagtcagagcatggtctaacgttgaatctttttgcataatgagctctggtaaatttattacagtggtaattttagttcataatttttggagtcagggaagtattgatactcttgcattctttacagactgtattgttttgacagattgctgtt

SEQ ID NO: 2017 - DNA, 454 bp, Triticum aestivum
  unsure at all n locations
  Clone ID: LIB103-049-Q1-E1-F6
aattccgggtcgacgggcacggacggaggacagagcacctctcttcttccaggttcttctccttatcttcacttaatgtatgtgcatgtgctgcagctcacccatggtcttgtttgtcttgcaagttagtgagcagcttcaggaggagctcaagcacgaccaccaagaggcaccaccgcagcaacagggcgactgtggaaggcatgttgtatttctgtcagcccagtcctgactatgtctgtccgtgagtccgacatttgattgctgttgaagcagctccatgctgaagaagagaacacttgtagagcttgtaacattacttggagagcttgtaaagtactgtagagcttgtaaagcattgtatatgttatagcttgtattacgtgtcattcgtanagcttgtagtgaatctggctaatggtaattggataaaccaggtgggttctcgcttccc

SEQ ID NO: 2018 - DNA, 377 bp, Triticum aestivum
  Clone ID: LIB103-049-Q1-E1-F7
attcgcgggtcgacccgcccataccaatacgtacgtacaatggggtaggtgcggatggaggtggaggtggagatcacgagcatccatgatgctctagcgaccggagccaggcgagcggtatcgtccgcggtcgcgacgacgacccgcgcgtcgctggatccaaggacggagtcatgctgcctacaggcggcgcggcaacctccaagggtggaaaggcgacctccaagacacccccgctagcgcatgcatcacggtcctcccaggtcatgcacgacgagcaacgccgcaacgctggtgactccgagcgtccccacggaaagagccctcaccatcaatctcgagatgcgcaggccggcatgcactccaagatgatggtg

SEQ ID NO: 2019 - DNA, 396 bp, Triticum aestivum
  Clone ID: LIB103-049-Q1-E1-F9
ggtaccggtccagaattcccgggtcgacttatggatttaaccatatccccatgatgcctactgagatggtctctccaaattccgttcattctgacactgcaagctctcatcaacaagctatactgcatcaaatgccttcaccccatggaatggctcagtaccaagtgaggcaaactaatcccaataatccgcttgaaggcgaaggtagtttaagtggcaattctaggcatcggggggatggacaagtgctccgtgataaagttgcctcaattgcaactggcggtgttgcaaactaaaatggcaatgttgaaaaggataatggattcactacggttgaacccaaccaagcccggctatcccgaacaaaggatttatgccaaaattggttaacccaaa

SEQ ID NO: 2020 - DNA, 442 bp, Triticum aestivum
  unsure at all n locations
  Clone ID: LIB103-049-Q1-E1-G11
taccgatcaagaattcgcgggccgacgggttgatcaaaaacccacaattcatcggatcttgacaaacacatcgcaaaaagaattacatcgaatagatctccaagagaatcaaggagaactttgtattgagatccaaagagagagaagaagccatctagctaataactatggacccgaaggtctgaggtaaactactcacacatcataggagaggctatggtgttgatgtagaagccctccgtgatcgaatccccctccggtagatcgccgaaaaaggccccaagatgggatctcgcgggcacagaaagttgcggcggtggaaaagtggtttcgtggctcccctggatgttttcaaggtatgagagtatatataggcgaaagaagtaggtaggttgagccacgaggggccacganggcngnggcatgcctacccccatgggcg

SEQ ID NO: 2021 - DNA, 409 bp, Triticum aestivum
  Clone ID: LIB103-049-Q1-E1-G6
attcgcgggtcgacgggaggggctgcgccccctctagggtttccacccccaagggctggcggccagccctacatcccatctaggggggcgaccaaggggaggagaggggggcgccactagggtgggccttaaggcccatctggacctagggtttgccccctcccactctcccatgcgccttgggccttggtggggggcgcaccagcccacccggggctggtcccctcccacacttggcccacgcagccttctggggctggtcgccccacttggtggacccccgggaccctcccggtggtccaggtacattaccgatatcacccgaaacttttccggtgaccaaaacatgacttcccatatataaatctttacctccggaccattccggaactcctcgtgacgtccggga

SEQ ID NO: 2022 - DNA, 348 bp, Triticum aestivum
  Clone ID: LIB103-049-Q1-E1-G7
attcgcgggtcgacggggactctaagcaaaggcagggtacagggtggtgtcaagggatcctgggtgggtcacctgggttgggaggaggaggcgtgttctcatgataaaagacttgccggttcatgatgctcagatccaacagcaatgacatgcttgtcctagtaggtccccgtatatatatgtcccctgctaattccttgcgtctggtgtaactatgacattttttttggggggtttaatcattgtgtagcatgaattggtgctggactaaaaaaaaaaaaaaaaaaaaaaaaaaaaaaaaaaaaaaaaaaggtataaaagttaaacacaacaataaaaacaaaacat

SEQ ID NO: 2023 - DNA, 419 bp, Triticum aestivum
  Clone ID: LIB103-049-Q1-E1-G8
attcgcgggtcgacgggaacaggaaggtgcgagcggcgctgagggaggctgagaggaaggtgctggaggccaggaagaagaaggacgctgctccggaaaccaatgcggcttacttgggtgggtttgcgatgcccaatgacccagctgagcagctcaagcacaggggataccatatggttgcaggtgcagtggacattgggttgttccggaaggcggcattggaggatgtcaagcggttcaaggaggcgtcaatggagattggtgaagcagagggcgaggaggaggatgagaaggaagatggatactggagtgaatgagcactggggaactggtgatggcttcatttgtttgtgttctgaattgaagcttttagggtctccattttctggactttggtgtactcttgtttagtcgatgat

SEQ ID NO: 2024 - DNA, 462 bp, Triticum aestivum
  unsure at all n locations
  Clone ID: LIB103-049-Q1-E1-G9
ggtaccgatccagaattcgcgggtcgacggggctctccatggcgtccaccttcgttggcaactcgacctccatccaggagatgttccggagggtgagcgagcagttcactgccatgttcaggaggaaggctttcttgcattggtacactggtgaaggcatggacgagatggagttcaccgaggcggagagcaacatgaacgacctcgtctcggagtaccagcagtaccaggatgccactgctgacgaggagggcgagtacgaggatgaggatcaggagcctgaggaggacatgtaaggtgggatgtccatgtcgtgctttgctgggtgggggttctgggggcagagtttgatctgtntggtgctttgttataaatctgtttatcatcgcaactaccgcttgtacgccancgccattcctcctgctttcctaagctctgtatttcctatgttatggcaccttt

SEQ ID NO: 2025 - DNA, 405 bp, Triticum aestivum
  unsure at all n locations
  Clone ID: LIB103-049-Q1-E1-H1
cggtcgtaaatcncgggtcgacggggatggtcaggctggcatgaagcaaggggatctaatcatttggtatgttgagcagcagaatgcccaaggcgcatatagttctacagaagaggtgaaggaggaagtaaagtgcatcaaggccattatagagaggctgatacagagggaaggccatcttgtagtcatagatgaaggaacagcggcagcagaaggtgctacggcaagggcatcggagcacagaatcctggctgttaacccaaactacgtcattgattgattaaccagctgaggtcacacagctaactagatccatcatatgtggttgaccaatatagcagacattcaaacggaagacatcctgttgtcatgctctagaaatgatatgttgcacctgccatcccc

SEQ ID NO: 2026 - DNA, 467 bp, Triticum aestivum
  Clone ID: LIB103-049-Q1-E1-H11
aggtaccgatccagaattcccgggtcgacgggtatatacatgttatataaaaaaaatattagtaattataaaaagagttaaaaaattcataaactttttcggatttttttactttcttttgtagatgtataatttttttaacgaaatcaaaactcccattgacatttgggcgaataacaatatcgtaattacaaaaagagtaaaaaattatgaattgttttggaactgaattttagtttttttgtagttgtataaaaagttcggtgaaataaacacccccattgacttttgggattaaaaaggaaaatcataattacaaaaagattcaacatagtctgaatatttttgaaaattattccactttttcgtagctatatagaaagtttggaacaaaattcccattgatttctgggcgaaaaaacaaaatcacaattacaaaaaagttaagttttttaattttttggaaa

SEQ ID NO: 2027 - DNA, 349 bp, Triticum aestivum
  Clone ID: LIB103-049-Q1-E1-H4
ggtcgactgagcaaggtggaccgcgtgctctactccctccgtcgtcaacccgcacaactacggcttcatcccgcgaaccctcggcaacaactccgacccaatcaacttcttcgtcatcatgcaggaccccttcgtccccggatgcttcctccgcgccaaggtcatcggactcatgcccatgatcgaccagggcgatgccgacgacaagatcatcgccgtctgcgccgacgaccccgagtaccgccacttcaacgacatcaaggacctccctccccaccgcctcgccgagatcaggcgattcttcgaggactacaagaagaacgagaacaaagaggtggccgtcaacgac

SEQ ID NO: 2028 - DNA, 403 bp, Triticum aestivum
  Clone ID: LIB103-049-Q1-E1-H9
gtaccgatccagaattcccgggtcgacgggcgcttgcacaggtcaggataccaagcgagtgtttaggatcccacacagggcatttcttgacatgctcctagcacaccttgggctaatcaccggctcagtatgatcgtgttgtacatgaggacggcaagatctgtgtgaccatctttttcaacacctctacattggatcttggaggaccaatcagtatgaacgcgtcgtgtcatcattcctcctggtctacattatgcccaagacatgcaaagttgtggatcgtctgtaagctaccatttgctttcgtacgtcctatgtctgtgatatttgctactaaacctattgtgctacgtgctttccgttttcgtacattgttaggtggctccctattgtgtgcatacaa

SEQ ID NO: 2029 - DNA, 416 bp, Triticum aestivum
  unsure at all n locations
  Clone ID: LIB103-050-Q1-E1-A1
taccggtccagaattcncgggtcgacggggtgcccatgacagctgaggtgacattaccggtactggcaccggcgagcgcgacaccggccatgactacactcggcatggagaagccgggagtgaagctcaatggtaagaagtctcatactgaaatgatgcagatcatggatgaagctagtgaacttctgaagaaaggcaatgacttcctctcgctgaatgaggagaacgttaagcctttgttgagtatggatggatcagctgatgcatggtggcttgatagtggtgctagtaaccacatgactggttcacggtgcaaattcaaggagatggatgaaagcatccgtggccatgtgaagctcggagatgggtctactgctctgattaaagggaaaggttcagtcatggttgaatgcaag

SEQ ID NO: 2030 - DNA, 412 bp, Triticum aestivum
  unsure at all n locations
  Clone ID: LIB103-050-Q1-E1-A2
accggtcctaaaatcncgggtcgacgggacctcaccggcagatccctcagctatcagggaaagcagccatcagcggagattgagggtgcctctccggcgagagtgctcgtgtcgtggtggtttcccaccagcggcatgggggaggcggtgtcctctaccgctaggtctacttgctggcgacctcaccgtcaccagcccatctgtagcctacttgaatggatatggttcctgagagaccatttcttatgcatcaggtcctgaaggtggatgttgcttgtttagatatctatggttccaaattattcaaaacggttcatgttatgctggatgctattttattgagagtggcttcgaacaatatggcatgaacatatttgttttctctttggccaataatgaaatgatctttgtg

SEQ ID NO: 2031 - DNA, 417 bp, Triticum aestivum
  Clone ID: LIB103-050-Q1-E1-A4
gggtcgacggggagcgcccacaaaggattcagtcccatcgagaagaaattcataaggttgctacatgattgtaatgtcggtccatcaagaatggtccaaatactgtccctgatccacgaccgagatgggagcctgagtagcatgccctacataccagcagacgtcaaaaacctaaaggcaaagtaccgtagagagagcaggttggctgacatagaagacacaatagcctacttcgaagagaaagcaaaagcagataatgatttcttctacaggataaggttggacgatgaggaccgtgtcaggaacatgtattgggtggatggtgctgcaagaagagcctacaaacatttctgtgattgcatttcattcaatgcaacatatctcacgaatatgtacaagatgccccgtgctccattc

SEQ ID NO: 2032 - DNA, 424 bp, Triticum aestivum
  Clone ID: LIB103-050-Q1-E1-A8
taccggatccgagaattcgcgggtcgacaaggagcaacaccactgcaaagactgcggcatctgcagagttgggggcaaggacaacttctttcactgccacaagtgcggatcgtgctactcggtgaccctccgggataagcatgtctgcatcgaggactcgatgaagaacaactgcccgatctgctacgagtacctgttcgactccctgagggaggcgtcggtgctgcgatgcggccacaccatgcacttgcagtgcttccacgagatgctcaagcacgacaagttcacttgccccatgtgctccgtgtccatctttgacatggagaaattcctgagggccttagatgccgagattgaggcgaagttcttacacatgggaaagggatggatcgtgtgcaaccactgctgggacacgacccgggtg

SEQ ID NO: 2033 - DNA, 415 bp, Triticum aestivum
  Clone ID: LIB103-050-Q1-E1-A9
cgggtcgacgggctgggtgcaggaccctcatattcaagagctgcttctcaagcagacggataacgcaagagctgccgcccgagagaaagccaagatggatcaacttgagttagacgcggttactccattgtatgaaggatgcaggcccgaggatacccgcctgaaagtaacgctcatggctctggagatgaaggtaaaacacaaaatgaccgacgcatgcttcgacgagaacatgtcattctggcacgaacgtcttcccaaggggaacaagtgcccgactagtttggaggaggcgaagaaaatcgtgtgtcctctggatttaccgcacgtgaaataccatgtgtgcatgaacaattgcatcatttatcgggacgagcacacggagtctaccatatgtccggtgtgcggtgtcact

SEQ ID NO: 2034 - DNA, 435 bp, Triticum aestivum
  unsure at all n locations
  Clone ID: LIB103-050-Q1-E1-B11
taccagtcaagaattcccgggtcgacggggagtcttcgaatggttgcataattatttagctactcattgatcttcacgtatatcttgttggagtagtttgtcgtttgctctagtgcttcacttatatcttttagagcacggcagtggttttattttgtagaaattaatgaactctcatgcttaacttatattattttgatagtcttaaacagcatggtattttgaatgaaaactatcataggaagtgaattggatgctatgatcaatttgatacttgataattgttttgagatatggaggtagtgatattaaagtcatgctagttgggtgattatgaatttaaagaatgcttgtgttgaagttatcaagtcncgtagcatgcacgtattgttaaagttgtgtagaaaatttgatgcatgaagtgtacctggcctg

SEQ ID NO: 2035 - DNA, 431 bp, Triticum aestivum
  unsure at all n locations
  Clone ID: LIB103-050-Q1-E1-B12
aattcncgggtcgacggggccagaaagcaatgaaacatctaaataaacttttcccgaacaaaatttccatccagcttccacaggacgaagcattacttaccagttggaagcaacaattggatcgtgatgttgaaacccttaaagcaaaatctaacatcggtagcattcgtacgtttttgaatcgcagtgcgatcgaatgcagtgaccttgaagaattattcattaaagatcagtcactgactaatgaaaatgtggacaagattgtcgggtacgctgtcagttatcatcttaagcacaataaagtcgaaacctccaaggacggtgaacttattatcacgagtggaagccttaagcatggcctcgacatgctacagagcatccatagtgataacaagagctcaaaaaaatcgttaaaggatgttgccacagag

SEQ ID NO: 2036 - DNA, 433 bp, Triticum aestivum
  Clone ID: LIB103-050-Q1-E1-B4
gggtcgacggggaaaacggacagcccatggacgaggagtatgaggaggagcaggttccagattactcgagagcctattctggtggattgagaccccttgcccatgtcatgatggatgatgagaccgaggatgatgatgaagatgctgaaggggacggagagggtgacgaggaagaatatgacgtgaaccatgcttccgccgatgttgatgatgagatggacgaggatgatgatataggtgatgatggggatgatggtggtgatggagttgaggtgaatgcagatgaagatgaaggcgcgacctcatactcgtcagagtacagtgaataagagcttctgtctccggtgaccatttatgcagggtagttaattaacgccgttggtcactgatccggatagcttggcggaagtggttttgggaactgatataaaat

SEQ ID NO: 2037 - DNA, 436 bp, Triticum aestivum
  Clone ID: LIB103-050-Q1-E1-B6
gtaccggaccagaattcccgggtcgacgggactgcctgctccctcctcccgcgaccggctatgctgctgcgtagacctcaccgccccaccgtactcccatcgctgacctagccatccctctactcatccacacctgttgttattctccggggacggcagacgaaccagtaaaccctcgtactcctccacgtgggaaacaactactgagtcttccctggctccatgtcgttcccttcctaggcctcgccgtcgtccaccgccctggtgctctcggtgtggcctggtcaacatggtcaatgaacgacatccatcggaagtggactgtacgtggagaggctgacagctgggtccacagccgcacgcaaggaaatgcctccttattacgcgcaaaataatgattccctcactgtcggatgtggggttccggcaaaaccct

SEQ ID NO: 2038 - DNA, 433 bp, Triticum aestivum
  unsure at all n locations
  Clone ID: LIB103-050-Q1-E1-B8
gtaccggtccagaattcccgggtcgacgggatccccgcctcggcctcgcctataaatagagcctcccgagctcgtttctctccacacacgctctccacacacctccacaacaccgtaggaagccgtagcccggccgggtaggcctctggccgccgttctcgccccgagctcgcacgcgatccccgtccactgccccctccctctctagagccgcttgagctctactgacttgtccgacgtgtccgtggtggtccactggtgcttgctggcgctgttggagctattggactggacctacctcactggaatcaccatctccgacgagctcgttgtcgtgcactcctctccagagaaagcgccgccaccgcgccgcccaactctgcttctctcccctcnccctccgacttgattgctggggctcgctgtcagccgc

SEQ ID NO: 2039 - DNA, 430 bp, Triticum aestivum
  Clone ID: LIB103-050-Q1-E1-B9
atgcccgggtcgacggggggatatggtacgcgtgagctaccaaggaagatggcgcgggcgggcgagcagtgagcgggggtaaatggtgtgcggccgacgatggggaagagaggaggaagaagaagagactagttgaatagttctctctgaccgagatggggaataaatggatcgcaaggacttactttctacagtatccctatgcatctacgctcacttcactcattttgctctgtacctagtcacttgttgaaatctgtagaaagacaaatactccgtatttgggaacagagggaggcttttactccgtactatttgggaacagagggagtatcaccatatggagggaacagaggaagcttgaaatatgaacatgtcaatgggagggattaagccccatgcatgcatgcatgcatgcaacatgcaacac

SEQ ID NO: 2040 - DNA, 433 bp, Triticum aestivum
  Clone ID: LIB103-050-Q1-E1-C10
attcccgggtcgacgaggaggaagagcccgaggaggagctaggaactgaatatctggtgcagccgcttggccgtgctgaagacgaagagcattccagtgacttcgagccagaagaaaatggtgatggtgctgaggacgaggagattgaggatgacgatgctgaggatggtgaggatcctgtcaaggcgcaatcctcatcaaagaggaagaggtctggtggggaggatgaagatgatgacgacggtgatgatgatggtgatgatgatgagaagcctccatcaaagcgatagtcaatttgttcgtgctgatctgtgatcttctctgcttgggccaagaaggaaaataatcctcatggagaggattgttggtaaatgctgtagctttaggacatctgtggtaggtgtagcagctcaaacttgagtctacccatgtt

SEQ ID NO: 2041 - DNA, 400 bp, Triticum aestivum
  Clone ID: LIB103-050-Q1-E1-C11
gtaccagtctagaattcccgggtcgacggggttgaatgaatccattgtgagaagagcccttgtgatcatgcaccagagggacgaagtggagtacaagagggagcgccatgtgattgtccgcaaggcttgagctgaaccgaaatgatggaactaccatggaaaccctctggccatctgatgtgtgtgtataagtagtgctgacactgcagcctgtttcctgaggaaatttgttgcgtcgttgaaattgagttgtagttgtactactttaagctgtagctgtagccctaaattatcttgtgtcgaactgaagatgtaccacagtaagttcattcatgattgcaacatttgggcgttctgcagctgagcagagttaatgcctaggaaaccgaaacttgtgctt

SEQ ID NO: 2042 - DNA, 418 bp, Triticum aestivum
  unsure at all n locations
  Clone ID: LIB103-050-Q1-E1-C2
cggtccagaaatcncgggtcgacgggcggcgggccagatcgaggaggaaggaggcgaagggatcgggatcgggcagatgagaggtgcgcgaggggatctagcagggctcgtgcgaggagaagcaagaggagaggtggcgcggcgtacgggagagatgggatcgagggaaaaagtgggatcgagggagagggaggctgcggcgctggagggaagagggagggagagatcgacaggaggtctcccctggcgctagggttagagggaaggagtgcggctgggcttccaggggtttgctgggccggcctggaccaagggaggtttgggccggactgggctgcagatgggccggccagcagctctctctctctctctctctctctctctctctctcttaatttctcttttcagcanaagagat

SEQ ID NO: 2043 - DNA, 442 bp, Triticum aestivum
  Clone ID: LIB103-050-Q1-E1-C5
aattcccgggtcgacgggacaggccatgtcatcctccgccccaaagcagctagtggcagggcctacaactgctgaggacgcaccaccggttcagatgccggccgctgaagcagcggggggagacccagctgcagcacatgctcagcagaccaacctggtggaacagactgctaagcagtctgatgcttcggaaccgcctactaagcagtctgtaggtccagaaccgaccgctcatcagtctgttggtccgcaggcgtgtgaccagcataccaatgcgtcagcacttcctgctcagcaaaccaacgcgttggcacggcctcctcagcacaccgacaagttggcaccaccttcgcagaaacccgacatagcttcaacgcatggtcagcagtccgatgcctggctcctacagcccagcagtttgtcacagcagcaccgccagctc

SEQ ID NO: 2044 - DNA, 462 bp, Triticum aestivum
  Clone ID: LIB103-050-Q1-E1-C7
attcccgggtcgacggggatgttctggctggcatgaagcaaggggatctaatcatttggtatgttgagcagcagaatgcccaaggtgcatatagttctacagaagaggtgaaggaggaagtaaagtgcatcaaagccattatagagaggctgatacagagggaaggccatcttgtagtcatagacgaaggaacagcggcagcagaaggtgctgcagcaagggcatcggagcacagaatcctggctgttaacccgaactacgtcattgattgattaaccagctgaggacacagctaactagatccatcatatgtggttgaccaatagagcagacattcaaacggaagacatcctgttgtcatatgctctagaaatgatatgttgtacctgccatccccttcccaaggaagcataagatctctggaatttgtacctcaatcaaaggttaaaatgtggtaattaa

SEQ ID NO: 2045 - DNA, 443 bp, Triticum aestivum
  Clone ID: LIB103-050-Q1-E1-C8
gtaccggaccagaattcccgggtcgacggggaagaagaccaaggccgagaagcggccgccgaagtccaaggagggcggcgccgacaagaagaagaagaaggccaagaagagcgtggagacgtacaagatctacatcttcaaggtgctgaagcaggtgcacccggacatcggcatctcctccaaggccatgtccatcatgaactccttcatcaacgacatcttcgagaagctcgccggcgagtccgccaagctggcccgctacaacaagaagcccaccatcacgtccagggagatccagacctccgtccgcctcgtcctccccggcgagctcgccaagcacgccgtctccgagggcaccaaggccgtcaccaagttcacctcctcttagataatctgttctcgtatcttcttggtcgttcgatggtactctgttatactactcg

SEQ ID NO: 2046 - DNA, 418 bp, Triticum aestivum
  Clone ID: LIB103-050-Q1-E1-D1
gggtcgacggggaagtcggccgccaaggagggcggcgacaagaagggcaagaagaaggccaagaagagcgtggagacgtacaagatctacaccttcaaggtgctgaagcaggtgcaccccgacatcggcatctcctccaaggccatgtccatcatgaactccttcatcaacgacatcttcgagaagctcgccggcgaggccgccaagctggcgcggtacaacaagaagccaaccatcacgtcccgggagatccagacctccgtccgcctcgtcctccccggcgagctcgccaagcacgccgtctccgagggcaccaaggctgtcaccaagttcacctcctcttaggctgttcgtcttcctgtgtctcgtagttagctgttcgggtgtgtttgtggccgtgttatcctgtaagaatcgc

SEQ ID NO: 2047 - DNA, 366 bp, Triticum aestivum
  Clone ID: LIB103-050-Q1-E1-D10
attcccgggtcgacggggacgcggacggcaagggcaaagggaaggagaggcgcagcaaggagcagaagaaactcaagcagagaggaggaaagacagggggcaggagatttgaagtaaagagtaaactgaagagcaagagaagatgaaaatgtatgtgtatctttggaagaaattttgccagtttagttcgttttttcgtttcatggtaggtttcaccggtgaaaaaacatgccttgtgccagtgtagccttgcatagtttagtgcgaggcgattttcatgttcaaaaaaaaaaaaaaaaaaaaaaaaaaaaaaaaaaaaaaaaaaaaacaaaaagataaaaacaaaaaataaacatacaaacaaaa

SEQ ID NO: 2048 - DNA, 388 bp, Triticum aestivum
  unsure at all n locations
  Clone ID: LIB103-050-Q1-E1-D11
attcccgggtcgacgggctctcctatgctagttgattattgttcctacaagttatttgctcacaaaatccctatgcataggaagtgggttagacttaaatttgctaatcatattcttcatgatgctctctttatgttacaattcttatcttttatgtgagcatcgttgagatcatcatgcctagctaggggcattaaacgatagcgcttgttgggaggcaacccaattttattttggttccttgctttttgttcctgtttagtaataaataattcatatggcctctgcttagatgtggttttatgcttttaattagtgtttgtgccaagtagaacctttgggaagacttggggaaagtcntgttgatcatgctgtaaaaaacaaaaac

SEQ ID NO: 2049 - DNA, 181 bp, Triticum aestivum
  Clone ID: LIB103-050-Q1-E1-D12
attacaacaccctatagtgagtcgtattagttcctacaagttatttgcgcagagaatcccgatgggcaggaagttggtgagatggtatatgtgctcgtcagattctgcatgatggtcgcggtgggtgagaattcgtatcttttatgtgaacggcgttggttatgatcgtggggagttaggg

SEQ ID NO: 2050 - DNA, 398 bp, Triticum aestivum
  Clone ID: LIB103-050-Q1-E1-D2
cggtcgacaattccgggtcgacgggcgtggtcagcagcggattcgacactattcttttttctgctttcctctgcttctattctcttttttggcatcgcctctattcttttttttcttttttgcagggttggcatcgcctctattcgaaaagccggagaatagaatgggggatgttctgtaatggtttttgatatacttaagtacataatgcatgcagatgaaccggcaacggatgcacggtgaccgaacatctatattgagggcctgcataattttctcgaagtggctgagacaaacaagcagaatggttttatgtattgtccatgtactgtctgtggggcaaaaaaaaaaaaaaaaaaaaaaaaaaaaaaagcggccgctctaaaggattcaagctt

SEQ ID NO: 2051 - DNA, 456 bp, Triticum aestivum
  Clone ID: LIB103-050-Q1-E1-D7
attcccgggtcgacgggttttgcaataagtatgtgagttctttatgcctaatgttgagtccatggattatacgcactctcacccttctaccattgctagcctctctaataccgtgcacctttcaccggtatcatacacccaccatatatcttcctcaaaacagcctccatacctacctactatggcatttccatagccattccgagatatattgccatgcaactctccactgttccgtttattatgacacgctccatcattatcatattgctttgcatgatcatgtagttgacatcatatttgtggcaaagccaccgttcataattctttcatacatgtcactcatgaatcattgcacatcccggtacaccgccgaaggcattcatatagagtcatatcttgttctaagtatcgagttgtaattcctgagttgtatagaaaattaaagtgcgatga

SEQ ID NO: 2052 - DNA, 420 bp, Triticum aestivum
  Clone ID: LIB103-050-Q1-E1-D9
attcccgggtcgacgggatgaaccaatccgcaccgcagacattccgttccaaggagatctccaagagcaacgtggtggatgacatggtctcgagcaatgctatcctctacgagcctggggagcatcctgaccacgtcgtcgtgatcaagtatgtgccatacgttggagacagcaagagggccatggacgagtacacctcggagatcttcatggggggcaagagcaccatcgtgctgcacaacacctgcgaggactcgctcctcgccgcacccatcatccttgacctggtgctcctggccgagctcagcaccaggattcagctgaaagccgagggagaggacaagttccactccttccatccggttgccaccatcctgagctacctcaccaagggcaccctggttcctcctggcacaccgg

SEQ ID NO: 2053 - DNA, 448 bp, Triticum aestivum
  Clone ID: LIB103-050-Q1-E1-E10
gtaccgagtccagaattcccgggtcgactcgactgcggagtgcgagagattggcttttttagacgcctattccgggtatcatcaaatccgtctgtatggacctgacgaaatcaaaacagctttcatcagtccattcgggtgcttctgctatatcaccatgccattcggtctcaagaatgccggagccacgttcatgagaatgattcaaaagtgtttactcactcaaatcagtcggaatgtggaagcatacatggatgatatcgtggtcaagtcacgaaagggttccgacctgttgactgacctagctgaaacatttgccaatctcaggagatatgatattaagctcaatccatcaaagtgcacattcggagtgcctggcagaaagttactcgattttctcgtttcagagcgaggaatcgatgctaacccagaaaaagttagcaccata

SEQ ID NO: 2054 - DNA, 407 bp, Triticum aestivum
  Clone ID: LIB103-050-Q1-E1-E11
ggtaccgagtccagaattcccgggtcgacggggacggggagccgccggttcgaagaatggataaaggcctcgactccggcgagtgctgacggtggcagggccagaccggcggccgccggagacgtcgtcgggcggagcaactgccggctgtttgggttctccctgactgatcagaaggtgctgggaggagcaggtgagggtgatgccaaggaaggggacgcggatgatgtggtggcggagtgcgccgacccgcgggtgctcgacttgtttgggcgcggccaccctgctcccggcgctctgcatgccatcgtcgccgctcccctggggatgtgatggtgctgctcagttgcgtacgttgtagtatcggacaattggttttccgttggttgaagacggacgccatctgt

SEQ ID NO: 2055 - DNA, 413 bp, Triticum aestivum
  Clone ID: LIB103-050-Q1-E1-E12
attcccgggtcgacgggtgttcctctgtgcgtgaggagcgctctgtgattccgctaacggtgatgacgccacgtggaccgggcatcttgagtgtaaggtagccatagtgcggcaatgcgttgaaccgggcgaaggccgttcttccaagcaatgcatgatggtcgctttggaagggtgcgatgatgaagagtagttcgtcgcttctggagttgcctggagagccgaatgttacctctagtacgaaggagcccctgctgtaggcttcaacgcctgatatcaccccttcaaaggtggtgttgctttgactaattctggatgggtctatccccatcttgcggacagtgtcctcatatataagattgggactactgccaccgtccatgaggacacgggtgagacggtatccgtccaat

SEQ ID NO: 2056 - DNA, 427 bp, Triticum aestivum
  unsure at all n locations
  Clone ID: LIB103-050-Q1-E1-E2
acggtccagaaatcncgggtcgacgggggacacgccttcccatcgaaaagagcaaaccacccgcccgcccgtgccccgtaacctaggaactccgccgatccgaaccccccaaggccgcagcatccagagcttcttccccgtcgcgccctcgaagaacccacaaaggaacgagtgtgaatgttctaatgatgtcaaaagccggcaagaagtctagtagtagtaattccatgtacgaagctccccttggctacaagattgaggacgttcgccccgccggaggaatcaagaagttccagtctgctgcctactccaactgcgcccgcaagccctcctgatattcccttcgcatgcctctcgacgtagcttaggatttctttactgcaatttccctttccctttcgtgcaataattctcccttggctggctg

SEQ ID NO: 2057 - DNA, 435 bp, Triticum aestivum
  Clone ID: LIB103-050-Q1-E1-E6
gtaccggaccagaattcgcgggtcgacgggggagaggagaaaaatatttttcttaaatgaatctagtcaaaccaaaaatattgatttaacctgaatcggatgatttttggaggctctatgggtctatatttataggtggaaaagaggtttaggggtcaaaggctaggcaatgtgagactaaacgtagacgaaatagaaaagaaacagaggaggcgggtcgcatgggcctaaacgcgtaaggcggttcggccggccgcgcagctgcagtttttttttaaacaaaatttggcgtaaaaaaataaaaaggttggctgggcctggcccatataggaaaaaaaaatggggcgcccattggtactatgatgtgcacctgggcggcagttagtgatgggccacatgtatagttttttcaatagaaacagaaggaaaagagaa

SEQ ID NO: 2058 - DNA, 437 bp, Triticum aestivum
  Clone ID: LIB103-050-Q1-E1-E7
ggtaccgatcgagaattcccgggtcgacagcgacggctacatgcaggccatgtcataggttaattaagtggtccatccccaacccctctgcttcaactgccatcgatctcttcaaaggccccgccgctaatctcccccgccatgcggtcaaggatttgcaatccttgtacgccatcgatcccattttgtccttcccgaaggacgcattctacaacggcggcttggaatcctcaattatcaagtcatatctcatcgaccacgaccacgaggagggcacccacaaagcgtcttccaaggtgaaatagcccatctgcgacatcagagagcacaccattggtttgtgctcttctaactggaaggatcccgtccatgacaagttaggcaatatcctatcagcaaatattactttttctaagctagccaaccgcacccttttg

SEQ ID NO: 2059 - DNA, 372 bp, Triticum aestivum
  Clone ID: LIB103-050-Q1-E1-E8
aattcgcgggtcgacggggataagtaccgccaccacggcggcattgttacaaataacagatgcaaccagcgcacggtctcaccaacacatcaacagacgatctcgactcgaagtcaccatatgtcggtgtacgggcccgcagatcgctaatgaggggtcacgtacatcacctcgaatgttcaagggaccaggagacaggggacacgatgtttacccaagttccggcctacatgatggaagtaaaactctacttccagcctaattgatatcgctgcaaaagagtcacacaagtactgatcaatgatcgatcatcttaaaggctaatccctagaagtccacccggtatgactatgataacctcaatggactaaa

SEQ ID NO: 2060 - DNA, 424 bp, Triticum aestivum
  Clone ID: LIB103-050-Q1-E1-E9
taccgagtccagaattcccgggtcgacggggaagagtatcgtcagcacgacggcgtggtgacgatcttgatgaactacagcagcagggcttcgcctaaactccgctacagtattatcgaggaatatggtggcagggggcaccgcacacggctaaggaatcgatcacgtggatcaacttgtgtcaacttgtgtgtttagaggtgctccagcctccgtatataaaggaggagaggaggggaggctggccggccaaagagggaggcgcaggagagtcctactccctctgggagtaggattcctccccccaatcctagtccaactaggattcctcggaggggaagggagagaggggggccggccaccttctcctagtcctaataggactaggggaggggaaagaggcgcagccaccttgggctgcccc

SEQ ID NO: 2061 - DNA, 461 bp, Triticum aestivum
  Clone ID: LIB103-050-Q1-E1-F5
gtaccggacaagaattcgcgggtcgacttccaccaaaacgatatccatcatctcatcgaaagacgggacacctttgcctctatcaagtggtatcagatttccaggttgctcggtgagattttacagtatttttttcgtaatttagatcgagtctgttcttcatacttatagtccacgaaaaagccaaaaaaaattagggttagttcatcccatccgaaccaatctgagcctttgcataatcttttctgtatttgttttgttaaatttgcggttgcatcgtcgtgtcaagttgctggtcttagcgtctagtcttttagagtttcgagttctgttcacaggttgtcacgtcgccgctgccatatatcaccaccgcatcatcatcgtcgctgttgccatataccaccaccacatattcaccgccaatccgaatccatatacgccaacacatatccgccggcatc

SEQ ID NO: 2062 - DNA, 424 bp, Triticum aestivum
  Clone ID: LIB103-050-Q1-E1-F6
taccggaccagaattcccgggtcgacgggcagatacagagtatgaagctaatggggcctgatgggtacgacaagagcgtgtcggacgacacgagtacgagtgaaacctctagcatctccctcggtcagatcctgaacaggaggcaggcaatcttgacttatagcagtgatacaagtgctaacaacaaattctcaggaaagaggaagaagtttgccttcactgggctttcagttttcctggctaagcaggctaagagcaagaagaagagagggtcagatgagaactgatgttagctctgccagaacactagctagttactgagtgttttgaccccctatttccatgtctgtgttcatgtacaatgttcctaggaggagtatatgtttctaggtctaatgaggttctgatatttatgtagctccat

SEQ ID NO: 2063 - DNA, 441 bp, Triticum aestivum
  Clone ID: LIB103-050-Q1-E1-F7
gtaccggaccagaattcccgggtcgacgggtacgctaatgaaaatgtgaacaagcttttggtggggaacaagtgcgatctagctgagagcagagtggtttcttacgaggctggcaaggcccttgccgatgagattggaataccattcctggaaaccagtgccaaggatgcaacaaatgtggaaaaggcatttatgaccatggccgcagagataaagaacaggatggcaagccagccggctggaaatgccagcaagcctgccaccgtgcaaatgcggggtcagcctgttgctcagcagaacggatgctgctcgtcttgatcaacactcaaagatcacagtagtgttcttgcaaaactcaattggttgttcttcccctgtaaattaagtgtactactatcatgccgtctgttggaagaagtgtcatgtcccctaactacaaca

SEQ ID NO: 2064 - DNA, 386 bp, Triticum aestivum
  Clone ID: LIB103-050-Q1-E1-F9
attcccgggtcgacgggatggtatatcgctagccctttcagagaccgcaaaacataaatgcaaagcacctctgaagatcaaggactgactaaacattgtaattcatggtaaaagagatccagtcatacccaatataaattaatagtaatggatgcaaatgacggcggtgctctctaactggtgatttttaataagagggtgatgactcaacataaaagtaaatagataggcccttcgcagagggaagcagcgatttgtagaggtgccagagctcaattttaaagcagagataaataatattttgagcggcatactttcattgtcaacataacaaccgagagatctcgatatcttccatgctacacacattataggcggttcccaag

SEQ ID NO: 2065 - DNA, 444 bp, Triticum aestivum
  Clone ID: LIB103-050-Q1-E1-G10
gtaccggtctagaattcccgggccgacgggtcttcatatatcagtaactttacttgaggctatatttttattcaccacatgataaatgttttgcttggagcgtcttgtatgatttgagtctttgctttttagtttaccacaatcatccttgctgtacacaccttttgggagagacacgcaggaatcggaatttattagaatactctatgtgcctcacttatatcttttgagctagataattttgctctagtgcttcacttatatcattttagagcacggcggtggttttattttatagaaactattgatctctcatgcttcacttatattattttgagagtattctagaagagcatggtaatttgctttggatataaaactagtcctaatatgatgggcatccaagatgggtataataaacactttcatataaagtgcgtcgaa

SEQ ID NO: 2066 - DNA, 409 bp, Triticum aestivum
  Clone ID: LIB103-050-Q1-E1-G12
gtaccagtctagaattcccgggtcgacgggaagctttatatcgatatcagagccaggtgttccgttttcttttatctttcctctgtagctaccatgccaataaacaaggcgatcgtcaaaacatatgtgcactcacttaaagtagctatttgcgccccagattttcctgctgtaataagaacatgtctgttgaattgttttgctgctcaaaactatgatggatggtctttaaaaaaaaaaaaaaaaaaaaaaaaaaaaaaaaaaaaaaaaaaaaaaaaaaataaaaaaaaaaaaaaaaaaaaaaaaaaaaaaaaataaagaaaaaaaaaaaatataaaattaaaaaaacaaaaaaacttaacaaaaaaaaataacaatcaaaaaaaaaaaggggcccctaaaaggaata

SEQ ID NO: 2067 - DNA, 431 bp, Triticum aestivum
  Clone ID: LIB103-050-Q1-E1-G5
gtaccggaccagaattcgcgggtcgacggggaggatgacgacgaagtcgacgaggaggaagagcccgaggaggagctaggaactgaatatctggtgcagccgcttggccgtgctgaagacgaagagcattccagtgacttcgagccagaagaaaatggtgatggtgctgaggacgaggagattgaggatgacgatgctgaggatggtgaggatcctgtcaaggcgcaatcctcatcaaagaggaagaggtctggtggggaggatgaagatgatgacgacggtgatgatgatggtgatgatgatgagaagcctccatcaaagcgatagtcaatttgttcgtgctgatctgtgatcttctctgcttgggccaagaaggaaaataatcctcatggagaggattgttggtaaatgctgtagctttaggacatctg

SEQ ID NO: 2068 - DNA, 421 bp, Triticum aestivum
  Clone ID: LIB103-050-Q1-E1-G6
attcgcgggtcgacgggggtttgacaaactattcatctttgaattagacaaggaccttggtatttcatccatggagtgtataattgactctatgggtgagttaggtggaatacctcaatcgttgtcggaagagaaggcgtatatgataagggggtatctagttgaatgtggcgatagactgttgatggtgaaacggtggattcatcctattgcccgttcaacaagtgatgactttttcgagcataaccgtactgttgcacttggggtttttgaggcggatttgggcaccgatcctgctggatggagaacagtaaatgatttggatggccatgcactctttcttggccagcatagctccaagtccctgcgcgctggagaatgcagttggatacaagaggactgcatctacttcatgtgtgac

SEQ ID NO: 2069 - DNA, 432 bp, Triticum aestivum
  Clone ID: LIB103-050-Q1-E1-G9
gtaccagtctagaattcccgggtcgacgggaagataaaggccgccgagaacaccaaggtcatctacgcccgcgcggagcagtacgccggggagtatgaggcccaggacaaggagctggtgcaacttaagcgtgaggcccggatgaagggtgggttctatgtcagtcctgaggcaaagctgctgtttgtcgtccgtatccgtggtatcaatgcaatgcacccaaagaccaagaagatcttgcagcttttgcgtttgaggcagatttttaatggtgtgttccttaaggtcaacaaggccaccattaacatgctgcgtcgggttgagccatatgttgcctacgggtaccctaacctcaagagtgtcagggagctgatctacaagagaggttacggaaagctcaacaagcaaaggatccctctggccaacaacaaa

SEQ ID NO: 2070 - DNA, 402 bp, Triticum aestivum
  Clone ID: LIB103-050-Q1-E1-H1
gggtcgacgggcctcgacaaggttgtcaagcccaatgttgtgtttcttaaggagtgcgggctagatgattgtcatattgccaagctgtgtatccctgtaccgaggatgctcgccaccaacccggagcgcgtccgggcaatggtggcatgtgctgaaagattgggtgtacctcgtggcactggaatgttcaggcaagcgctacgggctgtcgcgtttctcaacgaggagaagattgccgccaaagtgaactacttgaagagtacgttcaggtggtctgatgccgaagtgagcattgctgtgcgcaagtatccgattctgctggagaagtcaaaggaatctctgaagcgcaggtccgagttcctgttctataaggtgggggtggaacccgtgtacattgctcat

SEQ ID NO: 2071 - DNA, 406 bp, Triticum aestivum
  Clone ID: LIB103-050-Q1-E1-H10
gggtcgacggggacttccaatcatatccagacgcaggagcagaacctcaggaggagacacagcagaagcagcagcacgtcgaggaaggggctactactaccgggcaggacggcgtgcaggctgcccagtgctcagccaacgacgtcggcggtgtggtccaagacgcatatgtgcagaagtacacgtttcctcccggttggggtgacgtctcgagcatccccgcgacaggctgggagtgaccgaccagatctcttttcttttcttttccgtcggggccattgctgttggtagaataagacggggatcggccttgcggagctaacttccgggggcatcctgaactcaccctcgtcggatgctaattctgaacgtctctagtgtttgttcgctgcgtcacgttgttttg

SEQ ID NO: 2072 - DNA, 401 bp, Triticum aestivum
  Clone ID: LIB103-050-Q1-E1-H11
attcccgggtcgacggggcggcgcactggagacgcagatgggtggcggggttaaagccaaggaggagtaccgctttggctcgtccaaggtttctcctgctcctgctgaagaagtggctgctgctgccgctgccaaggggaagaaatccagggcgaagaaggctgctgctcctgctcctgctgctgccgctgccaaggggaagaaatccagggcgaagaaggctgcgtcgcggatagacttggacaaggctgaagccgttgtgtataaagccgatatgaaggcgagggagtctgccagggtagccaaggccaaggccgaggaggccgaagaagctgccaggatagccaaggccaaggccgaggaggctgaagaagccgcccgggccgccaaggcggatgctg

SEQ ID NO: 2073 - DNA, 425 bp, Triticum aestivum
  Clone ID: LIB103-050-Q1-E1-H7
ttcgcgggtcgacgggaggaggttaagcgcggagttccagctcgtcttccgtctgatcaaggggctgatattcataacattcatctccatcatcataatcttaacagcaatcgcccacatgacagtccttgacatcttcgtctgcatcctcgccttcatgccgactggatggggcctgcttctgattgcccaagcgatcaagcctgtcgtcgagatggtcgggctgtgggggtcggtgaaggctctcgcccggggctacgagatcctgatggggctcctgctgttcacgcccatcgcgttccttgcgtggttcccctttgtgtccgagttccagaccaggatgcttttcaaccaggcgttcagcagaggcctgcagatctcccgtatcctcggcggccacaagaaggaccgagccacccggaaca

SEQ ID NO: 2074 - DNA, 393 bp, Triticum aestivum
  Clone ID: LIB103-050-Q1-E1-H8
gaagaagagcgtcctggctgcaggtttgcagctccaaaaacaaaaaaaaaaaaaaaaaaaaaaaaaaaaaaaaaaaaaaaaaaaaaaaaaaaaaaataaaaaaaaaaaaaaaaaaaaaaaaaaccaaaaaaaaaaaaaaaaaaaaaaaaaaaaaaggggccgcccaaaaggttcaaacctaagttacccttgaaggcaatttaaaaccccttcaaaagggtcaccaaaattaatttcacgggccgtcttttaaaaacttcttaacgggaaaaacctggggttaaccaaattaaacccctttgaaaaaaatccccctttcgcaaatgggattaaaaccaaaaaggccccaaccattagcctttccaaaaatttgccaaccctaaatggcaaatg

SEQ ID NO: 2075 - DNA, 434 bp, Triticum aestivum
  Clone ID: LIB103-050-Q1-E1-H9
gtaccggtctacaattcccgggtcgacgggggaccagatagcgagcgcagggaagggcgatggggacgaagaagccgcagctcctccgcctcgccgtcgtcgccgtcgccgtcgcggccgtccttctgaccgcttcggccaagaagtccgcggatgttacacagctccagatcggcgtcaagtacaagcctgaatcatgtaccctacaagctcacaaaggcgacaagattaaagtgcattatcatgggacactcactgatggatcagtatttgactctagctatgacagaggtgatcccttcgaattcactcttgggaatgggcaggtgataaaaggttgggaccaaggtttactaggtatgtgcgtcggcgaaaagcggaagctaaggatacccgcaaagatgggttacggggaacgaggctccccaccaaag

SEQ ID NO: 2076 - DNA, 78 bp, Triticum aestivum
  Clone ID: LIB103-051-Q1-E1-A12
gaggcccaaaaggttccaagctaagttagccttgatggcaagttcaaacccctccaatagggtcacctaaattcaatt

SEQ ID NO: 2077 - DNA, 490 bp, Triticum aestivum
  Clone ID: LIB103-051-Q1-E1-A6
taccgatccgaaattcgcgggtcgacgggtagcggcggcgggaagcaggcctcgacggcggcgcaggggttgagagtaagcaacagcgacctgtcccacttggcgaaatgccttgttactacaacgttgatgacatcctcatggaggaggagcttatttcggttgttttccaagtaactgcaaatggcgttggtatgctagatcctggcgtcgagagaaacagtgttgaaaagggtgctaaggtagaccttccattttggcttgctcatgggatgctgtctctggaacaagcggtgtcgataaatgtacctccttgcttcacccagaaaactcggaaggagatccaagctgatgcagcctgtgttgatttgagggttcggtgcccttacttttatgagctaggatgcaagattgttcctctggtgggtgacaagagcatcggccagttcttgcgctacgcgttcaccagtaggtacaaggaggtactaag

SEQ ID NO: 2078 - DNA, 465 bp, Triticum aestivum
  Clone ID: LIB103-051-Q1-E1-A8
taccgatccgaaattcgcgggtcgacgggaggccacttcccgccgactctcaggtatgctacctcttttcgatccatacccttgttcgattgccccatctgccatgtcgctgcatgtggatctttttccactccaccatctacccaatttgctatcctctgctctgctggtcacgcagatgaaaactttaatttgcgctattaaaggaaaccctacttcatgcagactaatccatgtctgggttgaataaggaaaggaagggagactgtactgtccaagagtgtacgcatcgaacccgcatctaggttgaaaaggggaaaatcaatagctaaggaacgagtctcgtgtctcttgggttaagaagggtagaaaggcatgacaacgcaatagagaatgaccaggtcgattggtttgttgtcctcacataggaaaaacgtggctaaacataacaaaattgggacataa

SEQ ID NO: 2079 - DNA, 86 bp, Triticum aestivum
  Clone ID: LIB103-051-Q1-E1-B12
ctctagagggttcaaacctgccttcgcggggaagccaagtcataactcctccaatgcggcacctggattcaaattaatgggcggcc

SEQ ID NO: 2080 - DNA, 435 bp, Triticum aestivum
  Clone ID: LIB103-051-Q1-E1-B6
ttcgcgggtccacgggggtgaggacagtgacgagggcgatgagtactagagcctgcctcctggtgctttcccaaggcatgctgctgcaatcctatgatctgcccgagtggctttatctgttatctgtctgtttgaacatttgctttgtggtgtttgttttacaacctgttgtgttgtaagaaccctgtatgtttgaacctgttatgcaccttggttaatatgcatgctaaaaaaaaaaaaaaaaaaaaaaaaaaaaaaaaaaaaaaaaaaaaaaaaaaaaaaaaaaaaaaaaaaaaaaaaaggaaaaaaaaaaaaaaaaaaaaaaaaaaaaaagcggccgcccaaaaggttccaagcttacttacccttgaatgcaacttcaaaccccttcaaaagtgtcaccaaaattcaattcacgggccttcgttttaaaac

SEQ ID NO: 2081 - DNA, 423 bp, Triticum aestivum
  Clone ID: LIB103-051-Q1-E1-C12
gtcgacgggccccggaagacatcgaatctttcatcaacaagtatcggaaggtttccggatcctttccgtccgtgcaaaaggtgaaatccttggaccgcctttggcattaagtttcaattttcctttaaggcacaatgagggtatgaaaaagtccctgggttgagttaacagaatgctcattgcacttcacctaaatcttttgagtatggctttatacaatgcttcatgtgcttcacttatatcatttgaagtttggattgcctgtttctcttcacatagaaaatcgccatttgtaaaatgctcttaagcttcacttatatttgtgagagcgtggcatatattctgtagaaataattaaactctcttgcttcagttatatctaattagagagatgacacgaattggtcaaacacatggttagtc

SEQ ID NO: 2082 - DNA, 446 bp, Triticum aestivum
  Clone ID: LIB103-051-Q1-E1-C5
ggtccacgggtcaagctagatagggtggttatgaaaaatgcctggggttgaggtgtgtgattcccgtagcatgcacgtatggtgaaccgctttgtgatgaagttggagcacaattttatttattgattgtcttccttatgagtggcggtcggggacgagcgatggtcttttcctaccaatctatccccctaggagcatgcgcgtagtgcttggtttttgatgacttctagatttttgcaataagtatatgagttcttttgactaatgttgagtccacggattatgcgcacttccaccattgctagcatctcttgtgccgcacaacttttgccggtaccatacacccaccatgtacctttcccaaaacaagcaccatacctacctattatggcatttccatagtcattccgaagattatattggcatgcaacttttcaaccgttccg

SEQ ID NO: 2083 - DNA, 471 bp, Triticum aestivum
  unsure at all n locations
  Clone ID: LIB103-051-Q1-E1-C8
ctgcccgtacggtccgaaaattccgggtcgacgggtccagagaagctcaactcattcctcatggtacgtgcgcatcagaccacataggatgtgggtgaaacatgccttttcgttcaattgatttttctcacagccccagattatgtgttgtctttgtgttccttctctgcatgatgtcaacttgtcaagtgccacggctgcttcaacatgtgcgttgttaaaccttgtcgagggaggcggtggcgactggtggtgcgaagccgatcctccacaagggcttctccatgctgctacgctctcccgtcggtctcttcttgccttcgctcaggcaggcgccgacggggctgacacgccgttgaatcagcgacggacagcgtggcgacgcaggtgtgtgaggagtctccgtccgctacaggctacagcctcaggggacgaagcanacacatattgggagtcttcatgtgtgcagaa

SEQ ID NO: 2084 - DNA, 427 bp, Triticum aestivum
  unsure at all n locations
  Clone ID: LIB103-051-Q1-E1-D3
ggtcgcacgggctagggtttagcctctatgatctcatggtagatcaactcttgtaatacccatatcatcgagatcaatcaagcaggacgtagggtattacctccatcaagaggtcccgaacctgggtaaacatcgtgtcccctgtctcctgttaccatccgccttagaggcacagttcgggccccctacccgagatccaccggttttgacaccgacgatgagaaacgtccatctctagtactggatgacgcggtcttaataggctctccggcatggtggaggatggtcgggatggatggggtggagaacggtggcgatggatggggtggcggatggaggaggctggtgtggggatggtgttctagcacggatggtgtatgaatgggaaaatgtanggagaggtatggggaaccaagtttttgggaca

SEQ ID NO: 2085 - DNA, 482 bp, Triticum aestivum
  Clone ID: LIB103-051-Q1-E1-D5
taccagtccgaaattcccgggtccacggggaagtccgccgccaaggagggcggcgacaagaagggcaagaagaaggccaagaagagcgtggagacgtacaagatctacatcttcaaggtgctgaagcaggttcaccccgacatcggcatctcctccaaggccatgtccatcatgaactccttcatcaacgacatcttcgagaagctcgccggcgaggccgccaagctggcgcggtacaacaagaagcccaccatcacgtcccgggagatccagacctccgtccgcctcgtcctccccggcgagctcgccaagcacgccgtctccgagggcaccaaggccgtcaccaagttcacctcctcgtagagtgctcctgctcctgtgtctcgtagttagctgtccgggtgtgtttgtggccgtgtaatcgtgtaagaatcgcaccgtgatgtttctggatctcgagaaatagtaacggtgcctgcctc

SEQ ID NO: 2086 - DNA, 334 bp, Triticum aestivum
  Clone ID: LIB103-051-Q1-E1-D6
ttcccgggtccacgggtatcagcacatccggcaagttctgcagggccacaagaggccgatggtgatggcaacgtgatcagccagccagcagcctgctggatcctcttctctctggatgcctaaagtcagtatgtcaatgtaatgtaaacatccctttccccttcccctttcttcatgtagcttcggtctactccttaggagtcttggtaaagcttgtgctctgtagttgcttcagctactggtaccgtctattgtgtgtgatgtaatatattctggaccattatgccattcctttttcaatcaaaaaaaaaaaaaaaaaaaaaaaaaatataat

SEQ ID NO: 2087 - DNA, 438 bp, Triticum aestivum
  Clone ID: LIB103-051-Q1-E1-D8
taccgatccggaaattccgggtcgacgggagcaaggccatatcagataaaggcagatggagctttcggaggaggtctacaaggcaccgagttctcaagaactctgatatatccgagcctgaaactctaagttcgagcaaagcaaaagctgatgttgctccaagcaacaacgtctactcttcaacatactcttatgcctcagagaagcccctgcatctagagaagccagacgagaagattgtgcttcaagagaagccagatgagaagtccctactcgaagagaagcccgatgaaaagcagacagagaagacaactgaaaagccagtggaccagataattgaaaggtcaattgaacagccagatgaaaagataaccgagacgccgagtgaagagccagctgaaaggatatctgaaaaaccagttgaagagccagctgaaa

SEQ ID NO: 2088 - DNA, 458 bp, Triticum aestivum
  unsure at all n locations
  Clone ID: LIB103-051-Q1-E1-E2
ggtccgaaattcacgggtcgacgggatctgggatgtattccgcagccaaaatgcggtagactttgcacgcangaggcttcaagagcacaatgaccctgtcgcctgctgtaaagagttggtcgatgaggccatcaagaggaagagcggcgacaacctttccgtagttgtcgtctgcctcaactccatagcgcctcctgtcttaacagctcccaggcctcgcgtgcagagaagtatatccgcagaaggcttgagggagctgcagggcttcctcgatagcttggcggactgatatgtgtggcttgagaaccctggcaggtggcagcgctgtagtaatcccatttttccatagcctagcttggaatttaggtttagtatgtgccccatctcataacctgagatggttgttgttgagtaatgcatcactgtaacatattatgcggctaattttatctgcacct

SEQ ID NO: 2089 - DNA, 390 bp, Triticum aestivum
  Clone ID: LIB103-051-Q1-E1-E3
ggtccacggggttgctgtaattgttgctgttgctgttgctattgttgttgttgctgttgttgttgttgttgctgttgttgttgttgcagctgttgttgctgttgttgttgttgatgttgttgttgttgctgttgctgctgctgttgctgttgctgctgttgctgctgctgttgctgctgctgctgctgctgctgttggtgttggtgttgttgttgttgttgttgttgttgttgttaatgttgttgttgttcttaatgttgttgttgttgctgttgctaatgctgttgctgttgctgttgtatgatgctgttgctcttactgttgcagttgttgttgctgtagttgatgctactaattcctgtaactgttgcagttgcaattgttgttgct

SEQ ID NO: 2090 - DNA, 441 bp, Triticum aestivum
  Clone ID: LIB103-051-Q1-E1-E4
cacgggtccacgggacctttatgataagaggatctcccaggaggtatttggtgatctccttggtgaggaattcaagggttatatcttcaagatcatgggtggatgtgataagcagggcttcccaatgaagcaaggagtgctaacttctgggcgtgtccgccttctgcttcacagaggcacaccttgcttccgtggttttggcaggcgtaatggtgagcgcaggaggaagtccgtccgtggttgcattgtcagccaagacctatcagttatcaacttggtgattgtcaagaagggtgagaatgatctgccaggccttaccgacactgagaagcccaggatgaggggacccaagagggcttccaagatcaagaagctcttcaaccttggcaaggatgatgatgtccgcagctatgtcaacacataccgcaggaccttccttaa

SEQ ID NO: 2091 - DNA, 435 bp, Triticum aestivum
  Clone ID: LIB103-051-Q1-E1-E5
gggtcgacgggcgacgagccatctgggctttattatggaggtgccctactcctcctaaggtgcgtgtgttcgcgtggtgactcatcactgattcccttccaacatgggttaataagaagcgtcgtaatttggaggtatctgacgtgtgcccggtgtgtgcgtctgaacccgaggacacataccacgcgttctgcaggtccccacgagcagtaggtctctggcaggccatggcgagcgactggaggctcccggacgtccgcaagctggtgaatcctggaccggagtggctcctgcacatccttggggacagtacagagacggaacggcttcacctgcttatgactctgtggcgcagctggcatgtaaggaatgatatagttcaccataaacggcctcccaccgttgagtcatcgaagcgcttccttcatagctatg

SEQ ID NO: 2092 - DNA, 444 bp, Triticum aestivum
  Clone ID: LIB103-051-Q1-E1-E6
ttcccgggtccacggggaccaaaaaaatacttaggatttcttattgtactgattgaactcgacaaattcttgccctgcataagcaaaggaaaagaactaggcctgtcgatactggattttaccatagttctagttctaaaaaagactgtcaatttcttcttaaaaatagggctctggcagggttctgggtagtggcccaaaccgataccaatagggatgagggatatatacttatgaatttcataattgattctattccgcaattcataactacgaaagtaagaggtcggaaatctttttatccaaaggtccctaaaggacattccttttttgctcctaggattgaagaagagattatacgaaagactatcaagacttcctaattatctgacactacctacactaaagtaaggtctactgactctgtctggaattagattggat

SEQ ID NO: 2093 - DNA, 459 bp, Triticum aestivum
  unsure at all n locations
  Clone ID: LIB103-051-Q1-E1-E7
taccagtccgaaattcncgggtcgacggggtgtgacggagccctgccggagggtcctggaggtggggcagcaggccagcggtggaggagcttgggcgcgggacatggatgtctgactgcgaggccatgagaggcacatcgagaagggtgtgtctcctggcgcgtgcggggatggaaggagcggcgcgaggacggcagaggcatggtgcctcgctcctctccctggcgaagcagggaaggaggggatcgagggagagggcgctgcgagcgagagagaggaaggtgcaggtggtttggacacgggagcgagaggtgggggttcgaacgagtggtgaggaggggatcgagcgaatggagatggagatcgggcctctcatggcggcgctggtgggaggacgaagggaaggagtgggaatcgggctaggttagaattataggtacttgggccgggggagtgggc

SEQ ID NO: 2094 - DNA, 451 bp, Triticum aestivum
  Clone ID: LIB103-051-Q1-E1-E8
gggtcgacacgtggcacggcccaacagaggcccattcctgtgaaaaggccgacccatttgacttggtcaaaatttggcgggtcggcccatggaaagcctgttaacggcctgttcgcatatagcccatttacaacccgctaacccaaggcccgttatgccctatccgaattaggcccagtagcgtcatctaggccatccaatatgattccatcccattttcacttctggcccatgtatggcccatgacgtctttcggcccatatgaggccctatgtgactcttggcctgttaacggcccgtggtgaaactggcccgtaatgaatagtgtatcactttacacccattaacggcccgtggtgaaactggcccgtaatgaaccgtgtatcactttatacccattaacggcccgtaatccaattggccgtttcaagcccatgttacctttcggcct

SEQ ID NO: 2095 - DNA, 444 bp, Triticum aestivum
  Clone ID: LIB103-051-Q1-E1-F2
cacgggtccacgggatcagtggcatcgctgacttttggtgcttttgttggtgagggctccacatttgcttcagccatgacagcgccagtggcttcagtggtgttggtggtggcagccgcaagattttcaacctccacttgacgagctggagggttgcttacgatcacgttctcctcgagaactgcttcttggtgggacaggggagtagcagcttgtggtagttcttcttcatcggctgatgtagccggaatgtcttcagcagttttagcttcagacgtagagacttgaggccttggacctttgtgaagcctgcgcaacgcgggcgacgcatgtggagtttgtgttggctgggccttagagtcttcttcctcttgtgggtgatccgcccacgaagcatcctgtgctattggtgtcagtggacgaccaatgctgatgagttcacta

SEQ ID NO: 2096 - DNA, 392 bp, Triticum aestivum
  Clone ID: LIB103-051-Q1-E1-F8
gggtcgacgggcctctaatcttttgccgaactgagagtgatagtcccatggagaatggttatgctcgtcctgtcgaagggatccatgttgttgttgatatgcagaataatattgtcatagagtttgaagacaggaagtttgttcctctgcccccaccagatcatttgagaaactacactcctggagaaactagaggtggtgttgatcgaagtgatgtgaaacctcttattatcaatcagcctgagggcccaagcttccgtattaatggctattttgtggaatggcagaagtggaatttccgtattggttcaaccccaaaaaaggtttgggcaaccaacccggtgccatatgttgatggaagccttggacttaaacctatagctcaaaggctg

SEQ ID NO: 2097 - DNA, 395 bp, Triticum aestivum
  Clone ID: LIB103-051-Q1-E1-G2
ttcacgggtccacgagaactcttaggtggattacacactggaattaattcgcaacatattaccatgacaagcaaaatggtacaagagcacagtggacttcatgtacagccgcataaagctattgttggtgccaatgcctttgctcatgaaagtggaattcatcaggatgggatgcttaaatttaaaggaacttatgagataatatcgcctgatgatattggtttaacacgtgcaaatgagtttggtattgttcttgggaagctcagtggaaggcatgctgtcagaaacaaactagtggagcttggatatgaaatcaatgacaaagaatttgaggatttccttaaacgctacaaagaggtttcagagaaaaagaagcgtgtaactgatgaagacat

SEQ ID NO: 2098 - DNA, 478 bp, Triticum aestivum
  Clone ID: LIB103-051-Q1-E1-G3
gtccgaaattcacgggtccacgggttccggcctgcgccaggagtgccggacaatcacgatgagcacggcttagacctactgtcggatagtgctcgggatatcgcccctgcaggaaccccgaacctaaatccggaccagattgcatcgcccgaggatgtgtggatggaccctgccccgcaggccgcacactcatcggcggtagagccgaacataggccttacctctaaggaagcctatgactccagtcccccggactcgtatccggctataggttccagtccacgcgctcccgagcccgctgagcctggttgggctccggtaacggagtttatcgctgcggatatcttccagcactcgccccttggcgatgtgctgaactcgttaaaatctctctctttgtcaggagactcatggccgaactatgtccggctcgagtgggaagcatgcgatgaaggaaattcgttgcccaacccacaac

SEQ ID NO: 2099 - DNA, 465 bp, Triticum aestivum
  unsure at all n locations
  Clone ID: LIB103-051-Q1-E1-G8
gggtcgacattcctggaaaggagctggctattacttcagatgaggctttaagtttggaggagctaccgaaacgtgctgtgattcttggtggcggatatattgctgttgaatttgcttctatctggaaggggttgggtgctgaagtagatctattttataggaaagaacttcctctaaggggttttgatgatgagatgagaacagttgttgcaagtaaccttgaaggaaggggaatccgattgcatccagggacaaatttgaccgagttgagtaaaacagccgatggcattaaagttgtgacagataagggggatgagctcattgcagatgttgttctttttgctacaggtcgtgcgccgaactccaataggctgaacctggaagctgttggtgttgaggttgatcaaatangagccatcaaggttgatgaatactcccgtacatcagttccaagtatatgggctg

SEQ ID NO: 2100 - DNA, 400 bp, Triticum aestivum
  unsure at all n locations
  Clone ID: LIB103-051-Q1-E1-G9
gtccacggggtcaccatcctgcggtccgagaaggtcaaggacgagatcgtcctcgacggcaacgacatcgagctcgtctcccgctccgccgccctcatcaaccagaaatgccatgtcaagaacaaggatatcangaagttcttggacggcatctacgtcagcgacaagggcgccatcaaggaggagtagagagccggaaaccgtcccgcccaccagaagccgtgtttctgcctgccgtgtttgtttcatcgtgtttgtgtctgtctgtcgtcgtcgtcttcgtgattttgaactttctctagactgaattttgtagcggagttaaatttttagggatgtgccgtggaacatgctatctttattgttatcctgcatatcgtcgcccgcgcgagaaccggtg

SEQ ID NO: 2101 - DNA, 465 bp, Triticum aestivum
  Clone ID: LIB103-051-Q1-E1-H5
taccgatccgaaaattccgggtcgacgggaagtacccatcacaaactcatctccctcacatttacattatttgccatttgactctcgttttcctctcgcccacttcacccttgccgttttatttgccctttctttcccaatcttcttctctctctttcgcttgctttcttcttcctcgcttttgtttgccgttatgtcgaaaattggggagattatcgtcgagatggacaataatgataacatggaaaattccgatgctccggctgaagaagcccctatcttgcatacaataaattcgaatcggtcgtggtaacattattggtaaaggtggtattcaaaatttctttacttgtgtcggtgctttaccttccatgggtggttctattcttcatagaactagtagtcctgcagatgctatcgctatgcttgtagttgaacttgaaagacaatttatgcagtatgcat

SEQ ID NO: 2102 - DNA, 468 bp, Triticum aestivum
  Clone ID: LIB103-051-Q1-E1-H6
gggtcgacgagatgacgaagcgcaccaagaaggctggtattgtcggcaaatatggtacccgttatggtgccagtttgcgtaagcagatcaagaagatggaggtgtctcagcactccaagtacttctgtgagttctgtgggaagtttgctgtgaagaggaaagcagttggaatttggggatgcaaggactgtgggaaggtgaaggctggcggtgcttacactatgaacactgccagtgcggtcactgtcaggagcactatccgtcgtttgagggagcagactgaagcataagttgctactagtgttttgtcctagtgaatcatctgggatttcgcagtttagacgatactttggattcagttccattggctgtttagtcaaggattatctttgtacttggtgcgatgatgttctgttatgttattctcccaaccttttgttgcctgattccactctgatttactggtgg

SEQ ID NO: 2103 - DNA, 458 bp, Triticum aestivum
  unsure at all n locations
  Clone ID: LIB103-051-Q1-E1-H7
ctggcggtaccgatccgaaattcncgggtccacgggaggacgaagctacatgtaattcaccgacgagacgtaacaatgggcaggcaggcacatcaggttggagggaactcgaggcgtcaagcggcagaatcggttgtggggtgtcaggatggttggtagctgaaccctcaatgacacgcgagacccacctaaaacctccagccaatgtagatcctatgcaagattttgacctgtggctctgccgaaaacaacggcgacaacgcgtctgattggtgcaactggaggtgatatgtgccattgaaaaacaattgtggcatttccaaactttgaatgccatttgatcaaccatagaagaaaatccatcccaatcttcaaacgaatggcccaaaatcccagggtgtgataattcgcgatcctgactgacttactgcgcattgggagattcaacattgactggg

SEQ ID NO: 2104 - DNA, 466 bp, Triticum aestivum
  unsure at all n locations
  Clone ID: LIB103-052-Q1-E1-A10
tacaggtccgaaattcccggggccacggggaggctgctgatgaagtccaggctcgccggatgcggttttggctcgagcggcctccgcttgttggctgcctcgccgtccatctcaaccggcagagacgccggtgtacacgtgtgctagtgtgtgttgtgtgctgggtgtgcgtgagtgcgtccttctgtgcatgccgccgcacagtggtgaattgtgcgcgagtgcgtccttagcgcgcaagaagtttgtcctcaatgcgccctcaatttactagcatgcggggtgctaccccgagtggtttcaactttgtttccttcaccgcgtgtcagatgggcctctagtttacttattttcacccactgccacatgggccagcacaccangatacagaacacaagctgacaacgcagcatgtggattggttgaccggtcaactgaacaatatacagagctatacgctgacaca

SEQ ID NO: 2105 - DNA, 440 bp, Triticum aestivum
  Clone ID: LIB103-052-Q1-E1-A12
ttcccgggtccacgggttcatcaagaaccagaacgaggctggcgtgggcatgactgactacggcctcgacaggggcggtggccctggcctctgagtgaatgaggctttgtgttgctttgcttgttgtgaactgggctgggaggttgctgtaacttatgtgtgcctgaagctttgtgcttgcacctgcatctgatgatccgagtgacgcagaaacggtactgtaactgcatcatatgtttatggtgtggatcgcctttggggtgtactccagagacaatgttgcatgaactgtcatgggaaaagtaaaacattgcggtgtaatactacatttcccatgctgctttaagtctgtttattacttttagttcgtgtaagctgcggtgccagtgaggtgtcttgtatgttggctagatagagtgagatcgctcattgttgggctt

SEQ ID NO: 2106 - DNA, 366 bp, Triticum aestivum
  Clone ID: LIB103-052-Q1-E1-B12
tacaggtccgacattcccggggccactaagttagtcgcattcatatacgccatttgattcagtcctgggtgccaatcatatcacctgggctggaagttttgttgtacttttggtctgtagcatcagtgtcgtaaacaatgcaatgatgcatgttttggctcattgttgatttcagcttaatgcttattgtttgtactacctaaaaaaaaaaaaaaaaaaaaaaaaaaaaaaaaaaaaaaaaaaaaaaaaaaaaccaaaaaaaaaaaaaaaaaaaaaaaaaaaaaagcggccgcccaaaaggttcaaagcttacgtacccttgaatgcaacgtcataccccttcaaaagtgtcaccaaatttcattt

SEQ ID NO: 2107 - DNA, 474 bp, Triticum aestivum
  unsure at all n locations
  Clone ID: LIB103-052-Q1-E1-B8
tacaagtccgaaattcncgggtccacggggaagaagcccaaggcggagaagcggctgccggcggggaagtccgccgccaaggagggcggcgacaagaagggcaagaagaaggccaagaagagcgtggagacgtacaagatctacatcttcaaggtgctgaagcaggttcaccccgacatcggcatctcctccaaggccatgtccatcatgaactccttcatcaacgacatcttcgagaagctcgccggcgaggccgccaagctggcgcggtacaacaagaagcccaccatcacgtcccgggagatccagacctccgtccgcctcgtcctccccggcgagctcgccaagcacgccgtctccgangggcacaaggccgtcaccaagttcacctcctcgtaaagtgcccctgctcctgtgtctcgtagttagctgtccgggtgtgtttgtggccgtgtaatcgtgtaagaatcgcac

SEQ ID NO: 2108 - DNA, 440 bp, Triticum aestivum
  Clone ID: LIB103-052-Q1-E1-D10
gtacaggtccgacattcccgggtccacggggtatgaaccatagagaagttataatacagtaggtttaacacaaatatgaatttagaatgagttcattacagtacctaagtggtgatttattttcttatactaacggagcttacgagttttgtgtggttgaagttttcatgttttgggtagagattcgatggactatggaataaggagtggaaagagcctaatcttggggatgcccaaggcagccccaaggtaatattcaaggacaaccaagcaactaagcttggggatgctccggaaggcatcccctctttcgtcttcgttcatcggtaactttacttggagctatatttttattcgccacatgatatgtgttttgcttggagtgtcattttattttgttagtattttatttctgttatttatattaatgttttgcatct

SEQ ID NO: 2109 - DNA, 472 bp, Triticum aestivum
  Clone ID: LIB103-052-Q1-E1-D11
tacaggtccgaaattcccgggtccacgggactccagacactggctactatacacaggctggcaggaaaacacttgctgacaagtatgactatgtcatgcatggaaagctttacaagatttcagaggacaattccagcaaggataaaggacctactaaagtggagatctatgcatcttttggcggcctcctgatgttgctcaaaggtgatccttcaagtgctgctaacctcgagctggatcaaaagctgttcctcctcatccgaaaggtgtaaacgtgtcatctacctgataaccagcgcttgtagttcactcaaggctataccaagcctgtgatcgtttggaggctaatcgtcctacacccttatgtactcttttggcggtaatgcgactctagattggtaccatggcttctctgtagcaccagtcgcttattcctgtttccctggagcgcattatgcgtgttactaactta

SEQ ID NO: 2110 - DNA, 401 bp, Triticum aestivum
  Clone ID: LIB103-052-Q1-E1-D6
cgggcatgactccaccaacaacggcttcttcgctgtgacgtgcgcacatattcatcatcgcggccagtaactgcatggatttaattttttagacacttattctggtttgcccaaaaaggtgggttagaaagaaagccatgtgaattagttgtggcctgtgactgtgagggagtggattagcaactgaacctttgacactgttgtttggcaagaatgggaggagcgatcctttgtttcaaaaaaaaaaaaaaaaaaaaaaaaaaaaaaaaaaaaaaaaaaaaaaaaaaaaaaaaaaaaaaaggaaaaaaaaaaaaaaaaaaaaaaaaaaaaaaaccggccgctcaaaaggatccaagcttacttacgcttgaatgcaacttcaaaccccttcaaaagtgtca

SEQ ID NO: 2111 - DNA, 473 bp, Triticum aestivum
  Clone ID: LIB103-052-Q1-E1-D9
gtaaggtccgaaattcccgggtccacggggattttgcaaatgagtacactccggtttcgcggggaaagaagggaaatgagaaggagaaaagcacttccaatagcaaggtgaaggcttctaaagtaaagaaagaagaaaccggttctgatgatgaatgcaagccaaaatctcagaagagaagtccagctgcgggcaaacccaagatttccaagattaagaaaccaaaagatgaatatgatgatacaaaggaggaaaagaaaataaagaaggaagttggtatcaagaaagatgaaaagaaggctgctggggtgaagaaggagaggaaggtgtatgaattgccagggcagaaacatgatcctcctcctgaaagggatccattgaggatattttatgaatcgctctatgggcaggtgcccgatagtgaaatggctgcattttggttgatggaatggggtttgctaccgctggatgtg

SEQ ID NO: 2112 - DNA, 476 bp, Triticum aestivum
  Clone ID: LIB103-052-Q1-E1-E10
taaaggtccgagattcccgggtccacggggcgtcttacacaacattaagtagttgagacacgtgttgagcgataatttgctgaatcgtgcatggcatgctacgtcgttgtcgctggacgtgtagtttagagaaagaacccatttcatatatagaatagatagtgaaacaaactagtaggaaaaaaagaaatggcaaagaagcataccagtctaacaccagcgtcaggtatttcaccttggacgagcctatattcatacatgacccagtcggtccttgtacccttgggcgccttgccagcgtgaaacaccagggtcctcttcatcccaacagtgcgattttcatacaccacctgcctgtcctttccagtagccttccagtagccaccttcggttgaacggttagctctatgcccaacagagtactttctgccacgggtgcaaaagaagtaccactggagatccccggtcggcattga

SEQ ID NO: 2113 - DNA, 475 bp, Triticum aestivum
  Clone ID: LIB103-052-Q1-E1-E12
taaggtccgaaattcccgggtccacgggaagaagaagaaggacgcggagaacaccaaggtcatctacgcccgcgccaagcagtacgccggggagtatgaggctcaggacaaggagctggtgcaacttaagcgtgaggcccggatgaagggtgggttctatgtcagtcctgaggcaaagctgctgtttgtcgtccgtatccgtggtatcaatgctatgcacccaaagaccaagaaggtcttgcagcttttgcgtttgaggcagatttttaatggtgtgttccttaaggtcaacaaggccaccattaacatgctgcgtcgggttgagccatatgttgcttacgggtaccctaacctcaagagtgtcagggagctgatctacaagagaggttacggaaagctcaacaagcaaaggattcctctgaccaacaacaaagtcattgaggagggtttggggaagcacaacatcatctgcatc

SEQ ID NO: 2114 - DNA, 467 bp, Triticum aestivum
  unsure at all n locations
  Clone ID: LIB103-052-Q1-E1-E7
gggtccacggggcggtttgtatgcaatcatgtctgaaactggggaggttatcattgaaacgagtagtattagcaatgtgggaaatgttgatgcttttgattatcctcatgaagaacctactattttacacactaaaaagtttcggattggtagtggcaatattattggaaaaggagttattcaagatttctttacttgcgccgatgctttgcccactatgggcgggtctattcttcataaaactagtagtcttgcagatgctatatctttgctcgtggttgaacttgaaagacaatttatccacatgcatccttgcatatagaggatttttctagattttccaatattgagcattcttctgttaagcgagcagctaccatctttttagctcatgagttcagatttataataaaagaggcgaacggaatttttgcacattatanggtggatngccgacatcctcccat

SEQ ID NO: 2115 - DNA, 460 bp, Triticum aestivum
  Clone ID: LIB103-052-Q1-E1-F10
ttcccgggtccacgggaaaactttcaacagtggaagggagcattatgcgagctgttagtgagttgcaagcacttcaggatgaaagaaagaaagtggatcctcaaaaggctgaagctattgaacagttcttagtaaaattgagatctcttggatcaggggaagctgcttttacctttattcttgatgatgcttctggtaacagcttcatcgagaacccgaatgcaccttcatcagatcctttgttatctttgagattctatgagaggacatatgaacaacaagcagcactcggttttcttgctgaaccaaccaaagaatctggagactcttctcaggatgcttcaacagtggaaggaaactctggtgggccgcaaaggattccacatggttcagttggagctgttgcaggtcgccgtgctatagctcagggaaactctgatgaaattactacagcactgtg

SEQ ID NO: 2116 - DNA, 329 bp, Triticum aestivum
  Clone ID: LIB103-052-Q1-E1-F11
attcccggggccacgggaaaactttaaagactggagggtaccattgaaccacgtgtcagtgttttacggacaattgaggatcagaatcaaactgtggatacccaatctgcgaaacccatcgtgcagctcttaatattctgtaattctctataatcacgtcaagatgcgttaacgtttactcctgatgattactctgatttgaccgtcatctataatgatactgcaacttcattaaatgattagatatgtctgacattctataagttgatctagtaacaatttcaagcactaggtcgtcatccgtagccaaatcaacaatttacagattc

SEQ ID NO: 2117 - DNA, 447 bp, Triticum aestivum
  Clone ID: LIB103-052-Q1-E1-F6
ttcccgggtccacggggacctcgagctggacatggacctcgacatcggcgacgacttcctggagatgcctggctgcgactttggccggggcatggatgatttcctgcaaaccgtcgatttctgcgtgtgaattaagagaggtttaaggtttatctttaaaaaaaaaaaaaaaaaaaaaaaaaaaaaaaaaaaaaaaaaaaaaaaaaaaaaaaaaaaaaaaaaaaaaaaaaaaaaaaaaaaaaaaaaaaaagcaaaaaaaaaaaaaaaaaaaaaaaaaaaaaagggggccccccaaagggttcaaacttaatttacccttcaaggaaatttaaaacccctcaaaaggttcccccaaatttaatttaaggggcctttttttaaaaatttctaaaggggaaaaccccgggtttacccaatttaaacccctttgaaaaaaatccccttttc

SEQ ID NO: 2118 - DNA, 475 bp, Triticum aestivum
  unsure at all n locations
  Clone ID: LIB103-052-Q1-E1-F7
gggtccacgggctaccgccgacgttgaaacgaggcgagcgtcgagggaaccgtggagaacggcggggaagcaacattgcgccatctggcatcctcttgtggtgggagaacgaatactcctgtggctctggctggctctacaccctcacgaatggcacaccatactcgattgatttgttatcctctgggtgctcgaccttcgacctgtatgcccaccacctcgcctgactgttgcctcgggcgaatctgtctgctccatcgcccagaggagatacttaatgaactcggaggaccgcggcgtgactcccgccgaggagtacatgtacattgccaccctcatcgccgtcttcttcctctttcncatacaatgccacatggccctcaccgtccttgaaatctcccacccattgtcaaatcaagtaaggatatccttcaacctggctaactttgcctggtcccgccggcgatctgcctga

SEQ ID NO: 2119 - DNA, 468 bp, Triticum aestivum
  Clone ID: LIB103-052-Q1-E1-G10
tccgaaattcccgggtcgacgggggggccaggtgggttgggccgcctgctggctgggccggcctgctgcggctgggctgcacaggggaagccccaggtaagcccctcctttttttttctgttttctatttttttctgacatttgttttgatttcataaatatattaaatcatttaatttccttatgccaacttttgcaggagctagatatattattccagagctcttttataattggcataatttttggaccatatttcatatatatataaatatatttccaatgcaaatatttatcgaattaatccaaatggccaaaataaatgtccatgagctcctaaaaatattgttttgatttttatctctgtccaatattttcagagggcaacatgagcattttcttggacccttttggagaaatttttatttgggtcattttcaaaaatgattctgagggttccaccaatcc

SEQ ID NO: 2120 - DNA, 468 bp, Triticum aestivum
  Clone ID: LIB103-052-Q1-E1-G5
cgggtccacgggggcctcgggaagagttatcttttctgcttaacggcctgccaaccccaaggcctacccgctggcggactcgcagctgacgataacgatcctcgacctcgtccagcaggccgccaactacaagcagctcaagaagggcgccaacgaagcgaccaagactctcaacaggggaatatcggagttcgtggtgatggcagctgacacggagccgctcgaaatcctcctccacctcccgttgcttgcggaggacaagaatgtgccatatgtctttgtcccttcaaagcaagcccttgggcgtgcttgtggagttaccaggccggtcattgcttgttcagtgaccagcaacgagggtagccagctgaaacagcccattcagagtcttaaggatgctatcgagaagcttctcatatgatttatcaagacctttcagtgtgatgggcctctgcgacacagtttttc

SEQ ID NO: 2121 - DNA, 470 bp, Triticum aestivum
  Clone ID: LIB103-052-Q1-E1-G6
ttcccgggtccacgggccacccataaggcggttgatgcccttcttcggccgcaagaaagctattttttggtaaaaaaatcacggcgaaggtttcagcccaatcggagttacacatctccggatataaaagaaacggtgccaaggcagaatctcacagagcgtagaaacagagacagacagagagacagatccaatcttggaggggctctcgccatccagggagaaggtcaaggaagaagaggaagaagaaggggggctctctcaccctcacttccggtggcgccggaacgccgtcgggggccatcatcatcaccgcgatcttcaccaacacctctgccatcttcaccaatatctccatcaccttcgcccttctatctatagcggtccactctctcgcaacgcgctgtaccctctacttgaacatggtgctttatgcatcatactattatccaatgatgtgttgccatcct

SEQ ID NO: 2122 - DNA, 336 bp, Triticum aestivum
  Clone ID: LIB103-052-Q1-E1-H1
ttcaagggtccacgggcattctaatagaataaatcaatcagaaaaaaagaaaaaaaaaaaaaaaaaaaaaaaaaaaaaaaaaaaaaaaaaaaaaaaaaaaaaaaagaaataccaccaaaaaaaaaaaaaaaaaaaaaaaaaaaaaaggggccgcccaaaaggttcaaacttaagtaacccttgaaggaaacttaaaacccctccaaaagggcccccaaattcaattcaaggggccgtcttttaaaaagtcctaaacgggaaaaacctggggttaaccaaattaaacccccttgaaaaaaaccccctttcccaaagtgggctaaaaaccaaaaaggc

SEQ ID NO: 2123 - DNA, 454 bp, Triticum aestivum
  Clone ID: LIB103-052-Q1-E1-H11
tacaggtccgagattcccgggtccacgggcattcaaatcatgcaagttagagtccaaaacaagggaaaaagtgtttggaaaagtagatacgatggagacgtatcaactcccccaagcctaaacctttgcttgtcctcaagcaattcagttgacaaactgaaagtgataaagaaaaacatttacaaactctgtttgctctcgttgttgtaaatatgtaaagccagcattcaagttttcagcaacgattatgaaccaaccatattcacaataacacttaggtctcacatttactcatatcaatgacataatcaactagcgagcaataataataaatctcggatgacaacactttctcaaaacaatcataatatgatataacaagatggtatctcgctagccctttttgagaccgcaaaacataaatgcagaacaactccgaagataaggactgact

SEQ ID NO: 2124 - DNA, 498 bp, Triticum aestivum
  unsure at all n locations
  Clone ID: LIB103-052-Q1-E1-H5
tacaggtccgacattcncgggtccacgggggtgtagcaacacattcttcttctcttggttcttcttcttggtcatcggctgatgcagccggaatatcttcagcctctttggtttcagattcagagatgttcgcagtaggagaggcttcaggaaagacttcgcgtgaaacggattggcgctcttctccttgtagaacacttgacaaaagtgacctgtggccttggtcctttgcgaagcctgcaaaacgctggcgacgcctatggagatggagttggttgggcctcaaagtcttcatcgtcaatcaccggagtggtgacctaggtcgggggagtaactggtgtttcttcatcatgaggggattcttgagggtgatcagcccatgagtcatcctgagcaattggagtcaatggacgaccaatgctgatgaatttgttgttcgtgagaacaagccatgataccaaattgtgctcgattcgagaaaggacttcgtcatcttca

SEQ ID NO: 2125 - DNA, 429 bp, Triticum aestivum
  Clone ID: LIB103-053-Q1-E1-A9
tcccgggtcgacgggggcggcaaagagaaccggggctgaaaaggggctcctctggaggctgccggaggtcacctcaagggagctcggcaagatcggccccgccttcgggctcggcatcggctgcggcgctggcgccggagtcggcttcttcggcggtgcaggattaggttatggatttcctggactcactttaggcttcggagttggagctggctgcggtataagatttggttttggttatggcttgggcaaaggaattgctcatgatgaaaagagaagacattcaaacgttggtaaaatgttccaggaaactccaaatctgcctaaggataccattgctggtttgtttgacgagttggttgtaaacaccaaaaagcttgccaccgcaacttcaaaacagattgaaaaatggcactgagctgcaccacc

SEQ ID NO: 2126 - DNA, 436 bp, Triticum aestivum
  Clone ID: LIB103-053-Q1-E1-B12
gggtcgacgggcgccacttgctgcaagcctggcagaacacgcctccttgctgcattcaaatgcctccatgaaacccgcccatgtggaagccgataaacccactctggacacacggccgttcgtgatcgggccggcattaaacgcaacatctgccgagctcctcccgtatgtcatctatttaatctcctatttaaatgatgccaaatgccggccaagaatcacacacctccaccgctcccctatctcctccttcaccatttttttccactcttacaatggcttactaagagtagttattccgcatccaagctggttgggtggcccgccgagcccgccggatatgagatatgcaactcactgatccacctacctcccctcgcccgacggagccagttgccgccccaagccggcgcgcggttcaacaactcgccgctcc

SEQ ID NO: 2127 - DNA, 363 bp, Triticum aestivum
  Clone ID: LIB103-053-Q1-E1-B5
cggggtaaacccaatccaagcgggagccaactacgtgtcagcgcgtaagacgagcgggcgttccaaaggatccaagccttggtacacgtgcgcgagacggagtcgctctactttgctgacagagatggcgcctcgaggcgccgtagatagacaacataattgttgttgtatcgccaattttacgaaatataccgtctgctgttcatttttttctcgccttgttgcgcctttttttcaacatgttgtatgacttgacggctcgaaatagatagaactcttgatgtgggcctgtatttacttgtgagattcggtgttacccagccggattagtagagcatgttgccgtttatcggatcatttttc

SEQ ID NO: 2128 - DNA, 77 bp, Triticum aestivum
  Clone ID: LIB103-053-Q1-E1-C12
gggccctagaccgatcaggcttagatacccttgcatgcaacttcataccccttcaaaatggtcaccaaaattcaatt

SEQ ID NO: 2129 - DNA, 452 bp, Triticum aestivum
  Clone ID: LIB103-053-Q1-E1-E12
attcacgggtcgacggcaccgggttttctgttgaagttttgtgtggatggagtgtttgatcgaggaggtctcaatatgaggaaaaggaagagaggcaagagctcaagcttggggatgcccaaggaaccgcaagtaaatattcaaggagactcaagcatctaagcttgggaatgccccggaaggcatcccctctttgttgaacaagtatcggtatgttttcgtattcggttcgttcatgcgatatgtgcaagtcttggagcatcttttgcatttagttttcacttttcttttatgaaccatgctggtatgagatagtccttggttgatttatagaacgctcattacacttcacttaaatcttttgagtatggctttataaaatgcttcatgtgcttcacttatatcatttgaagtttggattgcctgtttctcttcacatagaaaacagccat

SEQ ID NO: 2130 - DNA, 430 bp, Triticum aestivum
  Clone ID: LIB103-053-Q1-E1-H9
gggtcgacggcgtcaccatattgcagtccgagaaggtcaaggatgagatcgtcctcgacggcaacgacatcgagctcgtctcccgctccgccgccctcatcaaccagaaatgccacgtcaagaacaaggatatcaggaagttcttggacggtatctacgtcagcgacaagggcgccatcaaggaggagtagagtgcgaaaaccgtcccagaagccgtgtttctgcctgccgtgtttcatcgtctttgtgtcgtggttgtgattttgaactttctctaaactgaattttgtagtggagttaattagggatgcgctatgcaacatgttatctttattatcctacatattgtcaccgtgagaattggtacgatgcttagcttcccctaaaggttgatgacttcaggtaattgaacttaaaacaagaaaaacca

SEQ ID NO: 2131 - DNA, 450 bp, Triticum aestivum
  Clone ID: LIB103-054-Q1-E1-A10
attcccgggtcgacgggctggtgtagagagaaccttgaactctcgccttcaggaagcggaagcaaaagctgctgcctcagaagaaaaggagcggtctataagtgagagactgtcacaaaatttatcccgcataactgttctggagacccagattacaattcttaggacagaacagacacagctgagccgatctcttgaaaaggagagacaaagagcatctgaaagtagacaggagtatctagcaattaaggaggaggcagcattacaagaaggacgcgcgaaacagcttgaagaagaaataaaggagcttagagctagacacaaaaaggagctgcaagatgcagcagaacacagggggctgcttgagacggaccttgaaagggaaaaagctgccagggcagaacttgagaaaacatcttcccgcgacttacctaaaattccatttccaga

SEQ ID NO: 2132 - DNA, 412 bp, Triticum aestivum
  Clone ID: LIB103-054-Q1-E1-A12
attcccgggtcgacgggactttctaaaaacaatcatgatatgatataacaagatggtatctcgctagccctttctgagaccgcaaaacataaatgcagagcacctttaaagatcaaggactgactaaacattgtaattcatggtaaaagagatccaatcatagtcatacccaatataaattaaaagtaatggatgcaaatgacagcggtgctctccagctggtgctttttaataagagggtgatgactcaacataaaagtaaatagataggcccttcgcagagggaagaagggatttgtagaggtgccagagctcgattttgaaatagagataaataatattttgagcggcatactttcattgtcaacataacaaccaagagatggcgatatcttccatgctacacacatta

SEQ ID NO: 2133 - DNA, 447 bp, Triticum aestivum
  Clone ID: LIB103-054-Q1-E1-B12
attcccgggtcgacggggggcgataaaagtaaagcagatgactacatcagaaccggtacagggaagctgggagctggaacccagcaggcctcgggtcctccttgctgcttcagggagtgtagctgctataaaattcgagagcctctgtcgtgtcttctccgagtgggcggaagtccgagctgtggccaccaagtcatcattgcactttgttgatagatcatctctccctagcgacgtcattctttacactgatgatgatgagtggtctacctggacgaagataggagacgaggttctgcacatagagctgcggaagtgggcagacatcatggtgatcgcccccttatctgcaaataccctggccaagatcgctggtgggttatgcgacaacctcctgacgtgcatagtgcgagcatgggactacaagaagccgatcttcgtcgcgcc

SEQ ID NO: 2134 - DNA, 297 bp, Triticum aestivum
  Clone ID: LIB103-054-Q1-E1-B7
ttatacgaattaaaccacatagtgtcctggacgataatgcatatatcgctggagaagcagtagatgctcgagtggatggaatcgttacataggcttctgcagggtgtgacatctcagctatgatgaccaggagatgattctattggacggtcgtttataagcttatcaattggatgcatcagtcataactcaacttacgctccttgcggcaaatggtactttccgcagttcaccttgtagcgagcaagggaggagatatagacgtacgaaatatttatgcttactaaatagctaatt

SEQ ID NO: 2135 - DNA, 435 bp, Triticum aestivum
  Clone ID: LIB103-054-Q1-E1-C10
attcccgggtcgacgggttatctgagttgacaatatgtgtaaaatagtgcacatttatctccagattcagcaattggaaggatgtccaacaaaatctcctgataatacaagagaacataaggtgcaacggagtagagtagatctcccatttataaaaagaaaaccatgtcaaactttaataacctttatagacgtgacatgtcttctctttttcaagaaaaaaagtgagcatgtctttgaggagagcaactaaaacgaagatcagggatacccggtgttaaagagagagtaaccgcacttaagaaaagctactaacagacctcaaaccatcactctggaaactgtgaatcccgtggaaactactttattttatcccaataagacagtttcaaacatgtgtagaaattattgctagtgtgtaagctggatgtcaac

SEQ ID NO: 2136 - DNA, 458 bp, Triticum aestivum
  Clone ID: LIB103-054-Q1-E1-C11
gtacaagtcaaaaattcccgggtcgacctctgcctcaaccttggccactgcatcaacctgggcacaccagagcatcgcggcaacctttcacgtcttcctcagctccggtaaaccttctaacctttcccctgcagatctgttttagggtttcacagttcttcagtattcatcgtctgcctcttgctcatatgatagatctttagatgaatccgcaaatctttactctgtgcaatgatagttgtttgacctttgcctttacttatgcatctcaaaaccatagatctacatgaacgtttttctcattggttcggtactgctcctttgaacctctaagtatttatctcttttctgaacttgcttcagatccaatgctataaggaaatcttgtgaaacctgtttctgcgtacttgtccatccgcaatgcttagattaggcggtttaaccttatagaaaatttt

SEQ ID NO: 2137 - DNA, 450 bp, Triticum aestivum
  Clone ID: LIB103-054-Q1-E1-C12
attcccgggtcgacggggtcatatatcagggcccaatgcatggtagtagctgtatcttaaatcacacatacagatctcagtgcttaaggtcggcttcaatgaaacaacccaccatgtactcctacatggcctctcatcgatacctttaccaaaacgcgttcaccacaccactctcattaccgacatgatcatttcactctagcccatcacccagatgaaccagacctgacacgactctaagcatagcaggcatagcaaggtaggaacaacacatacatatggctcaatcaactcctacacatgctagtgggtttcatctagttactgtggcaatgacaggtcatgcagaggaaatgggttcaactaccgtagcacatagcagcttgaaacgcgttgtcttaatgcagtaaaagagagcatgagcgagaacatgggattgtatcgatatga

SEQ ID NO: 2138 - DNA, 416 bp, Triticum aestivum
  Clone ID: LIB103-054-Q1-E1-C9
cccgggtcgacggggtaacctatgttgattcacactgccttccttcacaactgaaccatgggaaacaaactcaatatagttaactgtggtacgcatgaaacactaagtcttccatgcaaaaagtataaagcaagaacaacttggatataaaccaagcatttggattatacttctaacactcatgagcattttcaaattcaatcaatacattagcgtgatccatagatatttcactatgggtataaccaattatggccttaaggatcactaggacaaggacgagagtcacgcattaattgggcggattatcaggttatggatatgctaatcaatcgatatcaatgagaggattatggatttccatgcaacatatgcactacgatctatacgtgtacgatagatcacacagaaaacta

SEQ ID NO: 2139 - DNA, 433 bp, Triticum aestivum
  Clone ID: LIB103-054-Q1-E1-D10
attcccgggtcgacggggaacaggaccggctgggtggcggacggagcagggtgtggggtttcgtcgcgggttttcgcggcctcggtgtacgaatgggtgggcggatgggatggcagtggggaaccatggcttagagacgcgcttgtccgaaatgtggggtaagttacgaaagtacccccaccgatttgaggcggttctttcggttcaggggtaccacgggcatttcgcgtgtcgggatttcacaggaggtgggagttttcgcgcgcgttgtaatttcggaatagcaaggcgcgggttgagatggagggagttgtcggagcacaacgagacaaagatatatcttaaatatttcgggctaacaaggcgcggattgaagacgcgggagtttcgcagcatgatagacagagacgctagcttggattttcggcataac

SEQ ID NO: 2140 - DNA, 451 bp, Triticum aestivum
  Clone ID: LIB103-054-Q1-E1-D11
attcccgggtcgacggggttaaacactggtgcaaaaacatgggcatcaagctcgactacgcttcagtctaccaccctcaaactaatggtcaagtggaacgagcaaatggtctaatcatgagcggcatcaaacccagattagtgcggtccctcacagaatctaacacgcgcgggatagaggagctcgactccgtactctgggggctgcggaccacaccaaaccacacaaccggattcacaccattttttatggtatacggcgctgaggcagttttgcccagcgatataattcatgactcacctcgcgtgcgcatgtacgaggaaagagaagccgagttggatcggcaggacagtttggacgctttagaggaggagcgcgacgtggcaaaatcccgttccgcattctatcaacagcaggctcgaagatatcaaagcagagaagtacggggcaa

SEQ ID NO: 2141 - DNA, 448 bp, Triticum aestivum
  Clone ID: LIB103-054-Q1-E1-D12
aattcccgggtcgacgggagatgctagataattgttctgagatatggaggtgataatatcaaagtcatgcttgtagagtaattgtgaatttgagaagtgcttgagttgaagtttgcaagtcccgtagcatgcacgtatggtaaacgtcatgtaacaaatttgaaacatgaggtgttatttgattgtcctccttatgagtggcggtcggggacgagcgatggtcttttcctaccaatctatcccctaggagcatgcgcgtaatgctttggtttttgatggcttgtagatttttgcaataagtatatgagttctttatgactaatgttgagtccatggattatacgcactctcacccttccatcattgctagcctcttcggtaccgtgcattgccctttctcacattgagagttggtgcaaacttcgccggtgcatccaaaccccgtgat

SEQ ID NO: 2142 - DNA, 451 bp, Triticum aestivum
  Clone ID: LIB103-054-Q1-E1-E10
aattcccgggtcgacgggtttccggtattgtaccgggatgcttctaaaaggttccggaggatttaggagggtccggaggtccggaaaatgttccaccacgatcaatacagcagaatgggctgtaggggggtgccctagccttaatgggccaggggcaccagccccgccaaggcccatgcccatgggagaggggaaaccctaaaggggagggcctccacttgactttggaggcactcctcccccctttggccgccgccccaaccctagatgggatctaaggggccggtccccctctctcccacctataattagtggaggcgtgggagggcagccgcaccaaagttctggcacagccctccccctctcccaagtcctcctcctctcccgcggtgcttggcgaagccctgcaggattgccacgctcctccatcaccaccacgccgttgtgctgc

SEQ ID NO: 2143 - DNA, 445 bp, Triticum aestivum
  unsure at all n locations
  Clone ID: LIB103-054-Q1-E1-E11
attcccgggtcgacgggcgacggtagaggcgcccacatcaacctcaaggtcaaggggcaggatggcaatgaggttttcttccgcatcaagagatccacacagctgaagaagctgatgaacgcttactgcgaccgtcagtctgtggatctcaactccattgctttcctttttgatggtcgtaggctccgtggtgagcagacccctgatgagcttgagatggaggaaggcgacgagatcgacgccatgcttcaccagaccggagggtgctttcctggcccttagaaggagcttgctgcagcctggctgttctatgtcgtatgctacctttagaactagagtaaaatgtaagaagtgaaagaacttgtgaggctatggttctgtgccatagcctganggggggtctggaggtgaaacaacatctgagtactgttgatgtcgtgactga

SEQ ID NO: 2144 - DNA, 451 bp, Triticum aestivum
  Clone ID: LIB103-054-Q1-E1-E8
ttcccgggtccacgggtcatcaccgggagtggtcccgattattgtcacttcggggttgccggatcataacacatagtaggtgaatacagacttgtaagataggatcaagaactcacatatattcatgaaaacataataggtttagatctgaaatcatggcactcgggccctagtgacaagcattaagcatagcaaagtcatagcaacatcaatctcagaacataatggatactaaggatcaaaccctaacaaaactaacttgattacatgataaatctcatccaacccatcaacgtccagcaagcctatgatggaattactcacgcacggcggtgagcgtcatgaaattggtgatggaagatggctgatgatgacgacagcgacgaatccccctcttcggagccccgaacggactccagatcagccctcccgaaaagttttagggattgac

SEQ ID NO: 2145 - DNA, 444 bp, Triticum aestivum
  Clone ID: LIB103-054-Q1-E1-F11
attcccgggtcgacgggaacgggtgtaggatggcagacagttctctctacaattccaatggcctcaggcaggcgatgagcaggtgccccggctggaccatgctgcagagtgcgccagggttgataagttaagggatcatgttgcctaatctctctaatgatgtggcacatctggcgacttcaaaatgaccacttttttgacagcgcaaccagaggttgcagacactggtggacacgatactcctggaggcaatactctggatgatcgctggtgcaaaggcgctgaggaggcagccacaacatgcttgcccaccagatggtttttgagtagtttagctgtacagctcatttgtttcttttgttctgattttttttctttgagcttttggctgtaagtactaatacaaaatgatgtgcactttaggtacatattccacagaaaatg

SEQ ID NO: 2146 - DNA, 444 bp, Triticum aestivum
  Clone ID: LIB103-054-Q1-E1-F9
attcccgggtcgacgggggtaccgagatgatcatcggggcagagattctagaaggcgaagtcggagtcggagtggagatagatatggacgtgacaggtacagagagagggaccatcatcgtcgtagcaggagtcgtagcactagtcctgatgattacaagaggcgtggcagagacagaagtcctagtcgtagcaggagccgcagctacagtcctgatgatgacaggaagggtggcagagacagtttgtcgcccgcacgcagaagcactagtcgctcccctcgcaagacaccacctcctcgcaagacaccacctccttgcgaggggtctcctgctaagcgcaatgatgaccgttctcctgttaggcgcaatgatgaccgttctcctgttaggcgcaatgatgaccggtctccaggctctcgtagcccttcaacatgagctgaatg

SEQ ID NO: 2147 - DNA, 112 bp, Triticum aestivum
  Clone ID: LIB103-054-Q1-E1-G10
attcccgggtcgacgggatactctagagtgtcaccaaataatgctcctcggaaaatatgtccatctgacacagtatgatatcatagtatgtgggtcttgacttcgtcagtac

SEQ ID NO: 2148 - DNA, 442 bp, Triticum aestivum
  Clone ID: LIB103-054-Q1-E1-G11
tcaaaaattcccgggtcgacgggaccacgtaaacgagcatagcatagcaatataagcaacgtaatagtaactcccaaagtttggatgcagggcaataggttcctacctcatcaactacttcccaatacgcacatgttatcaatcctactcatgcaatgtttgagggtgaaactaatgcataaaaactgggtatgaaagggatatgatcaaagtgtgaacttgccttgtacagttgatgaagatgattcgcactcaacactcttcatagttctactcgtcacactccggtcaatctatcgtaagcaagcaatagtaaccacacataagcaatcactcaaaagatcagaaagaacgaagaatacgattcggaaaacaacaaaaccaagcaaataactcttgcaacatagaacaatttctaacagtaccaaaattgggtgaattt

SEQ ID NO: 2149 - DNA, 414 bp, Triticum aestivum
  Clone ID: LIB103-054-Q1-E1-G12
ccctatagtgagtcgtactagtcaaccactcgatgacctattggaatcttcggtattcctccgcattaacgaagggccgtttcccggccaggcatgtacgcactccgaatccggatgagtgtggagccaccaggggctatatattagccccactgtcaaactcctctggctaagtgaaagtgttaaagcattatagtccggttgcctagttcgatgtgctatcacctccttaaaaggaccaagacgttggattaagtgtgaatatgcatcttctgcgaacacccccgcattataggcgtgggggctgaagccgacgacttcaatctttcaggttatatacatgtatacataaacggccgcacaggaggcatcacaatactttcgggcaaaagtataaatacagccttgataaat

SEQ ID NO: 2150 - DNA, 332 bp, Triticum aestivum
  Clone ID: LIB103-054-Q1-E1-H1
gggacaagcattatggtccaaactttttttgtcttgttttgtgggagtaaaagtaggaactgtatatattaattgtccacatggcagagttgtcttgtgggatttgcctcgacatggctcgtcaataatgtaccatgattcttgtgctgtaaaaaaataagaacaaaaaaaaagaaaaaggaagatataaaaaaccggaaaaaaaaaacaagaggatgctaaatcatgaacatggtcaaaaaaaaaaaaagcggctgcccaaaaggatcaaaccttacttacgcttgcatgcaatgtcaaaccccttcaaaattgtcaccaaatttcaattc

SEQ ID NO: 2151 - DNA, 412 bp, Triticum aestivum
  Clone ID: LIB103-054-Q1-E1-H11
attcccgggtcgacgggatcatcggactcatcaactattcatatttcacggtcaagatgttcaaaggagtcattgcatcatcttacaatgaaagtcataacttcttcattgatcccattaacccgctgctcctttcatgcttcctgccgcagtgaacgggctctactccatgaggtggttatctcggtggaagatgtgctggtcacggtggatttggtggccgtggtcgattccatagaagacgtgcaccaaagggtcgtggacctcccaagggtgaaaggcgttgtttcagacgacgagacagattcaatgatgtacatctaagttagctgtatgttgatccacgatattctacattatctgttcagctgcaaacattatgctaactcaactgtgatcacgcattcagttc

SEQ ID NO: 2152 - DNA, 398 bp, Triticum aestivum
  Clone ID: LIB103-054-Q1-E1-H9
attcccgggtcgacgggttgaaataaatctgcacgcattgatatataacgaattacaagaacaaacctccgacgccccaaaaagtatccaacgggtttgcgaataccgtgctacctgtatcactgaatgttgaatcctcatcatttcgtgctttacatttctttcgcctctctgccctatgtttcggtgtgatacgtcagtggtacggtatatggctgatataggggggatgcttttataatgttgatccgtacgaccacattaaattggttcaatgtaggatctcatgtcttgaacagcctgtaacaatcaacaacatacagatgctacatactgcagtagttggccagattcagtgtcggcacctgttgatataacttaatctgtatccacggttc

SEQ ID NO: 2153 - DNA, 227 bp, Triticum aestivum
  Clone ID: LIB103-055-Q1-E1-A9
ttacatacaccctatagtgagtcgtattaagaagatatatacagagcagcgagtgggagaaaaatcatgcaggtcacgcgagcacagagtgtcaccgcctcagtgtttgctatcacagacgtcaggacgtcccccagacgggtaccgtcatcatcgggcctcaagcaccttacaaggaaaggaaacaccaacgggaacagcaccatcatctacgaagaaaacgcagt

SEQ ID NO: 2154 - DNA, 425 bp, Triticum aestivum
  Clone ID: LIB103-055-Q1-E1-B6
tgcccggccccccctagagtattttgttttttttttttcactcctcaaccccaataagggactcgtcacattatattgtgcaaacatgtctgtgtccgttctgatcataagatacaggcaaagactgtcatcaccggcaaattcagtgccagagcggcaggctaaccaatcagatgtgttcccagccaggaccgctaactggcatgtcaccagtcatcgcatcacatgcgtctcgtttcaccatatccggaggtgcgcaacctcgggaatctacgtggtggatccgtcgagcaacgggggatgatcgtcttgctgcgataaccttcccggggacgggtctagaggatgccctgcgactgctgaggcctggctcgtgcctaattcttgcatcccgggggatctactaattctatagcagccgccaa

SEQ ID NO: 2155 - DNA, 425 bp, Triticum aestivum
  Clone ID: LIB103-055-Q1-E1-C6
cccccacgagtatttttttttttcttttatgcaactgaacgacagatgattaagaaatgtgcagcacagtggacatatattacacaacattatatggtgcactacaatggttggaatttggaaataagtaccaactactgaactgaaatggacaggatattaagtacatatgaagggtggaataacagagttcttcgtgtcctacaagtagcatagcgctaatttattattacaaccaccatgcctggtaatagtagattaaagagtgctaaggtctctgccctgtgcagagagagagggagggagtgaaggggggcctggacctaaccatggtagtgacactgagaagtaatgacatctacatgagtggggtgacccaagacaacaaaaattcatctatgggtccattgtgttaatgagttaca

SEQ ID NO: 2156 - DNA, 300 bp, Triticum aestivum
  unsure at all n locations
  Clone ID: LIB103-055-Q1-E1-C9
ctccctatagtgagtcgtattaacacangcaaacatacagccgcggttgagcaagcaccattacggacccatcacgatcacacagttgctacagacagcaagataaccgacatagaagccagcaggcagcagcacctaacgacagccagagacgtgaccacaggagagaatcttggagacggcggcggcgcagacgatgccgaggggaacctggtgacggccatggtgccctccgacactgggtacgcggagagctcccccggaaggagcaggcgcacagaggtccggatctcacagccg

SEQ ID NO: 2157 - DNA, 165 bp, Triticum aestivum
  Clone ID: LIB103-055-Q1-E1-D10
ccctctctctatctctctcgctctctctctctctctatctctctctctctctctctccgtgtcgaactcctggaggaaggcggatacactaggggatgaacgggcgccagagcggtggagatcgaggttgtgctccatttagtgagggttaaattcaaggttggt

SEQ ID NO: 2158 - DNA, 332 bp, Triticum aestivum
  Clone ID: LIB103-055-Q1-E1-D3
tattacaacaccctatagtgagtcgtattatgcaagattcacggttgagatatttcagtacagtcctcaggacacagatatttactacggcgactttcaatataaagtcaatcctaagggggcgtctcaccgtgcaggtactggaacgcacagtcaaactacagtacacatgcatataacttgcaagcactacagatctggtcgaaaaactaatgcatgctttaaacaccatatctcgccagttatatacacacaccacaccagctagttgttgcactgcaatcctgcactgcacccacagtcatgacgcatcaaccgtacatcgacatcac

SEQ ID NO: 2159 - DNA, 463 bp, Triticum aestivum
  Clone ID: LIB103-055-Q1-E1-D6
gcccccccacgagtattttttttttttttttttatgcaactgaacgacagatgattaagaaatgtgcagcacagtggacatatattacacaacattatatggtgcactacaatggttggaatttggaaataagtaccaactactgaactgaaatggacaggatattaagtacatatgaagggtggaataacagagttcttcgtgtcctacaagtagcatagcgctaatttattattacaaccaccatgcctggtaatagtagattaaagagtgctaaggtctctgccctgtgcagagagagagggagggagtgaaggggggcctggacctaaccatggtagtgacactgagaagtaatgacatctacatgagtggggtgacccaagacaacaaaaattcatctatgggtccattgtgttaatgagttacacaacaattgcttggtaactcaaaagccttcttt

SEQ ID NO: 2160 - DNA, 437 bp, Triticum aestivum
  Clone ID: LIB103-055-Q1-E1-D7
ccccacgagtatttttttttgtctttttttgacaaaccaaacacccctccaaactagccctgtttatatttttcggcaaggtaaactgaaaacagattttactaggggtacatttattatagagtactccaacaggggccgtgcagccgtgcaggcaatggtacacagagctagactgcattactagtagtagtagcaagcatgcattattgtactggtaaaatagctaatgcttgctttaacaacctagctcgccagatatatacacaaaacacaccagctagctgttgcagtgcagtactgccctgcccccacagtcatgactcatgagccgtagatgagatcacagcatgagcgtccactgctgggtgggactcccagtggcgggcgacacgatgacttggctagcctcgtgccgaattcctgcaacccggggg

SEQ ID NO: 2161 - DNA, 264 bp, Triticum aestivum
  Clone ID: LIB103-055-Q1-E1-D8
tagtaggtcgcgttgtactattgcaacaccctatagtgagtcgtattacaattaaccctaagaattaacccaagcggaagcatttcaatacattcactcagagagatagacatacatttatcactacatagatgacatgtttccttaacaggaagatgtcgatgagcaactgagcatcacgacgagatgaaacacaggacaacttttcatttcgagtacattattagtatcgggctcctagcatcgacgcgtttacttcgtgcc

SEQ ID NO: 2162 - DNA, 105 bp, Triticum aestivum
  Clone ID: LIB103-055-Q1-E1-F7
atagtgagtcgtattaagcgatatggagatgtagatagatatctccaatgaatcattcgagtagtaggggtcatctcaattgtcatcattctctctatggtgcag

SEQ ID NO: 2163 - DNA, 225 bp, Triticum aestivum
  Clone ID: LIB103-055-Q1-E1-G4
tgtctctctctcactctatctctcactatgtcgaaccctgtatctcgggggatctactagttctaaagcggccgccactgcggatgaactacatctatagttcccgctattgagggtcaatttcgatcttgtgctaatcaaggtcagatcagtttcaagcgtgaaattgtcatgcgcacacaagtctcctgaataaatgagacagacgcatagattgtaaaatct

SEQ ID NO: 2164 - DNA, 371 bp, Triticum aestivum
  unsure at all n locations
  Clone ID: LIB103-055-Q1-E1-H4
attattccaacgtcaccggcaagggcccgctcgagaacctcgctgaccacatcgctgatccagtcaacaacaacgcatgggcctacgccaccaacttcgtccccggcaactaagctcaacggctatgctatgcaacttcattgtctttcggatcggagagggtgtacgtacgtggattgattgatgctgcgagatgcatgtgtgtcttttgtttcacgttgcattgcataggcaagtcgagatgatgagttggcgttgtacactaagatgaaccatgtttgtgcaatagtggtggtttttgtttcctgctggttaaaaaaaaaaaaaaaaaactcgaaactagctcgtgccgaattcctgcancccggggg

SEQ ID NO: 2165 - DNA, 393 bp, Triticum aestivum
  Clone ID: LIB103-056-Q1-E1-A10
ttcacgggtccacgggcggagatgacatcccggagcatgagctgccgtatccatttactcaagcaaaatcaagtgtggctcagagcacaccaagagttgttactgaagttgtatttgccgcgccatcaccaagcctggctgaacagccggctgttgcactgtcgcacatgtcgcagtctttcaagaggaggttctcacaaagatcttcaacctactctgcaactgccagcacaaccggtctgccgccgaaggctgagtctactgctccatctccactgggcagggagttgatgctcagttctacttctggtggcatagatcatgagtcccaagtgcaagagaaaagtagcaaggatgttgcactcaggtttggtgttacagaagggactcctg

SEQ ID NO: 2166 - DNA, 405 bp, Triticum aestivum
  Clone ID: LIB103-056-Q1-E1-A6
gtaccgatcttagaattccgggtcgacggggaacctgtggtatctgggctagtccttgatgattcttggctttgggatcctgactttgcaactgcttcaaagtatgtgatgagtcctccaatccgggaagcagggcataataaagcacttcaagctgctctttcatcaggaatattacagcttgtgggaactgatcattgcaccttcaattccactcagaaagctttcggttctgatgatttcaggaagattcccaatggcgtaaatggtattgaagaaaggatgcatataatttgggatagcatggtggagaccggcaagatcacagtcaccgattatgtgagagtgacaagcacagaatgtgccaagatcttcaacatataccctcgcaaaggagcaatcctc

SEQ ID NO: 2167 - DNA, 417 bp, Triticum aestivum
  Clone ID: LIB103-056-Q1-E1-A7
aattcgcgggtcgacgggattgctccactccatctcctctgtctccctcgatccgcgccgcagctgcccccaccgccctccgcctccaccgaagcagcgccgccaaccgacgccctccctctcttctccgtccgtccatccctcgtcgagccaagctgggagtgctggggggatctcggggatgttaatcggcgaccaatcttcggctgaatcaagatagaaacaggttttgatactgaagtctgggggagtagtatactctgtttgagtataccatttagttttggaataaaccacttctccacatggcgggggctgaatccgcactacccgcagttgatcatgtggtgttggataacagcgatactgaagtctcagaggtcgtggaatgcgattccacagttgtagaagtgctgg

SEQ ID NO: 2168 - DNA, 428 bp, Triticum aestivum
  Clone ID: LIB103-056-Q1-E1-A9
ccggtcctacattcccgggtccacgggcttcacaaagcagagtggattccgatcataaaaagtatgctctgcagaaaagccttagacctcccgatggcatccttgaagatcttttcacggagccagatcttgaattcagcagattctcattcgtgttctcctccatgacacccgacgatccacagtctatgggcttgctcaggattacacttgagaatccccatttggaaggggaccaaaaggatcaggagcctgcagccgagaaggaggctcaccagaaagctttccacttatatgccgccatctctcgagagcaggccaatcagctgcaactggcaggcgacgacgatcgaggtaggttagagttgctatgcaaggatcttactgtaaagctgatggggtacgacagtacatgtgatacaggcaac

SEQ ID NO: 2169 - DNA, 449 bp, Triticum aestivum
  unsure at all n locations
  Clone ID: LIB103-056-Q1-E1-B12
attcacgggtccacgggcgatcttaaatgatcaaagacctagatgaggaagaagagcaagatgcatctcctgcaaaatctcaaaagctaatgggggatgcaatcagaccatgggctgctccatcaaagcccaagtctgcccccaaggttgctgttcaagcccccaagagatccaccagaaacattgcaccagctgagaagaacaaggccccagtgcctgaagtggaagaagaagaagaagggcaagtgcttagaaagttgaagcccaagattcctgaccatgatgacacccatccagtggcataaaacactacanaaaaagacacatccgtgacattttgggctgaacgaaatttttttctgtcatacatatgacacttctatgaagataattgtgacaaaacccggtatcatcatagatgtggtgggctcctacttctatgacaaaaa

SEQ ID NO: 2170 - DNA, 429 bp, Triticum aestivum
  Clone ID: LIB103-056-Q1-E1-B7
aattcgcgggtcgacgggattatttatgggactaacctattaacgggaggcccagcccagaattgttgtttttttgcctatttcagtgtttcgaagaaacggaatatcaaacggagtccaaacagaataaaatcttcaggaacgtgattttctcatcgaacgtgatccaggagacttggaccctactccaagtaaaaaaagaggcggtcacgagggtgggggcgccccctagggcacgccccctgcctcgtgggcccctcgttgctcctccggcgtacttcttcctcctatatatacacacgtacacccaaacgattagaacaggagccatatatctaattccaccgccgcaactttctgtatccacgggatcgcatcttggggcctgttccggagctccgctggaagagggccgtcatcacggaggga

SEQ ID NO: 2171 - DNA, 375 bp, Triticum aestivum
  Clone ID: LIB103-056-Q1-E1-B8
gtcgacgggagctatcaatcgttgttcaagccgatcatgggtaaggttatggagattttccgccctggtgcggtggtgctacagtgtggagcagattccttatcgggtgaccggttgggctgcttcaacctatccattaaggggcacgcggagtgcgtgagattcatgaggtccttcaatgttccggtgttgctgcttggtggtggtggttataccataagaaacgttgcacgatgttggtgctatgagacaggagttgcacttggtcatgagctaactgacaggatgccgttaaatgagtattatgagtattttggcccagattatactcgtcatgttgcaccatgtaatatggagatcaccttcacacacagg

SEQ ID NO: 2172 - DNA, 447 bp, Triticum aestivum
  Clone ID: LIB103-056-Q1-E1-C12
ttcacgggtcgacgggcgacggtgaaggcgcacacatcaacctcaaggtcaaggggcaggatggcaatgaggttttcttccgcatcaagagatccacacagctgaagaagctgatgaacgcttactgcgaccgtcagtctgtggatctcaactccattgctttcctttttgatggtcgtaggctccgtggtgagcagacccctgatgagcttgagatggaggaaggcgacgagatcgacgccatgcttcaccagaccggagggtgctttcctggcccttagaaggagcttgctgcagcctggctgttctatgtcgtatgctacctttagaactagagtaaaatgtaagaagtgaaagaacttgtgaggctatggttctgtgccatagcctgagggggggtctggaggtgaaacaacatcggagtactgttgatgtcgtgactgaact

SEQ ID NO: 2173 - DNA, 375 bp, Triticum aestivum
  Clone ID: LIB103-056-Q1-E1-C6
ggtcgacgggacgggtgtagccttaccatggcccgggaccatttttgccttttggctcacgtatatgatagtgtcgctagcatccatatgacagagaatctggcccgacatggctagtcgtgaacccaaagtggcacagacatatggggacaggcatacatgaatcatatcgagcatgtcggtcatcagcgagtgaatccgggctgtagcactgagctaacaggactccatggaacccggactgtagcaggctaggtaggactccggaagtcaccgcgtgacatttccccgaagggacagacatacgaacgaagtgaaacacatgccggccagtcaagtgtcatgagcagtactgttgggctagcacgactccgg

SEQ ID NO: 2174 - DNA, 403 bp, Triticum aestivum
  Clone ID: LIB103-056-Q1-E1-D8
gtaccgatcaagaattcccgggtcgacggggaaacccggtatcttgcgtcctggttcggtcagataaggaaggacgaagagaagttcagggcagccatcgacccgaccctggagctcaccgacgagattttcgagagcatctcggtggtcgcggagctggccggccactgcacctcccgggagccctcgcagcggccggacatgggccacgccgtgacggtgctcgtgcccatggtggagaagtggaagccgtccaacaacgaggccgaggactacatgggcatcgccctgcacctgccgctgctccagatggtgaaggggtggcaggagtcggaggcgagcatgacggacgggagcatcatgagcctgagcctggaagacagcaagggcagcatccccgccc

SEQ ID NO: 2175 - DNA, 400 bp, Triticum aestivum
  Clone ID: LIB103-056-Q1-E1-E10
ttcacgggtcgacgggaggtccagaccagaagccatggccgctggtgcgtgtgtgctattcctgccgctggtgcgtgtgtgctgttcctgccgcttcctgccgctggtgaatgcgggttgttcctgctatgggaaaaggcccgttggggcgatggagagagggcgttcgcgctgttgggagcgatgcttggtgttcgggctggggctcctctcgtcccgaactaattcgttcgatcgatgcccagattccttccgaacgaatcgttcggtgtggggaggtcccagaccgaacgttcggccgttatcggcgtccttaataagaattaaacaagaagcaaaccgtcatccgcctgcttcgaggattggtcgtgtctagccgcgtcttcccactcgcttgctg

SEQ ID NO: 2176 - DNA, 442 bp, Triticum aestivum
  Clone ID: LIB103-056-Q1-E1-E11
attctagggtccacgggaacccagaaaattcaatatcttccatgctacacacattatagacggttcccaagcagaatggtaaagtttatactcccccccaccaacaagcatcaatccatggcttgcccgaaacaacgagtgcctccaactaacaacaatcctaggggagtttttttgcaattattttgatttgatttgagcatggggctgggcatcccagtgaccagccattttctcgtgagtgaggagcggagtccactcctcttgagaataacccgcctagcatggaagatacagacaaccctagttgatacatgagctgttcgagcataagaaacagaatgtttatttgaaggtttagagtttggcacatacaaatttacttggaatggcaggtagataccatatataggaaggtatggtggactcatatggaataact

SEQ ID NO: 2177 - DNA, 390 bp, Triticum aestivum
  Clone ID: LIB103-056-Q1-E1-E12
attcacgggtccacgggggtttaaacattgagagatttctccatgtgagttgtatgtaatggcttacgcccggctttcgactaattagcagttcaactctctccttctgagtaaaactatgatgcaaatcatttgcttccgtatgatcgggaggctcgtcgccagggtcgccctccagagcgacgatgtcgagctcgtcgccgtcaacgacccctttatcaccacctagtagatgacctatatgttcacgtacgacacagttcacagccattggaagcagactgacatcttccttacagaggacatgattttacactttggtgagaggcaaattactgtcttcagcatcatgaaccctgaggagatcacgtcccgttaggcaggtgccga

SEQ ID NO: 2178 - DNA, 431 bp, Triticum aestivum
  unsure at all n locations
  Clone ID: LIB103-056-Q1-E1-E6
gtaccgatcaagaattcccgggtcgacggggaccacttacctttgtatcgttcgttgttgactttggatcttctatctcctatcgtgtttcgaggatctagtacttgtgaaatcattcttgttggtttgagtgttctctcgtgttccccttttattttttccctcgtttccctcctcgtgttcatcgcggaatccgctcctttcgtgaaagatcggccgattagggttcctaccctacatcatcttggtatcaagagccacgttgatcacgatttcggagcctccccgttgatgaggacttcaataccattgttacacccacaacccctgctgctatacatattggaccaattactagagctcgcgcacgccaactgaattatcaggtacttccgtntcttggtaatgattctaatgttcatgagaatatg

SEQ ID NO: 2179 - DNA, 409 bp, Triticum aestivum
  Clone ID: LIB103-056-Q1-E1-E8
gtcgacgggcacataatacctatttgcaacaataagaacatcattaatccttcccgtaggtttcttaatagtggaatccgcaagatgcaagtttagagagcaatcaacaaaattgcggaaatctcgcaaatcacacaaagttttgggaatagtggagacactagcacccaaatcacacaaagcataaaactcttgatctttaattttgattttaatagttggttcccactcatcatagagttttctagggatagaagctttcaaatcaagtttttcttcataagattgcatcaaggcatcaacaatacgttcggtaaaggctttattttgactataagcacgtggagaatttagcacggattgcaacaaggaaatacaatcaattaaagagcgactttaataattaaat

SEQ ID NO: 2180 - DNA, 411 bp, Triticum aestivum
  Clone ID: LIB103-056-Q1-E1-F10
ttcacgggtccacggggagccggaatccattgcaatgcttcacaagatcgctgggagggtgtccagccaactgaagacagaggagggcgcagaggtagtcgcggaacaggcctgctacctcccgtgcaccaatgacgggctgccggtcatcggggagatgcctggggtgaagggatgctacgttgcaaccgggcacagctgctggggcatcctcaatgctcctgctaccggtgcagcactcgccgagctcatccttgatgggcaggccaagattgttgatcttgtgcccttcagcccggcaagatttctcaagaagaagagcaggcgcggagtgtaatggcatgcgcggtttgtttcgatctgatgttccaaacttggcaaccgaataaaaagctatcctctcttgcctgt

SEQ ID NO: 2181 - DNA, 437 bp, Triticum aestivum
  unsure at all n locations
  Clone ID: LIB103-056-Q1-E1-F11
attcacgggtccacggggacccgaaagagttcccggcgtcaggtgttatcagactcatcgtccgatgactctaangcgaactcctgccgcgaagacgaggaagagaaaaaagaggcttctcccccagcggggggagagaagaaaagaaaggcctccccaactggggaggccggagggtccaagaagggaaggacccttcctccggactactccaccaacaccgacgacagtgaagaggagtggccaccgagggctaagcccctggcgacatcgtaagtgtccagataccagaataattcatggcgttttgtttgtcgcatagaatcttctaacgccgaatacaaccctgcagcccgcccaaggacgggctcgacatttcaacgagcggctccctggctccatcggacgttaatagcacttcacttctgggcgcctcc

SEQ ID NO: 2182 - DNA, 397 bp, Triticum aestivum
  Clone ID: LIB103-056-Q1-E1-F5
attcgccggtcgacgggaattattaagttgtaagtaaatagaattgtgatgatcatcattcatagagtattgtcccaaaaaaagagaaaggccaaaaaaagaaggggccaaataaaaaagaaaggccaaataaaaaagggaaaggccaaataaaaaataaaaaaataaatataagggaaaatgctactatccttttacaacacttgtgcttcaaagtagcaccataatcttcatgatagagagtctcttgttttgtcacttccataaactagtgggaatttttcattatagaacttggcttgtatattccaacaatgggcctcctcaagtgccctatgtcttcgtgagaaagcaagttggattcacaaccacttagtttcttttgttgagctttcat

SEQ ID NO: 2183 - DNA, 398 bp, Triticum aestivum
  Clone ID: LIB103-056-Q1-E1-F7
aattcgccggtcgacgggaaccacatagaactgtttaatgatgcggccgtgaaggactggaggttcaagagatatgcgacgtgcagcaccttgaggttgtaccggaggaggaggaggcttgaatgtgggctgacgagttccaggcttgggtgtactggtgcgaacagcaacataagcgggttcctcaatttcttccaattcatcctcgtaatcggattcttccatcgaagaggcgctagtggagctgcgagggtgagcgacacgcttccgaggacgagcgcgctcctgcgaatcatcggacccaccacgacgagatggacgagagcccccagcggtgacctgcttgcgagcagagcgcctttgtccatggcattgctacctagggaaggagaagactc

SEQ ID NO: 2184 - DNA, 404 bp, Triticum aestivum
  Clone ID: LIB103-056-Q1-E1-G6
cgggcaaaaatcatggttaagaaacatattaagcaaggggaaggacaaacaggtgggatcttctcaattgaagctccacttcatgtttcaaatgtacaagtaattgatccagtcaccgggaaaccatgcaagactacatacaagtatttgccagatgggactaaagtaagggtctctagaggaatgtatgcgtctggtgctgtcatacctcggccagaaattttgaaggagagaaaaaagccgagacccacatctcatggcccaaaggacacaccaattgagcatgtgctggagaagacctatgatgccaaagctggaattggtatgcctgatctatgaggagacgtccactgctgggagtgaaagagagagagagttgggcatatttgtgatctatatccatc

SEQ ID NO: 2185 - DNA, 380 bp, Triticum aestivum
  Clone ID: LIB103-056-Q1-E1-G7
attcgcgggtcgacgggtggacttgactagttgtgcttgcactggtagcaggaactagaggtttttctttattcataactctcctcaattttttttggctttgaagtgaatcatggttgtggacattatgtatgtggagatatctgtgaacatgagttcgatgtggaagttgaacttggaatgtcgggcttgcacgtgaactataccatgtccaatgctacgtttgttattgtttggaaagtaattattgttattacatgacccaaaaaaatttgtgccacatcagtagatgcacggacatcacaacagaaatgctaactggataaacatttgaacctagctactatgaaggaaattctgtattgacaacagttttagat

SEQ ID NO: 2186 - DNA, 395 bp, Triticum aestivum
  Clone ID: LIB103-056-Q1-E1-G8
gggtcgacggggaagacccacgcgggcaagaagcccaaggccgagaagcggctgccggcgggcaagacggcgtccaaggaggccggcggcgagggcaagacccggggccgcaagaagggcagcaaggcgaagaagggcgtggagacgtacaagatctacatcttcaaggtgctgaagcaggtgcaccctgacatcggcatctcctccaaggccatgtccatcatgaactccttcatcaacgacatcttcgagaagctcgccggggagtccgccaagctggcccgctacaacaagaagcccaccatcacctcccgggagatccagacctccgtccgcctcgtcctccccggggagctcgccaagcacgccgtctccgaggggcacaagggcgtcac

SEQ ID NO: 2187 - DNA, 385 bp, Triticum aestivum
  Clone ID: LIB103-056-Q1-E1-G9
ttcacgggtccacgggtgaagaagacgcatcttgtcaaggctgctccggcggacaagtcgggagctgctgtgcgagaacggacctgagctgtgtgcggtggtgtcataaggagcctatccatctccactagaattatcccaagtttcacttcacatcgtgatgttgttttacctttttcctgtcattgtcctgctataacggatagcgctccctgttggcgccgccgccggcggggatgccctagtggtggagggtgtatgtcctcttccgcggggtgcccctgcttgtacctagatggttactctttccgtccattgtcaccggctaacattgtgataatatcagtctgggtaatgttagattaagctgttgtcctcccctgac

SEQ ID NO: 2188 - DNA, 413 bp, Triticum aestivum
  Clone ID: LIB103-056-Q1-E1-H11
ttcacgggtccacgggggggaaagatgtcgagggccgtcagggtccgcggcgacgagctggagacggagcggggagcaagggcgaagaagcgaagcctggcagtggatcgctcgacgagctctagatctcccggcgacctagctgttcggagttcccattcccacccagagatactgttcgcgatcttcgagcccgacgaagctcaatccggagcaacacaaggtcgtgtgtgcgatgtggccgagtccgcgacggaggaatcctccgatccacccagctcaccgatctacgaaccctacattcctgacgaactagccgcagatccagtcgtacgctccgccttcaagcatgccatggctaagtacgagggagaagaagatcgtctagctgacctgttcactatggatcacta

SEQ ID NO: 2189 - DNA, 410 bp, Triticum aestivum
  Clone ID: LIB103-057-Q1-E1-A10
ttcccgggtcgacacattcgggcgatgttgctggacttgttttaccattgtcgaggatgtcttgtaaccgggatgccgagtctgatcagaatgtctcgggagaaggaatatccttcgttgaccgtgagagcttgtgatgggctaagttgggactcccctgcatggatttgaactttcgaaagttgtgcccgcggttatgggcagatgggaatttgttaatgtccggttgtagataacatgaaacttaacttaattaaaatgcaccaactgcgtgtgtaactgtgatggtctcttctcggcggagtccgggaagtgaacacggtgttggagtaatgtttgacgtaggttgttctaggatcacttcttgatcatagttggttgaccgtgcttttgccttctcttctcgctct

SEQ ID NO: 2190 - DNA, 409 bp, Triticum aestivum
  Clone ID: LIB103-057-Q1-E1-A12
gtacaggtcaagcattcccgggtcgacgggtgtttgctattcttagaatgtcattttcttttgcttttcttgctgtttgaatagaataccaagatctgaaattattaaatgagagagtcttcacatagttgcataattatttgactactcattgatcttcacttatatctttcggagtagtttgtcgtttgctctagtgcttcacttatatattttagagcatggtggtagttctattttgaagaaatagattaactctcatgcttcactcatattattttgagagtcttaaatagcatggtaatgtgctgaaaaatcctaatatgccaagcatacaagatttgtaagaattcttatgagtatgttgaatactaagagaagattgatgcttgatgattgttttgagata

SEQ ID NO: 2191 - DNA, 400 bp, Triticum aestivum
  Clone ID: LIB103-057-Q1-E1-A3
atgcccgggtcgacgggaaaactgatgacaaaatcaagaccatggaattggtggaagaattaagatctaaaagggctgacctgcaggctaccctcttgcttgatgcctttaacaaggaccgagctgcaatacctcaacctattccacctcctcaaatggcaacactgccagcacctcctcctcctgatgctcgtactcaagaactgatcaatgagaagctaagtaaagctgaagcccttggtgaacaagggatggtagaagaagcgcagaaagctttagaagaagcagaagctctcaaaaagttggcagcggcacggcaggagccagttgctgatccttctaaatacagtgttgctgatgttcgaattactgatcagaagttgcgcctctgtgacatatg

SEQ ID NO: 2192 - DNA, 418 bp, Triticum aestivum
  Clone ID: LIB103-057-Q1-E1-A6
attcacgggtcgacgggtcgaccacagtgctgtctgagtaaccgtctgcaatagaaatccccaataagcagggtaattagcctactattgataatccatgtactaatcaaattgatatttcttataaaacacactaggtatttcatatccgtataacaacaaccatgatttcataatcgaattacatcagatagcttcggcactcagttacgccattacacaacagcaccaagttccacatgcagcatcaaaaacctttggaatgtagcatcatacacagtaaatagatagatgaatctcatctgggaaactgcagaagcggaaggaaagtattgagccttcagtgatgttgaatgtccttgcaactttaggccagtggctatggacaattgccagcccaaccttcgtcctcttcagc

SEQ ID NO: 2193 - DNA, 410 bp, Triticum aestivum
  Clone ID: LIB103-057-Q1-E1-A8
cgggacctacctattatggcatttccatagcaattccgagatatattgtcatgcaactttccaccgttccatttattataacagacttcatcattgtcatattgctttgcatgatcatgtagttgacatcatatttgtggcaaagccacctttcataattctttcatacatgtcactcttgagtcattgcacatcccggtacaccaccagaggcattcatatagagtcatattttgttctaagtattaagttgtaattcttcagttgcaagtaaataaaagtgtgacgatcatcattattagagcattgtcccagtgaggaaaggatgatggagactatgattcccccacatgtcgggttgagactccggaaaaaaaaaaagagcaaaaagaaaaaaaagcgggcgctct

SEQ ID NO: 2194 - DNA, 410 bp, Triticum aestivum
  Clone ID: LIB103-057-Q1-E1-B10
cgggtcgacggggatgtttgattattttgatgcatctatggctagtattaagtggaatgaaccatagagaacttcgaatacagtaggtttaacaccaaaataaataaataatgagttcattacagtaccttatgtggtggttttgttttctttcactaacggagcttataagatttcctgttgagttttgtgttgtgaagttttcaagttttgggtaaagctttgatggagtacggaataaagagtggcaaaagcctaatcttggggatgcccatggcaccccaagatattcaagaatatccaaaagcctaagcttgggggatgccccgggaaggcatcccctctttcgtcttcgttcattggtaacttcacttggagatatatttttattcgccacatgataagtggtt

SEQ ID NO: 2195 - DNA, 327 bp, Triticum aestivum
  Clone ID: LIB103-057-Q1-E1-B11
attcccgggtcgacgggtagctgcaaagtattcgcaggaagactgtaaattagacagtcttatagatggcctagataaggaataggttaatgattgattgtattaaccaaccggtaccttaacccgacaatgtaaaaagttggcaaccgcaggcttttggattaaacccccaaacccaaaaaatggtgaattgctcccgagaatttgaaaagaaccatccataatgtccggaaactaggaaacccggacattacgcacatatacacaaaaggttttatttcgggctatatgttatatcacatatgtaaaacacatttcccagggaaa

SEQ ID NO: 2196 - DNA, 454 bp, Triticum aestivum
  Clone ID: LIB103-057-Q1-E1-B12
gtacaggtcaagaattcccgggtcgacgggtggccttgaacgacctagatttagttttaggctgccttgggacgtcctcccacctccttggccgccaccccttgctcctatataagtagatccatctagtagcttttccttgggatttgtttagttaaaagttagccattgcaacttcgtgtacttcgtttgtgttcaacgaccagaccaagaccgcttacggatccccaccattatcaatacttcatatatattcgcagtattcagattgctttatcatattcttgctcgttcttcgattgcttgcaggaatagaccttcgtggtcaggttgatcgtgctccagcttggtcaataacctctcggagttggtttagcgattgctaaggcgcaacgtcgtgcacgtttgtagtcggatcgtcaaagtcgtctctaccaaatcgatagttatcatc

SEQ ID NO: 2197 - DNA, 446 bp, Triticum aestivum
  Clone ID: LIB103-057-Q1-E1-B6
attcccgggtcgacggggcgcggcaagggaggcaagggtctgggcaagggcggcgccaagcgccaccggaaggtcctccgggacaacatccagggcatcaccaagccggcgatccgtcgtctggcgcgtcgtggcggcgtgaagcgcatctcggggctcatctacgaggagacccgcggcgtgctcaagatcttcctcgagaacgtcatccgcgacgccgtcacctacaccgagcacgcccgccgcaagaccgtcactgccatggacgtcgtctacgcactcaagcgccagggacgcaccctctacggattcggaggctaggccaccaccaccagattagagtgtctggggttcgtggtcgttgatgtaattgcagcatctcgctgttgtttgctatcttctgtagaatggaatggaatggaaattgaactagtttatccttcaag

SEQ ID NO: 2198 - DNA, 423 bp, Triticum aestivum
  Clone ID: LIB103-057-Q1-E1-B7
gggtcgacgggatacttggatgcttcaagttaaacccttttgagcatcttaagctgtcttttgattcttctgtggatgaggtgaagaagcaatataggaagttgtcactgttggtccatcctgacaagtgcaagcatccacaagcacaagaagcttttggagccctggcaaaagcacagcagctcctacttgatccacaggaaagagggtacattcttgatcaagtcacttctgcaaaagaagaactgagggcaaaaaggaaaaaagagttgaggaaagacagtgcatctaagataaaatcccaagtagatgagggaaagtatgaagagcagtttgaaagatcggacgaatttcagaagcagctaataattaaagttcgtgagattttgacagacaaagaatggcgtcggaggaaaatgcaga

SEQ ID NO: 2199 - DNA, 345 bp, Triticum aestivum
  Clone ID: LIB103-057-Q1-E1-B8
gtcgacgggggcagtataggccatttctaccaaaacttgttgcagacctagatctgtgaatttgccggttgattgaagtgccatgtaattgacgcatttgtgaagtcagctgtcacctgtacttggatggaattgtttgaactatatgcttatctgttgtcatcaaaaaaaaaaaaaaaaaaaaaaaaaaaaaaaaaaaaaaaaaaaaaaaaaaaaaaaaaaaaaaaaaaaaggaaaaagataaaaaaaaaaaaaaaaaaaaaagcggccgccctaaaggttcaaagcttacttacgcgtgcatgcaacttcaaagcccttcaaaagtgtcaccaaaattcaatt

SEQ ID NO: 2200 - DNA, 245 bp, Triticum aestivum
  Clone ID: LIB103-057-Q1-E1-B9
tcccgggtcgacgggacaagaggagcagtggcagggagagaaggtgaagactacgccatgtgagttgctgatgttgtgccttatgcggtggggataagggatgtgtgatgtgcttgtgtggtgaaaggcgaggagtggcttttcctttttgcgggaggctgttcatttttgtctattctatttttatattcaagatacatacaattatttatcatcattataatcgagataataaatatttattt

SEQ ID NO: 2201 - DNA, 454 bp, Triticum aestivum
  Clone ID: LIB103-057-Q1-E1-C10
gtacaggtccagaattcccgggtcgacgggtttgccttaatatgccatggtcaactcgcatgaagattgcgctcggtgcagcaagggggcttgagtatctccatggagctgagagatccatcatctatagggatttcaagacatcaaacatcttgctagacgcggattataatgctaagctttcagactttggcctagcaagaactggacctagtggagaccaaacccatgtctcaactcgggtcatgggaacttatggctatgcagctcctgaatatgtgatgactggccatttgacagcacggagtgatgtttatgggtttggtgttgtacttctcgagatgattattgggaggagggctgtggacaagagccggccgagccgtgagcataacctagttgagtgggcacgccccctccttgtccacaaccggaagctcttcagaatcattga

SEQ ID NO: 2202 - DNA, 404 bp, Triticum aestivum
  Clone ID: LIB103-057-Q1-E1-C11
ccgggtcgacgggaccacactatctctgccacgcacggagatatggaccagaacactagggacatcatcatgagggagttcagatctggatcttctcgtgtgctcatcaccaccgacctgctggcccgtggtattgatgtgcagcaagtctcccttgtcatcaactatgacctgccgactcagcctgagaattacctccatcgcattggtcgtagtggtcggttcgggaggaagggagttgccatcaactttgtcacccgtgaagatgagaggatgctgttcgacatccagaagttctacaacgtggtcattgaggagctcccggccaatgtcgctgaccttctctagattatatcttaggaatgcagtaaagtgcttgataaagttcgtttttgttgaatatc

SEQ ID NO: 2203 - DNA, 434 bp, Triticum aestivum
  Clone ID: LIB103-057-Q1-E1-C12
attcccgggtcgactaatgaatcagaaaagagggatgacaatttattatcggaaaatatgggtggattagatagcttaaacgctcaagcaaaagaacatattctccaattgcagtctcgcttggattctatggaaagggagctacatgaactcaagaagaaaaattcttccttgcaaatgcaacagtttgctggagaagaaaaaaatgagttacttgactacttgagatcattatcacctgacacggttatcgaactctcggaaccttcctgccctggtgtgcaggaagctattcattccgtggtacatggtcttctagcaactctctcccccaaaatgcatgcaaagccccctccaccatcagagaacatggctggtggaaccctgaatttcgggaatggggatgatgaccgtgctgaactcgtggaggatgt

SEQ ID NO: 2204 - DNA, 366 bp, Triticum aestivum
  Clone ID: LIB103-057-Q1-E1-C4
gggtcgacgggagctgtgtacggtgagtgtcataaggagcctgtccatctccactagagttatcccaagtttcacttcacatcgtgatgttgttttaccttttttttcttgtcgtcgtcccgctgcctgctataacggacagcgctccctgttggcgccgccgccggcgggggtggtgccctggcggcggagggtgtatgtcctctgccgccgggtgctcccctgcttgtacctagatggttggttactctttccgtccattgtcaccggctaacattgtgataatatcagtctgggtaatgttagacacatgaaaaaagaagagagaaagaagaaaagcggccgctctaaaggatccaagcttac

SEQ ID NO: 2205 - DNA, 405 bp, Triticum aestivum
  unsure at all n locations
  Clone ID: LIB103-057-Q1-E1-C5
cggggaagacccacgcgggcaagaagcccaaggccgagaagcggctgccggcgggcaagacggcgtccaaggaggccggcggcgagggcaagacccggggccgcaagaagggcagcaaggcgaagaagggcgtggagacgtacaagatctacatcttcaaggtgctgaagcaggtgcaccctgacatcggcatctcctccaaggccatgtccatcatgaactccttcatcaacgacatcttcgagaagctcgccggggagtccgccaagctggcccgctacaacaagaagcccaccatcacctcccgggagatccagacctccgtccgcctcgtcctccccggggagctcgccaagcacgccgtctccganggcaccaaggccgtcaccaagttcacctcctcct

SEQ ID NO: 2206 - DNA, 449 bp, Triticum aestivum
  Clone ID: LIB103-057-Q1-E1-C6
attcccgggtcgacgggccggatcatggcgctcaagaagacgcgcctcccggaggacgacgagggcgtgccccccacggcgctcagggaggtctcgctgctgcggatgctgtcgcaggacccgcacgtcgtgcgcctgctcgatctcaagcagggccagaacaaggagggccagaccatcctctacctcgtcttcgagtacatggacaccgacctcaagaagttcatccgcggccaccgccagaaccacgagaagatccccgcccacaccgtcaagatcttgatgtaccagctctgcaagggcgtggctttctgccacggacgcggtgtcctgcaccgtgacctcaagccacacaacctgctcatggaccgcaagaccatggctctcaagatcgccgatcttgggctcagtcgtgccttcacggttcctctcaagaagtacacacacga

SEQ ID NO: 2207 - DNA, 448 bp, Triticum aestivum
  Clone ID: LIB103-057-Q1-E1-C7
gtacagtccagaattcccgggtcgacggggtcatccctggattggtgctgacacacacaatacttgaaggatttataacagagttcaatcacacacttattacatcgaatgtctcagaagagaacttattacaataaatatggcttaaggccatctaaataagataacagcggaaggcttggaagataaagtgagtccatcaactccaacggcatagctgagtgcacggcaacgacctagcacaccttactctttgtctgaaaagtttgcaacatgatatgttgcagcccgaaatgggtcagcacatggaatatgctggcaagataacacggtagagcgatgaacaggtaaatgctatcactacatgcatatgaggctggtggaggctctatggttataatgttttgcgaaaagccaatttttccctacatcaaagggaatatatttt

SEQ ID NO: 2208 - DNA, 400 bp, Triticum aestivum
  Clone ID: LIB103-057-Q1-E1-C8
aattcccgggtcgacgggatttgccagatggcgcagaagcttgtcaacatcataaagcagatggatcccagggaccctttcagaatcgagatgacggacatgctgatcgataagctgtataatatgggtgtaattccaacaaagaagagcttggttaaatgtgagagactttcagtgagcgccttcgccaggcggagacttgcaacaattatggtgaagctcaagtttgccgaacaccttaaagaggctgtcacctacattgaacaggggcatgtgcgtgtaggcccagagacggtcaccgatccagccttccttgtgaccaggaacatggaggacttcatcacctgggtggattcctcaaagatcaagacgaagatcatggagtttaatggtgcattgg

SEQ ID NO: 2209 - DNA, 343 bp, Triticum aestivum
  unsure at all n locations
  Clone ID: LIB103-057-Q1-E1-C9
attcccgggtcgacgggaccctcagacttaggagccgaagcctggcaagatggccgagctccggcggtatccgaccggcgaggtggttgtcgcggaggtgaagctccctgagaaaggagaggttgcccaagaatggggagatgcgtcccgacaggttgaaggaggccatgcgcagcgagacaaccctgtcggggtgccgcccgccgcccgcaagcaacgcctggccagctgcagtggtgggtggaggtgttccatgaagccagcaaccctctcgggggcgcaatggtggacttgaaggaaaggancgcgagttggtcgctccccctccccgccgggaccgggg

SEQ ID NO: 2210 - DNA, 416 bp, Triticum aestivum
  Clone ID: LIB103-057-Q1-E1-D12
attcccgggtcgacggggacccctcagatggcagggaaagggaggaggctaatgaatacgctaggcaagaaatggcagagattgacttcagtgaactccgtctccttgatgctagaccaaatctgccacaggcgaaattttttccttacgttcctaacgaggacgacgctcttctagatgacattcccagcgatgatgatgattttgaagaggaggatgctctgcccatccaaggagaggacttcgaaggggaagccgccgccgccgctcacaagcttgttcctcctattcagtccagctgagaagatgattcagttggtctacctctatctattctatccaattatgtttagcagatgtctctgtcgtggatccgtacatgtgggttggtcgggtctatcaatctgtattaattt

SEQ ID NO: 2211 - DNA, 411 bp, Triticum aestivum
  Clone ID: LIB103-057-Q1-E1-D3
gggtcgacgggggaacgggaggattggaaatacaacgcctctcaacaagtagggaacgaagcacactcgttccccctggatggattggggaaattctccgcctgagccttgtcactgaaggaagtcaattttgctcgaacggggactagatccacagggggaagaaatccctatgtctgtagcttcactagctgactgtgggatgcggaacaatttctccccatcgccttttccggggccgtggggacgggaggaagagctgggagcactagccatgttggaatggtttctcctagaaagctctgaggattcctcacttggtgtggaatggatctgaagatcccaatctctttaaatagacgcctttcttaaatggtcagggtggtatatgcaaaaataacccaacctctc

SEQ ID NO: 2212 - DNA, 417 bp, Triticum aestivum
  Clone ID: LIB103-057-Q1-E1-D6
cgggtcgacgggcaagactaactggctatgagtgtttttatagcaggttggtaagcattgggattttgtgggatttcaccgagtcgggaaggaagcttgcgtgggaacctacgaggtcgcgcgggaacgggatcaccgacgattcattggcaccaccatttggccaaaagaacgaccccgcgcgctgcgcaagcttgcactgtaagccatatgcggcagcggggtgacaagacgtgcgagaggaggacgagaggccatgtacacatatggttaataaaaaacgcttgcaatttaattacctactataccaccgtcctggtttaagtatgatttaactaataaaatatgaatgcatgtcgccaaagattatatagtcggatttgtatttgaacatagtttccaattaaataatttttt

SEQ ID NO: 2213 - DNA, 434 bp, Triticum aestivum
  Clone ID: LIB103-057-Q1-E1-D8
attcccgggtcgacggggaagaagcaggaggccctcgagaggctaggcgccgacggcttcgttgtcagcaagaacgccgacgagatgaaggctgcgatgagcaccatggatggcatcataaacacggtgtctgcaaacatccccatggcccctctcttcgggctactcaagcccaacggcaagatggtcatggtcggcctcccagagaagcctatcgaggtccctccctttgctctggttgccaagaacaagaccctggccgggagcttcatcggcggcatgagggacacccaggagatgctggacctcgcggcgaagcatggtgtgacggcagacatcgaggtgatcggcgccgagtacgtgaacacggccatggagcgccttgccaaggccgacgtcaggtatcggttcgtcatcgacatcggcaacaccct

SEQ ID NO: 2214 - DNA, 405 bp, Triticum aestivum
  unsure at all n locations
  Clone ID: LIB103-057-Q1-E1-D9
ttcccgggtcgacggggtcaccatattgcggtccgagaaggtcaaggatgagatcgtcctcgacggcaacgacatcgagctcgtctcccgctccgccaccctcatcaaccagaaatgccacgtcaagaacaaggacatcaggaagttcttggacggtatctacgtcagcgacaagggcgccatcaaggaggagtagagtgcgaaaaccgtcccagaagccgtgtttctgcctgccgtgtttcatcgtctttgtgtcgtggttgtgattttgaactttctctagactgaattttgtagtggagttaattanggatgcgctatgcaacatgttatctttattatcctacatattgtcaccgtgagaattggtacgatgcttatcttcccctaaaggttgatgacttc

SEQ ID NO: 2215 - DNA, 390 bp, Triticum aestivum
  Clone ID: LIB103-057-Q1-E1-E1
gggtcgacggcgaagtcggacgccaaggagggcggcgacaagaagggcaagaagaaggccaagaagagcgtggagacgtacaagatctacatcttcaaggtgctgaagcaggtgcaccccgacatcggcatctcctccaaggccatgtccatcatgaactccttcatcaacgacatcttcgaaaagctcgccggcaaggccgccaagctggcgcggtacaacaagaagccaaccatcacgtcccgggagatccagacctccgtccgcctcgtcctccccggcgagctcgccaagcacgccgtctccgagggcaccaaggctgtcaccaagttcacctcctcttaggctgttcgccttcctgtgtctcgtagttaactgttcgggtgtgtt

SEQ ID NO: 2216 - DNA, 446 bp, Triticum aestivum
  Clone ID: LIB103-057-Q1-E1-E10
attcccgggtcgacgggacacatcaaagttatttagtacgtactctctccaaaaaagggctgatcatgtcatggctaccatcctgtgctccatcgttgagtacatgcactattcacgtgccattgaggagaaaaaatattgtgtactatgtgccatcgaagtacatgactcacttacacactgcttatctgattatctccattttcttgcatgacacctcctccttgatgctaaatgtcacgcgtgttggcaaaaggatgaacacagctcacgtacaagataagagttgaagaacataggttcccggcgaccgagaaggagcaaggaacctcgcggtggagcgtctgcaaggaaccttgcatgttttcccctgtttttgccgccttcccacctataaacaaatataagaacatgaactctttgctaaccactacaaatgatacatc

SEQ ID NO: 2217 - DNA, 413 bp, Triticum aestivum
  Clone ID: LIB103-057-Q1-E1-E12
attcccgggtcgacgggaccccattattatttaccatggagatctacatgtgccaaacatgtgtatcaaagaaaatttggaaaatatatattttacaatgccccattgaggtgtagactgatgttttgatcagttagtctagagggcaatataaactcaaaaaaattcaaaaaattataaaaccttggaaacctatctgtgtttgtgcaagagatcatgtgtgcaaattttgaggtaatttagaggtggtcgaaaaaatgacctcgttatggagggaccatttggtaacttaagccagtttttgaacaaatgtgatttttaccacaacctccaaatgaccccatttttcttttacatggtgacctacatgtgccaaacatggctatcatagaaagtttgaaaaaactttaatt

SEQ ID NO: 2218 - DNA, 441 bp, Triticum aestivum
  Clone ID: LIB103-057-Q1-E1-E6
ggtcgacggggagggggtatgacaacaaggggtggctgcgtggtaacgcaaagctaccaaagcaagttcctgctactgaggagcagaagtggctcattgagcccacggggaaagagtaagtgccactttataataatttcattattttgcttgtcacatgctcattctggttgttatttattttgcttgtcacatgctaatagttcattcttttgcagcaactggatatattctaaaggggtccgtattcccaacggcctcatcaccgtcttgctgaagttacactggccggggttgtactgtccggatccagtcaggcacccgaaccatcgggtcttggccacgagctgggagcactgggaagcggccctccacgcggaccatgggacccatgccaaggccgtgatcaccactctctgggtgaattctcttcagaagcac

SEQ ID NO: 2219 - DNA, 429 bp, Triticum aestivum
  unsure at all n locations
  Clone ID: LIB103-057-Q1-E1-E7
attcncgggtcgacgggccatattcacaataacacttaggtatcatgtttactcatatcaatggcataatcaactggcgagcaataataataaaactcggatgacaacactttctcaaaacaatcataatatgatataacaagatggtatcccgctggccctttctgagaccgcaaaacataaatgcagagcacctttaaagatcaaggactgactaaacattgtaattcatggtaaaagatatccagtcaagtcatacccaatataaactaatagtaatgcatgcaaatgacagcggtgctctccagcaggtgctttttaataagaaggtgatgactcaacataaaagtaaatagataggcccttcacggagggaagcagggattcgtagaggtgccagagctcgaatttaaaatagagataaataat

SEQ ID NO: 2220 - DNA, 443 bp, Triticum aestivum
  Clone ID: LIB103-057-Q1-E1-E8
attcccgggtcgacgggaatcactcatctgtaaaatatgacagctaatctcgtgagcacaaagtttctgtttttttacagcaagatcacattaactttcacccaagtattcccaaaggtcttacttggcactttattgaaacaaaagctataaaacatgattactagagtagcttaatcatgtgtacacacaaaaacaataaagataaatattgggttgtctcccaacaaacgctttactttaatgccttttagctaggcatgatgatttcaatgaggctcacataaaagacaagaattgaaacataaagagagcatcatgaagaatatgactagcaaatttaaacttaatccacttcctatgcctagggattttgtgagcacacaatttaagggaacaagaatcaactagcataggaaggcaaaacaagtataacttcgaaa

SEQ ID NO: 2221 - DNA, 449 bp, Triticum aestivum
  Clone ID: LIB103-057-Q1-E1-E9
gtccagaagtcccgggtcgacgggccacacgcactataacatacatactacgccatgtcaccgcatgcatgcatgtggaaatctttttggattttcagtttttaaaatgttttatctcttaaatgaaaaatccaattgaagatccgttttcaccattaaatccctcgcgacgagatcttcgaaactagatctcatatcaatatatttcaacgaaattttttttggttaaaagttgccatgtctattgcacatgaattaccatgatgtttacactaaagttgtcatgttatgtttcagctattttcttccatattaaaaagtaaattttgacatattataaaacggagaattaagaaactagacttgccatgcaccataaactaaaattgccatgatacatgcacctaaaattgtcatggctcatgcaaaaaatattttcattgtcaaaa

SEQ ID NO: 2222 - DNA, 404 bp, Triticum aestivum
  Clone ID: LIB103-057-Q1-E1-F1
gggtcgacggcttgtacctagaccttatgacaactagaaccggatacttaataaaacacacccttccaagttccacagacaacccggtgatcgcttttccgcagggccacaaggagaggattgccgggtaggattatgctacgcgatgctactggagatgcaacttggagatcctatttggaggacttcaatctactccctcctacatgctgcaagacggaggctggcacaagcgtagtcttcgacaggattagctatccccctcttattctggcattctgcagttcagtccactcatatggcctccttacacatatacccatgcatatgtagtgtagctccttgcttgcgaatactttggatgagtacccacggttgcttttccccctcttttcccctttcac

SEQ ID NO: 2223 - DNA, 450 bp, Triticum aestivum
  Clone ID: LIB103-057-Q1-E1-F10
tccagaagtcccgggtcgacgggtgatattagagtcatgctagtgggtagttgtggattgtagaaatacttgtgttgaagtttgtgattcccataacatgcacgtatggtgaaccgttatgtgatgaagtcggagcatgatttatttattgattgtcttccttatgagtggcggtcggggacgagcgatggtcttttcctaccaatctatccccctaggagcatgcgtgtagtactttgtttcgatgactaatagatttttgcaataagtatgtgagttctttatgactaatgttgagtccatggattatatgcagtctcacccttccatcattgctagcctcttcggtaccgtgcattgccctttctcgcctcgagaattggtgcaaacttcgtcggtgcatccaaaccccatgatatgatacactctatcacacataagactccttat

SEQ ID NO: 2224 - DNA, 437 bp, Triticum aestivum
  Clone ID: LIB103-057-Q1-E1-F4
ggtccagaattaccgggtcgacgggaaggagctctgcaagagcatcaaccctgatgaagctgttgcctacggtgctgccgtccaggctgcaatcctcagcggtgaggggaacgagaaggtgcaggaccttctcctcctggatgtcaccccactgtctcttggtcttgagactgctggaggagtcatgactgtgctcatcaccaggaacaccaccatccccaccaagaaggagcaggtcttctccacctactccgacaaccagcctggtgtgctcatccaggtgtttgagggtgagaggacaaggaccagggacaacaacctgctcggcaagtttgagctctctggcatcccgcctgcgcccaggggtgttccccagatcactgtctgcttcgacattgatgccaacggtatcctgaatgtctctgctgaggacaaga

SEQ ID NO: 2225 - DNA, 202 bp, Triticum aestivum
  Clone ID: LIB103-057-Q1-E1-F5
gtcgacgggtatagtagagactggtagctaacctaacttggcgcgtgatgccatgagctatatcatgttccttgttatatgcagttagagactttcaacatgtagatttgcttccaagacttctgtcatagaagagtacctttcctgttgtcccacggtaccatcttgaattagtgaatcttggctaccttttagttcgtag

SEQ ID NO: 2226 - DNA, 415 bp, Triticum aestivum
  Clone ID: LIB103-057-Q1-E1-F6
aattcccgggtcgacgggaccttttcgattagctgatcttgtaggttttggcgttgccgttgccactggaaagcaatattataagagttatccagagcgatgttataaatcacgtcttactgaaattatgctcgaggagaacaggacaggtgaatcttctcataggggattttatctttataatgataagcgacaagcttctccagatcctgatatcaaaaagtatgttgagaaatcaagaaacatggcaggtgttgcacaagatcctaagctgatgaaattaacagacaaggacattgtagagatggtcttctttcccgtggtgaatgaggcctgccgagtgctggatgagggaattgcactgaaagcatctgaccttgatgtaacatccattatgggaatgggctttccttct

SEQ ID NO: 2227 - DNA, 421 bp, Triticum aestivum
  Clone ID: LIB103-057-Q1-E1-F7
gtaccagtccagaattcccgggtcgacttcttcacccccggctgcggtggctgccgcgctctccaccccaagattgcgcagttcgctgagcggaatccggacgtgctgttcctgcaagtcaactacgagaagcacaagtccatgtgctacagcctccatgtccatgtcctccctttcttcaggttctacaggggagcccagggcagggtcagcagcttcagctgcacaaatgcaaccatcaagaagttcaaggacgccctcgcaaagcactcgccggacaggtgcagcctcggcccggcgcgggggctcgaggaggcggagctcttggctctggcggcaaacagggacctggaattcacctacaacgagaagccgacgctggtgccgatcgccgaggctatccagatggaagctgcctcca

SEQ ID NO: 2228 - DNA, 435 bp, Triticum aestivum
  Clone ID: LIB103-057-Q1-E1-F8
ccgggtcgacggggtaaccgaaggatgattgctataatgattgctatgatgattgttatgatcccgttgattctcttgaaatacccctttttgatgatgcttgctgcttatggccaagatgccaatatgaatgatgcttatggagatgaacttgctatagttccttatgttaaacatgaaattgttgctattgcacccacgcatgatagtcctattatctttttgaattctcccaactacactatatcggagaagtttgcacttattaaggattatattgatgggttgccttttaccattgcacatgatgatttttatgaatgtgatatgcatgtgctagctgctcctacttgcaattattatgagagaggaaccatatctccgcctctctatgtttcccatacgctgagattgtgagaaactgcttatactatg

SEQ ID NO: 2229 - DNA, 451 bp, Triticum aestivum
  Clone ID: LIB103-057-Q1-E1-F9
gtataggtccagaattcccgggtcgactgtccggacgcaaaagccttagcggctttcaggcataatgtccgagacgaatggctcgccagacacctcggccaagaaaagccaagaacaatggccgcactaacaagcctcatgacccgcttttgtgcaggagaggacagctagttggcaagatgcagcaccagcgacccaagtacatccgaaagtagggatggaaacggaaaaccgcgacgcaataaggaccgtcgccggactaaggaaaaaagtccgaagagcacggcagtcaacgccggattcaaaagctcacgacagaatcagaaacagccgcccctccaagataacagggacgacctatccaacctaaacaaaatctcggataggatatgtcaaatacacagcactcccggaaagcctgctaaccatacccacagagattgttgggttt

SEQ ID NO: 2230 - DNA, 375 bp, Triticum aestivum
  unsure at all n locations
  Clone ID: LIB103-057-Q1-E1-G1
gggtcgacgggggacggccaccatctccttaggtttcagttctcctccgcctccggtctcgagagctcgccagaatggtcgcccacaggttccaccagtaccaggtggtgggtcgcgcgctgccgacccccggcgatgagcagcccaagatctaccgcatgaagctctgggccaccaatgaggtccgcgccaagtccaagttctggtacttcctgaggaagctcaagaaggtgaagaaagccaacggccagatgctcgccatcaacgagatctttgagaagaacccaccaccatcaagaactacggcatctggctgaggtaccanagcaggaccggttaccacaacatgttcaaggagtaccgtggcacaaccct

SEQ ID NO: 2231 - DNA, 416 bp, Triticum aestivum
  Clone ID: LIB103-057-Q1-E1-G10
tcccgggtcgacgggtattgaggtggacatgcattttgcaaatgtcaggctctaatcagatggcttcagatggtaaatttggaaaaggtcctcgggagctcactggggctgttgatttaattagccgctacaggctgctgaaccatcacagtttcttttgtaagaaaccattgccactggctatctcagatacacattatcttcagaatgttgtgggtgacactgaaatccgtaaaggagaagggatggagatagatcaactcattcagaatccagacccgagggagaagaagactgcttatattaaaccctttgacatggaaacactagggcacgcatttcagttgcgagaaacagcgccagtagatctgccttcggctgaaaaaggtactccgactatatcggggaattcaaag

SEQ ID NO: 2232 - DNA, 437 bp, Triticum aestivum
  Clone ID: LIB103-057-Q1-E1-G11
cccgggtcgacgggagtaatatacagggacggatattcttggtctcaagcacactacacaattctacaaaactctaccttggtgaccccgtatgtcgatgaacacaagaacagtctgcgctccaaacacccggagcagtgcgacgactggactacatgtgaacacatcaggactttcaaaagttggttggaaacacgtctcagaggtgacaacactatttgtgatgagttgtacttgttgtctaggggaccatctttgactgtattgacttacaaaggatacgagataaatgggaatacattttacacgatcgcccaagatcaaaagagcaccaaccaaaacagcggtgtccgctttgatgcagcaaccaagagcggaaaggatacatattatggttacatagtggacatatgggaacttgactacggacctgattt

SEQ ID NO: 2233 - DNA, 401 bp, Triticum aestivum
  Clone ID: LIB103-057-Q1-E1-G12
tcccgggtcgacgggtaggactacgaaatgtcaaatgaaaagctcttgaagacattctcttggtccggatttgggcatttttatatcgtgcagtccgcagtttacctgcatctttcgctttgaagagtgtacatttgctatgtcatccacgagatttgttcttgtaaatgtgggcaagtcatttgcattttcataaagcaaacttcccttgcctacattgtatcaaatggacaaaagctcatcacattggtcaaactgatgcggttatgactaaaaacaagggcgtgaacagaaaaaaaggcggccgccctaacggttccaggcttacgtcgccttgcatgcaacgtcaaagcccttcaatagtgtcgccaaatttcatttcatggggcttcattttaaac

SEQ ID NO: 2234 - DNA, 400 bp, Triticum aestivum
  Clone ID: LIB103-057-Q1-E1-G3
gggtcgacgggcacttcttatcaggggactcgtacggagctgtgtcccgcaacggcggcagctcgaccgactcgccggaccggggaagcttcgggaccaaggagacgtccctgagcgagctggacatctacggcagctcgcggtacgaggcgatgctgctgcggggggaggacgtgaggaacacgagctggctgcacggcgggttcgacgacgacaagcccgaccagagccccctgttcgaccaccggttcgagccgctcccggagcccttcagccccttctgacgctgacggccgcctccctgcctctgtatgtaaagtctgtccccccggtcatcgcctgttcctcacgtccttcgttttgtgtttgcacaagatgtgtagtctgtaggccctttgat

SEQ ID NO: 2235 - DNA, 355 bp, Triticum aestivum
  Clone ID: LIB103-057-Q1-E1-G5
gggtcgacgggcaaaccgaagggacctgcaaagggtggcgcacaagggaacgccgagcaaccgacggagtgcaagcagcagtagaactttgtggatgcagttgttgcagtattttttccattgaactgcccagggggaatgagcttttatgctggttgtgttgtgcacgggtgagacgtttggtgtggatatttaccgtaggcatggttttgtatcaggtggcgtggtgattgtgctggtgtgggatggatggtttgggagtttgggacggtcatgttagcgtgttattcttattatggtctctagctatatgcagtcgaaggacaccctaagactgtaattatatttgaactcg

SEQ ID NO: 2236 - DNA, 424 bp, Triticum aestivum
  Clone ID: LIB103-057-Q1-E1-G6
atgcccgggtcgacggggagagcagcaacagcagctgggcgagcgagcgatggagcgagagccggagcagtagcagcagcgcgagtgagtgagcgagagctgaagcagcagcagcagatctggctggtacgaccgccgccgccgaaggggcctcacactaggggagagccgccatggagatgtcgcccgcggcgctgacttcaaggtagccgctccatgggggtgcaggatggagctctgtcggcaccgggaggtcgagttaaggagaaggtgtgatgcgataagtgtacaacctctttggtggcgccgagtaggcctcggcttcgtccgaggagtcggtgaggatgttgcggttccggtggagcaggttaaggcggcgctgtggggatggagcagccgcgatagacgaggcgatcgtcggaga

SEQ ID NO: 2237 - DNA, 427 bp, Triticum aestivum
  Clone ID: LIB103-057-Q1-E1-G7
gtaccagtccagaattcccgggtcgacggggctctccaaggcgtccaccttcgttggcaactcgacctccatccaggagatgttccggagggtgagcgagcagttcactgccatgttcaggaggaaggctttcttgcattggtacactggtgaaggcatggacgagatggagttcaccgaggcggagagcaacatgaacgacctcgtctcggagtaccagcagtaccaggatgccactgctgacgaggagggcgagtacgaggatgaggatcaggagcctgaggaggacatgtaaggtgggatgtccatgtcgtgctttgctgggtgggggttctgggggcagagtttgatctgtttggtgctttgttataaatctgtttatcatcgcaactaccgcttgtacgccaccgccattcttcctgccttt

SEQ ID NO: 2238 - DNA, 272 bp, Triticum aestivum
  Clone ID: LIB103-057-Q1-E1-H1
gggtcgacacaaggaagaaaacaaattccggcgaccgagaagtagtagtatttccatgcaaatggatcttacgatgcatgttgtttgttgcgttaacgactaaaataaccctaagtgcatgtttgtttcactcctatgtggcctaactgctccaacatccatcaattcagcaagggaaaatgtcgtctaaaactatgtccacagagtagattatgggattttggctaaaagcttatgtgcactataaaacgggataaagggagtttttttgc

SEQ ID NO: 2239 - DNA, 377 bp, Triticum aestivum
  unsure at all n locations
  Clone ID: LIB103-057-Q1-E1-H3
gggtcgagttcttctccccaggctgcggtggctgccgcgctctccaccccaagattgcgcagttcgctgagcggaatccggacgtgctgttcctgcaagtcaactacgagaagcacaagtccatgtgctacagcctccatgtccatgtcctccctttcttcaggttctacaggggagcccagggcanggtcagcagcttcagctgcacaaatgcaaccatcaagaagttcaaggacgccctcgcaaagcactcgccggacaggtgcagcctcggcccggcgcgggggctcgaggaggcggagctcttggctctggcggcaaacagggacctggaattcacctacaacgagaagccgacgctggtgccgatcgccgag

SEQ ID NO: 2240 - DNA, 378 bp, Triticum aestivum
  unsure at all n locations
  Clone ID: LIB103-057-Q1-E1-H7
aattcncgggtcgacgggaagatcaaaaagctcatctggagcagtgggatcagaagcgtgccccgtagggttcgcgtgaggattgcccgcaggaggaacgacgaggaggacgccaaggaggagctctactcactcgtcactgttgccgaggtgcctgctgagggtttgaaggggctgggaaccaaggttgtcgatgacactgagtagaatctttctttatctacatcgttagaatgagctgttattttgcattgcaccagcatgttttttgtatcccatggaagttttggagtatggaatatcgcaagctatctattttccttcatctaaaaaaaaaaaaaaaaaagaaaattaaagagaaaaaagaaaaaatgaaaa

SEQ ID NO: 2241 - DNA, 421 bp, Triticum aestivum
  Clone ID: LIB103-058-Q1-E1-A2
gggtcgacgggtccacgccaccaacaactaccaatagaccacggctggcgttttctgcgtttctgagtccaatttgtttttttaggggtggttctgagtcgagttattgctaaaataacttcaggatgctgccaataattgtattgttgttcgttaaagtacacttttttcctcaggaattacttcaggggcagattatggttacctccggccggcccctcaccggtgaggtgtaatgcatcaccatatgcttagccctgtgtactgcaaaactgctcatattacgtgcgtataaggtcattgagtcatcgacattggtgaatctgccgaacgtccaaaggtagatcatgagttgacatgtccggcatacaatacatactggaaagagaatgtgcacaaatttagataaaaagaatttgtc

SEQ ID NO: 2242 - DNA, 438 bp, Triticum aestivum
  Clone ID: LIB103-058-Q1-E1-A6
taccgatccagaattcccgggtcgactgtgtttctgtatctatccaggggctggcatttttcgataaagggtgaattttattgactcgaaataaagcatcaagttgatataaacacgatgaaaacatacacggcctctgcataattaagacgcacataaccaataccaacacacacacaaaatacccgctagcaaatagcaaggccatataagaccaaagcattgcataagcgagagaaaaacccgaagcgaagcgaacaaatctgcgatcgacaaactacaacaatgaccatatccacaccaaccatctcatgatatcataaggacaacggggttcttcaacagcaacgccttcatgatgagagcaacgctcgagagccgccgtcatcggatccaaccaccaaaggtaagactctaggttttcaccctgaagacagt

SEQ ID NO: 2243 - DNA, 415 bp, Triticum aestivum
  Clone ID: LIB103-058-Q1-E1-A8
attccgggtcgacgggctttgggacaaatctaaaacttggaaccctggtaaaatatgattcgatccgcaggcacttgaagcaaagcacacggcacctaagctagtaattgggaaagcaaaattagtccaaacaagtatacgatccggaacagtaccatgcgcagatcaggctaggatcggaggggaccacgaactcctcagctccggtagagggatcccgccgcccgagtgggtcggcggccgtcaggtctgccaattggactggctccgcccggccgcctccccgcttcgtcacctacccctttgctagctggtggctgtaacttgtcggcttcctccgccccttatcccttctcttgtatgcgattcacgcagttggcttcgtgattgctaggaccgcgagtggcttcgccct

SEQ ID NO: 2244 - DNA, 408 bp, Triticum aestivum
  Clone ID: LIB103-058-Q1-E1-A9
tacggtcgtaaaattcccgggtcgacggggaggaggagcctgaggaggagctaggaactgaatatctggtgcagccgcttggccgtgctgaagacgaagagcattccagtgactttgagccagaagaaaatggtgatggtgctgaggacgaggagattgaggatgatgatgctgaggatggtgaggattctgtcaaggcgcaatcctcttcgaagaggaagaggtctggcgcggaggatgaagatgatgatgacggtgatgatgatggtgatgatgatgagaagcctccatcaaagcgatagtcaatttgttcttgctgatctggtatcttttctgcttgggccaagaaggaaaataatcctcacggagcgggttgttggtaaatgctgtagctttaggacatctgtg

SEQ ID NO: 2245 - DNA, 417 bp, Triticum aestivum
  Clone ID: LIB103-058-Q1-E1-B8
gtaccgatccagaattcccgggtcgacgggcatctcgaatactacttctggctgtgggcggggatcggcgcggtgaactttgttgtgtacacggcattcgccaagaattacacggtgaagaaagtcgagctccggtgaacacggtttgctgtcggtcacaggcgtacgtttttcatcctctttgttgtgtatgtaccgtctacaaaaccagttcgatgtaattaaatatcgcccaaaattcctgtagctgtgttcatttgaataaatataaaaggtgcctttggaacagaaaaaaaaaataaaaaaaaaaaaaaaaaaaaaaaaaaaaaaaaaaaaaaccaataaaaaaaaaaaaaaaaaaaaaaaaaaaaaaaagttaaaaaaaaaaaaaaaaagaaaaaaaaaaaaggggccccc

SEQ ID NO: 2246 - DNA, 400 bp, Triticum aestivum
  Clone ID: LIB103-058-Q1-E1-C7
tcgacgggagagcttacccgggccaaggagcaagccaggagaagtgatgcggctaccatgaaggcagctgaggaattaaaagccgaacaggctgctcatcaccgaagtgaggataaaatagccaacatggctcttgagctgcaaaacaccgcgagccgatatgagcttctcgaaagggaaaaccaaatgaaaacggctgacctagagaaggccttacaagcagcaaaggaaactcgctctaaaatcagaatggctcgggagaagcttcagcaagccggtgatatcgtggctgggaagccctttttattgtgaatgaaattcggcgatccgaagtatgccccccttgaccaattgtggagttctctagatgcgtacttggatttagcaaagagtgatgctg

SEQ ID NO: 2247 - DNA, 387 bp, Triticum aestivum
  Clone ID: LIB103-058-Q1-E1-C8
ggtcgacgggtgggggcagatgggcaagagatacctgtaagtctggtatatgaccaagtagcgttagcagcaaagtattcccaacaggattgtaagctagacagcctgttgtatggtatagaggaagagtatagccaatctaagtgactatgtaatttaaatggacctatgtagtccctagccggattgaaaatcatttgtcatggcggaccttttcgcttcagcccccggacctgatagtccggagtgtatccgaatacccgcacagttataaaaaaccggggtatgcatggaaaccaggcgtatgggtcacaagtgcctgaatataccagtatccaactagttatgtgatattacatggatagtttgaaacatctttcagagaga

SEQ ID NO: 2248 - DNA, 416 bp, Triticum aestivum
  Clone ID: LIB103-058-Q1-E1-D12
gggtcgacgggaggtgctcaaggggcccacgagacaggggggcacaccctacagggggggcgtgccctcctatctcgtggagtcctcgagtatcttctgacttgaactccacgtctccaggatgatattcttgcaaaaaatcacgttgccgaaggtttcattccgtttggactccgtttgatattccttttcttcgaaatactgaaacaggcaataaaacagcaatatgggctgggcctctggttaataggttagtcccaaaagtaatataaaagtgtataataaagcccataatcattcaaagcacatagtaatatagcatggaacaatcaaaaattatagatacgttggagacgtatcaacgcatcaaattcctccttaatgcctgcttgaaccataaaatcttctgattgcca

SEQ ID NO: 2249 - DNA, 432 bp, Triticum aestivum
  Clone ID: LIB103-058-Q1-E1-D6
attcgcgggtcgacgggtcggggatatgccctactggcacacacgctcggcaaaatggggtcgtgtgcgaccggcgagcgctcaaatatagaaatacgtgcagtagagctaaaaatacaattatacaggcgaaattgattccggtcgcaagtacatcccacacagtcagtccccgctaaacatttccgttcgtatgtacatcccacacagtcgctccaaggaaaatgtttccattcataggtacatcacacaaaaaatttcccgttaaatcgtttgcgttattgaatgtatcagacatggtccgtataagaaactgtgtggcaaaggatgtccatcacacacagtttttatgtggtaaacgtttgcgcaaggtggcctaactcaaacagttttcaagagaaagtcatgtatgattacacattgatccaacac

SEQ ID NO: 2250 - DNA, 438 bp, Triticum aestivum
  Clone ID: LIB103-058-Q1-E1-D7
aattctcgggtcgacgggggtaaggacggtgacgagggcgatgagtactagagcctgcctcctggtgctttcccaaggcatgctgctgcaatcctatgatctgcccgagtggctttatctgttatctgtctgtttgaacatttgctttgtggtgtttgttttacaacctgttgtgttgtaagaaccttgtatgtttgaacctgttatgcaccttggttaataaaaaaaaaaaaaaaaaaaaaaaaaaaaaaaaaaaaaaaaaaaaaaaaaaaaaaaaaaaaaaaaaaaaaaaaaaaaaaaaaaaaaaacccaaaaaaaaaaaaaaaaattaaaataaaaaagggggccccccaaaggtttcaagcttaatttacccttaatggaaatttaaaccccttccaaagtttcccccaaattcaatttcctggcccttttttt

SEQ ID NO: 2251 - DNA, 437 bp, Triticum aestivum
  Clone ID: LIB103-058-Q1-E1-D8
attcgcgggtcgacggggtggatgaactagcgggacgatgagatcaacgacggatcctcatccgatacggtggatgagggatgtcgaggtgttgctgtggacgacatcgtcggggaagaggctccggctgggtggcggacggagcagggtgtggggtttcgtcgcaggttttcgcggcctcggtgtacgaatgggtgggcggatgggatggcagtggggaaccatggcttagagacgcgcttgtccgaaatgtggggtaagttacggaagtacccccaccgatttgaggcggttctttcggttcaggggtaccacgggcattttgcgtgtcgggatttcacgggtggtgggagttttcgcgcgcgttgtaatttcggaatagcaaggcgcgggttgagatggagggagttgtcggagcacaacagacaaagatatat

SEQ ID NO: 2252 - DNA, 92 bp, Triticum aestivum
  Clone ID: LIB103-058-Q1-E1-E4
ttaataatacggaggccgccctaaaggatccaagcttacttacccttccatgcaacttcaaactcctccaaaatggtccccaaaattcaatt

SEQ ID NO: 2253 - DNA, 426 bp, Triticum aestivum
  Clone ID: LIB103-058-Q1-E1-E8
gggtcgacgggggcacggaagaggcccggggctgcagcgggagagagccggacggcggggaggaaggaggcggacacgtccgccggtgggagttttgtccggcggcggaggggacgaggttagggtttgatctgcgaagatttcggggggactcacatatatatagctagagggagctaggagactcctaatggagtgcggttttctcccacacgatcgtgatcgaacgacctagagcatggaggtgacttagaggggttttgggctgtttggagggggtttttgctacaacacacaaaaggactttgcggttacccggttaaccgttggagtaccaaatgacctccaaatggaacgaaacttgacaggtggtctaccggtggtataccaaggccacttgacaagcctcggtccattccgaaaacg

SEQ ID NO: 2254 - DNA, 456 bp, Triticum aestivum
  Clone ID: LIB103-058-Q1-E1-F5
gtacgatcaaaaattcgcgggtcgacgggcatgcagaaaacctgaagcatagtagcgtaactgaatattcatttattgaaaagccataaaacacaataagttgacacattttattggatactgtatccaattattacaaaatgacgagcacattttcgcaaggaaatggcacaccatcaaaacccttactggaagtatatggaaaggaatggaaccccgggagctatcacaccttttcgatagatgcaaagaaacaaaaataagattacacggtactggacgggacatgatgtccaattattcaagacaacaagaacatttcgactatctcggcatgaaatcccggcgtatagactttcttatgcaatagctgcggcaaattcaacatccttggtacatacacgatcgcatccagttgtgcaattctctatgacatctttcccttgttcacctacg

SEQ ID NO: 2255 - DNA, 391 bp, Triticum aestivum
  Clone ID: LIB103-058-Q1-E1-F6
gacgggcgacggtagaggcgcccacatcaacctcaaggtcaaggggcaggatggcaatgaggttttcttccgcatcaagagatccacacagctgaagaagctgatgaacgcttactgcgaccgtcagtctgtggatctcaactccattgctttcctttttgatggtcgtaggctccgtggtgagcagacccctgatgagcttgagatggaggaaggcgacgagatcgacgccatgcttcaccagaccggagggtgctttcctggcccttacaaggagcttgctgcagcctggctgttctatgtcgtaggctaccttttgtgctcgagtacgatgtacgaagtgtaacaacttgtgaggctacggtcctgtgccattacctgagggggggtc

SEQ ID NO: 2256 - DNA, 381 bp, Triticum aestivum
  Clone ID: LIB103-058-Q1-E1-F8
gggtcgacgcctacctgcattacatattcggtgaggagaacgagccggagcaggtcggggagcaagagcttcatcgtccagtgcaggcaccatggcccatcggcaacgatatcggcgtgacagtccttgggcacacaattgacatattgcagaggaggtgtgatgaggagtttgccatccaccatgcaaaatatccaaagctgctcagcggcatgatcgacgacccacccaaagagccgccgtcactagtgctcattgagagcctgatgccccgcaaggaatgggcagaggccctctgcgattcagtcaagacacgggcagcctgcagcttcatcattgcccgcgacggccgtgtcaaactcgattccgatgatgtggtgg

SEQ ID NO: 2257 - DNA, 429 bp, Triticum aestivum
  Clone ID: LIB103-058-Q1-E1-G6
cgacgggcggatggagcaggaagatcagagattgaagaagcacgtcggctgttggatggacatccaacagtcactgctgctataatcgtgtgttcactgacaaagccttgcgtaaacaagtctgcctcgaaatctgtggtatgtacagcccatttgctattatttttataatgtttactcattttctaattcatatggaatttattgcagcccgttttccattttgagaattgctggccattttctggtcagtaccagggtcaaaaaattaactaaatatgtgggaaattgcgaaaattcgcaaatttttgctggggaacgaaatattcttaatccaaaaattaatagccatactaaaacaaatttaaaaataaattagtactatgtcatgttaaatccaatgaaatacgtataagatatcagttaaaa

SEQ ID NO: 2258 - DNA, 434 bp, Triticum aestivum
  Clone ID: LIB103-058-Q1-E1-G7
attcgcgggtcgacgggttcctgcaacggatggatctgtgccgcaagtacgcttttggcaagatgctcgtgattggttctgaggcgcccttcaaagtcaaggggctgtggctcttccgtgggcaggacatccctgagttcgtcatgaatgaggtctatgacatggagctctacgagtggactaaggttgacctctccgacgaggcccagaagaagcgtgtcgaggccatgatcgaggaccttgagccgtttgaggggcaggccttgctggacgccaagtgcttcaagtaagcgaacagtgcctgggatcgtgatggcggtggcaaagaaactatctaggacttgaaattcagtgtcgaaacagttggtctttttctggaagagtttgcttgttacttaatggctatttgacctggtgaactagttaattttgtg

SEQ ID NO: 2259 - DNA, 411 bp, Triticum aestivum
  Clone ID: LIB103-058-Q1-E1-H5
attcgcgggtcgacggggtaaatgcagtctgaggagggtgaggagtatttttagccggagtgaaaaacggctcgcccgaggaaaatacacaaacgtgcccctgaccttctcatcctagcgacatgtgtcacccacatacagtgtggtggagatcgtgggtgaatagataactcttatcgtgggaagtgtaatggtttgagcggcaaaagccgaaaattcagataagaatattttaaagtttcgttcgcaatttcttcagctgacaaggacacattgaagcttttgaacgagtttcaaatagaacgcacatgaagaatttgtgaacatactgggttgagtttagcagagagggggaaagggtccgatcacattcacttagcaaaaaggtcaacttgaagaattagcaataag

SEQ ID NO: 2260 - DNA, 449 bp, Triticum aestivum
  Clone ID: LIB103-059-Q1-E1-A10
attcccgggccgacggggttcgtgactcaaaccgggactaaaggtgtaatcattagtcccggtttgagatacaaaccgggactaagggcatcacaccctttagtcctggttcgtgtcttaaaccgggactaaaaggctcatttgaaccgggaccaatgcctttagccgcacgaaccaggaccaatgctcacattaatcccggttcgtgactgaaccgggactaatgggcttatctggcccgaacgaaagccgtgttttctagtagtgaagatggagtattgggaagggccttataggtctcaaatctgaaatctcatcaaccaagacatatggtgagtggaggaatgtatctcgtactttacaaaactactcaaattaaatagatgcattaattggattaattatggtgcatgcatgtttgaccactagatgagtaggaacattacatg

SEQ ID NO: 2261 - DNA, 402 bp, Triticum aestivum
  Clone ID: LIB103-059-Q1-E1-A5
gaaagggaaaaggggtggaaaagggaacgccaaagggtttggtaaaggtaaaggaaaaggtaaaggcaaacccaaagggatgggtaccacttgattatctggccacaagaaacaaatattgtatgctagataccagcaggaatacgaagtccgcgtgtctgatatgtctgcgtgcttgttacattaacctagactgggtcactggtatcacttcagttttgtttcacttctattgtgatagccggagatctaaccgtaattttgcaacatatatgtaaccgcctttgttgtgactacaagtaaccatgggctcaatttgatttgcatccagcattccacacttggttctactgccaatatacatctcaagctgacgctctacaggatccaagcttacgtaca

SEQ ID NO: 2262 - DNA, 454 bp, Triticum aestivum
  unsure at all n locations
  Clone ID: LIB103-059-Q1-E1-A6
gtaccgatctacaattcccgggccgacttcttctcccacggctgcggtggctgccgcgctctccaccccaagattgcgcagttcgctgagcggaatccggacgtgctgttcctgcaagtcaactacgagaagcacaagtccatgtgctacagcctccatgtccatgtcctccctttcttcaggttctacaggggagcccagggcagggtcagcagcttcagctgcacaaatgcaaccatcaagaagttcaaggacgccctcgcaaagcactcgccggacaggtgcagcctcggcccggcgcgggggctcgaggaggcggagctcttggctctggcggcaaacagggacctggaattcacctacaacgagaagccgacgctggtgccgatcgccgaggctatccanatggaagctgcctcattggcggcccatggatgccattgcccgcggccgc

SEQ ID NO: 2263 - DNA, 428 bp, Triticum aestivum
  Clone ID: LIB103-059-Q1-E1-A8
gtaccgatctaaaattcccgggtcgacgggtgtacgaactagatttggttttaggctgccttgggacgtcctcccacctccttggccgccaccccttgctcctatataagtagatccatctagtagcttttccttgggatttgtttagttaaaagttagccattgcaacttcgtgtacttcgtttgtgtccaacgaccagaccaagaccgcttacggatccccaccattatcaatacttcatatatattcgtaatattcagattgctttatcatattcttgcttgttcttcgattgcttgcaggaatagaccttcgtggtcaggttgattgtgctccagcatggtcaataacctctcggagttggtttagcgattgctaaggcgcaacgtcgtgcacgtttgtagtcggatcgtcaaagtcatcctca

SEQ ID NO: 2264 - DNA, 391 bp, Triticum aestivum
  Clone ID: LIB103-059-Q1-E1-B1
ggtcgacgggaaacactagggctgttgccgacgaaggggaagctccaccgacctaccattcatgcataaatgtacactgtaggtgctttactccttgctttggagtcgatctcctctctcctggcttcattggcttgattcttgcctgtcttttgcattctacgattgttcattgtagtcttcaggtttgttggtcttcccgacggctgtcaactatcatctacaagttcagtcatttcatgctggagcccctacagtttcgaagtgaccatgtcggccactgcgtctactacacaaatactgctactccccactattttttcagtgtagtttgttccataaatgtgttgtgtcaccgtctgggtgtgactgattttttgagatgtacctt

SEQ ID NO: 2265 - DNA, 412 bp, Triticum aestivum
  Clone ID: LIB103-059-Q1-E1-B10
attcccgggtcgacgggggccgtcagctggatcgacggcggggagcgcttcaccgagcgcatcgtcgccttcgcctgcgtcaagggcatcttcttctccggctccttctgcgccatcttctggctcaagaagcgcgggctcatgccgggcctcaccttctccaatcgagctcatctcccgcgacgagggcctgcactgcgacttcgcctgcctcctctacgacatcctgcgcggcaagctggacgagtcgcgcgtcttcgagatcgtctccgaagccgtggacatcgatagggagttcgtctgcgacgcgctgccctgcgcgctcgtcagcatgaacggctacctcatgagccagtacatcaagttcgtggccgaacgcctgctcatggcgctaggctgcaataagctgtac

SEQ ID NO: 2266 - DNA, 406 bp, Triticum aestivum
  Clone ID: LIB103-059-Q1-E1-B12
attcccgggtcgacgggtagaggaacgacagcgcgaggaagaagaaggagagtgtgagaagagagtgccgggccggcctgtttataaggtaattcataagtgggcacgagattcaaggagaccacggcgtggttatctccccctcacggtgcctcgattttcggaaagacagtaacagcagagatccgttgcggatctggcggagtaaaaaatggacttaatggaggatgacgtcacggcggattatccggagtccggagaatgacgtcacaccgggttatggccttcacacgaacggtaagccggagattttttctgtcggcagagttgaaaattgacacgagccggctcaagtcaatctggccaaaaaaaaaaaaaaaaaaaaaaaaaaaaaagcggccgctct

SEQ ID NO: 2267 - DNA, 367 bp, Triticum aestivum
  Clone ID: LIB103-059-Q1-E1-B6
ggtaccgatctacaattcccgggtcgacggggatacccaaatggcggagggtgtatgtcctcttccgcggggtgcccctgcttgtacctagatggttactctttccgtccagtgtcaccggctaacattgtgatagtatcagtcagggtaatgtcagatcagtacaacttcaactccttcctcacaacgatgcagctggtaatctgcacctgcaccaacatcaagatgcaattccctgaaaacgtcaggcagtccaaaaggattcagtcttatctacgcgtacataccacttcatagctcatcaattgagcccctgaatttcatttcattggccctcattttaaagtatcataactggcaaacccct

SEQ ID NO: 2268 - DNA, 455 bp, Triticum aestivum
  Clone ID: LIB103-059-Q1-E1-B8
ggtaccgatctagaattcccgggtcgacgggcacatcgaggcattgggtcaggcgaaccacttggttttgagcacagttggccatctgaaagcacaaccacaatgcaaagacattaggatttctagggaaaattggacagcataacagttgtaaatgctcagaaaaagatttgagagatccacaaaagtttgcaataccactcaacaacatcatatcaaggttctgattcaattagcaacatactagaaatagtagaaactgaattggggcttgaaacaacaatcctataagctactacggattagtaacatgtgaacctgacagaagaagagagcctagtccttaacccacgttaaatgagaagagaatgactcagatcagagggcataaggtaaaggagtaaaagagccttacgttccctcccacaatcaattcccctacatataactaaagc

SEQ ID NO: 2269 - DNA, 404 bp, Triticum aestivum
  Clone ID: LIB103-059-Q1-E1-C10
attcccgggtcgacctaatttgtcagaatttttggagttacagaagtattcaaaatctccagattgctacagactgttctgtttttgacatattctgttcttcgtgtgttgtttgcttattttgatgaatctatgagtagtatcgggcggtatgaaccatagagaagttggaatacagtaggtttaacaccaatattaataaagaatgatttcattacagtaccttaaagtggtggtttattttcttatactaacggagctcatgagattttttgttgaagttttgtgttgtgaagttttcaagttttttggtaaagatttgacggattttggaataaggattggcaagagcctaagcttggggatgcccaaggcaccccaaggtaaaattcaaggaaaaatga

SEQ ID NO: 2270 - DNA, 301 bp, Triticum aestivum
  Clone ID: LIB103-059-Q1-E1-C2
cggtctagaaatcccgggtcgacggggttgaataaatccattgtgagaagagcccttgtgatcatgcaccacagggacgaagtggagtacaagagggagcgccatgtgattgtccgcaaggcttgagctgaactgaaccgatggaactaccatggaaccctctggccatctgatgtgtgtgtataagtagtgctgacactgcaacctgtttcctgaggaaatttgttgcttcgttgaaattgagttgtacttgtactacttaaagctgtagctgtatccctgaattatcttgtcgaactga

SEQ ID NO: 2271 - DNA, 298 bp, Triticum aestivum
  Clone ID: LIB103-059-Q1-E1-C9
gacgggctatcccactatgtgcatgcgcgcactcctttcgtgtttgatggcttcttgatttatgcactgcctagtgtaatgcattaccattccggttgagttgatagaccctgtccacgatcaaactgcaatttgggtgcccccatttggtcatttacctcatgtcatcgcattgtttaaagttggagcaaacttcgccggtgcattcaaaccccgtgcagccgctctacacgatccaagcttacctacccttgcatgccatctcataacccttcaaaagtatcacctaaattcattt

SEQ ID NO: 2272 - DNA, 448 bp, Triticum aestivum
  unsure at all n locations
  Clone ID: LIB103-059-Q1-E1-D11
attcccgggccgacgggcaagggtacgaagaggggctcgtccgcggccgaggacgagcagtccaccgcggcggtggcggtgcagctcgccaaggagtggagcacgtggacgatgaagacggcgaaggtggtggcgcactggggcttcatcccgctcatcatcgtcgtcggcatgactaagggagacgagcccaaacctagcttgctccagcttctgacccccgtctgatccaatccccggcgagccctagactggatcgatccatctccttttagttactactagtagatgtttttgctgtttattgaatcctggtggttgagttcttgatccctgngtggtgatcttttatctgatctgtgtctaataatgttatgtggtcggatcgatcctggattggatcggatcttgttagatacctgagatgctacagatctgctattaatat

SEQ ID NO: 2273 - DNA, 461 bp, Triticum aestivum
  Clone ID: LIB103-059-Q1-E1-D12
aggtacaggtctagaattcccgggtcgacgggcacccacacatgatagtcctattatctttttgaattctcccgactacactatatcggagaagtttgcgcttagtaaggattatattgatgggttgccttttaccattgcacatgatgatgaatgtaatatgcatgtgcttgctactcctactttcaattattatgagagaggaactatatctccacctctctatgtttccaatacgatagaattgcaagaaactgttatactatgcattggcctttacttggtgtgcatgaattgttcttttatgacatgccaatgcataggaagagagttaaacttcgttgttgcatgatatatgttactttgtgctcactactaaattacaaatcattgttaattaaaattggctttgatataccttgggatctgggtggatccatcacttgagcactatatgccta

SEQ ID NO: 2274 - DNA, 344 bp, Triticum aestivum
  Clone ID: LIB103-059-Q1-E1-D6
gacggggccaagcacatctccaagatcgcagagaagaagatcaaggccgccggcggcgctgtcgtgctcgttgcctagggttctgttcgcgaccgtgccttgagatctattatatctgaactattagttgtttcccgtaccagcaatttgtgttgaacaagacatcgttagtttgttatcctggttcctgtgtggtaaaccaacatcttatgagaattttgcgctatgttatgccagtttatatcagacgagttatccaaaaaaaaaaaaaaaaaaaaaaaaaaaaaaaaaaaaaaaaaaaaaaaaaaaaaataaaataacaaaaacacaacggaaagaatgaa

SEQ ID NO: 2275 - DNA, 438 bp, Triticum aestivum
  Clone ID: LIB103-059-Q1-E1-D9
attcccgggccgacggggaagaagaagctgaaccccatgcgggatatcaaggtgcagaagctcgtcctcaacatctccgccggtgagagcggagatcgcctcacccgcgcctccaaggtgctggagcagctgagcggacagtcaccagtgttctccaaggctaggtacactgtcaggtcgttcggtatcaggcgtaatgagaagattgcgtgctacgtgactatcaggggtgagaaggcgatgcagctgctggagagtggcctgaaggtgaaggagtacgagctgctcaggaggaacttcagcgacaccggctgctttggcttcggtatccaggagcacatcgatctcggcatgaagtatgatccatctaccggcatctacggtatggacttctttgtggtgctcgagcgtgctgggtaccgcgtctcccgccgccgc

SEQ ID NO: 2276 - DNA, 410 bp, Triticum aestivum
  Clone ID: LIB103-059-Q1-E1-E10
attcccgggccgacggggcggctcagaaatgctctacagggcaccattcaaggcgccgttgtgctctacgggtagctggcgcaacgacgcgtccgttggtggccgtggttgggcctggggtggccggtgtggacagcggtgagctcggttgcggccatcggagttcgggcgtgagcggagacgcggttgcggtggccgtggcgatgtgtgtttagcacctacggcgtctacgtggtgcggtgagtttgatgggcgcatgtccgggaccaaatggtcaccggagcatcaccggagacgaacgccggcggtggcgcattcggttgcaggcgaggcgacggctatggagcatgagggaaaaacagagatggggagcaggagcaggggctcacgatgggtgcgacgagctgctc

SEQ ID NO: 2277 - DNA, 457 bp, Triticum aestivum
  Clone ID: LIB103-059-Q1-E1-E12
ggtacaggtctagaattcccgggtcgacgggtcagttcatgtatatctgggtatttcgtgtgatttgtttcacattccaccagaaccattacgaggttcccctgatcttgcttcccaccggaggaacgaactgtaacgacccgaagactcaaatgctgggtctgcatgcggtcagcggctcggggaagagggacctgagaaagcacgagacagactctgccggcgtcggaaatcatcaccgactacgtcggcgcagtccacatacagagtcaatccctaggccccatgatggacgaacaggttggactgaacctgctgatggttgggagacggagctatctagcctgcttggatgcgcaggtgcacatggtgccggacgacttgctgctgagcacggactacctgctgagtgctcatcctcctcagatatgatcgatgatagttgaagaagcgacac

SEQ ID NO: 2278 - DNA, 365 bp, Triticum aestivum
  Clone ID: LIB103-059-Q1-E1-E4
cctgccgacagatgatgatatgcagaagctggatatgctcacgaagttcatgtctcagcacccggtgatggacttcccaagggagaagattacttgtccatcggatagtattatggggcggaattatgcactatattcagcaatcgcggagcttttctacctttgtaagatgccttgatgaagttgctactcatggggatcgtttgaatggattagggtctgcgaatcttgccatgtttggggcaatttttgtggtgacttccagaggaataagggaagaccagaggagggggagaggggaaagggattttttgttttgaagttctgttaccagaagagcggccgctctagaaggattcaagctt

SEQ ID NO: 2279 - DNA, 450 bp, Triticum aestivum
  Clone ID: LIB103-059-Q1-E1-E6
gtaccaatctagaattcccgggccgacgggtagtctaaatctgatatatcaggacactatccgcacctgtcaagaatcaaccaaagtagtactacctttaaaggagtaataccaggcgtagaggcccgatgcacggtctctctaacattagaggttgtattcggttctcccgacaacttttgaagcgaataactaatcttcaacatcgctctgttccaaagcgtctatcatgcactactcggaagaatggccttcgctcgtttcaatgcagtaccgcattaggcttatctcaaacttaagatgcccggtccacgtggcgtcatcacaatcagcggaaacacagagcgttctcttcgtacggaagaatatatgggagctctagcagccgaaccactgaatggcctctccaacccaagtaacccattggtctttcgagacacggacgcggat

SEQ ID NO: 2280 - DNA, 292 bp, Triticum aestivum
  Clone ID: LIB103-059-Q1-E1-E7
gggccgacgggtatagcgaataccacgcgctatttaacccaagttcagagctctccgttcagataacacccctaggcctgcatgtccgaatagatctggtaagtatatcagggagagattgctccgggagctgtatctaatctcagtgcaatacgcatctggctttgcacatttcagttcgggagtcctgtgggtacatgtctggctaacgtcggcaacgctataggatccgtgcttacttaggcgtgcatactacgtcatatctcttctagagtgtcaactaaattcagtt

SEQ ID NO: 2281 - DNA, 382 bp, Triticum aestivum
  Clone ID: LIB103-059-Q1-E1-E8
attcccgggtcgacggggggcaagggcgccgtgcagaagggttccaagggcccaaagattggcggcggcggcgggaagcgttgaaagtgcgttgaaagtcgattacgccaatagacatagagttgtgctgcctagccttgtttcctatcctactatcatagacctttgtcaagttattaccccgccctcttgaatttgcaccttatctgtgaggctgaatggtgttaacgttttggattgtctcgatgagtttatttataatgaatggtacttaaaaaaaaaaaaaaaaaaaaaataaaaatggaataaacacaatcaatgatcaataagaaacgtactcttcgtagggaagaaaaaaacgtgagatctaacagccgaatca

SEQ ID NO: 2282 - DNA, 446 bp, Triticum aestivum
  Clone ID: LIB103-059-Q1-E1-E9
attcccgggtcgacgggttgtactcatttgtcaagtttgactacgtattagctagtaagatggacgttgccattgaactggtatttgaaccaagaactgtggcaggtaaaccattattatatctccatttggtgctgcattgcacagacgctcaccattgccagatcattagcattgatcttcaagattttgcatggtttcctctctcagaaaaatctcccgttaacgaaaaagcgaagggaaacctcaaagccttccatcttagaagtgtgcatcgctcgatgcagaggctgggggctgggggttatcctcctttttgaaaaacaagacaaattcctacaattttttgcagtaacctgtccggatctgatcagctctacctatctataagcagctaattgactgcaggaagtagactgagtttagaagacaattgttctactcta

SEQ ID NO: 2283 - DNA, 443 bp, Triticum aestivum
  Clone ID: LIB103-059-Q1-E1-F10
attcccgggtcgacggggcgacgaagaccggcgaggggggagacggagaccagatgcggtggtggttgtcagaggaggatgcgagtgtggatgtgggctttggttgggtcgtcgggggttggtgagtgtgaagagtgtgcctcttgttgggctcaaatctcaatactgactacgctagtgggctgggctacgaacttcctcgcccgcatttttttccggctacaaacatggaaaaacatcccctcagaggggaaaaaacaaatttaaaaaaatagtgtagatactccctccgtttttatttactccgcgtattagttttggtccaagtcaagctttgtaaactttgacaaagtttatagacaaaagtattaacatatacaataacaaattaataccattagattcattactgaatgcactttcacataacatagatttgttgc

SEQ ID NO: 2284 - DNA, 440 bp, Triticum aestivum
  Clone ID: LIB103-059-Q1-E1-F12
gacggggaagaccaccgcgggcaagaagcccaaggccgagaagcggctgccggcgggcaagacggcgtccaaggaggccggcggcgagggcaagacccggggccgcaagaagggcagcaaggcgaagaagggcgtggagacgtacaagatctacatcttcaaggtgctgaagcaggtgcaccctgacatcggcatctcctccaaggccatgtccatcatgaactccttcatcaacgacatcttcgagaagctcgccggggagtccgccaagctggcccgctacaacaagaagcccaccatcacctcccgggagatccagacctccgtccgcctcgtcctccccggggagctcgccaagcacgccgtctccgagggcaccaaggccgtcaccaagttcacctcctcctagactgacgatgcgtcgcttgttgtgacagatg

SEQ ID NO: 2285 - DNA, 430 bp, Triticum aestivum
  Clone ID: LIB103-059-Q1-E1-F5
taccgagtctggaattcccgggtcgacggcgggatgggggaggcgtcatctccggcgatcgccaaggatgtcaccgagctgatcgggaacacgccgttggtgtacctcaacaaggtgaccgacgggtgcgtggggcgcgtcgccgccaagctcgagtccatggagccctgctccagcgtcaaggacaggattggatacagcatgatcaccgacgcggaggagaaggggttcatcgtcccgggcaagagcgtgctgattgagccaaccagtggcaacacaggcattgggctggccttcatggctgctgcgaagggttacagacttgtactcacaatgcccgcctccatgagtatggagaggagaatcatcttgaaggcttttggtgctgagctgatcctcaccgacccactcttgggaatgaaaggagctg

SEQ ID NO: 2286 - DNA, 416 bp, Triticum aestivum
  Clone ID: LIB103-059-Q1-E1-F6
aattcccgggccgacgggatatttgatagagcgtgggcatatcttttgtagaaagaattaaactctcctatttcacttatatctatttagacagatgacaggaattggtcattcacatggttagtcataaaatgctacataaaacttgtagatcactgaatatgatatgtttgattccttgcaatagttttgcgatataaagatggtgatattgtagtcatgctagtgggtagttgtggattattagaaatacttgtgttgaggtttgtgattcctgcagcatgcacgtatggtgaaccattatgtaatgaagtcggagcatgatgtatttatttattgtcttccttatgagcgatggtcttttcctaccaatctatccccctaggagcatgcgcgcagtactttgtttcgatagc

SEQ ID NO: 2287 - DNA, 419 bp, Triticum aestivum
  Clone ID: LIB103-059-Q1-E1-F7
attcccgggccgacggggaggggaagcatgctagcttcgaatacgggaggtatgggaacccgaccactgaggctttggagaagaagatgagtgcactggagaaagccgagtccactgtctttgtggcgtcagggatgtatgcaagcgtcgctatgctcagcacacttgtcccagcaggtgggcacattgttacaaccacagatttgtaccgcaagacaagaatttacatggagactgagctccccaagaggggaattacgatgactgttattaggcctgctgacatggatgctcttcaagatgcacttgataataataatgtatctttattcttcactgagactcctactaatccatttctcagatgcattgatattgagcttgtctccaatatgtgccataacaagggagcattgcta

SEQ ID NO: 2288 - DNA, 413 bp, Triticum aestivum
  Clone ID: LIB103-059-Q1-E1-F8
attcccgggtcgacggggcaacggattcatcccaattgctgagtacggattggagtttaccaaagactcgaaagaggggaagaaacgggtgccggtgagactattatacagtgggaagaaccattatgatctgctgatataaaatgggcacatgagatgtgtcccgatgaagcatcagaataccggcagccaccgcccatctgtggcgcatacacaaattcccgtttactttccatggttacattcttcgatcctgctatgctcctgcttgtcagttacgatgctgtaacagctgtttcgtcgatgacagtcatgggcatttggggatttgtggatttggagctagaattagcactgacctgatgatggcgccacacgagctaactatgtgctgcatggtgcagtgctgtttt

SEQ ID NO: 2289 - DNA, 411 bp, Triticum aestivum
  Clone ID: LIB103-059-Q1-E1-F9
attcccgggtcgacggggagtcggacaagctcgcccgctacaacaagaagcccaccatcacgtccagggagatccagacctccgtccgcctcgtcctccccggcgagctcgccaagcacgccgtctccgagggcaccaaggccgtcaccaagttcacctcctcatagactgaagatgcgtccgtcgcctgtagttggtctctgtatctgcacctgtactgtcgactctgcttgtctctctgcaagtagtgctggtagtctgctgggtgatcgccaatgctttgttggctaattaattggttgtaagaactgaagttgttgtgtttggcagactgatatatctatctagaactgaacttgtggtggtactgaaaaaaaaaaaaaaaaaaaaaaaaaaaaaagcggccgctct

SEQ ID NO: 2290 - DNA, 449 bp, Triticum aestivum
  Clone ID: LIB103-059-Q1-E1-G10
attcccgggtcgacggggcagagaaagtgaggagggcgctgtgctacccactcaaattgatcgccaagaatgctggtgtcaacggcagtgttgttaccgagaaggttctttctaacgacaacttcaagttcggctacaacgctgccactgggcagtacgaggacttgatggctgctggtatcatcgaccccactaaggtggtgagatgttgcctggagcatgccgcgtcggtggccaagaccttcctgacgtcggacgtcgtggtcgttgagatcaaggagcccgaagccgcgcccctcgccaaccccatggataactccggctttggatactgatgagcaacacaggccgagtttctcctgacgacgtggattaatttttggtagcatgaaccaagttttgagagattgatgatgatgatgatggtagttttgagataagaaaaatgc

SEQ ID NO: 2291 - DNA, 445 bp, Triticum aestivum
  Clone ID: LIB103-059-Q1-E1-G11
ttcccggttcgacgggaatctatattcttccactctttcgtttaagacatgagctttgttcatcctgttgccgacacgcgggacatctatatgcctccattttacaaaatcatactatatgcctccatgacacgcgggacatctagcatcaaggtggcgtgtcatgcaagaaaatggagatatgcagtgcgtaagtgagtcgtgcacttcgatggcacctagtagtactacgcaatattttttctccacgatggcacgtgaatagtgcatgtactcaatgacagagcatgggatggtagccatggacatggccggccctttttgaagagagtactaataaatacgtaactttgatgtgtcacgtcaactcgcagaacgacgagaagcttgcttactacgccttctccctcgccaacgtgtgcgcggtggctcgcagcacgaagag

SEQ ID NO: 2292 - DNA, 387 bp, Triticum aestivum
  Clone ID: LIB103-059-Q1-E1-G12
gggaaaccctatactgagtcgtattaatttgacacactacttttgatcgccaggatgccgatatcagctgaattgtggttacctaatgagtactttctaagaacaacttcagattcggctcaggactcctaatggccaggtttaataccttcacaatgtctgtaaacatcaaccccatctaattgtggtcagatcttacgtggatcatagcacatcgatacctgataacttcttgacgtcggtcctcatggtcggtaagatctcctagaccaaggctgttccctgtcaccaacacatgcataattcgatatttggacatgtttacacagcacttgatgagtttctcgcgagaaattgtcataacttatgatatgattaaccaagttt

SEQ ID NO: 2293 - DNA, 382 bp, Triticum aestivum
  Clone ID: LIB103-059-Q1-E1-G3
cggtcaagacatcccgggtcgaccgggacaacgacaaatgggaggttagcggtattctgtgaatggaatgatgacggaattcataacaactgtagatgcacagctctggcaattcgagatcttttcttttgtctgcatggcacaaactatatgagtcaccagccgctctttccacttcaattgtactattttgttgtaccaaatgttagctaatgcaatctccattccggataaaaaaaaatatggaaaaacttataaaaaacatcaaactcaccaaaaaaaaaatcaatatgtaaggcaatgaaaattataaaccaaagcctaaaaaaaaaaatcggccgctctaaaggttccaagcttacttacccttgaatgcgacttc

SEQ ID NO: 2294 - DNA, 388 bp, Triticum aestivum
  Clone ID: LIB103-059-Q1-E1-G7
attcccggttcgacgggtgaagagagctcttgtccaccccagtgtaatcttgcaacgtgcgtttttgttaaagtccggcactctgcacaatgacctgttcctttgagttttgtttgtcatgctggagttatagattgtgttatctcgattaaaaaaaaaaaaaaaaaaaaaaaaaaaaaaaaaaaaaaaaaaaaaaaaaaaaaaaaaaaaaaagaaaaaaaaaataaaaaaaaaaaaaaaaaaaaaaaaaaaaaaaaaacaaaaaaaaaaaaaaaaaaaaaaaaaaaaggggacgcccaaaaggattaaactttaaatacacttgaaaagcaagaaaaaccacttcaaaaaggccagctaaattaaaattaagggccgttgttttaaa

SEQ ID NO: 2295 - DNA, 414 bp, Triticum aestivum
  Clone ID: LIB103-059-Q1-E1-G9
attcccgggtcgacgggagaattaaggccaggcagatgatgtctggtgatgaacttatgatgtctgcggaaggtctgagctttgtggatggtggcatgaaggagatagaagctggaggtggaggatacagaagaggggcaaatgatgacttcatggtttatggacaggacaactcaatggacaggaggagctccttggacccccttgccgaggcgcattacaagagacccactcctctagaggaaaagaagaatgtgcacagtatgggcgatgagtccttcatgatacctgttacctccaactcacaggataatcttggagcagccggccgtactgccattgacatagatgccgagcttggctcaagtgttcagaaaacatcagatgctaaggctggagctgaacttttctatg

SEQ ID NO: 2296 - DNA, 443 bp, Triticum aestivum
  Clone ID: LIB103-059-Q1-E1-H1
tcccgggtcgacgggccttcagatggctgaaatgtagaccgggcctttttgggcccgttatatcacgggcagttaccaggccgaaacatatctcgggccttagttggcccactaatatcatgggcctttaataggccgaaagcttagtacagacatcaacgggccgaattgtgcgacaagcctttaacaagcccaaagtcacgttgggcttaactgttgccacctttatcacgggccattagtgggcccaatgtcctgtcaggccatatatggcccatgggaagcacgggccattcctaagacgaaagtcacaccggactgaaatgggcccatgtctacatcaggcctctaacaagccgaaagtcactcggctataattggccccaaatattcaacgaacaattaatgggccagatctggctttgggccgtaaatgggcccaa

SEQ ID NO: 2297 - DNA, 442 bp, Triticum aestivum
  Clone ID: LIB103-059-Q1-E1-H3
cccgggtcgacgggatgacacaggtcaccaacatggatgattcaattcatgggaccttttggtgcagttcacctaaaatgaagcaatgtcccatgagctagcaacttcttcttcttctttctttaagaaatgggctcaagcccaagttcaatttccgtcagaaaacgaaacccacagagcttcttcattagttgcaataaaattgagcaacatcaaggttggtcgtgaagctcctgaaaagtaggcggaccaggacagttgcatctctaacgaaaagaagcaacttatcttaatgggaaatttagcaggagatgaaaaaagtgccattgattcatattactggaggcattacattgaaaacaacattggtttaacgtgtccttacttttaacagtgcgactgctacatttttacagtggcattacataagagtggctcgggg

SEQ ID NO: 2298 - DNA, 452 bp, Triticum aestivum
  Clone ID: LIB103-059-Q1-E1-H5
ggtaccgatctaaaattcccgggccgacggggaagaagcagctgaaccccatgcgggacatcaaggtgcagaagctcgtcctcaacatctccgtcggcgagagcggagatcgcctcacccgcgcctccaaggtgctggagcagctgagcggacagtcaccggtgttctccaaggcgaggtacactgtcaggtcgttcggtatcaggcgtaatgagaagatcgcctgctatgtgactatcaggggtgagaaggcgatgcagctgctggagagtggcctgaaggtgaaggagtacgagctgctcaggaggaacttcagcgacaccggatgctttggcttcggtatccaggagcacatcgatctcggcatgaagtacgatccatctaccggcatctacggtatggacttctttgtggtgctcgagcgtgctgggtaccgcgtctcccgccgccgc

SEQ ID NO: 2299 - DNA, 373 bp, Triticum aestivum
  Clone ID: LIB103-059-Q1-E1-H6
gtgacgagggcgacgagtactagagcctgcctcctggtgcttttccaaggcgtgctgctgctatcccatgatctgcccgagtggctttatctgtaatctgtctgtttgaatctttgcttttggtgtttgttttacaacctgttgtgttgtaagacccttgtatctttgaacctgttatgcaccttggttaatatgcatgctatctggttatctaaaaaaaaaaaaaaaaaaaaaaaaaaaaaaaaaaaaaaaaaaaaaaaaaaaaggaaaaaaaaaaaaaaaaaaaaaaaaaaaaaaagcggccgctctaaaggatccaagcttacttacccgtgcatgcaacttcatagctcttcaaaagtgtcacctaaat

SEQ ID NO: 2300 - DNA, 419 bp, Triticum aestivum
  unsure at all n locations
  Clone ID: LIB103-059-Q1-E1-H7
gtaccgatctacaattcccgggccgacgggcaaaacgataaacattttgatcgtcaagcgtcaggcagcgagaggcagcaggataggcccgacagcaggcagagtggctgggatggctgggataacactgggaaggctgataggtcagaatcaaaagagaggcagtagaaccatggcggcttcttctggtccgttgtcctgttttgttgtatatgcagtagctagcccgcgtgtttccgaacctacctacctacctgatgcgctgtagcgattagcatcctgctcgaactgtgtcatgtggtagaagaattgtagcttaaagcatcatgtgcatcctactcttgtgttttctttcttgccttggaaccaaactaatacattttctgaataaatcctgatgtcggagatgcaaaanaaaa

SEQ ID NO: 2301 - DNA, 442 bp, Triticum aestivum
  unsure at all n locations
  Clone ID: LIB103-059-Q1-E1-H9
attcccgggtcgacggggatcgagatttggcctacaaccacaatccctgtcttgtctccaaaaaaaaaaccacaatccctgtcctctcctccgccatcgccaccgccacctcctcccgttcttctccggccgccgcctcagacttggtgcccgcgtgctgccacccgcaggagccgcagatggcgtcttcgacgtccaccctagagatcgaggctcgcgacgtggtgaagataatgctgcagttctgcaaggaaaactcgcttcatcagacgttccagaccctgcagaacgagtgccaggtctcgctcaacacggtggacagcatggacaccttcatcgccgacattaatgctgggcgctgggatgccgtgctgccgcaggtttgccagctgaagctgccgcgcaagaagcttganggactctacgagcagattgtgctgga

SEQ ID NO: 2302 - DNA, 398 bp, Triticum aestivum
  unsure at all n locations
  Clone ID: LIB103-060-Q1-E1-A1
ccgggtcgaccggcttccagcagccagggcgagcggtggtagcgcttccttctgactttattcctgcaatcatttaccgtgcctcgtggaggcgtaaacctttgccttgaatttgtgaaacacccctgtttttgtataactaatagaactctgcgatttccttttcgtgcttgggttccttcgtgtttgccttaacgttccgcatcggcagggcccggccccgtgcatacctcgactatcgttggggcatctggatcaccaagacgagaacaaagggtgaaggggtacgtgactttgtaaacccctgagtcaagatgctcaaagggttccctttacgtacgaacaacctcaatgttctgtgttagtanagcccaaacccgtgcatacctcgactaccg

SEQ ID NO: 2303 - DNA, 446 bp, Triticum aestivum
  Clone ID: LIB103-060-Q1-E1-B10
cggtctagaatacccgggccgacgggttgccaaaggagaatacatgtttgcctattcccaaagcaagagtccttgcaaaccaaagaatggattttgttttttgggatgtggctaacaaatcaaaaggaaaaacatgttgatgcagcagcaggtacctgttggtgctttgtgcgtgatgtacaagaacatgcctatatgctgttatcctgtaaaacatcggaatgacaatgctatattatttataatatgcaattcatagttttgttggcactagtaactgactccgcgaagacacttccattgatatgatttttagggacatgtattgccaattagtctgctgctatatgctggagtaattttctgggaatgcacttgatggtatattactaatgtgcattcagcgataacactctcctgcacaatctgcagggtcttttgtgcac

SEQ ID NO: 2304 - DNA, 434 bp, Triticum aestivum
  Clone ID: LIB103-060-Q1-E1-B2
gtccggaagtcacgggtcgacgggggtgctgatggcatcgtaccgctgctggacaagccttcgttggtcgtcgccggcagagccgcacgctgctgccgattcagtccacgtaatcaccgcccttaaattgattcttgcggcagatgaatcaagccccgcgccccgatgtcaaccaaagctcccgatgagtcacatgcgcaacaatcggcttcctcctcaagaatcacctgcaccaaaggaagcctttttcagaagaacatccctgctccgtctccaggcaccttctctatggccgcaagttcggcaagtttctctcacctacgattcctctctaactgaagcacgatccgcaagaatgtgtcaacatccgatggatcatgatgatctctctgattcggttggttttgatcggaaacgatagatggttcaaaact

SEQ ID NO: 2305 - DNA, 499 bp, Triticum aestivum
  unsure at all n locations
  Clone ID: LIB103-060-Q1-E1-C5
gggtcgacgggccctctggtagtatcttttctccaatatttattatatatttcaaagtaattctccgtaaaatttcagctcatttggagatgtgcagaataggtatctctgacatagctttttcgggtctagaatttcagctgccggtattctccctctttgtgtaaaccttgcatattatgagagaaaaggcattagaattactccataaagtgttataaaggataaaaacattataaataacattatgaaaacatgatgcaaaatggacgtatcaatgaacaatctgatcataaacacacaattcataggatcccaacaagcacactgcaaaagaaaattacatggaatagaactccaagaatatcgaagagaacattgtattgaagatgaaagagagagaagaagccatctagctactagctatggacccgtaggtctgtggtgaactactcacgcatcattggaaggcagcaaggatgatgtanaagccctccgt

SEQ ID NO: 2306 - DNA, 204 bp, Triticum aestivum
  Clone ID: LIB103-060-Q1-E1-E1
ggtcgaacagcctgttgttgttactgatgttgttgttgctgttgttgttgtcgctgttgttgttgtcgttgttgttgttgttgttgttgttgttgttgttgttgttgttgttgttgttgttgttgttgttgttgttgttgttgttgttgttgttgttgttgttgttgttgttgttgttgttgttgctgttgctgttgttgttgt

SEQ ID NO: 2307 - DNA, 515 bp, Triticum aestivum
  Clone ID: LIB103-060-Q1-E1-E6
gggtcgacgggggtaccgtaataatcatcggggcagagattctagaaggcgaagtcggagtcggagtggagatagatatggacgtgacaggtacagagagagggaccatcatcgtcgtagcaggagtcgtagcactagtcctgatgattacaagaggcgtggcagagacagaagtcctagtcgtagcaggagccgcagctacagtcctgatgatgacaggaagggtggcagagacagtttgtcgcccgcacgcagaagcactagtcgctcccctcgcaagacaccacctcctcgcaagacaccacctccttgcgaggggtctcctgctaagcgcaatgatgaccgttctcctgttaggcgcaatgatgaccgttctcctgttaggcgcaatgatgaccggtctccaggctctcgtagcccttcaacatgagctgaatgtcaaacaactgaggatcaatggaacagagctgctcatattggaggctgttcagttgctttatcatgaacaatctgca

SEQ ID NO: 2308 - DNA, 526 bp, Triticum aestivum
  unsure at all n locations
  Clone ID: LIB103-060-Q1-E1-F5
accggtcatgtattcncgggtcgacgggtcagaatacaactaaaaagggacaactcagggaacatataactatctgagttgcagatgcatagattagtatgtcgaactaagttcaacatatttcttctggataacccatgcagaaaggtagaactggcagagtcacaacatagaggcgagaactcatcaagaacactttggctgtgatctttcggttcaacaaggaacttctgccataagaagctcatggtatttggaagaaataaataccacacaccttgaggactatcgcaaaggttattaataacctaaaggaatgagcaaacactaacaacatgaggtaagtagggtgaatctcgggttcaagaacccaggagtagaatacctactactaaatggcataacgggatgcttaggagaatgatggccagaatcatcacattgggatcacaaataataactagattactaagtgatactctagacacctagggtcatagtaatagctccaacctatataacgagg

SEQ ID NO: 2309 - DNA, 515 bp, Triticum aestivum
  Clone ID: LIB103-060-Q1-E1-F6
gggtcgacgggctaccaatctataccccctaggagcatgcatgtagtgctttggtttttgatgacttctagatttttgcaacaagtacatgagttcttttgactaatgttgagtccatggattatacgcaccctttcacccttccatcattgctagactttcttgtgccgcgcaactttcgccggtaccatacacccaccatttaccttcctcaaaacagccaccatacctacctattatggcatttccacagccattccgagatattttgccatgcaactttccaccgttccgttcatatgacacgcattacttttgtcatattgctctttgcatgatcatgttgttgacattgtatttgtggcaagtccaccttcataattttcatacatgtcgctcttgattcattgcatatcccgggtacacgcatgaggtattcatatagagtcatatcttgttccagctttgagttgtaaatccataaaagtgtgatgatcttcattattagagcattg

SEQ ID NO: 2310 - DNA, 422 bp, Triticum aestivum
  Clone ID: LIB103-060-Q1-E1-F9
acgggctaccaatctatcccccctaggagcatgcatgtagtgctttggtttttgatgacttctagatttttgcaacaagtacatgagttcttttgactaatgttgagtccatggattatacgcaccctttcacccttccatcattgctagactttcttgtgccgcgcaactttcgccggtaccatacacccaccatttaccttcctcaaaacagccaccatacctacctattatggcatttccacagccattccgagatattttgccatgcaactttccaccgttccgttcatatgacacgcattacttttgtcatattgctctttgcatgatcatgtagttgacattgtatttgtggcaagtccaccttcataattttcatacatgtcgctcttgattcattgcatatcccggtacaccgc

SEQ ID NO: 2311 - DNA, 391 bp, Triticum aestivum
  Clone ID: LIB103-060-Q1-E1-G1
ggtccggaatcacgggtcgaccggcgcaacatggtcacaaccttccatctccatcaggggtgatggagaacgtcgtggttcctactctcaagaccttctctctgcgagcgtacgacccaaagcaggtgataattgcgggcggaaacaagaaggccttgggaattcccccgaagggaacccaacgaaaatcaatcgacttcccggggcctcgaaccaagccgctaaccctcaaggatttctccggcgacggtctgactgatatcaccctggtgaacatcggggggattgtacgggtttgtgcagacaaaggaacccgggggccctcttcttcagcacgcttgtcggcttcttgattgttgtgatcggggtgatctttgtctctctgcaactc

SEQ ID NO: 2312 - DNA, 439 bp, Triticum aestivum
  unsure at all n locations
  Clone ID: LIB103-060-Q1-E1-G9
ggtaccggtctagaatacncgggccgacgggtctcttgattcacttatatctatttagagagatgacaggaactggtcattcacatggttagtcataaaatcctacataaaacttgtagatcactgaatatgatatgtttgattccttgcaatagttttgcgatataaaatggtgatattagagtcatgctagtgggtagttgtggattgtagaaatacttgtgttgaggattgtgattcccgtagcatgcacgtatggtgaaccattatgtaacgaagttggagcatgaggtatttattgattgtcttccttatgagtggcggtcggggacgagcgatggtcttttcctaccattctatccgcctaagggcatgcgtagtagtactttgcttcgagggctaataaacttttgcaataagtatatgagttctttatgac

SEQ ID NO: 2313 - DNA, 415 bp, Triticum aestivum
  Clone ID: LIB103-060-Q1-E1-H10
aattcccgggccgacgtacatgcaactgcagctgatgaaaagaatccagaacagaagcgtgtgcctgtttcaattgatgtccaagatcctgacttccatgattttgataacgatcgcacagagagagctttttatagcgaccaagtatgggctacatatgacagtgaggatggaatgcctcgtctatatgcaatggtgcagaaagttctttcaatgagacctttcacaatccgcatgagtttcctcaattccaaatccaatattgaactgtcgccaataaactgggttgcctctggtttccacaaaacatgtggcgattttagggttggaaggtaccagattaccgtaacagtcaacatattttcgcacaaagtcagctggactaaaggcccccgtgggattatcagaattattc

SEQ ID NO: 2314 - DNA, 430 bp, Triticum aestivum
  Clone ID: LIB103-061-Q1-E1-A10
attcccgggccgacggggaaggtatatggtgggtgtatgataccggcgaaaggcgcgcagtattagagaggctagcaatggtggaagggtgagagtgcgtataatccatggactcaacattagtcataaagaactcacatacttattgcaaaaatctattagttatcaaaacaaagtactacgcgcatgctcctagggggatagattggtaggaaaagaccatcgctcgtccccgatcgccactcataaggaagacaatcaataaataaatcatgctccgacttcatcacataacggttcaccatacgtgcatgctacgggaatcacaaacctcagaacaagtatttctcaaattcacaactactcaactagcatgactctaatatcaccatcttcatatctcaaaacaattatcaagtatcaaacttct

SEQ ID NO: 2315 - DNA, 434 bp, Triticum aestivum
  Clone ID: LIB103-061-Q1-E1-A12
aattcccgggccgacttcttctccaccggctgcggtggctgccgcgctctccaccccaagattgcgcagttcgctgagcggaatccggacgtgctgttcctgcaagtcaactacgagaagcacaagtccatgtgctacagcctccatgtccatgtcctccctttcttcaggttctacaggggagcccagggcagggtcagcagcttcagctgcacaaatgcaaccatcaagaagttcaaggacgccctcgcaaagcactcgccggacaggtgcagcctcggcccggcgcgggggctcgaggaggcggagctcttggctctggcggcaaacagggacctggaattcacctacaacgagaagccgacgctggtgccgatcgccgaggctatccagatggaagctgcctccattggcggcccatggatgccattgtc

SEQ ID NO: 2316 - DNA, 331 bp, Triticum aestivum
  Clone ID: LIB103-061-Q1-E1-A2
ggtccggaaatcacgggtcgaccggatcccgcggggcagagaaaacatgagccctggcctggaggctgaagcacgggacttggctgaatctgaattagcatggaccaacaaatcaggagcgaaccgagtgaaagaattctaggaaaagggcagggtctctgaagacagtcctaagctattctgtaactaccttaaaacggtgtgctctgtatgcttgtaaaagtaacattgaccgcattttttgtggaggttgaaatgagaggagctagaaaaaaaaaaaaaaaaaaaaaaaaaaaaaaagcggccgctctaaaggatccaagcttactta

SEQ ID NO: 2317 - DNA, 137 bp, Triticum aestivum
  Clone ID: LIB103-061-Q1-E1-A4
ggtccggaactcacgggtcgacgggcagataaatcggaatagtctgacaaatcggttttgctcttccccttattcataaaggcaaattcatccttggtggtatgcttggataaaacaactgggttgcctggggcggt

SEQ ID NO: 2318 - DNA, 489 bp, Triticum aestivum
  unsure at all n locations
  Clone ID: LIB103-061-Q1-E1-A8
gggtcgacggggtggaaatagtattcggtggtgctcctagatgttttcggggtacgtggatatatataggcgaaggaggtaggccagaggagccatgaggggcccacgagggtggggggtggcctacccccatagggcgcgccctcctgcctcgtgtccgcctcggctgcttcttgacgtccactccaagtctcatggattgcgtttgttccaaaaagatcgctcccaaaggtttcattccgtttggactccatttgatattccttttcttcgaaacactgaaataggcaaaaaaaacagcaattcaggctgggtctccggttagtaggttagtcccaaaaatgatataaaagtgtaaagtaaagcctataaagatccaaaatgggtaatataatagcatggaacaatcaaaaattatagatacgttggagacgtatcaagcatccccaagcttaattcatgctcgtcctcgagtangtaaatgataaa

SEQ ID NO: 2319 - DNA, 306 bp, Triticum aestivum
  Clone ID: LIB103-061-Q1-E1-B1
gacagatcttatcccatagtgttaccagctttttttcttgctttgtggcagattgtttgggtatcggtttatgcattgcaattgcaactctgacctgctgcgaatgttcgaactgatgaggtttatgcattttgaactttatagtaatgctatttgcatgccttcaaatttggaaaaaaaacaaaaataaaaaaaaaacaaaacaaaaaaaaaaaaaaaaacaaaaaacaaaaaggaaaaaacaaacaaaaaaaaaaaaaaaaagcggccgctctaaaggatccaaccttacttacccgtgaatgc

SEQ ID NO: 2320 - DNA, 420 bp, Triticum aestivum
  Clone ID: LIB103-061-Q1-E1-B10
aattcccgggccgacggggacaatagacacacccaagtcgctaagcattttcatccggttttggcgcttcacattaagattcttccttatctatatgagtctgtttgcatggtatcgacgtttggctggaattaaaggttctcagcattggctccaacgcttcaagctcttatctaaattatcatcgagggccatttaccattcaacttgctcaacagtgtttttccactgggatgcacaatttgtgtttgactaataggatatccttggtgctgatctacgtagtgatttcaacatcatagcagtataatgtccaagctgtgtgtctcatcaacctcctctgccacggcttcatcctcaccctgagcatcctcttcctctggtccaacggctctgccatcggatccaagtttacttcca

SEQ ID NO: 2321 - DNA, 444 bp, Triticum aestivum
  Clone ID: LIB103-061-Q1-E1-B12
gtactagtcaggaattcccgggccgacgggggacggagacgacgcaggccagctgttggacaggctcacgagcgcgaaggcgacgagagggagaggggcccgagcaagaagacgccctggacgcggccaacgctagcggagcgcgcgcattgcatgtcaaagctcgtgttcaccgtgtgcactggtgcacacagtggcacacggcgggccaaacaatgtctgggggcttgtccttcctggggaggttgcaactgcggtggtagtttggttaaaagtgacatggttaaatgacagttaacacctgaagtttactgcagtaaacttgatcgtgtactgctgctcaacagggaggtgatttggtcaaatggagttgtctgggaggttgaggtaaagaaggacttacatcctggtaactatggaggggtttggatcaagatttaacag

SEQ ID NO: 2322 - DNA, 243 bp, Triticum aestivum
  Clone ID: LIB103-061-Q1-E1-B2
gtcgaccgggcactaccacttagttcaacttctccgcccacgcccagcgaggacgagactgacgacgagacccgagagaggccgagacctggaagatccgaatccatcgccgctcccccacgcaacgagatgtcttcacccgcagagtactacaattcacttccaccaataagcaaggcatatggaacattgtgtttctttacacagtgctggttcagctccagatactagacccaggccttc

SEQ ID NO: 2323 - DNA, 120 bp, Triticum aestivum
  Clone ID: LIB103-061-Q1-E1-B4
ggtcgacgggtcacctcctgggaggtactcatgttgcattccctttttaaaaaaatttttgcacggcgtgcaaaagaaaactcacggccgcgacatatatttaccacgttttattatttt

SEQ ID NO: 2324 - DNA, 432 bp, Triticum aestivum
  Clone ID: LIB103-061-Q1-E1-B9
tcccgggtcgacggggacagtagagttgactagtgccgatttcctccatctccatctccagctccggctcccagatcgagacggcggcggcgatgggcgcgcacccttacgtgccggcgagcctggacctcccgggctacgtgccgctgcgcctcacccagctcgagatcctggggacctacctcggcacctccctcttcgtcctcgtcgccgtctggctcctctccgggagatgccgcaggttgtccgggaccgaccgcctgctcatgtgctggtgggcgttcaccggcctcacccacatactcatcgaggggcccttcgtctttacccccgatttcttcaccaagaccaaccccaacttcttcgacgaagtctggaaggagtacagcaaggatgactccaggtacgtcgccagggacaccgccaccgtca

SEQ ID NO: 2325 - DNA, 425 bp, Triticum aestivum
  Clone ID: LIB103-061-Q1-E1-C11
aattcccgggccgacgaacctaaaaatgttgagccggctgccataaagccagaggcggtggagcatgatggtacagaagccgatccaagtaaagaagcatctatacctcctcaagaggaaaccactgctgtagccttggttacaggaccggaacaaaatgaagaagcagatgcacctactcaagtcaaaccagttgctgttatacctggtacgggaccagaagagaagaaagtagaggcatccacccaagaggataatgctgaagcagttgccgcagagccagaatctgctagagcccaggaaaatgcggaagcttctactcagcctagtcctatggagatagagtcagttcaggaaacagctatgctgggagaagctgaaaccaggcagcaactgccacttccgtctgccgagggtgtggtggc

SEQ ID NO: 2326 - DNA, 329 bp, Triticum aestivum
  Clone ID: LIB103-061-Q1-E1-C12
acgggaaacacaatcatttctgaatttccttccatgttagccagggtaaatgtattaagtatgcagtctcttggatggcttggataatggttatggtgaaataactcagttgtaaccatgtctcatgttcttctgaattccatggaaaaaaaaaaaaaaaaaaaaaaaaaaataaaaaacataaaaaaaaaaaaaaaaaaaatctaaaaagaaaaaaaaaaaaaaaaaaaaaagcggccgctcaaaaggatcaaaccttacttaggcgtgcatgcaacttcatacctcttcaatagtgtcacttaaattaatttcatgggccgtctttt

SEQ ID NO: 2327 - DNA, 429 bp, Triticum aestivum
  Clone ID: LIB103-061-Q1-E1-C9
ttcccgggccgacgggtgttccatcttcatgcatgctcaactcaacacccctcttcatgcatgcttctagtgtatttgtgctaaactagtgtggactcatgcaccctccatacactctaccaaacacccaaaaggaggtcgagaagggaactcttgggcggcatttgtctcttactacgtactaccactaaatgttgtaggtgcaatgcacggtgatgttatggagtacgtgcctaagtactctactactacggtattagttggaggcacatattaacttttatatttgtttacgtgtatgccccgagaccttccaactagacgtgtctttctctccatgtcgcactttgtatcgttcatacctctaagtactactacgtgtggtctccgacccagaagtggaagaagtggagatgctctaccatgctg

SEQ ID NO: 2328 - DNA, 428 bp, Triticum aestivum
  Clone ID: LIB103-061-Q1-E1-D10
aattcccgggccgacgggaagatgagcaagatcgactcccacctcgcctgcgccgtcgccgggatcatgtccgacgccaacatcctcatcaacaccgcccgcctccacgcccagcgctacgcgctctcctaccaggagcccatccccgtcgagcagctcgtccagtccctctgcgacaccaagcagggctacacccagttcgggggcctccgccccttcggcgtctccttcctcttcgccgggtgggacaagaaccacggcttccagctctacatgagcgacccctccggcaactacggcggctggaaggccgccgccgtcggggccaacagccaggccgcccagtccatgctcaagcaggactacaaggacggcatgacccgcgaggaggccgtcgcccttgccctcaaggtcctcagcaagaccat

SEQ ID NO: 2329 - DNA, 425 bp, Triticum aestivum
  Clone ID: LIB103-061-Q1-E1-D11
aattcccgggccgacgggggagtaaacgcgctctgcaaggagccggtgccgcagatcgtggcgcgcccgctgcccaacgacatattggagtggcattttgtacttgaaggaagtgtagccacaccctttgaaggtggatattactatgggaagcttaaatttccctctgattacccttttaaacctccaagtatcagcatgacaacccccagcggcaggtttgcccctcacaaaaggatatgcctatcaatgagtgattttcatccagaatcttggaatcccatgtggtctgtagcaagcattctaacaggactcctctcatttatgatggatgatgctcttacaactggaagcatcagaagtacagatggagagaagaagcgtttagcaaaggcttctcttgcgtacaactgtgagagcaaaaa

SEQ ID NO: 2330 - DNA, 419 bp, Triticum aestivum
  Clone ID: LIB103-061-Q1-E1-D12
aattcccgggccgacatgcaacacaacatgcggaccttctgcaaaatgtaggagcggctcgggtcttgcgtgcagcggcggcagcaacatcagcttccattgaggccaaagtgttcgccagaattgtccttaggaatctggaacaccatcaggcagggacttcaacctgaaaacacaatggcgagcacaagcgcgactaattctccaacagggtacgacttctaacctttggccccagaatggatgcaaactcgcggttaagttgtcgccggcatttgaagctgccgcgcaagctgtgaccttggaacttccaccttggggagaactgtcagaagagatgaatgaacgttcaaccggcagctgttgagtgtgcaattttcctgttgtttgtctgatgtgtaaaagtaacttaaaaagtg

SEQ ID NO: 2331 - DNA, 466 bp, Triticum aestivum
  Clone ID: LIB103-061-Q1-E1-D6
gttgttgcagctattgctgctgttgttgttgttattgttgtcgctgttgttgctgttgttgttgctgttgttgctgctgttgttgctgttgctattgctgctgttgttgctgttgttgctgctgttgttgttgctgttgttgctgttgttgttgctgttgttgctgttgttgtagctattgttgttgttgttgttgttgttgttgttgttgttgttgttgttgttgttgttgttgctcttgttgttgttgttgttgttgttgctgttgttgttgctattgttgttgctgttgttgttgttgttgttgttgttgttgttgttgttgttgttgttgttgttgttgttgttgttgttgttgttgttgttgttgttgttgttgttgttgttgttgttgttgttgttgttgttgttgttgttgttgttgttgttgttgttgttgttgttggtgttgttgctgttgttgttg

SEQ ID NO: 2332 - DNA, 422 bp, Triticum aestivum
  Clone ID: LIB103-061-Q1-E1-E12
aattcccgggccgacgggaagctcaacaagctcatctggagcagtgggatcagaagcgtgccccgtagggttcgcgtgaggattgcccgcaggaggaacgatgaggaggacgccaaggaggagctctactcactcgtcaccgttgccgaggtgcctgctgagggtttgaaggggctgggaaccaaggtcgtcgatgacactgagtagactcttttctttatctacatcgttagaatgagctgttatttggaattgcaccagcatgctttttgtatcccgcagaagttttggagtatggaatatcgggagctatctattttccttcatccaaaaaaaaaaaaaaaaaaaaaaaaaaaaaaaaaaaaaaaaaaaaaaaaaaaaaaaaaaaaaaaaaaaaaaaagcggccgctctaaaggattca

SEQ ID NO: 2333 - DNA, 420 bp, Triticum aestivum
  Clone ID: LIB103-061-Q1-E1-F11
aattcccgggccgacgggatccaaaatgggtataataggaactatcataaaaagtgcgttgaatactatgagaagttggatgcttgataatttttttgagatatgaggatggtgatattaaatttgtgctagttgagtagttgtgaatttgagtacttgtgctgaagtttgcaagtcccatagcatgcacatatggtaaccattgtgtaacaaatttgaaacctgaggtgttctttgattgtcttccttatgagtggcggttggggatgagcgatggtcttatcctaccaatctatccccctaggagcatgcgtgtagtgcttggtttttgatgacttctagatttttgcaataagtgtatgagttctttatgactaatgttgagtccatggattattcgaactctcacccttccatcat

SEQ ID NO: 2334 - DNA, 353 bp, Triticum aestivum
  unsure at all n locations
  Clone ID: LIB103-061-Q1-E1-F3
ggtccggaaatcacgggtcgaccggacagcccgaagcaganagaaatccactccaatccaatccccacagaaatccccatctcaaaaccctagcccgtccgatcccggcgagatggccaacccgagggtgttcttcgacatgaccgtcggcggcgcgccggccgggcgcatcgtgatggacctgtacaaggacncggtgccgcggacggtggaaaacttccgcgcgctctgcaccggcgagaagggcgtcggcaaaaccggcaagccactgcactacaagggcagctcgttccaccgcgtgatccccgacttcacgtgccagggcggcgacttcaccaagggcaacggcaccg

SEQ ID NO: 2335 - DNA, 500 bp, Triticum aestivum
  unsure at all n locations
  Clone ID: LIB103-061-Q1-E1-F5
accggtcaggtattcncgggtcgacgggcaagctcacacaaatgaggttagcaagggcaaaccactagattgggtttcaggacaaccagtcacagatgagcatggacgccttcagattataaagaatgatgacctcgaagagctccaagaactcggttctggaacttttggaactgtatatcatgggaaatggaggggctctgatgttgcaataaaaagaatcaatgacagatgttttgctgggaagccatctgagcaagaaaaaatgcggaatgacttctggaatgaagcatctaaccttgctgatctgcaccaccccaatgttgtggccttttatggcgttgttctagatgggcctgggggatccattgcaacggttacagaatacatggttaatggctcacttaggacggctttgctgaagaattccaagagcctggatcgacgcanacggctaattattgccatggacacagcttttggaatggagtatctgcata

SEQ ID NO: 2336 - DNA, 434 bp, Triticum aestivum
  Clone ID: LIB103-061-Q1-E1-F9
aattcccgggcagacgggggaagtaggagctgcgccgctgggcctagggaagagggggagggtctttcctttttcattttatattcgtttttctttttagttgttttctgttttctatttctttttaaaataaattcttttataaaatataaaacttgcacctaaactagtataataaattagaccaccaccacaattagtttagcatttaaataaattagtttagaatttttataaattaaaaagcatttaaataattgttttagcccctattttaaatatttatgggcacttagacacattataaaaatgttggttcaccaccataattagttatgggttattttccacgtgatgaatattttagtattcatgtttgtgtatttctttatttcacttacaatttgaatttgaattcaagtggaatttgaaat

SEQ ID NO: 2337 - DNA, 405 bp, Triticum aestivum
  Clone ID: LIB103-061-Q1-E1-G1
ggtccggaactcacgggtcgacctaacctctcagagaagctcataggagtaaggtgtgcgtgtgtgcattcataaagatgagtgtatgcacgtatgtatgagcgcttgcgcctgtactgtgttaaaaaacaggagcctagtttcccaacccggctcaacacatttccgacgaaggccaacccggagaccaaacaacatgaggcgtttctccgatggccctcgtctgctgcggccccctgatgtcatctccggccacggctcctaaaaggacattgacccaccggctccgctaccaagcccgccttcggcaacagggatctcgatgcttggcggagcgaaacaggttttctttgtcgcgtcgtcgcaaaggctggactcgccagcgtcgccgcccttccttttgcc

SEQ ID NO: 2338 - DNA, 433 bp, Triticum aestivum
  Clone ID: LIB103-061-Q1-E1-G10
aattcccgggccgacggggaccaaaagggagagttgtataaaaaagcactactggagtccttcaaaggtgcatctccgaagaggaagggcggaagcttttggcagaaattcacgccggactcggcggccaccacgccgcagcccgggccattgtaagcaaggccttcgtacaggtttttatttgttgacggcccgggtagatgcacatgacatggtccaatgatgtgtcggttgccagcttttttcaaaccaaagccacatgccacccaccgccctccaaacaatccccattatctggcccttcacggtctgggggcttgacatggttggaccccttaaagggggaacccataagaaaaaaatacttactggtcatggtggataaattcaccaaatggatagaagacaaacctgttaaaacggccgaatcggg

SEQ ID NO: 2339 - DNA, 221 bp, Triticum aestivum
  Clone ID: LIB103-061-Q1-E1-G5
gacggggtctgaaaataatttgcgaatgtgtgcgtggtttgtgtaaaaaaaaaaaaaaaaaaaaaaaaaaaaaaaaaaaaaaaaaaaaaaaaaaaaaaaaaaaaaaacccaaaaaaaaaaacaaaaaaaaaaaaaaaaaaccggccgcccaaaaggatccaacctaacgtcaccgtgcatgcgacgccaaaccccttcaaaagggccaccaaaatccaatt

SEQ ID NO: 2340 - DNA, 424 bp, Triticum aestivum
  unsure at all n locations
  Clone ID: LIB103-061-Q1-E1-G9
attcccgggccgacggggaggttaaggaggacggtgccaatggaggaaatggtggggcatgcactgaggaggaccgagacctcagcaccactgtgctacgaagacatgcatttgcatacttgacaaaagggggcggtaccatatctgagggtcttgttgctgcatcgtcacctgtggacttgcaaaataaactgcaggagcttatcgaatcagagcatcctggtgctggttggaactacgccatcttctggcagctttcgcgcacaaagtctggtgatcttgtccttgggtggggtgatggctcttgccgtgaacccaatgatgctgagttggcagctgctgcttctgcacgcaatgatgatgccaaacatcggatgctgaagcgtgtactgcancagttgcacaaagcatttggtggtgctga

SEQ ID NO: 2341 - DNA, 435 bp, Triticum aestivum
  Clone ID: LIB103-061-Q1-E1-H1
ggtccggaactcacgggtcgaccggagctggatctttacccttatgagcccctgaaggaggcagcatgaggttggtagcccgaggggtgtcagagaaaactgctagaccgtcagcaccatcaatagcaggggaaaaaattgggatatgttcaacatctgtagtcagcctgagcagagcactgtatggttcaggcacaacaggtggatctgaactggcgtcatgctgagaaataaacagagcggtggaaaagtagtgaacatatttagttggctgagtagtgataacccacatgtataggggatcgcaacaattttcgagggtagagtattcaacccaaatttcttgattctacacaaggggagccaaagaatattctcaagtattagcagttgagtcgtcaattaaaccacacctagataacttagtatctgcag

SEQ ID NO: 2342 - DNA, 430 bp, Triticum aestivum
  Clone ID: LIB103-061-Q1-E1-H10
ttcccgggccgacggggaagaaacccaaggcggagaagcgggcgccggcgtccaaggaggccggcggcgaggggaagacgaggggcaggaagaagggcagcaaggccaagaagagcgtggagacgtacaagatctacatcttcaaggtgctgaagcaggtgcacccagacgtgggcatctcctccaaggccatgtccatcatgaactccttcatcaacgacatcttcgagaagctcgccggggagtcggccaagctcgcccgctacaacaagaagcccaccatcacgtcccgggagatccagacctctgtgcgcctcgtcctccccggggagctcgccaagcacgccgtctccgagggcaccaaggccgtcaccaagttcacctcctcctagacaacttaggcttgatcctcgtcgcttcatgcgttctg

SEQ ID NO: 2343 - DNA, 353 bp, Triticum aestivum
  unsure at all n locations
  Clone ID: LIB103-061-Q1-E1-H3
ggtcgaccaggcggaagagcccaagngaggagctnnaggaactgaatatctagtgcaaagccgctttggccgnntgctgaagatgnaagagcattccaagtgacttttgagccgcgaagaaaatggtgatggtggctgaggaataaggaaattgaggatgatgatcctgaggatggtaaggattctgtcaagccgcattcttcaccaagaaggaaaaggtctggtgggaaggatgaagatgatgataacggtgatgatgatggtgatgatgatgagaagcctcaatcaaagcgatagtcaatttgttcttgccgatctggtaccttttctgcttgggccaagaaggaaaataa

SEQ ID NO: 2344 - DNA, 118 bp, Triticum aestivum
  Clone ID: LIB103-061-Q1-E1-H7
atcatcgctgctcaaaacgttccatccttaaatttactcgcattgcacgtcataccccttctcacaatgtcacctaaattcagttcacgtggccctcgtttcacacttcccaacattt

SEQ ID NO: 2345 - DNA, 443 bp, Triticum aestivum
  Clone ID: LIB103-061-Q1-E1-H9
ggtaccaggtctagaattcccgggccgacattcgcccgcaggaaagcaatgagcgtgctttcctatttagggtcgagagtggcactgatggtgaaggtaccaccagtgccatcctctttggtgggcaccctcttggtttctggtggagctgccattgtcttcttgcacttgccggtggagctcgatggtgcgtcctcgacggtagcgcagcactccgaagaggtgcgcttgccagagcgggcatcagaactcttgccggacttggtcttcttcttcaccccgggagcttcaacggaaggtgatttgcgatctgctgcggctgctgcttcccggtagatcttgtcggcgcaaataagagcatccttcttgtcgccagggacagagatgacgcttatcgggcctggcatcttcagcatgttgtatgcatagtgagaggctaccaa

SEQ ID NO: 2346 - DNA, 423 bp, Triticum aestivum
  Clone ID: LIB103-062-Q1-E1-B7
ccgggccgacgggaatcagacatgatgacatcgaggcgcacaacccagacggtctttcagtttagagtagcattttttgtacatttttatggatatattcggttgattgatcacgcttgctgatcaacgccaatctgatttgttctatgacctcttgatactttttacccctcagtaattcaggccattgtctcccatgtaagaacgagatgccctacagaaagtcagtgggcacataatcttggtgctcacgtgttgaatatgttctgtggcgcggcaaagatagtgtgctgtcaagatttattgcaatcaacatgaatcagaatttaataaaaatctccaatgtgcttcacttaaatcatgagcactagacaattttgctcaaaaaaaaaccggccgctctaaaggatccaagcttactta

SEQ ID NO: 2347 - DNA, 451 bp, Triticum aestivum
  unsure at all n locations
  Clone ID: LIB103-062-Q1-E1-C5
cgggacgacgacgtagatgtggacgagtcggatagaaagctcttagatgatgaaaagaaacccgatatcacgaaacgaccacacactcctattggagatgaggtggaatgcaagaagccaaagatagcagaaggctcaaggtgccaaggagaagaacctgaggctggagggataaagaattcctcctgggtctgatgacaggggaatgcagtaaacaccagaagcatcaaaactatgatctggaacagtatcctgaataaactattttctggattatgaatgaattctgaagcatggggctataagtgaattatgtaacatggatttgtaactatggtggatgttaagttaacgttctatcagtgcaaaanaggaaattataaatgaaaaatgataaataattaaatgcattaaaaaaaaaaaagcggccgctctanaggatccaagctta

SEQ ID NO: 2348 - DNA, 415 bp, Triticum aestivum
  Clone ID: LIB103-062-Q1-E1-C9
cccgggtcgacggggaaaagcacagtgacaatctgtggtgatattcacggacaattccatgattttgttgagcttttccggattggcgggaagtgtccctgatactaattatttgtttaagggggaataagttggttgtggatactaacccggttagaacgtttccgccttggtagcactgaaggttcgccacccacatcggattacaatcctccgcggaaaccatgagagtcggcagatcacacaagtatatggattctacgatgaatgcctacgaaagtacggcaatgcaaatgtatggaagatattcacagatctttttgattatttcccattaacagccctggtggaatctgaaattttctgcttgcatggtggtttatctccatcgattgagaatcttgatagtgtgcgt

SEQ ID NO: 2349 - DNA, 449 bp, Triticum aestivum
  unsure at all n locations
  Clone ID: LIB103-062-Q1-E1-D10
cccgggtcgacgggatataagaaacggtgaaagggccggattctgaaaacgcagaaacagggagagacaaatccaatctcggaggggctctcgcccctcccaaacaatggaaaccatggaccaaaggggaaacccttctcccatctagggaaaaggtcaaggaagaagaataagaagggcgctctctctccctcgcttcaaatggcaccggaacgccgccgggggccatcatcatcactgcaatctacaccaacacctccgccatcttcaccaacatctccatcaccttccccctctatctacagcggtccactctcncgcaacccgctgtaccctctacttgaacatggtgctttatgcttcatattattaaccaatgatgtgttcccatcctatgatgtctgagtagattttcgttgtcctatcggtgattggtgaattactttgat

SEQ ID NO: 2350 - DNA, 387 bp, Triticum aestivum
  Clone ID: LIB103-062-Q1-E1-D11
acggtctactatcccgggtcgacgggaaaatctagctagtcgatctgacggacgctcagcggctactgcggtcgaactcagcggacgaagtgcatcgcatgatggcggagatcgacatcgacggtgacggcatcagcaacgtcaccgagatcatctccttctgcaacgccaaagccgggcgcatgaaagacgtcgccaaggtcgtctgaatcagttcatgtcacctcagccgtccgatccatgagccgatccatctacgctcagcttcgaatatcaatttcatgcaactacctactccggtcacaattcagcctcagcttcacctgaggccggccctaattttgttcgatcatgttatatgccaccactattgcctagtgatgatca

SEQ ID NO: 2351 - DNA, 480 bp, Triticum aestivum
  Clone ID: LIB103-062-Q1-E1-D5
ccgggtcgacgggtatctttcggaatagtttatcgtttgctctagtgcttcacttatatcttttagagcacggtggtggttctattttatagaaataattaatctctcatgcttcacttatatcattttgagagtcttttagaacagcatgataatttactttggttataaattttaaaagctaagagaaattggatgcttgatagttgttttgagatataaaggtggtaatattagaggtgtgctagttgagtaattgtgaaattgatgaatacttgtgttgaagttggcaagtcccgtagcatgcacgtatggtaaacgttgtgtgacaaatttgaagcatggggtgttctttgagtgctttccttatgagtggcggtcgggggcgagcgatggtcttttcctaccaatctaccccctaggagcatgcgcgtagtgcttggtttgatgacttgtagattttttcaataagtatgtgag

SEQ ID NO: 2352 - DNA, 408 bp, Triticum aestivum
  Clone ID: LIB103-062-Q1-E1-D9
ccgggtcgacgggaagccagagcaagacgcgcagacagggcacggcggcgcggagaacgtggaggagtacctgagcctggagagccactcgaacaaggcgaggaggatggagagcacccagagcgccaagttcaagaggagcttcacgttgccggcgaggatgagctcgtccaactcgccgtccccgtcggtgtcagcctcgacggggccggcgccgtcgcagcagcagcagcagcaagggatggagtaccgagcgcagcacgagggcagcgtctactcagacctcatggagacgttcttggagtagcaacgcatgcatgcgtcgacggtcgatcgatcatccttacgacgacaagcgtacggactctatgttttcttgttcccactttttgttttgttccaaccaag

SEQ ID NO: 2353 - DNA, 431 bp, Triticum aestivum
  Clone ID: LIB103-062-Q1-E1-E11
cccgggtcgaccgtgaacactagtgatcatgctcatggaaacaatgtagaatttttcctgaagattctcacaaaaataattatccccttgtacaattccattgtattataaaaataatgtgccaagatttgcctttatgatgagtagatttcttgttggtatgtgcgtgcaaaaacaaaaactttggctgtagtgcgtgattttacatttttttattggaacgtcgaaagtttctgaaactttttgcacagtcttgctatacaaatttttttcttttgtcctaatttttcagaatttttggagtaccagaagtatggttaatgttcagattactacagactgtcctgtttaagacagattctgtttttgatgcattgttttgcatgttttgatgaaactatcgattctatcagtggaataagccatgaaaa

SEQ ID NO: 2354 - DNA, 356 bp, Triticum aestivum
  Clone ID: LIB103-062-Q1-E1-E12
ccgggtcgacgggacaacgaaggatggatctgcgtcgccgaatccctggaacaacctggcagggttatacggatgaacagtgtctcattttttattcaagcatgctgcatgaccgatcgacaccgtgagcgcgtacctcagtgtttaaatgccctggtaaacggtgatatagtagtatagtactccctccatttcataatgtagtgcttcctttatctccgtacttcaaatttgaccgtaaatttaactatcaagatcgattgtggcgggagcaaaaattatatatatcagaatttttggaataccaaaaataaggtttctctttaaattactaaaaaaagtcctgtctaagaaaa

SEQ ID NO: 2355 - DNA, 242 bp, Triticum aestivum
  Clone ID: LIB103-062-Q1-E1-E7
cggtcgaccgggattagtgagttataaaaaaaaaaaaaaaaaaaaaaaaaaaaaaaaaaaaaaaaaaaaaaaaaaaaaaaaaaaaaaaaaaaaaaaaaaaaaaaaaaaaaaaaaaaaaaaaaaaaaaaataaaagaaaaaaaaataaaaaaaaaaaaggggccgctcaaaaggttcaaatttaacttaccctttaatgaaatttaaaacctcttcaatagggccccctaatttaatttcagg

SEQ ID NO: 2356 - DNA, 308 bp, Triticum aestivum
  Clone ID: LIB103-062-Q1-E1-E8
ccgggccgacgggcaaggaagtttacattaatcaaaaaaaaaaaaaaaaaaaaaaaaaaaaaggcggcggcccaaaaggttcaaggctaacttacccgtgaaggcaacgtcaaacccctccaaaagggccaccaaatttcaattcacgggccgtcgtttaaaaacgtcgggacggggaaaacccgggggtaaccaaacttaaccgccttgcagaaaatccccctttcgcaaccgggcgtaataccaaaaaggcccgcacggttggcccttccaaaaatttgcccaccctgaatggcaaatggaacccc

SEQ ID NO: 2357 - DNA, 446 bp, Triticum aestivum
  unsure at all n locations
  Clone ID: LIB103-062-Q1-E1-H11
ccgggtcgacggggcagatcagtaagagggtgtcctcggccactctcgcgtcgatctgctatggggttgttgtcgtccgccgtgaggaaatgtaacagcaagatgctcctcggcggcggctcttcatctccgtgtggtgtgcgcggcaaggaacaaccattgacgcccagcaagcacaagcggtcgaggaagaagcgcttctggaggaagaagaagtccagcaagaagttcggctgcgtcccctgcgtcagcctcaccgagctcaccaggcgcgccgagtgcgaggccatcgccgacctcgtcaacaacatctcggccaagtcagacgttaccagccacatgtacgcggccgaggagatcctgcggatcaccaaccataacatccccagtagagtgctcaccttccgtgagttgtccgcggcgnacaacaacttcagctgcgataa

SEQ ID NO: 2358 - DNA, 426 bp, Triticum aestivum
  Clone ID: LIB103-063-Q1-E1-A10
gtaccgaactagaattcgcgggccgacgggcttaaaaatcttgcagcaaaatatagatgtgtttataactgcacatgaggaacaacaagagcgggagaagaaggaaagagaggcagcagctgaagaagaagaaggatagagttttagatgctgccgttgagagcgagggcgctgccggacatgctatcgcggaaggaagcaagaagattgtattggtgaagcaaaagaagaaaattaagcatgccaaagtaacaagctgttgtaccaaggctcataatttggtgactctcaatgaggatgaggcaacacctaagctgaagaagaagaagagcaaaaaacagctaaaggaaagcaaaagtcctgttgaggtacaaagtccattggacagtaatgatgctggaacacttaagctgaagaagaagaaaa

SEQ ID NO: 2359 - DNA, 359 bp, Triticum aestivum
  Clone ID: LIB103-063-Q1-E1-A4
ggtccggaaatcacgggtcgacctcttctcccccgggaaccgatggctgccgcgctctcaaccccaagattgcgcagttcgctaaccggaacccggacttgcggtcccggaagttcacctacaaaaaccacagttcaatgtgttaaaccctcaaggtcaaggtcctccctttctacaggttctacagggaagccaagggaagggtcagcagcttaagctgcacaattgcacccatcacgaatttcaaggacgccctcgcaaagcactcgccggacaggtgaagcctcggcccggcgcgggggctcaaggaggcggagctctgtggtctggcggcaaaaagggacctggaattcacctac

SEQ ID NO: 2360 - DNA, 312 bp, Triticum aestivum
  Clone ID: LIB103-063-Q1-E1-A8
accggtcaggtatatccgggtcgacgggaaggaccccaaagacctgcagacggagatcgacgacggcgaggtcgagatcccctccgcttaaagacctgatgtcgaggtgattatcatctctgatgatatggaagtcataccatgttgcttatgtaccttccaaacgatgtgatccctcctctttttgtcatgttttagcagtaatcctgtgagacctcattgttactactgcatatttggtctttgcaatgtagtctgtgcacttgggttaacttaatctataccattcagtggttaaaagtttaagaaaac

SEQ ID NO: 2361 - DNA, 452 bp, Triticum aestivum
  Clone ID: LIB103-063-Q1-E1-B10
taccgtactacaattcgcgggtcgacgggtacatgattagaatttgctagaatactctttgtgcttcacttatatcttttgagcttgatagtttctgctctagtgcttcacttatatcttttagagcacggtggtggcttatttttgtagaaattgctagtatctcatgcttcacttatattattttgagagtcttttagaacagcatggtatttgctatggttataaaattggtcctagaaaggtaggcatctaaattgggtataataaaaactatcataggaagtgaattggatgctatgatcaatttgatacttgataattgttttgagatagggaggtagtgatattaaagtcatgctagttaggtgattatgaatttaaagaatgcttgtgttgaagttagcaaatcccgtagcatgcacgtatggttaaagttgtgttacaaattt

SEQ ID NO: 2362 - DNA, 357 bp, Triticum aestivum
  Clone ID: LIB103-063-Q1-E1-B2
ggtccggaaatcacgggtcgaccggccccgtggtggcaaccgcgcctaaggtcctccggcatcgccgtcgtaccccaaaataaggcttaaggccattaaaatcggtaactgggggaaataaaggtttgaacccaaaacctaaattccaaggggtttgattcggcaaaaaaaaaaaaaaaaacaaaaaaaaaaaaaacgggcgccccaaaagattcaaacctaactaaccctggaagccaactcaaaacccctccaaaatggcaaccaaaatcaaatcaatgggcgtccgtttaaaacgtcctgaacgggaaaaacccggcggtaaccaacttaaaccccctggaacaaaatccccct

SEQ ID NO: 2363 - DNA, 491 bp, Triticum aestivum
  Clone ID: LIB103-063-Q1-E1-B6
accggtcaggtatatccgggtcgacggggggcatcgtttaaactttgggttttgtttagattgaaagttcgccatagctgcaacttcgcgtacttcgtttgtgttcaacgaccagacaaaggcgtcacagaaccccaccttgatcaataaagctttcatcttatattcgcaatatccagattgcaatcttagtttcttgcttgttcttcgtttgctcgcaggaaacagaccctcgtggtcaggttgattgtgctccggcgtggtcaataacctctcggagttggtttagcgattgctaaggcgcgacgtcctcgcacgttcgtagccggatcgtcaaagttgacttccaccaaagcgatatccatcatctcatccatagacgggaaatctgtgcctccatcaagtggtatcagattttcaggttgctcggtgaaaatttacagtttttcgtagtttagatcgagtctgttcttcatacctacagtccacga

SEQ ID NO: 2364 - DNA, 191 bp, Triticum aestivum
  Clone ID: LIB103-063-Q1-E1-C1
attgatccaatcaaaaaacacacttgaatattaactacacccaatacttaagtacagtcatattgcctccaagttggggctttaaaaggaaaaaatggaaacccaaaaaaaaaaaaaaaaaaaaaaaaaaaaagcggccgcccaaaaggatcaaagctaacgtacgcgtgaatgcaacgtcatagcccttc

SEQ ID NO: 2365 - DNA, 461 bp, Triticum aestivum
  Clone ID: LIB103-063-Q1-E1-C12
gtaccgtactacaattcgcgggtcgacgggtttgaggaggtcatgcacaagctactgcagcttcgccagactgccacggtcgccgagtatcgcgcggcgttcgacgagcaaatgtaccatctgcttgcgctggatccatccatcaacaccaagtttttcgtcacccagttcatcatgggcttgaaggacgagctacgcgccccggttcggctccaagcgccctcgagcatcacccgagcatcggtattggcgcgcattcaagaggaggaactaggcacgatgcgcgcacgcccacgcatcacgccagcgggacggcctccactggcgacgcctcctccacaaccacgggcagccgctgatacgtctaaatgtatctataattttttattgttccatgctatattaaattctgttttggatgtttaatgggctttattatacacttttatattacttttggg

SEQ ID NO: 2366 - DNA, 266 bp, Triticum aestivum
  Clone ID: LIB103-063-Q1-E1-C6
gggccgacgggcgcctgcaaaggatgccaagtcagcgtttaggatcccacacagggaatttcttgacatgctcctaccggatcttggactaatcaccggctcagtatgatcgtgttgtagatgaggacggaaagatatgtgtgaccatcttattcatcacctcaacagtggatcatggacgaccaatcagtagcaacgcgtcgtgtcaacattcctcatggtcaacatcacgcgcatggcatgcaacgttgtggatcgtctgtaag

SEQ ID NO: 2367 - DNA, 436 bp, Triticum aestivum
  unsure at all n locations
  Clone ID: LIB103-063-Q1-E1-C8
gggtcgacgggtcccacaattttttctcacaaaatccctattcataggaagtggattagacttaaatgtgctagtcatattcttcatgatgctctctttatgttacaattcttatcctttatgtgagcatcattgaaatcatcatgcctagctaggggcgttaaacgatagcgcttgttgggaggcaacccaattttattttagctccttgatttttgttcctgtttaataataaaaaatccatctagactctgtttagatgtggttttatgtgtttaattagtgtttgtgccaagtagaaccgttgggaagacttggggaaagtcttgttgatcatgatgtaaaanacanaaaactttagcgctcacaagaattactgccatttttatttggagagtgctatttagttaattctttctgaagatgattaatagat

SEQ ID NO: 2368 - DNA, 445 bp, Triticum aestivum
  Clone ID: LIB103-063-Q1-E1-D12
attcccgggccgacgggactaacaatttatcagttaaatctttggtcaaaatttaccacaaattacaatagtgaggaataaactaggacggaggtactccctccatttttgtatacaaggcaactataaaaaatacattttgcatctatacaaggccaccaacagtaatcgagacaaatattaatgatgtttcctcgtactagtaacccatggcttaattactagcatgcatgtagtggatgatagtgacaaactcatctacttcctctctcacgcccactcaatttcttctaatgtgcatgcaccctattaattaacccagtaaacgagaaaataaattgatttgtaaagcacacattgatttttatcttggtacctgcaattttagtttgtggtcgtgtatataaaaatgaagggagtactagtagtagtttagaaacccaaa

SEQ ID NO: 2369 - DNA, 454 bp, Triticum aestivum
  Clone ID: LIB103-063-Q1-E1-D9
gtaccgatctagaattcgcgggccgacgggtgcaccaaaaggcatcacctttttcatatttgtctatcagtaactttacttaaggctatatttttattcaccacatgatatgtgttttgcttggatcatcttgtatgatttgagtctttgctttttagtttaccacaatcatccttgatgtacacaccttttgggagagactcgcatgattcatgatttgttagaatactctatgtgcttcacttatatcttttgagctagacaatattgctctattgcttcacttatatctttttagagcacggcggtggtttattttatagaaattgttgaactctcatccttcatttatattgttttgagagtattttaggatagcatggtaatttgcttatgttataaaattagtcctaatatgatgggcatccaagatgggtataataaaaactttcat

SEQ ID NO: 2370 - DNA, 451 bp, Triticum aestivum
  Clone ID: LIB103-063-Q1-E1-E10
taccgatctacaattcgcgggtcgacggggtaagggaaccggctccggcaaggtggaggatggggtggtggacggacgaggctggccacagtgcggcggttgtcatgccgccgacggtgtctgaatggggaaatggacgggagggggatctcaaactttgggatgcgcttctctgaaatgggggaaagttactaacttatcccccatttaaaatttcggacatagcatcggttggggatacgacagtaatctcgcatctcccaaatatttgccggtaactatttcgagccagtgttgctgttctcgcgcggcctcggtggcagccatggatgaggtgactgatgcggtgaacaaccttaccataggggaatgagcagcggcgacggcgggagcggatgggcacaagaagaaccgcatccaggtctccaacaccaagaatccgctcttcttc

SEQ ID NO: 2371 - DNA, 447 bp, Triticum aestivum
  unsure at all n locations
  Clone ID: LIB103-063-Q1-E1-E12
attcgcgggtcgacggggaaaaaaccaaggcggagaagcgggcgccggcgtccaaggaggccggcggcgaggggaagacgaggggcaggaagaagggcagcaaggccaagaagagcgtggagacgtacaagatctacatcttcaaggtgctgaagcaggtgcacccagacgtgggcatctcctccaaggccatgtccatcatgaactccttcatcaacgacatcttcgagaagctcgccggggagtcggccaagctcgcccgctacaacaagaagcccaccatcacgtcccgggagatccagacctctgtgcgcctcgtcctccccggggagctcgccaagcacgccgtctccgagggcaccaaggccgtcnacaagttcacctcctcctagacaacttaggcttgatcctcgtcgcttcatgcgttctgtatgtacgtagttggca

SEQ ID NO: 2372 - DNA, 434 bp, Triticum aestivum
  Clone ID: LIB103-063-Q1-E1-F11
gacgtctgccgcaaccaactgctgttttaaatgggcaaactcgctagtccggctagccaccggagcttccatcacctgcacatagaggcagtatggttattacctgggaatatgatcctctgttcgtcgtcgtttccgacgacaaccagagtctcaggggctactatctacatagggcacacctagcatgtgcaggactatcatacattattttacgtacctcaaagcctgtcagtagactcataaaagcttcatgcaatccgctttcggcggacgagattctctccatcaccgtattcatcagcacacggtgttcatctgagatggccgctcgccccaccaactccctcagaacatctgatcgcacaccaaatggtgtcagactcttttgtccgctctcttcggcagccggacactgggagcttcgggggtca

SEQ ID NO: 2373 - DNA, 432 bp, Triticum aestivum
  Clone ID: LIB103-063-Q1-E1-F9
attcccgggtcgacggggaggaggagcctgaggaggagctatgaactgagtatctggtgcagccgcttggccgtgctgaagacgaatagcattccagtgactttgagccagaagaaaatggtgatggtgctgaggacgaggagattgaggatgatgatgctgaggatggtgaggattctgtcaaggcgcaatcctcttcgaagaggaagaggtctggcgcggaggatgaagatgatgatgacggtgatgatgatggtgatgatgatgagaagcctccatcaaagcgatagtcaatttgttcttgctgatctggtatcttttctgcttgggccaagaaggaaaataatcctcacggagagggttgttggtaaatgctgtagctttaggacatctgtggtaggtgtagcagctcgaacttgagtctacccatgt

SEQ ID NO: 2374 - DNA, 446 bp, Triticum aestivum
  Clone ID: LIB103-063-Q1-E1-G10
attcccgggtcgacgggaagcaggagatcatgaacaaaaagccgctttctaccagcaacaccgaaaatcaagatgttgatgcaaagcaggggctgcaggaactcaaggtccatggagagaaaaaccctgtggtggaaaacggtgtggcggcaggggctgtaaatggtgttgccccaacagacgcaagcccggcagcggtcgcagttggctgttgatttccgctgctcaagtcatttgatcatccattcgaggaggacagcttatatacagggtgaggaagagttgccgtggctgtaggaattcaagattctgctagttggatatatgcttgtgggttgcagaaaggtgcaagtctgaggcgattcaggattcaatgaaaggctttttttttggggtggttctgctcttctgtagtatcttcgccgttgctggagtctggtggttgg

SEQ ID NO: 2375 - DNA, 438 bp, Triticum aestivum
  Clone ID: LIB103-063-Q1-E1-H11
attcccgggtcgacggggaagaaaccaaggcggagaagcgggcgccggcgtccaaggaggccggcggcgaggggaagacgaggggcaggaagaagggcagcaaggccaagaagagcgtggagacgtacaagatctacatcttcaaggtgctgaagcaggtgcacccagacgtgggcatctcctccaaggccatgtccatcatgaactccttcatcaacgacatcttcgagaagctcgccggggagtcggccaagctcgcccgctacaacaagaagcccaccatcacgtcccgggagatccagacctctgtgcgcctcgtcctccccggggagctcgccaagcacgccgtctccgagggcaccaaggccgtcaccaagttcacctcctcctagacaacttaggcttgatcctcgtcgcttcatgccttctgtaagtacg

SEQ ID NO: 2376 - DNA, 450 bp, Triticum aestivum
  Clone ID: LIB103-063-Q1-E1-H9
gtaccggactaaaattcgcgggtcgacgggccctctaatggaaacggttcccgccgccggtacccctttcgggtccggaggaacgcagcggggcagcagagataagctggtaatgctgcgcactaagttgacccccctatggggttgacgggcattacggatacttggggcctgtttggagtcccccccgctctgtgactctgctcccggagtagccgtagccgcagttcaatatcatggagcgaggaaacaggtactccgcggatccttgggtttggtggagctagtggtttcccgaacagctccttagtgatataccacatagctctagatacatcgaggaaatggtcgatcgctgtctttgcggaatcggccacataggcacgtgacatttctgatgagagtatctggggtgtgatccattgactgattgttactgtacttggtaaa

SEQ ID NO: 2377 - DNA, 420 bp, Triticum aestivum
  Clone ID: LIB103-001-Q1-E1-A10
cgggtccacagggcgtcacacaatatcaatcaacaataattcttgccgaatgaaaagttccagtagttcactctataatcctagtattggttacatgcacacacatctcagtgtaatccaacaatatctacacagggtcttgtttttgtgctagtgacaagttgagttagttgcaatggtctagctgctaaacaagcagacctgagttcgacgatgtaccgatcaatcctttgatcccgagaatagtttttttagtggttgatcccgatcacgagaaaagtgaatcgagaaaactgatcgcaattgatgatgagaaaatcgaaaaccggtagggcctaaaaaccaaggattgacatacaagaaaggaaaatgcttgtggctggcaggccagccgaactttaagctggtcatgcacgaggt

SEQ ID NO: 2378 - DNA, 442 bp, Triticum aestivum
  unsure at all n locations
  Clone ID: LIB103-001-Q1-E1-A11
cgcgggtccacatcttctccccaggctgcggtggctgacgcgctctccaccccaagattgcgcagttcgctgagcggaatccggacgtgctgttcctgcaagtcaactacgagaagcacaagtccatgtgctacagcctccatgtccatgtcctccctttcttcaggttctacaggggagcccagggcagggtcagcagcttcagctgcacaaatgcaaccatcaagaagttcaaggacgccctcgcaaagcactcgccggacaggtgcagcctcggcccggcgcgggggctcgaggaggcggagctcttggctctggcggcaaacagggacctggaattcacctacaacgagaagccgacgctggtgccgatcgccgaggctatccanatggaagctgcctccattggcggcccatggatgccattgcgcgcggccgctct

SEQ ID NO: 2379 - DNA, 458 bp, Triticum aestivum
  unsure at all n locations
  Clone ID: LIB103-001-Q1-E1-A3
gggtccacggatnagtatgtgacaaagatggatacatataatatacatgagatgcgtgtgcatctggattctgtatacgtggaaggagaagagacaacatgtttgatgagagagcaggaagaacatggacgagaggggaaggatctcgtgggttgagggattgacaattttgtgcgggggagagagggattggtaattttgtgcaagagagagagggcggggggaggagtcagtcagccgtcgtcacatcaccctgcttccaaatgaccccgcagttctctagcgcggtgtggtcaccgtcttcgatctgctcgttccctttttgaagattgaggtgttgtgcatgttggggtgcagagaagcacaagcgagagtggtcgccgtataaccttggatggggatgaattgtgtgctcgggggagtgtgtgtgtgtgttgtgccgcctgtgtgtgtgtgtg

SEQ ID NO: 2380 - DNA, 352 bp, Triticum aestivum
  Clone ID: LIB103-001-Q1-E1-A6
attcccgggatcacgggatggaggcaattatttgagatggttttaaatctgtgagggctttttagcaaaattacaaatgaactgagtctgcgacatgttttttgggacggagggagtatttcggtacggatggagtagatggtatgctagctcagaaaagaaaaagagtagatggtatgcaaacagccaaactaagtgcaaccaggctcgctgggaaaggctaccaaacacggccctaggggccacgtgcagccactcaatccacttgcttgttttcactcttgtgttttggtgggcactcgtgcggacgaagcatggaaactcccgacatgacctgggctcgcaaccaaca

SEQ ID NO: 2381 - DNA, 439 bp, Triticum aestivum
  Clone ID: LIB103-001-Q1-E1-A7
attcccggatccacgggctgaacttaatgctggtgacgagaaaattagagagttgatatcagttttagaccaaaggaaggatgaatcaattgaacgcacatttaaaggagttgcaaggcacttccgcgaagtgttctctgaattagtgcaaggtggtcacggatacctggttatgatgaagaaaaaggatggtgatgctgccgatgatgacatggatgaggacgcgcctcgtgaagcagatcctgaagggaggatagagaactatattggtgtgaaagtcaaggtttccttcactggcaagggagaaactcagtccatgaagcacttgtctggagggcagaagacagtggtggcattaacactgatcttcgctatccaacgatgtgacccaactccgttctacctgtttgatgacattgatcctgctctggatcctcag

SEQ ID NO: 2382 - DNA, 333 bp, Triticum aestivum
  Clone ID: LIB103-001-Q1-E1-A9
tcgagggttcatcgatccagctcgcgacgccgccgtccgaccgagagtagtagtgctatctatctagttgctgtctagggttcgtggttctccgtgcaagagcagtggtatctccttggtgtttgctcccgtcttgtgagctgatgttgctgttgtagagatgtactggaagaagtttggaatggaaattgcagcagtttatccctgaaaaaaaaaaatcgagaaattaaaacacatcaataagggataaaaaataagaaacagatacctgagtcaagatgcagggggatatcagaagacgggacacaaaaaaaaaaagggggccctcaaggg

SEQ ID NO: 2383 - DNA, 403 bp, Triticum aestivum
  Clone ID: LIB103-001-Q1-E1-B11
cgggtcgatagggagtatgaagcccaggacaaggagctggtgcaacttaagcgtgaggcccggatgaagggtgggttctatgtcagtcctgaggcaaagctgctgtttgtcgtccgtatccgtggtatcaatgcaatgcacccaaagaccaagaagatcttgcagcttttgcgtttgaggcagatttttaatggtgtgttccttaaggtcaacaatgccaccattaacatgctgcgtcgggttgagccatatgttgcctacgggtaccctaacctcaagagtgtcagggagctgatctacaagagaggttacggaaagctcaacaagcaaaagatccctctggccaacaacaaagtcatcgaggagggtttggggaagcacaacatcatctgcattgaagacc

SEQ ID NO: 2384 - DNA, 387 bp, Triticum aestivum
  Clone ID: LIB103-001-Q1-E1-B4
cgggtccacggaaagaagcccaacgcggagaagcggctgccggcggggaagtccgccgccaaggagggcggcgacaagaagggcaagaagaacgccaagaatagcgtggagacgtacaagatctacatcttcaaggtgctgaagcaggttcaccccgacatcggcatctcctccaaggccatgtccatcatgaactccttcatcaacgacatcctcgagaagctcgccggcgaggccgccaagctggcgcggtacaacaagaagcccaccatcacgtcccgggagatccagacctccgtccgcctcgtcctccccggcgagctcgccaagcacgccgtctccgagggcaccaaggccgtcaccaagtgcacctccccgtagagtgct

SEQ ID NO: 2385 - DNA, 471 bp, Triticum aestivum
  Clone ID: LIB103-001-Q1-E1-B9
cgcctgccggtaccgttcctatgctcgcgggtcgacaggaggaggccaccctactcaccccagtcaaacggggttgccgagcgaaaaaaccgtactctaactgatttggttaactccatgttagatacgtcgggtttatccaaggcatggtgggggaaggctataatgacatccggtcatgtcctgaataaagttccaacaaaggataacgagatcactccttatgagaagtggacgaagagaaggacaacactctcgtacttacgtacctggggatgcttggcgaaagttaatgtgctgatccccaaaaagcgtaagcttggaccaaagactgtggactgtgttaatttgggctatgctatgaatagtgctggctatagatttctagtagtgaaatctgaggtacctgacatgaagttcggtacaattatggagtctaaagatgctacattctttgaggacattttcccc

SEQ ID NO: 2386 - DNA, 458 bp, Triticum aestivum
  Clone ID: LIB103-001-Q1-E1-C11
cgcctgcccgtaccgtacctatgctcgcgggtcgacaggtgttctcgacgatgagattgaaaaagcacatccagatgtcttcaacatgatgcttcagatcttagaagatgggaggctgacagatagcaagggacggacagttgacttcaagaacactctgctgatcatgacatcgaatgtcggaagcagtgtcatcgagaagggaggccggaagattgggtttgaccttgactctgacgagaaagataccagctataacaggatcaagagcttggtgaccgaggagttgaagcagtatttccggccagagttcttgaacagattggatgagatgattgtgttccggcagctgacaaagctggaggtgaaagaaatcgctgatattatgctcaaggaggtgtttgacaggctcaaggcaaaggaaatcgacctccaggtaacagagaagttccgggata

SEQ ID NO: 2387 - DNA, 349 bp, Triticum aestivum
  Clone ID: LIB103-001-Q1-E1-C12
ccgggtccatagggagcagaaacaaatgacaagcggatttcagtaaggtattctctgcaagcactgaaattatcggtaacatatagttttgtgataaagtaattcgtaacgggtaacaagtaacaaaagtaaacaacgtgcagcaaggtggcccaatcttttttgtagcaaaggacaagcctggacaaactcctatataaaggaaagcgctccccaggacacatgggaattatcgtcaagctagttttcatcatgctcatatgattcgtgttcgttaccttgataatttgatatgtaggtggaccggtgcttgggtaatgcccttccttggacaaacatcccaattatg

SEQ ID NO: 2388 - DNA, 384 bp, Triticum aestivum
  Clone ID: LIB103-001-Q1-E1-C2
gggtccacggaaagtcgtcgaactgacgccggatcacagcgtcggcgtgctacatcacaacagcaagagcaccaagtcgtcgaagttgcatcgtagcaccaggtggctccctgcagcgatgtcggctcgtagcatccggcgtgatgcatcacaacagcaggagcaacaagtcatcgaagttgcatcgtaacaccaggtggctccctgcagcaacgcgcctcgaactccctaatctgccgtgttgcagcaaccaccatgaacggccgcgggcaacggcaagcaagccttcgtgctgtgttgcaacaatgaagggttgttgctccacctatggcctccctcttcttgctccgttgcactgttgacgtttaaccggggtcttctcgg

SEQ ID NO: 2389 - DNA, 409 bp, Triticum aestivum
  Clone ID: LIB103-001-Q1-E1-C4
cccgggtgcacggagaccgaagcagccaaagaaactcgaaacacaggaacaggaagcaagctgcccccccccctcctcatctccgactcactcacgatccgagatcaggatggccggatcgatggaactccctaccaagggcggcttcagcttcgacctgtgccgcaggaacgccatgctggagaagaatggcctcaagatgcccgggttcaggaagaccgggactaccatcgtcggcctcgtgtttgcggatggagttgttcttggcgcacacacaagggcaaccgacggtcctatagttgctgataagaactgcgagaaaattcattttatggcagcaaacctatattgctgtggtgctggaactgctgctgacacagacgctgtgacacacatggtcagctcccag

SEQ ID NO: 2390 - DNA, 434 bp, Triticum aestivum
  Clone ID: LIB103-001-Q1-E1-D10
cgggtcgacaggctgaacagtcctattcctcttgatatacaatctggaatgctgggaggggggctgcatttgcacccatcatggagtgatgtctgcatgaaattttattgccacccaaggctcgtctctttttatctacatgttcattaccattgtgtacaataactacatgcataggaatagaacatagtgagattatgtaaggagtgcatgccgaaatctagagtgatggtagcaacctgtggacagacccaaaaccaatgatagcaggcagataatagccgccattaaaaatacagataatggctcctttactgtttgtttcccacccaacatgatagtcatagtatacacctagagattaactaggtagtaaacatataatattggttgttgcgccgatatctaccccacaaccaattaaaaacttaact

SEQ ID NO: 2391 - DNA, 377 bp, Triticum aestivum
  Clone ID: LIB103-001-Q1-E1-D11
gggtccataggtgcaaccgacggtgggagacgcgaaagcagttcattaaatctgttatcgagctttgtttcgaacatcatctcaaggccactgatcttctccatggcgtcatcaaaagtgttcatcacatcttgtacctgttcagtcatcatgtgctgaaacttaacatgaagctccttgttcgataagttctcccagtcaagctcgtcggcttgtgatcctggcatgggtagcagcaagagggcgacaccagaatatgatcgtacaggcctactaagaagtgggttgtggtgtttcacaaatctgttcaagcaagtctcggattcttacgagttcgtacccaacagcaggcggtgagtcggaagcgttgtagtcag

SEQ ID NO: 2392 - DNA, 212 bp, Triticum aestivum
  Clone ID: LIB103-001-Q1-E1-D12
aatcgattgtttacaccttcaggtgtgtcaatgcaacgcttctttgtattgtttagtaaacattttgatgtgcccagtgttgctcgcaaacataggatagatgagtggtcaagctcattctaggtttctactgcattgtttcttgataaaatttgcttttgcgttaatgtcgttgacagcattgtagtaaacacccctttggttattgtcgc

SEQ ID NO: 2393 - DNA, 463 bp, Triticum aestivum
  Clone ID: LIB103-001-Q1-E1-D2
gggtccacgtagaagaagaagacgaagaagaggaagaagaagaggaagaagacggaagagaaagaagctgagacgactgggcagaagcagacatttgacactactgttgaaaattcaggggcagagcctacagagagagacacggttgacggaaaacagtctagcaagtcaaagaagagcaaacgtaagcataatgatggtgcacctgccgtacaggtttctgctggcgatcaaatcgtgacaagggaagataagaagagaaggaaggaaccacttgtgctggaagcgagcaagcaaacccaaaacacagctgaaggtgagaatagagagattcagaagagaggacaggaaagcagtaaaaccagtccagactttagtgagaatgcatctgcggggggagaagaagctggtttaggtgttaactaatgagtagaaggacgaaataagaaccagggggaattga

SEQ ID NO: 2394 - DNA, 277 bp, Triticum aestivum
  Clone ID: LIB103-001-Q1-E1-D9
gggtcgacaggcagccattacagttgcatagcagtatataagtcaatcacatccccataaaatttgagggttgcccaggagtaacggtatcaccctcagactttacaggtgcactagtagtatcgcaactgggtgcaacctcgaggattctagctgcgacaaacgtttcacatcaattgacatagtcaccacgtgtgctagttgcacaagactatgtatctagttagcatccttaggaaatccatatgcccacagagcataatagagatttggcagc

SEQ ID NO: 2395 - DNA, 265 bp, Triticum aestivum
  Clone ID: LIB103-001-Q1-E1-E2
gggtccacggaggactcccaaccaacgtatagacaaagcgacccccgcttcccgtcccctctctcctccacacgcctcgctccctctcccctcgtccgccgccgccgccgccaccatgggcaggggcaagttcaagggcaagccaaccggccgccgcaacttctccaccccggaggagatcgcttctggaacttcagggcgtccacgctcatttaagaagaatgtagctgaagcagaagaggaagaggaagaggtagaagaatct

SEQ ID NO: 2396 - DNA, 435 bp, Triticum aestivum
  Clone ID: LIB103-001-Q1-E1-E9
acgcctgcccgtacctgtcctagactcccgggtccataggcgacggtgaacgcgcccacatcaacctcaaggtcaaggggcaggatggcaatgaggttttcttccgcatcaagagatccacacagctgaagaagctgatgaacgcttactgcgaccgtcagtctgtggatcgcaactccattgctttcctttttgatggtcgtaggctccgtggtgagcagacccctgatgagctcgagatggaggaaggcgacgagatcgacgccatgcttcaccagaccggagggtgctttcctggcccttagaaggagcttgctgcagcctgtctgttctatgtcgtatgctacctttagaactagagtaaaatgtaagaagtgaaagaacttgtgagacgatgggtctgtgccaatagcctgagggggggtctggaggtga

SEQ ID NO: 2397 - DNA, 451 bp, Triticum aestivum
  unsure at all n locations
  Clone ID: LIB103-001-Q1-E1-F1
cgggtccacgtacgagagtgaaactgtgagtgagagagaggtcatgcgcgtggggataaggtanggatagttgtagcgcgtttgccaaaacgcgctatagataatctgaatagcagtagcgctttgcatataaaccgctactgctaagtgtaactatacaaaaatatgtcaatgcaaaaatacattggccatcaatgatctttttgtgtacaatctaaattgtcaatatgagtcctcttcggtaggaaccggagaggactcatattgcagccacaaattttacacatagagttcagtgaagaccaactggttgtgatagtttcagaaataacatatttaaggtggtaaacaccctgttcacggagcgaggtgggactaaacttgtgggctgatcttagcagtagcagttttctactaagcgcgctgctgctaacttccatagcagtagcgc

SEQ ID NO: 2398 - DNA, 351 bp, Triticum aestivum
  Clone ID: LIB103-001-Q1-E1-F10
cgggtccacaggctggagggaaatgtgatgcgtgcaacagcgaccatgccggcaggcacggcagggttgaccgtggccatcatgatgtttccaagggagagcgaggcatccgccatcgcgtagctaaagaagtcgatgccccgggagaggttggccaccgttgccggtgtgaaagggccagatgagttcacttgtgtgttttacagtcttcagaattggagggtgagatgctacagcagtacagctgcaaattcccttgcttatccgtgaggcgatatttcaaaagtttgactgtgaccgaatttattcatagagaagctaagcggtacttgtcagtatgcttgactaaca

SEQ ID NO: 2399 - DNA, 447 bp, Triticum aestivum
  Clone ID: LIB103-001-Q1-E1-F11
acgcctgcagtacgttcgtaggctccgggtcgataggcacataggtgcataattattcaactactcattgatcttcacttatatcttttggagtagtttgtcatttgctctagtgcttcacttatatctttttagagcacgacggtggttttattttgaagaaatagatgaactctcatgcttcattatattattttgagagtcttaaacaacatggtaatttgcttgggttataaaatttagtcctaatatgataggcatccaagatgggtataataaaaactttcatataaagtgcattgaatactatgagaagtttgattccttatgattgttttgagatatgaagatggtgatattaaagtcatgctagttgagtagttgtgaatttgagagatacttgtgttaaagtttgtgattcccgtagcatgcacgtatgggtgaacg

SEQ ID NO: 2400 - DNA, 399 bp, Triticum aestivum
  Clone ID: LIB103-001-Q1-E1-F2
gggtccacggagctggacgggaacgtgacgcgtgcgacagcgaccatgccggcaggcagggcagggttgaccgtggccatcatgatgtttccaagggagagcgaggcatccgccatcgcgtagctaaagaagtcgatgccccgggagaggttggccaccgttgccggtgtgaaagggccagatgagttcacttgtgtgttttacagtcttcagaattggagggtgagatgctacagcagtacagctgcaagttcccttgcttatccgtgaggctatatttcagaggtttgactgtgaccgaatttattcacaaagaagctatgcggtacgtgtcagtatgcttgactaacaaatagcattaggatctggttttgttctctagaccttattacttcatgg

SEQ ID NO: 2401 - DNA, 389 bp, Triticum aestivum
  Clone ID: LIB103-001-Q1-E1-F4
ccgggtcgacgtacgtcaaggccacgatctaccgcctcatcggccgcgagaagcccgtccacgccgtcctcggcggcggcaagcctgctgatcttgttctatggaggaacatgaagatctcaggaggggtgcttgctggcgctacggccatctggctgctgttcgagatcatggagtaccaactgcacaccttggtgggccactgcctcatcctctccctggcaaccctcttcctctattccaatgtctgcattttcatccacaagtctcccccgaacatccctgaggtgaaaattccagaggacatgactgtaaacattgcactatcactgcggcatgagatctagcggggcttcttcaccttgagacagatttgtcatggtcgtgat

SEQ ID NO: 2402 - DNA, 420 bp, Triticum aestivum
  Clone ID: LIB103-001-Q1-E1-F9
acgcctgcccgtaccgttcctagactcccgggtccacaggcataaataacatgaccgctatgttgatttcgtttcagctacatgcatgaacatgttccacgtcaagccactcgaatcattcaaaggaggataccaccctatcataccacatcacaaccattttactagcatgttggcactcaacgtaaaccattagaagctcctagcctattaagcatggcataatcaactatcatctctaactatcattgcaaacatgttcattcagaataagctgaatcaagaacgatgaaccaatcatatttacatcaacaagatacgtcgagttcatactagcttctcccatctcaatcatttcatcatataacgtcattactgccttccacttgtacgacctaatggtgtctataataataatag

SEQ ID NO: 2403 - DNA, 341 bp, Triticum aestivum
  Clone ID: LIB103-001-Q1-E1-G1
accaaagtgcacaaaatccagcgtataatcaatcacagatcaattccacgccaagcaactctcagatccctcgtggatcaccaaacaaatatttttggcgcaaccataacgctgccttttctgtaaattgttcaactctgaacaaactcccgtagaaaagttgaaacctgcccattatataggcgacacccacgctgaccagatacgtctcctaattggactcgtacagatccaaacagaccagacaaaatctagcaaccgacctatactccttttccgatttaaaagctcacgtacagactccaaagactacgtactaggactccccactttcaaggaaa

SEQ ID NO: 2404 - DNA, 438 bp, Triticum aestivum
  unsure at all n locations
  Clone ID: LIB103-001-Q1-E1-G10
acgcctgcccgtacctttncgaagcctccgggtcgacagggacctcctgaaggtgatggaccggagcgacctcaccggcgcgcgtgcagcggcagatgctgccccgcacttccccctgaaaggacctggctgggaggtcgtggtggctgccgggggcggtatgctctcagcgctcaccagctgagccccgggcccgctccagtgaccggcctgtcaacggcgaccgacgccttggtattctggtgcttcggctttgttcgtcgcctgtgttaaggccgatgtttttgtgaacatgatgtggacatgacaacgggatcctaccccccctaagtaattatggacgaccgaggcgttgcagtgtgtactgtactgcaccccctagattaggaactgatcgattctttggcgagctgtgttgtgatgtaactcgagctcgtg

SEQ ID NO: 2405 - DNA, 227 bp, Triticum aestivum
  Clone ID: LIB103-001-Q1-E1-G2
gggtccacgtgtcatcttcgacctcgtcttcttcttaatcatcatcatctccgccgtatacatcctctgggacaacctcatcttcttcaacttgctatactactccatgtgcgtcatctacaccttctgcgcctgatacatcgtgtccgactgcttcacctacatcttttagaccatcgtggtgggccacttctgcataaactgctacttactcacgcttcacttat

SEQ ID NO: 2406 - DNA, 130 bp, Triticum aestivum
  Clone ID: LIB103-001-Q1-E1-G9
gggtccacaggtgcaccataaatatgcccatggaagtcgtcaatttgattgatcactggaagagccccgatgagttcaccaatgacttgttcaaaagctgcgtcgccaagaaccacatcactaggggcat

SEQ ID NO: 2407 - DNA, 317 bp, Triticum aestivum
  Clone ID: LIB103-001-Q1-E1-H1
acgcctgcccgtaccggttcgagagcccgggtccacgagttggttgagacacacaatgctagttgcacgtcacgtaaatcttttgagtacgggttgatacaatgcttcatgtgcgtcacttatgtcatttgacgtttggattgcctgtttctcttcactgtatcaaccgccatgtgtagtaatactcttttacgtcactgaaacttgtgatatagtgggcacatcatttgtagattgacataaactcacatgcatgacatgtatcgatttagacagatgacaggaagcggtcactcacatggctagtcataagatcc

SEQ ID NO: 2408 - DNA, 340 bp, Triticum aestivum
  Clone ID: LIB103-001-Q1-E1-H10
gggtcgacaggttatattaatctttgatttttagtttaccacaatcatccctgctgtacacaccttttgggagaagcccacttgattataatttgctagaatactctatgtgcttcacttatatcttttgagcttgatagattttgctctagtgcttaacttatatcttttagagcatggcggtggctcatttttgtagaaattgctagtcactcatgcttcacttatattattttgagagtcttttagaacaacatggtatttgctatggttataaaattggtcctagaatggtacgcatccaagttgggtataataaaaactatcataggaagtgaat

SEQ ID NO: 2409 - DNA, 433 bp, Triticum aestivum
  Clone ID: LIB103-001-Q1-E1-H11
gggtcgacaggtgccctttcacaccttgagagttggtgcaaacttcgccggtgcatccaaaccccgtgatatgatacgctctatcacacataaacctccttatatcttcctcaaaacagacaccatacctaccaattatggcatttccacagccattccgagatatattgccatgcaactttccaccgttccgctcatcatcatcatgacatactttacttttgtcatattgccattgcatgatcatgtagttgacatcgtatttgtggcaaagccaccatgcattatttttcatacatgtcactcttgattcattgcaccatcccggtacaacgccggaggcattcatatagagtcataccttgttctagtttcgacctggaatccttgtgctgtaatcaatagaaatttgatgatcatcattattagaaca

SEQ ID NO: 2410 - DNA, 438 bp, Triticum aestivum
  unsure at all n locations
  Clone ID: LIB103-001-Q1-E1-H12
cctgcccgtaccgtgtcttatactctcgggtccacgggtcaagcataagtcgtatagaagatacgatcaacatgaagatgttcatcgatgttgactagtccgtctcacgtgatgatcagacacggcctagttgactcggatcatgtttcacttagatgactggagggatgcctatctaagtgggagttcattatataatttgattagatgaacttaattatcatgaacttagtctaaaatctttacaatatgtcttgtagatcaaatggccaacgttgtcctcaacttcaacgcgttcctagagaaaaccaagctgaaagacgatggcagcaattatacgtactgggtccgaaactcgaggatcatcctcatagctgcaaagaaagattatgtcctaaaagcatcactangtgacacacctatcccacaggaccaagg

SEQ ID NO: 2411 - DNA, 275 bp, Triticum aestivum
  Clone ID: LIB103-001-Q1-E1-H2
ctctgtgtgcttatgatggagtcccgcatttgctttgagaactgtaagcgtgtttaacctgacagcgcctgtaattgtaggccctttccgcatacgtcacagcttggtgtcttatgaggtgctgcatggcagcaggctggtttatgccgcctcggtcattattaccacttgtaacttgttagagtgcacattaatctcaggaggacatacacataatacttatgctgctgttgttgtgacgacctttatgcctctgccttgtgttgcgattcata

SEQ ID NO: 2412 - DNA, 201 bp, Triticum aestivum
  Clone ID: LIB103-001-Q1-E1-H9
cgggtcgacaggacagcccaaactgcgtctgatatatattgcaaagtgtccccttggaattgacttccatatgttcttaagtcacatatcacaccatcgacttcgcctatcaactattccccgaagatcaggtgtatcggtactttgattctagggaaagtacacctttgcaactagtacaagacttatatcagaggattg

SEQ ID NO: 2413 - DNA, 162 bp, Triticum aestivum
  Clone ID: LIB103-001-Q1-E2-A12
cgcgtcctgcagaccaagattgtccagttcgctgagcggtaaccggacgtgcggttccagcaagtcacctatcagaggcacacgtccatgtgcaagagccgccatgtccatgtcctcacgttcgtcaggttctacatgcggagggcaacgcacggtcagcag

SEQ ID NO: 2414 - DNA, 423 bp, Triticum aestivum
  Clone ID: LIB103-001-Q1-E2-A2
cccgggtcgacaagactagagtatatgcgcatccattcatccatccatccccactgccgtttcccccactatataaaccccctcccatccccaccactgctcacccctctcctctcctctcctctcctctcctccggcgtcttcctccccccaccccctctcctgatcaaagcgcacgccgagcaagctagctagcaggtggtggtgggcgcatacacatacgcttactgtacgcgacgcggctttgcttgtggccaccaccatgatgtcgtcgcccgcggagtccgagaccagcttcttcccggaccacctcgcggagcagcagcagcagcagccccccttcgccgagcaggagcagctgtgctacgtccactgcaacttctgcgacaccatcctcgcggtgggcgtgccgtgcagcagcct

SEQ ID NO: 2415 - DNA, 455 bp, Triticum aestivum
  Clone ID: LIB103-001-Q1-E2-A3
tcccgggtcgaagggtacgtatgtgagaaagatggatacatgtaatatacatgagatgcgtgtgcatctggattctgtatacgtggaaggagaagagacaacatgtttgatgagagagcaggaaaaacatggacgagaggggaaggatctcgtgggttgagggattgacaattttgtgcgggggagagagggattggtaattttgtgcaagagagagagggcggggggaggagtcagtcagccgtcgtcacatcaccctgcttccaaatgaccccgcattctctagcgcggtgtggtcaccgtcttcgatctgctcgttccctttttgaagattgaggtgttgtgcatgttggggtgcaaagaagcacaagcgagagtggtcgccgtataaccttggatggggatgaattgtgtgctcgggggagtgtgtgtgtgtgttgtgcgccgtgtgtgtg

SEQ ID NO: 2416 - DNA, 360 bp, Triticum aestivum
  Clone ID: LIB103-001-Q1-E2-A9
tcgagggttcatcgatccagctcgcgacgccgccgtccgaccgagagtagtagtgctatctatctagttgctgtctagggttcgtggttctccgtgcaagagcagtggtatctccttggtgtttgctcccgtcttgtgagctgatgttgctgttgtagagatgtactggaagaagtttggaatggaaattgcagcagtttatccctgaaaaaaaaaaaaaaaaaaaaaaaaaaaaaaaaaaaaaaaaaaaaaaaaaaaaaaaaaaaaaaaaaaaaaaaaaaaaaagggaaaaaaagaaaaaaaaaaaaaaaaaaaagcgggggcgctcaaggatttcaacttttttatccgtgtaagggg

SEQ ID NO: 2417 - DNA, 376 bp, Triticum aestivum
  Clone ID: LIB103-001-Q1-E2-B1
cgcctgcagtacgtgtcgtaggctccgggtcgaagggtgaccaatgctaatacgcggacttaaataaaaacggagggagtacacatttgttttcttagtttgtagtgaactaatcatttgttgaaattgtgaaataaatatattaggctattgacttcgaatgtaatggtctatacaattcaatagttacaatcattgtcgaatcccaagatgtatacaaggtctatagtacttcataacatgctcaaactcacacacacacacacacacgcacacacataaagtaaactagaagaccattctctcatgtatacacaacgtatcggcatctgtgtatgtctcactcatgcatgatcatttgcacattcaaacctct

SEQ ID NO: 2418 - DNA, 464 bp, Triticum aestivum
  Clone ID: LIB103-001-Q1-E2-B4
tgtacgccggcaggtaccgtgtcgaggctcccgggtcgaagggaagaagcccaaggcggagaagcggctgccggcggggaagtccgccgccaaggagggcggcgacaagaagggcaagaagaaggccaagaagagcgtggagacgtacaagatctacatcttcaaggtgctgaagcaggttcaccccgacatcggcatctcctccaaggccatgtccatcatgaactccttcatcaacgacatcctcgagaagctcgccggcgaggccgccaagctggcgcggtacaacaagaagcccaccatcacgtcgcgggagattcagacctccgtccgcctcgtcctcgccggcgagctcgccaagcacgccgtctccgagggcaccaaggccgtcaccaagttcacctcctcgtagagtgctcctgcccctgtgtctcgtactcagctgtccgggtgtgtttgtggcc

SEQ ID NO: 2419 - DNA, 445 bp, Triticum aestivum
  unsure at all n locations
  Clone ID: LIB103-001-Q1-E2-C1
tcgcgggtcgacgggaccgcggagtcctcctcttccttcctgcccgtgaccccacgcctcctccccatctagatctcctctgctcatcaaccgccgctgcccttcgatccgcccgcgctgcaagagctcgccgccgcgctagcaggaggccgtcgcgggatcctccttctcctccctgccacgggatccttctccttgaccacgaccccgtgcttcctcctgatctcgagatcgcctgctcgtcaatcatcgcgccgcagcttcgtcaagagctcgccggagctaccctgcagcacccctttctcctaacgtctccctcgccggagcttctttctgccatgataaaatccgctcaaggccatcgtccaccgcctcgagctcgacgctcacgctcggatctagccgctggcaagggccagtgcgtaacttttntgtgaaatattgt

SEQ ID NO: 2420 - DNA, 461 bp, Triticum aestivum
  Clone ID: LIB103-001-Q1-E2-E3
acgcctgcagtactgtcgtagcttccgggtcgaagggtccttggtgttggtgggttcggtaaagtttaccagggagagatcgatgggggcacaactaaggtggctatcaagcgtggcaaccccttgtctgagcagggcatacatgagttccagactgaaattgaaatgctgtcaaagctccgccaccgccatcttgtgtcgctgattggttactgcgaggacaagaatgagatgatcctggtctatgaccacatggcccatggaactctgcgtgagcacctatacaagacccagaatgcgccgcttagctggaggcagcgtttggagatctgcattggtgcagcccgtgggctgcactaccttcacaccggtgcaaagcacaccattatccaccgtgatgtgaagaccacaaacatcctcctggatgagaaatgggtcgccaaagtttcagattttggtct

SEQ ID NO: 2421 - DNA, 375 bp, Triticum aestivum
  Clone ID: LIB103-001-Q1-E2-E4
gggtcgatagtcccttgagactctgcacttaaatggagccactagtgcccctcggttagctgaagacgatgaagattccgttgctagcgacttgcactgctttgagttgaccatgcatggagatgctgtgcagactcatgaccttgcaggaactcgacgaacagtcgccgactgcatgtactcaccaatgagaagactggagttttccgatggtgtgtctgttgaaggctcgaggatctcaatcgcagggcctcgttcagaaaagggcagggtgaagccaggcagcagcaaagcacagctgcatagttcggcaccagaaatcagctcccgcaactgtgacaggatcgatcctagagatgtgcagaatgaagcagt

SEQ ID NO: 2422 - DNA, 451 bp, Triticum aestivum
  Clone ID: LIB103-001-Q1-E2-F1
gcctgcagtacgtgtcgaagactccgggtcgaagggcgagagtgagagtgtgagtgagagagaggtcatgcgcgtggggataaggtagggatagttgtagcgcgtttgccaaaacgcgctatagataatctgaatagcagtagcgctttgcatataaaccgctactgctaagtgtaactatacaaaaatatgtcaatgcaaaaatacattggccatcaatgatctttttgtgtacaatctaaattgtcaatatgagtcctcttcggtaggaaccggagaggactcatattgcagccacaaattttacacatagagttcagtgaagaccaactggttgtgatagtttcagaaataacatatttaaggtggtaaacaccctgttcacggagcgaggtgggactaaacttgtgggctgatcttagcagtagcagttttctactaagcgcgctgc

SEQ ID NO: 2423 - DNA, 419 bp, Triticum aestivum
  Clone ID: LIB103-001-Q1-E2-G1
cgggtcgacgggcggctctttggattaagcaggacaccagaagaccaaagtgcacaaaaaccagcgtataatcaatcacagatcaattccacgccaagcaactctcagatccctcgtggatcagcaagcaaatatttttggcgcaaccataacgctgccttttctgtatattgttcaactctgaaaaaactcccgtagaaaagttgaaacctgcccattatatacgcgacacccacgctgaccaaatacttctcctaattggactcgtacagatccaaacaaaccagacaaaatctagcaaccgacctatactccttttccgatttaaaagctcacgtacagactccaaagactacgtattaggactctccaattgcaaggaaactaaataaatattccggccatgttgataacatagt

SEQ ID NO: 2424 - DNA, 110 bp, Triticum aestivum
  Clone ID: LIB103-001-Q1-E2-H9
gtaccggatcatgaattcccgcggtccacggggacctcttaaagctgtcgaactaccttcaaggcatagctgtactcttgaatcagccgtacatggccctcctaggcatc

SEQ ID NO: 2425 - DNA, 453 bp, Triticum aestivum
  Clone ID: LIB103-002-Q1-E1-A3
cgcctgccggtagtggtcctagcagcacgggtcgacgggaagcatcttagtggggcatataaggttgagaaggacaggctcctctctcttatacagaatctggacgtcagggccgaatccacgattttgatgcctgctgagctccaggttaaaactgaagcagagaagaggttgaaagaacttctccgtgaagaagaattgaagtgggctttgcgggctaaggttcgcaaagtagtccaaggggacgcaaatactcaattctttcatctgattgctaatggtaagcacagaaagaagagaatattccaacttgaacaagatgagggcactattttaggacaggataacctaaaaacatatataaccgaatattataggcagttatttggacctccgaaggacagttgtgtgtctctcgatgagtccagaattgacgatgtgcctcaactttcg

SEQ ID NO: 2426 - DNA, 431 bp, Triticum aestivum
  Clone ID: LIB103-002-Q1-E1-B1
gggtcgtaggggtcatattctcagggccaaatgtatggtagtagctgaatcatggatcacaaacatagaactcagttcctgaggacggctgcaatgagacaacccaccatgtactcctacatggcctctcaccgctacctttaccaaatcgtgttcacacacttagctcacacacagtaggacatgttcacacacctctgattcatccccgatgaatcagacctgactcaactctaagcagtagcaggcatgacaaacaaacatgaatgagtaggcacaacagggctcaaacaactcctactcatgctagtgggtttcatctatttactgtggcaatgacaggtcatgcaaaggataaaggggttcagttaccgcagcaagtaacagttgaatcgttgttgtcctaatgcattaaaagagagcaggagcga

SEQ ID NO: 2427 - DNA, 423 bp, Triticum aestivum
  Clone ID: LIB103-002-Q1-E1-D1
gggtcgacggggtaatctaaaccccccataccctaccttgcatccaaacccctctatggtcggtcgtccgctccgatctactatggtcgtcgcctgcatctgctgtcttaagtttactatatgctaccgctgatgctgctgctgctgctgctctaaaatattgatgctgttgctgctgctgatgcgtgtggtgtgtcgtgtgctagacgcgtgatttttttttacctgtacacatgaggccgtgtggcctcattgccatgtttaattacctgtcgctactctaagatgctggcaaattgtttgctgatgttaatgtctagtggcgctcgagagatctgaaagatctgctgtcgatccagttcctccaattggcggctaaagtgcatgaatcggggatttgcgcttgagtttcttatcccgccg

SEQ ID NO: 2428 - DNA, 390 bp, Triticum aestivum
  Clone ID: LIB103-002-Q1-E1-D9
tgacggggccgcggggcacgctgacccgcaacttcaagcacctcaacctcgacttccagctgcaggagggcgggcgcaggctcaaggtggacgcctggttcggcacccgcaagaccatggccgccatccgcaccgccatctcccacgtccagaacctcatcacggggtcaccaagggcttccgctacaagatgcgcttcgtgtacgcccacttccccatcaacgcctccatcaccgccgccaaccgcggcatcgagatcaggaacttcctcggcgagaagaaggtgaggaatgtggacatgctcgactgggtcaccatcctgcggtccgagaaggtcaaggatgagatcgtcctcgacggcaacgatatcgagctcgtctcccgctccgc

SEQ ID NO: 2429 - DNA, 379 bp, Triticum aestivum
  Clone ID: LIB103-002-Q1-E1-E1
gggtcgacggggaccagacatggtctctgtgtgaagacgatggactcgcacatttgctttgagaagtgtcaacgtgtttaatctgacagcgcctgtaattgtaggccctttccgcatacttcagaacgtgttggcctatgaggtgatgcacggccgtatgctgattaaggtcgactcggtcactcacaacaattgtaacattgttaaactgcagattaatctcaagtagacatctacctaatacataagccgcggttgttgtaggaaattgaaatctggtgtgctcttaactgattaaaacttggctgctctagaagatacaacctatattaggctttaatacaacttcatacctcttcgatactgtcacctatcttca

SEQ ID NO: 2430 - DNA, 340 bp, Triticum aestivum
  Clone ID: LIB103-002-Q1-E1-E3
cctgcagtatggtccgtgacatccgggtccacgggacaacagccacaacaagctgcaacttgtcatgaagagcggcaagtacacgctcggctacaagaccgtcctcaggaccctcaggaactccaaggcaaagcttgtgatccttgctaacaactgccctccgctccgcaagtctgagattgagtactatgctatgttggcgaatatcactgtccaccactagcatggaaacaatgttgatttgggaactgcgtgtggtaactacgtccgagtctgacgcctgagtatcatcgaccctggcgattcccacatcatcgacgctacaccagctggccagtaa

SEQ ID NO: 2431 - DNA, 438 bp, Triticum aestivum
  Clone ID: LIB103-002-Q1-E1-H2
tcccgggtccacgggatggtaaaagttgtgtgacaaatttgttgcatgaggtgctcttttaattgccttccttatgtgtgaaggtcgggatcgcacgatggttaactcctaccaacccttcccctaggagcatgtgtagtagtactttgcttcgagggcaagtagacttttgcaataagtatatgagttatttatgactaatgtgagtccatggatatacgcacactcatccttccactttgctagcctctattataccgcgcaactttcgccggtatcatgcacccattatttaccttcctcaaaacagtcaccatacctacctattatgacatttccatagccattccgagatatattgccatgcaactttccaccgttccatttattatggcacacttcatcattgtcatattgctctttgcatgatcatgtagt

SEQ ID NO: 2432 - DNA, 444 bp, Triticum aestivum
  Clone ID: LIB103-002-Q1-E1-H4
tggtcctacattcacgggtccacgggacaaccgtaacgcgacgtcatctatagtgtaccgtgtcccctgggtactgatttataaagtatcctaggggacaagcatgacatgcacttggtctgtaggctacccaaggtagcttacaaccaacgctagcaccacccatgcctacctcacactatagaagctagctccatccatccatcaaaggatcggctcacacactctcacgcacatactcattcggccagaggtcacggtcaacacgccactagctatctagctcattgctactactctcagtctaatacagctccaggagcactttgtactgcccgatgtacaccccagatatatactcagacatgtaagagtaagggtattatctctccggagagccccgaacctgcgtaaactagcgcgtgctacgcgcatatccgtctc

SEQ ID NO: 2433 - DNA, 353 bp, Triticum aestivum
  unsure at all n locations
  Clone ID: LIB103-002-Q1-E2-A10
accggtcctacnattcccggggtcgacttccaccaaagcgaaatccaccatctcatcgaaagacgggacacctccgcctctaccaagtggtatcagatttccaggttgctcggtgagattttacagtttttcgtagtttagatcgagtctgttcttcatacctatagtccacgaagaagccaaacaaaaaaattagggttagttcatcccatccgaaccaatctgagccttgcaaaatcttttctgtatttgctttgttgaatttgcggttgcatcctcgtgttcagttgctggtctcagcgtctagtcctttggagtttcgagttctgttcacaagttgtcacgccgtcgcc

SEQ ID NO: 2434 - DNA, 409 bp, Triticum aestivum
  Clone ID: LIB103-002-Q1-E2-A3
cgacgggaagcatcttagtggggcatataaggttgagaaggacaggctcctctctcttatacagaatctggacgtcagggccgaatccacgattttgatgcctgctgagctccaggttaaaactgaagcagagaagaggttgaaagaacttctccgtgaagaagaattgaagtgggctttgcgggctaaggttcgcaaagtagtccaaggggacgcaaatactcaattctttcatctgattgctaatggtaagcacagaaagaagagaatattccaacttgaacaagatgagggcactattttaggacaggataacctaaaaacatatataaccgaatattataggcagttatttggacctccgaaggacagttgtgtgtctctcgatgagtccagaattgacgatgtg

SEQ ID NO: 2435 - DNA, 399 bp, Triticum aestivum
  Clone ID: LIB103-002-Q1-E2-B1
ggcgggttctcatggccaaatgtatggtagtagctgaatcatggatcacaaacatagaactcagttcctgaggacggctgcaatgagacaacccaccatgtactcctacatggcctctcaccgctacctttaccaaatcgtgttcacacacttagctcacacacagtaggacatgttcacacacctctgattcatccccgatgaatcagacctgactcaactctaagcagtagcaggcatgacaaacaaacatgaatgagtaggcacaacagggctcaaacaactcctactcatgctagtgggtttcatctatttactgtggcaatgacaggtcatgcaaaggataaaggggttcagttaccgcaacaagtaacagttgaatcgttgttgtcctaatgc

SEQ ID NO: 2436 - DNA, 353 bp, Triticum aestivum
  Clone ID: LIB103-002-Q1-E2-B4
ggtccagaaatccgggtcgacagcgaggccaagaaggactcggggatccctcgcgtcggtagtgctgctgattggtctaaccacttctagctcgatgacccttgttgtaaactgccaatcttgacactgaatcgctgagacaccgcactgcatctgcattttatttttgagcagtttacaacgctctagacaatgctgtttcaataaatgtactgtctgatgggtaatgatactgctgtaagtttaccgatactcgaagaaactctgatgccaccacctggtggtagaggtttatcagcccccctatatatgtctcaataaataaagttcagtgaaggcttagtttgtttgtc

SEQ ID NO: 2437 - DNA, 441 bp, Triticum aestivum
  Clone ID: LIB103-002-Q1-E2-D1
cgggtcgacggggtaatctaaaccccccataccctaccttgcatccaaacccctctatggtcggtcgtccgctccgatctactatggtcgtcgcctgcatctgctgtcttaagtttactatatgctaccgctgatgctgctgctgctgctgctctaaaatattgatgctgttgctgctgctgatgcgtgtggtgtgtcgtgtgctagacgcgtgatttttttttacctgtacacatgaggccgtgtggcctcattgccatgtttaattacctgtcgctactctaagatgctggcaaattgtttgctgatgttaatgtctagtggcgctcgagagatctgaaagatctgctgtcgatccagttcctccaattggcggctaaagtgcatgaatcggggatttgcgcttgagtttcttatcccgccgtaagaagtattttacct

SEQ ID NO: 2438 - DNA, 434 bp, Triticum aestivum
  unsure at all n locations
  Clone ID: LIB103-002-Q1-E2-D3
cgggtcgacgggataaaaatatgatagattggataaatagatctcgaataaaagcaaattaaaataaagtgcagcaaggtatttttgtatttttggattaatatatccgaaaataaaagaaaataaaaatagatcgcaaagacaaatataataaagaagagaccccaggcccgtagatttcactagtggcttctctcgagaaaaatatcaaacggtgggtaaatgaattactgttgggcaattgatagaacttcaaataatcatgacgatatccaggcaatcatcattatataggcatcacgtccaagattagtagaccgactcctgcctacatctacttctattactccacacatcgccagctatccagcatgcatttagtgtattaagttcatggagaaacagagtgatgcanaaagaacaatgacatgatg

SEQ ID NO: 2439 - DNA, 401 bp, Triticum aestivum
  Clone ID: LIB103-002-Q1-E2-D9
tgacggggccgcggggcacgctgacccgcaacttcaagcacctcaacctcgacttccagctgcaggagggcgggcgcaggctcaaggtggacgcctggttcggcacccgcaagaccatggccgccatccgcaccgccatctcccacgtccagaacctcatcacggggtcaccaagggcttccgctacaagatgcgcttcgtgtacgcccacttccccatcaacgcctccatcaccgccgccaaccgcggcatcgagatcaggaacttcctcggcgagaagaaggtgaggaaggtggacatgctcgacggggtcaccatcctgcggtccgagaaggtcaaggatgagatcgtcctcgacggcaacgacatcgagctcgtctcccgctccgcgccctcatcaa

SEQ ID NO: 2440 - DNA, 371 bp, Triticum aestivum
  Clone ID: LIB103-002-Q1-E2-E1
cgggtcgacggggaacagatatggtctctgtgtgctgacgatggactcgcacatttgctttgagaagtgtcaacgtgtttaacctgacagcgcctgtaattgtaggccctttccgcatacttcagaacgtgttggcctatgaggtgatgcacggccgtatgctgattaagatcgactccgtcactagcaacaattgtcacttgttagactgcagattaatcgcaagtagacatctacatactacataagccgctgttgttagtgcaaattgagatctggtgtgctcttagctgattaaaacttggacgctctagaagatcaacgctatattacgcgttacaacaacttcataccacttctatactgtcacc

SEQ ID NO: 2441 - DNA, 408 bp, Triticum aestivum
  Clone ID: LIB103-002-Q1-E2-E3
cgggtcgaccggacaacatcaacaacaagctgcagcttgtcatgaagagcggcaagtacacgctcggctacaagaccgtcctcaggaccctcaggaactccaaggcaaagcttgtgatccttgctaacaactgccctccgctccgcaagtctgagattgagtactatgctatgttggcgaagatcactgtccaccactaccatggaaacaatgttgatttgggaactgcgtgtggtaaatacttccgagtctgctgcctgagtatcatcgaccctggcgattccgacatcatcaacgcaacaccagctggccagtaaacctgtgtatgccattttcagtgtctcgtctgatgcgtcatctaaggtggttctaaagtgtagttcttgctggacttgatttggtcttgtg

SEQ ID NO: 2442 - DNA, 369 bp, Triticum aestivum
  Clone ID: LIB103-002-Q1-E2-E8
aattccggtcgacgggccactgcaagaggtgtgctatgacagcttcaactaccgcggaggtgccgcgaggctgcggtgattcttcaatttccgtggctacactcggtggtgagctgcgctccaaagggggccgccggtcctacgacgacctgccggtggctgcgctgctactatgccggcttgatgatttcccatctctattttcttgattgctccgatctgcaccgacatgcggtcctgccgacgtcgtccgatgtactgctaatctgaggccactggatctgcaggactggcatgggactcactgctgctgccgggactgcaacaatcggggcagcgacgctttggccttggccttttttttggttc

SEQ ID NO: 2443 - DNA, 433 bp, Triticum aestivum
  Clone ID: LIB103-002-Q1-E2-F3
cgggtcgaccggtgggaacaatggtagtgagataatgtgatgcaacactagaggtgccacgtggagcgtttaactggtcaactagtcatgtcatgagcaaatacagagttgtacggtgagcccgtgactgtataataaccactaaacgtaaatggtgaccgtaatgagtggatcctgaagtccaatgtgcgtatcgtgctttcgcttcaaatacaatgatcgtcattgcatatatcgtgagagaaagatgaaacatgcgtgaattttctgggggcttacttttagaggacctggagatagttttgtgtgcatacgtgaaaggggcgtacagggggtatgcgatggagagagagatgctcttcgtttctctttattatgactaactttgtatatagtatataaatatacaaattcacagtgcggaaaaaatatc

SEQ ID NO: 2444 - DNA, 391 bp, Triticum aestivum
  Clone ID: LIB103-002-Q1-E2-H4
acaaccgtaccgagacgtcatctatagtgtaccgtgtcccctgggtactgatttataaagtatcctaagggacaagcatgacatgcacttggtctgtaggctacccaaggtagcttacaaccaacgctagcaccacccatgcctacctcacactataaaagctagctccatccatccatcaagggatcggctcacacactctcacgcacatactcattcggccagaggtcacggccaacacgccactagctagctagctcattgctactactctcagtccaatacagctccaggagcactttgtactgcccgatgtacaccccagatatatactcagacatgtaggagtaggggtattatctccccggagaagccccaaacctgggtaaac

SEQ ID NO: 2445 - DNA, 396 bp, Triticum aestivum
  unsure at all n locations
  Clone ID: LIB103-002-Q1-E2-H6
gccgacgggaggaaacagcagtacattacagagtgctagccaaaatgcgaaagccacaataccgttcccgttccgccgcgcagagagacgaccataaataaagcttacacaacatagccaacaaggagaccgttcggacctggggctgccgccgaggcgcgtgtgccatgcatcacgattgcccaacaactaagattgcagaagccaacatgatgaaaggataatgcagcaaagacgcacgatgacgaggtagcgcagatttgatttgggaccttatgttctgccgactgtangggggacccttcctagatcttgtcaagcttctccgccttcaccaccgggttggccttggcgatggcgtccatggccgccgcgcggtagtcaaacttgcactcg

SEQ ID NO: 2446 - DNA, 180 bp, Triticum aestivum
  Clone ID: LIB103-003-Q1-E1-A11
gcaataacaccgcgaaccgggcgacctttcagccggtgtcgcccttgcccttgtctcattctgatgcaataaggcccgaagaaatttgaagagtttgtttgtacctttgaatattatagagcatgcaccgagcaatcgtgatgtttgaatcaaaccgtcgccttcaggcgcttgattttg

SEQ ID NO: 2447 - DNA, 434 bp, Triticum aestivum
  unsure at all n locations
  Clone ID: LIB103-003-Q1-E1-A12
gcgagtcgacgggagacactagagtgagtcgtcttagcacccggggggtccaaccgcaaacaaacattagcatacataggcaccaggaaaggaggcacaggcaaaacctcaggttaaaggggtctcaccagaggattcagcttaataactcgggttcgcaaaaggattcaaaacaaacggagcaacgaaactcaaacggcgaaggaaacaggatccgtttactaatctggacctatgtcaaattttatagtagcaaaaacttgttcaggttgattaagcagaaagagggtctcgggacgaagatctaggcgcttgaatcgcctgattccgactaacgagcgaaaagataaacagaaactaagatcggatcanaaatcgcgatcagaaaaatcgcggaataaatccgataaaaagaaaattgacgaatagactaa

SEQ ID NO: 2448 - DNA, 379 bp, Triticum aestivum
  Clone ID: LIB103-003-Q1-E1-A9
ggaaccccaaaattaatccttgtaagcaacagaagggccagaagaaaggccacaataaccttgaaaacttacaaattcaacaccttcaaggtgctaaaccaggttaaccccaaaatcggcatctcctctaaggcaatttcaatcataaactccttcatcaacaacatcttctaaaagctcgccggcgaggccgccaagctggcgcggtacaacaagaagcccaccatcacgtcccgggagatccagacctccgtccgcctcgtcctccccggcgagctcgccaagcacgccgtctccgagggcaccaacgccgtcaccaagttcaactcctcgtacagtgctcctgctcctgtgtctcgtagttagctgtccgggtgtg

SEQ ID NO: 2449 - DNA, 418 bp, Triticum aestivum
  unsure at all n locations
  Clone ID: LIB103-003-Q1-E1-B12
gaaagcattgttggacaaggcttacatgaacgccaaaacgcttctcacaaaccacaacaaggtgctccacgcgctagcaaatgccctcctgaagcatgaaactctcagtggtgacccgatcagggagctagtttcgacaggacgacaaggagatggtcctagcagtagccagcaaaatcagggaacaccttctcctggtgacgagttctcgaaactagtatcgactgaacaacaagaagatggtcataacaatagcanacaggatcaggtaacaccttctcccaccggtgacgagattaaggaatcagcanggagatgatcctaacaatggtcagcagaatcagggaacacctttctcaccctagccttggagacgcttatacaggaagaaatatttctttgcctgatagatactaca

SEQ ID NO: 2450 - DNA, 419 bp, Triticum aestivum
  Clone ID: LIB103-003-Q1-E1-C10
tgtgccttaaggtttaataaatcaccaattgaatgttacctaagatgctctggcgctccaaaaaatgttgggaacctttcaatcctcaacttaatccagtgaggaaacccatatacagctatgccatccactagttccttgacctcttgagatgtccaatgggcgttgtttcttctctgcccacgtttttggcctctacctgcagagtgcatgtaccgagagcatggttccgtggtaatcgaccaagttcctctcttgtgtgcacttctcacgcgactctcatgcctccaatcactttctagcatctgatctgaaacacaaaatgtatgcgtttaactacctgaactatgaaaaatgatatagttcaactagtggccttcaaaattcataccccagtagatcgcagcccccctcctccg

SEQ ID NO: 2451 - DNA, 428 bp, Triticum aestivum
  unsure at all n locations
  Clone ID: LIB103-003-Q1-E1-C11
tcgacgaagatcacttccatctggcacagaatccagaaccaccagatccaatctagacaccatcatggaggggttcaccacttccattggtgcctctccgattatgcgtgggtagttctttgtagacctacgggtccatagttagtagccagatggcttcctctctctctctcttggttatcaatataatggtctcttggagatccatatgttgtaagtacttttgcggtgtgtttgttgggatccaatgaactttgagtttatgatcagatctatgtttttatccatggaagttatttgagtcttcttgatctcttatatgcatgattgcttatagcctcgtatttcttctccgatatttgggttttgtttggccaacttgatctatttatcttgcaatgggaagatgtgctttgtantgggttcga

SEQ ID NO: 2452 - DNA, 382 bp, Triticum aestivum
  Clone ID: LIB103-003-Q1-E1-C12
cactctccaatgtagtgtcggtaactataaaatgttgagtgtcttgaaaactttctgataattgtgggatttgctttgtaatggtaatcgtgaaattggtgtggttatgttttggtcaaaaaaaaaaaaggaaaaaaaaaaaaaaaaaaaaaaaaaaaaaaaaaaaaaaagaaaaaaaaaaaaaaaaaaaaacacaaaaaaaataaaaaaaaaaaaaaaaaaaaaaaaaagaagaaaaaaaagaataaaaaagaaaaataaaaaaaaaaaaaaaaaaaaaaagggggccccaaaaaagaaaaaacctaaattaacggtgaaagaaaattaaaaacccctaaaaagtgccccaaaaattaaaataaagggggggtttttaaaa

SEQ ID NO: 2453 - DNA, 417 bp, Triticum aestivum
  Clone ID: LIB103-003-Q1-E1-C9
aacacatccagcgcctcctcccgtctcgtcctcgtcccccgtcccctcctccgggcccgatttaagtccagatgaatccttgccggaattctggtggtggtcaaagttccccgggttaactggttggaaaatgccaacctgcaaagcctgctgcaacaacagctgcgaagcccgcacctgctgaaaaaacagcaacggcagctgctgatgtagccaagcagattccatctggcattccaagttaccgggcgaagaactatttacgttcagatggccagaacacgggcaacttcctttacgagcgtccttcaaccaaagttcatgctgctcctggccggtggctcgtccctgggctacttgtttggcggaaagtgatgttaatgatggtgcctgcttaatgaacgagcgatgaattgg

SEQ ID NO: 2454 - DNA, 210 bp, Triticum aestivum
  Clone ID: LIB103-003-Q1-E1-D10
tctaaaattaccatcttcatatctcaaaacaatcatcaagtaacaaccttctcatagtattcaatgcactccatatgaaagtttttaatacatccctaatggatgcctatcagagtaagactaaattcatcaccaaagaaaataggaaccgtgacatacctccttgggcgaacaaatgcttgtatgggaaaagtgaaaaaaacaccaatc

SEQ ID NO: 2455 - DNA, 408 bp, Triticum aestivum
  Clone ID: LIB103-003-Q1-E1-D11
cgggtcaacgagaaatctcgaacggtggcgtcatgggctccaagtcgcacgccaagaccaaggtcagtgaaaggctcatcgccaaagacgctgcgcaaacgatgaactaagcctagccctataagtattgtcagagcatatgccatgtagtttccctttcagtctgtcctgattttgacgacgaactcgaacccttttagcagcactgtggaatcgtattgtggttttctgattcgctgttccgttctccagacttctgcaaagatcagatgaggtttacccatgtttggattctatatagttttatgtcctttgtcgagtctgaagttagttgtgtttgacatcttccaaacttggctggcttttggttaacatgcaatgacgaccagctcagagtgatcattactt

SEQ ID NO: 2456 - DNA, 354 bp, Triticum aestivum
  Clone ID: LIB103-003-Q1-E1-D12
acggggaccacgcaacacggtcaaagggaaatggttaccaaaggaggggcgggcaccaatacgacggctacgactagtctcacatttgctctgctggcgaatggtcgcatcccatttggtgctcttgatctggtgcggcctggccatatttttgtcacaacaaagcgcgattacctggagaacttgcgttttgcttagctgctattgagcatgactcgtttctgatgggactctttttagtgtttttgctacatgatcgtgtcgcctatctggtactatgaactaaacacgggaaaagaatggatcagtgttagttgatccttggtcaaaaaaaaacaaaaaaagcagacaaaa

SEQ ID NO: 2457 - DNA, 397 bp, Triticum aestivum
  Clone ID: LIB103-003-Q1-E1-E11
ctcccgagtccacggggatcagactgatcaggaaaacagatatccagccggatagcctgtatgtcctagcccgctatagcctgatgctcatgtcgagtacgattgatcgtcaatcgcacagactacgtccactgcccacaatgataccaccgtcaccaagaaccacggaactactgacagggttgattcatccacatcggatggaccagataccaccacttctatcctagatgttgatgcgggcagccatcaagagggatcaactgttcctgctgctacaaatgtacatgtacggaacacacctgtatcttcagatcaagctgtctcgaatgaacagcgtgacatagtctctgaactaaacatcttctacataccacatctgcggggcacgtcacaa

SEQ ID NO: 2458 - DNA, 422 bp, Triticum aestivum
  Clone ID: LIB103-003-Q1-E1-E12
acgggtacccatgatgctaataatatgcaaagctacaagcttggggattctatgtttgatgattatcatattttttgtcccccaagttttgatgagaatatttgttatgatgaaagcatgcctcctatttatgatgattttgttgatgaaagtgggtttgcaagagtgtcaactttaggaagtaatgatcccactattttgaagggtgttgaatcttgttgtgataattatggaagtggatttggagaggtcatgactttatttagtgatgaatccactatttcggaagaggttccaatagactatgagaataaagttcctatctatgatgattattgtgatgacatgtatgctataaagaataattataaccatgaaacttgtcatcatgattttaattttcaattggatcatgcctcaca

SEQ ID NO: 2459 - DNA, 454 bp, Triticum aestivum
  unsure at all n locations
  Clone ID: LIB103-003-Q1-E1-F10
cggggtccctaaaaaaacggaaaaccaaaacgggggtcaaaaatccgtataaaatggcaagcaaccggcaatcccaaaagcaaaaaaccaaaacaaacacggcaaatcaacggaagctaaaatgcatgtaaaattaattatcccgaggtgaacatacatgttaccaaaggagggacattttaatttcaaaaaaaaattacagagatcattaagacgttttagtacattgattgattttccatgggtataatgtgaaaaaatcaaatttgagctacatcacacgtgacagtgcacctaaatggattgcaaaaacacacgtgtctcacagggtgcatgtttactccccatgcaacanatttcaaacattgagaatcttgatttttaaattctaatacatccaaaacttatttgaagttcatgaaacttatcgtgttgtcatatggacaccaataca

SEQ ID NO: 2460 - DNA, 344 bp, Triticum aestivum
  Clone ID: LIB103-003-Q1-E1-F11
taatagacagattcctcatgtccaccaatttatttcagaactttctgagttacagaagtattcgaaagttacagattactacagattgttctatttttgacagattctatttttcgcgtgttgtttgcttattttgatgaatctatgagtaggggtatgaaccatggagaacatggaatgcagtagatattacaccagtataaataaagaatgagttcacaacactaccttaaaatggtgatttattttcttatactaacgaagctcatgagattttctgttgtgaagttttaatgttttgggtaacgatttgatggattttggaataaggagtggcaagagcc

SEQ ID NO: 2461 - DNA, 313 bp, Triticum aestivum
  unsure at all n locations
  Clone ID: LIB103-003-Q1-E1-F9
ctactaaaaccctaaatcaactgcgggtgttgtttaaaaaattttgcgcccggtattttaatcgtacggcaactgctaattagttatcaaccgctctaaggagctattgtactgtcgtgtcgcgttgtgtcngatttgctgttcaattagtagttgcggtggtgaatgcgtggctagagatgtttcatggccgtgcaatgaactgcatgtcgtcagctctgtatccgtcgttggtgtgttgtgttttctagtttataaatctgatttacaaaananaaaataagaaaaaaaatataaagattatttttaattt

SEQ ID NO: 2462 - DNA, 405 bp, Triticum aestivum
  unsure at all n locations
  Clone ID: LIB103-003-Q1-E1-G10
ttaatcaccctaaaataatgttgggaaccttggagattaaggccaaaatgacctccacaattgacaacaacaacttgaattacacaatgaccaaaagttcaataaccccgcacaaatcttcctaacaccaaatggccatgaacagcgacggcggcctcagcatgccagcgacgatcagaacatcgacaaggccctccgtcgccggtgggccaagtcaggagaatcaccatagaatgaaagaaacagctggaaacttgnggctgtacaatgagggtatgactgtcaaactgatacggggagcttagtttgtagtggggtcaaaaaaccattcatttgcagtgtattcagcccaagtaattcgaaaattttgggttgagagtgtgaagtacagatgttgttagaaaa

SEQ ID NO: 2463 - DNA, 448 bp, Triticum aestivum
  Clone ID: LIB103-003-Q1-E1-G11
tccacgggctactgtaaaacgtatctcattaagagcatggtggtggttttattttatagaaataattggtctgtcatgcttcacttatattattttgagagtcctttagaacaacatggtaatttgcttttaggaataataaaaactttcatataaagtgcattgaatactatgagaagtttgatacttgataattgttttgagatatgaagatggtgatattagagtcatgttagttgagtagttgtgaatttgagaaatacatgtgttgaagtttgtgatttcctgtagcatgcacgtatggtgaaccgttatgtgatgaagtcggagcatgatttatttatcgattgtcttccttatgagtggcggtcagggacgagcaatggtcttttcctaccaatctatccccctaagagcatgagcgtagtactttgtttcgataactaat

SEQ ID NO: 2464 - DNA, 400 bp, Triticum aestivum
  Clone ID: LIB103-003-Q1-E1-G12
tggaatacagtaaatattacaccaatatgaatttagaatgagttcacaacagtaccaaaagtggtgatttattttcttatactaacgtaccttacgagttttctgttgagttttgtgttgtgaagttttcaagttttgggtaaagattcgatggactatggaataaggagtggcaagagcctaagattggggaagaccaaggcaccccatggtaatatacaaggacaaccaagagcctaagcttggggatgcaccggatggcatcccatctttcgtcatcgttcatcggtaactttacgtggagctatatttttattcaccacatgatatgtgttttgcttggagcgtcattttgttttattctgttttgcttgctgtttgaataatatctcaagatctg

SEQ ID NO: 2465 - DNA, 397 bp, Triticum aestivum
  unsure at all n locations
  Clone ID: LIB103-003-Q1-E1-G9
agtcaagacagatgtcctccacgcaacacatcgagctcgtccccccgctccggcggccctcatcaaaccagaaatgccatgtcaagaacaaggatatcaggaagttcttggacggcatctacgtcagcgacaagggcgccatcaaggaagagtagagagccggaaaccgtcncgcccaccagaagccgtgtttctgcctgccgtgtttgtttcatcgtgtttgtgtctgtctgtcgtcgtcgtcttcgtgattttgaactttctctagactgaattttgtagcggagttaaatttttagggatgtgccgtggaacatgctatctttattgttatcctgcatatcgtcgccgccgcgagaaccggtgcgacgcttatctagccctaaaggctgaagac

SEQ ID NO: 2466 - DNA, 379 bp, Triticum aestivum
  Clone ID: LIB103-003-Q1-E1-H10
ggcctatcccgttttgtccgacaaggggaaaagggccatgtacaacgccgggctctttgatcccctcgacgacgacgaccagtatttctcggacttcatgcacgagatgctggtgatgatggatagcgtgaaaaacgagaagccggacacgctcgatgacctgcagaagatgctggatgacatagtcaacggcgacggcggtagccgcgccactgctggtgctggtggtagcggcggcagtggtggtggctgcggtggtcgcgttccaccggaggccaaccgcataactcgtgtcaccccttacccgcagccttcgcgaaggtgatggacgcgccggtgctcgtgacgtgcacgcaccgctgcgcttgtaagatacaga

SEQ ID NO: 2467 - DNA, 407 bp, Triticum aestivum
  Clone ID: LIB103-003-Q1-E1-H11
cacgggaaacgaggaagatggtgagggtggggtttggattacctgaccatatcgacgaagccgcacaacaagaagaagggtcggcggcaaggacgccccgcagcacgaagaagggtcgccggcgatgaagcaacgctgcaagaagaagggtctccggtgaggaggcggcgcttcaagaagaaggttcaccggcgaggaggcggcgctgcaagaagaagggtagccggcgaggaggctgagctgccagtaagcaccagtgaaggtttgaacttggaaagtgatacgtccattttgcatcatgcttttatatcgatatttattgcattatgggctgttattacacattatgtcacaatacttatgcatattcccgcttaatctgcaaggtttgcataaagagggagaat

SEQ ID NO: 2468 - DNA, 376 bp, Triticum aestivum
  Clone ID: LIB103-003-Q1-E1-H12
cacggtaagtcaacgcttacggattcgctatgtggatttcgcgagatccgcaacacaatcaaccctctccctctcatgtcgccacccaaggtgatcgccgggccagcctgtgtggttggcgatgaaggtcgtggtgagatttttgctgattcgttcgctggcgaaggaccttggacgccaaggcggcggcctcggacggcgaggaagcgttcgtcagatgtgctagccggcttcctcggctacacgggtggagaagattcggctgattgtggtcgcaacccggattccccaccttctgctccagatctgaagactaagaaaggtttggaggactccatcggcatgcacacggtccaatgctacaaatgtgagaaat

SEQ ID NO: 2469 - DNA, 175 bp, Triticum aestivum
  Clone ID: LIB103-004-Q1-E1-A1
cgggacagaatgacgaacctatataaccagacaatcccaggaaaatggagctcggaagtcgagcttccagaggagaaaccttaactagtgtggctcgggtatttcatctaacaccctcatggtgcataaggaaggtgaagctaagaggcaacccaagatgcccctccccctcctt

SEQ ID NO: 2470 - DNA, 415 bp, Triticum aestivum
  Clone ID: LIB103-004-Q1-E1-A11
ggtcgacgacgaggatgcaggctaggcatcattgacatcgagaacaaattctatgcaaatttaacattttttaaatgcttggattgcgatttcttatatacgagaaacctttagtccgtggctaggaatatgattcagaatcataaagaattctcttaacctttaagggatttaacaaaatggtgtcattctggatgtgcagaaaatggtccatatttttcatgatctcatctacccttctatatgccatgttgtctagtgtcaagggattcaataaaaccatggcttcatcattagctggaagtaacaggcgcatgatggtacgaagctctccaaagtcgtcttggaacggaatcccggataggataattagctttatggtatgaagttcagcaagagccttccgaatatcgct

SEQ ID NO: 2471 - DNA, 440 bp, Triticum aestivum
  Clone ID: LIB103-004-Q1-E1-A12
ctcgcgggtcgacgggatgcttggactcgctgaatcgtattatcagccgactaggagagaaggctctccccctgtactgactcatgaagaagtccactcacttcgagtggaatgaccaagccgaccaagccttccatgagttgaagaaaatgctgaccactccgcctatcctggcagcgccgactgaaaaggagcccatgctcctctacatcgccgcgactagccgagtcgtcagtactcttgttgtggtccagcgcccagaagaaggccgagcccagctagtccagaggctggtgtactacctaagcgaagtgctatccagctcaaagcagaactacccgcactaccagaagatgtgctatggggtatatttcgccgccaagaaactgaagccctacttccaagagcaccccatcacggtcgtgtgcaccgccccgctc

SEQ ID NO: 2472 - DNA, 411 bp, Triticum aestivum
  Clone ID: LIB103-004-Q1-E1-A7
gatcctaccatggttagcagcaatagaaacacacaagaatatgatcctacaaactactagaaaatggcggtggtggggtgtcacaaatccgtcaagcaaatctcaaattcttaccagttcttacccagcagcaggtggtgaacgacaaccgttgtagtcaaaactctcaaagcttggatagagcgattaccagggagagtcaaacgcatgacgtagatgtatgtggagcgaggaaggcttataatatggtagcaaaaagggtcagcaataatcaattcagagatgcaaagttgaataaacgctcaacgacggtactgtgctggtcctaggctagaccgtgctagagacgcgagcctagagcactaacaaaatcacggcgctgcacgtaaacaagggaaaagcacactccgg

SEQ ID NO: 2473 - DNA, 190 bp, Triticum aestivum
  Clone ID: LIB103-004-Q1-E1-A9
gagacaaacagggacgagagtgcactctggatccagcccaaggagctgggctcttacaccagcaacgaggacaactggatcgaaggtgtgaacgaaacgacgcatcggcctcaggggagccttggacactacagtctccttctgtagtctcctctaaaccgagacaaaagtgcaaattaagcgctacccc

SEQ ID NO: 2474 - DNA, 190 bp, Triticum aestivum
  unsure at all n locations
  Clone ID: LIB103-004-Q1-E1-B1
actcccgggacgaaggagatgggggattaatttctagagttttgaaagtggaaggactaaaatgcaaaaaatcaaatgtactatcnccgcgacattattttcaagacggagggagtagtagtattatttcctgaaaaaaaaaaaaaaaaaggaaaaaaaaaaaagaaaaaagaaaaaaaaaaaagggggc

SEQ ID NO: 2475 - DNA, 431 bp, Triticum aestivum
  Clone ID: LIB103-004-Q1-E1-B12
tcgtgggtcgacgggactccctaaggatattcatagaacggtgtcaatggagagaaacagcaggatgccgtcaatgggaagccaaagtcgcctgtggcgaatggtgttaacggggatgcgaaggttccggcagagaaagccgctgccaccgctgctcctccggccgttacctacgcggcgaaggtggcccaaacagcagcggccgagaagaagcctgtggcgaccgagaagaagcctgttgtcgccaacggtgctgtcaagaccggagtagctgcttgatcgcattacccgatcctcccagctagccatgaagaacaaacggacggtgctggcgaaccaggcgagacatgcgggttccaaggtactgatcatcaaaggtggcgtctggaaagcgggtcggatagttaggtttccctagctctctccttttt

SEQ ID NO: 2476 - DNA, 402 bp, Triticum aestivum
  Clone ID: LIB103-004-Q1-E1-B3
catgggggtcttagtcgtacttatcaaaaagataagggaggcaagttgggaaggacggagctcagcacgttaggcacctagtgtcatctcagtgaatgaggcatagatgaacctctcgagtggaatttcaagaaaaacatcgagagcgagtacgaggtacaataagaagttccaagttgttagataatcgttcgatgtctgaaacaaagtgtgaaaggggtactgactaacgcgagaaagtattgcgtctgatgccagaatagatcagtaggaaggtggctcatggtctacataagaagccaagcgtggggaataactttgggaacagggggtgtacaccaaagtcaggttttgatcgtgtggaagggttatgggcccaccatgtgggaaaagtaggaagag

SEQ ID NO: 2477 - DNA, 208 bp, Triticum aestivum
  Clone ID: LIB103-004-Q1-E1-B6
acgggacaacggataatggttcgtaggatttatgaggtctcgttgtttttgcatgctagcaaattactccgggatgcgagttttatgatttcgcttgtgttcaaggattttactattattagtgcttgtatcctacctgtggtatcgtcatagtttgctgggtatggaagcccttttatcctgcttaaaaactgtattttgcctggaa

SEQ ID NO: 2478 - DNA, 431 bp, Triticum aestivum
  Clone ID: LIB103-004-Q1-E1-B9
cccgggtcgacgaggtagcttaagatgctgccaggtccaaggacaaggctgcacaaacctcgacgactgtacatgttccgcgccactctcaggaggcgcaagaccaacagcgtcatggcacttgcagtgccatacgcatgataggccaagaccaagctggtggatctcggggcgctcaagaccagcatgcacgccagcgtgctggcacgagcggggcacggtcgcctggacgggatactgctccttctaacatagttagaagtccgagcacgacccgctcctcgcgccgtccgccactgccacccaccactctagcagaagctttggcgcaagctcaactgctcctagattaccctccgacgtcggacaagatcgacgaatggagggtcaccattcagagtctcatcggctacgccaacggcgacactcca

SEQ ID NO: 2479 - DNA, 413 bp, Triticum aestivum
  Clone ID: LIB103-004-Q1-E1-C10
ctcacgggtcgacgggatactgcaacttggccctgcctatcttttttcattgtagaggtgacctttggattttaaagaaattacgtcaaaccaattgagggatttatttatcacggaaagttgaacgaaaaccatgcaattttctatggttttgcattcctacacccagattcgttaagatttctagcaaacaggttaggcctcaaggggtcttctatgtgtcttacatgcatcttctatgttttcaaaactcttagaaaacatcttgtagaacacacaaagagctttacacataaatccaagtgtgttgattccttgtaaagttgtaaaattcaagaagttgtgtcattttcaatcgtgcattttattacttgtcttatgagaattctgcgctccaatggaacggttcccaa

SEQ ID NO: 2480 - DNA, 297 bp, Triticum aestivum
  Clone ID: LIB103-004-Q1-E1-C11
ctcgcgggtcgacgggacacatcacaattagtcgtcccagtcgcccatatgtgcttaccacgtacaccgaccgtcccaggatcaaagatcattcgggagcggccgcattataatccggacccatgttctccgcagcagtggaacgacttgtggataggaactgcatccaaaacatgataatccagcacgtgtccgtgtaagactgcgtcagtcctaccttgtagattacctaaaggttcaagtacgaaagagtacacgggcagtagtgtcacgaatgtttcagtgtaaaggaccgat

SEQ ID NO: 2481 - DNA, 415 bp, Triticum aestivum
  Clone ID: LIB103-004-Q1-E1-C12
gggacactctcacatcacgtcgtgactaggcgcgcgatccggcggctgagcagccgcaccttcgtgcggcggctctgaatgccgcgcaggaggagcacgacaggctcttcaccgacgagaagctcgcaaaaagggagatggaaaggttagtgcagaaacaaggcatggagcggattgagggatggccgttggttgtgatccgtggtttgttcttcttttcagttctttgctcccagatttcttgcgggtttgcaacagcaggcttctattactccaggcagatagagtcgcgctgtgctctcggtccgcttgatatctttgctttcgtgttgattggagtcgtttcactgccgtaccatttgttccttttctgggtttctctgggcgggaactaatgatgtcgatgatgagtttc

SEQ ID NO: 2482 - DNA, 431 bp, Triticum aestivum
  Clone ID: LIB103-004-Q1-E1-C2
ttccaggtcgacgggtcagtacatattactatgctagtatttcttcgctaaggaatttcctcacctgcaaattcctcagtgaagaattcataaaaatcgcctattcacccccctctagtcgatataacgcactttcattgggaggcaaccaaattttatttttgtttcttgtttttgttcctgtttagtaataaataattcatctagcttctgtttatatgtggttttatgcttttaattagtgtttgtgccaagtagaacctttgggaagacttgggggaagtctttgcgatcttgctgtaaaaaacagaaattttagcactcatgagatttgctgccatttttactggagagtgcgattaggtttatgattttttcagatgattaatagaaaaattcctcatgtctgacaatttatttcagaatttttg

SEQ ID NO: 2483 - DNA, 392 bp, Triticum aestivum
  Clone ID: LIB103-004-Q1-E1-C3
tcgacgggacgtgctacacttataacttttgagcgttataattttgctctatgtgcttcacttagatcttttagagcacggtggcggattcatgttaaagaaactattgatctctcatgcttcacttaaattattttgagagtctcttaatagcatggtaatttgcttaataataatatgcttggtattcaagatttgtgaaactttcttttgagtgtgttgcatactaagaaaagattgaagcatgataattgttttgagatatggaggtgataatattaaagtcatgctagttgagtagttgtgaatttaaacaatacttgtgttaaagtttgtgattctcgtagcatacatgtgtggtgaaccgttatgtgatgaaatcggagcatgat

SEQ ID NO: 2484 - DNA, 438 bp, Triticum aestivum
  Clone ID: LIB103-004-Q1-E1-C4
tcgacgggccccctgaaatgggcaatgtttctttgtaattggatcgggtgacttacgagagtacaccctttagttcggacggggggtttactgagagccggatgatctcagaagtttgtttgggttttccaggcgctttccatcgcacagtacctcagtactatggccgccaagtcagcgaactgtgttatgtcacggcgacttatggcattgaggattcccttgtccgtgcaatttttgcaaaagaatgaaattgcgtcttcctcgcgacagtccttgaccttgttcattacaacgaggaatctggcccaatagtgaagtactgtctcttggggctcttgtctaatgtgggaaagatcacgtgtatccgggtgggctggtacatctaagtctgaacccgtacccgatccgagacccatgggcgggggaagttcccaa

SEQ ID NO: 2485 - DNA, 396 bp, Triticum aestivum
  Clone ID: LIB103-004-Q1-E1-C5
ccgggccgacggagaagaacacaaggcggagaagcgggcgccggcgtccaaggaggccggcggcgaggggaagacgaggggcaggaagaagggcagcaaggccaagaagagcgtggagacgtacaagatctacatcttcaaggtgctgaagcaggtgcacccagacgtgggcatctcctccaaggccatgtccatcatgaactccttcatcaacgacatcttcgggaagctcgccggggagtcggccaagctcgcccgctacaacaagaagcccaccatcacgtcccgggagatccagacctctgtgcgcctcgtcctccccggggagctcgccaagcacgccgtctccgagggcaccaaggccgtcaccaagttcacctcctcctagacaactta

SEQ ID NO: 2486 - DNA, 438 bp, Triticum aestivum
  Clone ID: LIB103-004-Q1-E1-C9
tcccgggtcgacggatgagatgaacagtatcccgtggagtcccgttttgcggtatgccacacccctcccgatgaacaggacctccgttttgaccatagcgctccaacacaagtccgtttcatccgttttgtggtacgccacgcccctcctgatcaacaggaccctgtttcgactgtaggaggtccaacacaagtccttttcctccgttttgcggtacactagacccctcccgatgaacaggatcccgtttcaaacgtggtcggtcgaacaaaaggccgtttccttcgttgtgcggtacgccaggcctcgtttccattgggtgttctgtccaagccggttggctcccatgtgttccattgcctcccgatgaacacgacgcattccgttgcctctcgatgaacacgacgcattccgttgcctcctcatgaacatgacgat

SEQ ID NO: 2487 - DNA, 366 bp, Triticum aestivum
  Clone ID: LIB103-004-Q1-E1-D11
tccattgtgagaagagcccttgtgatcatgcaccagagggacgaagtggagtacaagagggagcgccatgtgattgtccgcaaggcttgagctgaaccgaaatgatggaactaccatggaaaccctctggccatctgatgtgtgtgtataagtagtgctgacactgcagcctgtttcctgaggaaatttgttgcgtcgttgaaattgagttgtagttgtactactttaagctgtagctgtagccctaaattatcttgtgtcgaactgaagatgtaccacagtaagttcattcaggatcgcaacatttgggcgttctgcagctgagcagagttaatgcctaggaaaaaaaaaaatgaaaaaagagaa

SEQ ID NO: 2488 - DNA, 394 bp, Triticum aestivum
  Clone ID: LIB103-004-Q1-E1-D4
tcgacgggccgctgccgctctttaaaagcaaggtttgaagaaggtaaacgctgtaaggagaaaaattcccatccctttcaaataaagacgcgagaactttgaaattcattccaaatagtggcaaaccagctatagaaagcaagcaaaagaatagtcgcgtcgggcacctacactagtcttctggtcttcccgccagcgcgaagcatggaacttccactaagacgtgggtgggacccccgtgaggctctggggcaacactcaggagactccggggcgtgtaaaacctcactcattattacatagagtgtcacgagcagagacctatgaggcgcatggtgataacccacaagtttatggggatcgcaacagtttttgagggtagagttattaaccc

SEQ ID NO: 2489 - DNA, 385 bp, Triticum aestivum
  Clone ID: LIB103-004-Q1-E1-D6
cgggtcgacggacataaacatccttatatcttcctcaaaacagccaccgtacctacctattatgacatttccatagccattctgagatatattgccatgtaactttccaccagtccgtttattatgacacgcatcatcattgtcatattgctttgcatgatcatgtagttgacatcatatttgtggcaaagccaccgttcataatttttcatacatgtcgctcttgattcatcgcaatcccggtacaccgtcggaggcattcatatagagtcatattttgttctaactatcgagttgtaattcttgagttataaataaatagaactgtgatgatcatcattaatagagcatttgtcccaaaaatagaaaaaaatagaggccagag

SEQ ID NO: 2490 - DNA, 141 bp, Triticum aestivum
  Clone ID: LIB103-004-Q1-E1-D9
cacgccagctgatatggaccctatgcatagttgcccatccttactgggtaacgcgattctcaatgtgttcggacatatcacaccatgagtctggaaacataacccactgttatagctagccgtacgaacatgtaaggatcc

SEQ ID NO: 2491 - DNA, 202 bp, Triticum aestivum
  Clone ID: LIB103-004-Q1-E1-E2
aacagacaggttcatcgtcgatgaagtggatcgtctagcttgatgtttatgtacagttgcgtcatcaaagataacttgtactaatgcgtgtttgagtttcggatggtataatgtacggcagtcatcaagctctgttagattctttagctgataaaaaactgtcatgacttgatttgccctgttagaatttcatcactgtcct

SEQ ID NO: 2492 - DNA, 416 bp, Triticum aestivum
  Clone ID: LIB103-004-Q1-E1-E3
cgggcactacttatatattgcatatgtattgtctgtgaattggtactaacgtttcgtttggctactgcatagcgatgccgtggtatgtcgtgtacaagggtaaggttcccggagtctacgacgactgggaggagtgtcggagacaggttcaccgattcagcggtaacagttacaaagggtacgccactagggccgaggccgaatctagatgcgcccgctatctagcgggagaggggagggagcgttggaggaactggatgaagacgagtttcatcgtgatgatgctcatcgtgatgactgcagctctcttctatgtgatggtagtttagatgaccgatatcgacttgtaatgtgaagacaaactcgcggtctcgagacttgtaataaaatgttctatctttgtttggtcttttcaa

SEQ ID NO: 2493 - DNA, 392 bp, Triticum aestivum
  Clone ID: LIB103-004-Q1-E1-E4
cggggccatctaaccatggaagaccttccagagcctgcgagcaatcgggcttgggtcgccttcagccttcggaacatccatactcctccacctcgtcctcacttatcctactcaaccgggatggatgccttcccctctgctgtcgatccatataaagaacatccacaggggcaagcacgggagcgattctgagacgtatgacacagaagggaggtttgaaccagcgaaattcgatgctatattcagcaagtttggcaaaactcggccaaatgctttgtcagaagatgagattaacgccatgcttaaatacaaccgcaatatgtatgatttcctgcgctgggccgcggccaacctccaatggaagttgctgcacaaggtgggcaaagataacg

SEQ ID NO: 2494 - DNA, 428 bp, Triticum aestivum
  Clone ID: LIB103-004-Q1-E1-E6
cgggtcgacggaattctctaaccgcaaaaagggtgaactattgttaatccatataaccaaacgaaaatacgtgttgatagatagtcaagttatttgtatcatcttctctgcaagaaaaggaagttatacgtatgaagcaaagttttgtagtacgatttacctggtccattggatataacatccagctagtaactcgttgattttctggttccacctaatcatcctggagaaagtaactcgttgttcttctcccgcgcttaacaggaatcgaacgctgaatctcccgctattgtgggggcaacgatagccaacagaccaatcaaaccttggtgacggacatgctgtaggtactgtaggagtactgtagctagtgcgttttttaagacgaacatgaaatattaatttgaactccagaaaatatttttttt

SEQ ID NO: 2495 - DNA, 420 bp, Triticum aestivum
  Clone ID: LIB103-004-Q1-E1-E7
gtcgacgggacttgggaacgggggaacctgaacagttaccagtgcttgtcaatttcaggaaatgacttaacagaactttacgaaatgcattaaaactttaaaaagtgatacaacatataccgtttatcagatgacactacttcacacatgacatatgctcatcactacgaaacaggtccgaatacacaatctgttcaaccaccacacatcactagcataccgaacatgcaaacgtccccctctggtcagtctgtccaaaaatgccaaacatcggggatactttactggatgttttcccccttcgcgagtagcacctagtactgcgttagatcaccctagcaccgtatattgccatgttatgctttgtgatgcttcaaatgctctgttaattactgtgttccccctccgttacctctttcc

SEQ ID NO: 2496 - DNA, 359 bp, Triticum aestivum
  Clone ID: LIB103-004-Q1-E1-F1
ttcagttaccgtgcgtgtccttgtgcaggaaatgactagaaagagcatcgccgccatcatcgaccggggacaaggctgtcgtgcccgtgctcatcccgaacagtcgctgcatgcgcgccgcgtcagcacatcctacggcaggagggcctctgcgcggccctgttccaggagcaccatccagcaggtggcaggggatggagacaatccgcccgagccactccggcgacgaaaccctagctaataagatgggttgagagcgagcgttggtggccgggtgtagtaaatctaaccggatgggatgaaagagccgagcgaggggaacatgggggtgtgctgggcgccggccatacctgacagaa

SEQ ID NO: 2497 - DNA, 454 bp, Triticum aestivum
  Clone ID: LIB103-004-Q1-E1-F2
attccaggtcgacgggtacacgtaagcctttaggtttatgtaatgcacctgctacctttcaaagatgcatgatggctatattctctgacttttgtgaaaagatttgtgaggttttcatggatgacttttccatctatggatcttcttttgatgattgcttgagcaatcttgatcgagttttgcagagatgtgaagaaactaatcttgtcttgaattgggaaaagtgccactctatggttaatgaaggtattgtcttggggcataaagtttctgaaagaggtattgaagttgataaagccaaggttgatgctattgaaaagatgccatgtcccaaggacatcaaaggtataagaagtttccttggtcacgccggattttataggaggttcattaaagacttctcgaaaatttctcgggctctggacaatttattacaaaaagatatacaatttgt

SEQ ID NO: 2498 - DNA, 357 bp, Triticum aestivum
  Clone ID: LIB103-004-Q1-E1-F3
gtcgacgggcactgatcttcacttaaatctttcggagtagtttgtcatttgctctagtgcttcacttatatcctttagagcatggtggtagttttattttgaagaaatagatgaactctcatgattcacttagattattttgagagtcttaaatagcatggtagttttcttaaaatcctaatatgctaggtattcaagaataataaaattctcttatgagtgtgttgaatactatgagaagtttgatacttgataattgttttgagatatggagatggtgctattagagtcatgctagttgagtggttatgaatttgagaaatacttgtgttgaagtttgtgattcccgtagcatgc

SEQ ID NO: 2499 - DNA, 421 bp, Triticum aestivum
  unsure at all n locations
  Clone ID: LIB103-004-Q1-E1-G12
cttaccaacctattgtccaagaaaaagccacaaaaaagagttagatctattcatccttggtccaagccagtctgagcctttgcaattttttttcattgcttgcatagttgaattatcagttgcatcatcgtgtcgagttgctggtcttagtgtctagttcgtttaaagtttcgagttctgttcacattagtcatgccaccgctgcatcattatctcttccactgtccactacccatccatcaatttccaccacgtgctacccaccattcattgtcataataatagttgagattgttcacatcttcacttgatccaatctgcatcttatctagtttgttttggaaagagggagaanaaaagagagaaaaaaacgagaaaaaaaaggagaaaaanaagtcagagaaaaaaaaggagagaaaga

SEQ ID NO: 2500 - DNA, 162 bp, Triticum aestivum
  Clone ID: LIB103-004-Q1-E1-G3
tcgacgggaccaatgaaagattccagtgttattgactttgttaacacggtatgcacccttcagtacagataagtggagttcgaagagtttgcggcttccgccatcagcgtacatcacatggaagctctggagtacctgcgaacagcatgctcagcacgcgta

SEQ ID NO: 2501 - DNA, 416 bp, Triticum aestivum
  Clone ID: LIB103-004-Q1-E1-H1
gtcgacggggctgacaatattaagtacagttcaaatgggcaataagatggttgagagggtagtgaacatgagaagactagctcctccgaaacatgatgatcaaagatccagcctcaatagtttgtcaggaaaatcattaaattctccagatagctctggcttcggtcggtcattgtcaaagaagtcactggacatggcacttcggcacatggacatacggcgcagcattccaaacaatctacggcctcttatgacgagcattccagcatcatctgtgcatatcggccggtctggctccacaaggggcagaccgataagtgtctcggactcacctcttgcgactagcagcaacgccagctccgatccgagcgtcaacaacaacctgatgtgctttgacagcatcgacattgacgacg

SEQ ID NO: 2502 - DNA, 422 bp, Triticum aestivum
  Clone ID: LIB103-004-Q1-E1-H10
ctcacaggtcgacagagatctggaacatcaatcttgataagccgacccctgaggtgaacaagtgggaggcggacaactcggcatccaacacaggttgggcagcgagtcaggagcctctgagcagctggaacaaaatcagcaccggctggggtgatgccctggcgcagcccggttggggcagctcaagcaacaaccattgctcagggaataactggaacagttcccatggagcatccagcaacagtaacacatactaccaggatccatgcagcgcatatggcacgaagaggaacagtggcggcgggtactcccagcagaggaacagcaagcacagaagccaggctgagagccaccaccagatgggcagatggcatgatcaccgggacagggggacgcatggtgagcggtttccgtttgacaat

SEQ ID NO: 2503 - DNA, 387 bp, Triticum aestivum
  Clone ID: LIB103-004-Q1-E1-H12
cttacggattcccttgtggcagctgctgggattatcgcccaggaagttgctggggatgttcgcatgactgatacccgtgcagatgaggcaaagcgtggtattacaatcaaatccacgggcatctctcttttctatcagatgactcctgaatcactcgagatgtacaagggcgacagggatggtgatgagtacctgatcaaccttattgattcacctggccacgttgacttttcttcagaagtcacagctgctcttcgtatcactgatggtgccttagttgttgttgactgtattgagggtgtctgtgtgcagactgaaactgtgctgcgccaagctcttggtgagaggattaagcctgtccttactgtgaacaagatggacagatgc

SEQ ID NO: 2504 - DNA, 427 bp, Triticum aestivum
  Clone ID: LIB103-004-Q1-E1-H3
tcgacgggggtgtcgaaatatattcgtactatatgatgcatgccatgcatataggccaagcgtttagagaatcgtttccaacagtaatgacgcctcggtaaaatccattttcgactcctcatggcttgacatcattgccgagaaaacttttctacatcagaagtgaacaaataattcttagattaaaacacgaaatacaccaaattacaacttgatttgagtcaccaaagtgatattcatttcaacacggatttttcaatctagacgcgataattatgaaaattgggggaatctccaactgtctagagttacagagaattataaaaagaatccacaggactgacgaatgaaatcccatgccacaattttgtgctaaagccatgcagaatcattcagctcgatatcaacgcatcagtcacgaaattcc

SEQ ID NO: 2505 - DNA, 405 bp, Triticum aestivum
  Clone ID: LIB103-004-Q1-E1-H4
tggttgtttggtggtctcgaattttgatgtaatttttattatgttcaattaagatgccttgtactttcgatgaacttttgtatataataatatatttgatcctttcccgacacacatacgtgcggttttaagccatgaaacattgagtcacaaccttaacatgttcttcttacatgagtttttgtaataaatagcaacgacctcatcatctgacgaggactttccttgctcgatctctgcgcagaaaccagaccaacgtggataatgtacgtctgtaaatacctaaaggttcggacgctgacgttggtgtgggaagatgatagcactgaatttgctatgatcgtggacaacgtcagtgccgagatagggacaacaacaaggcggtatgggactttactgttttct

SEQ ID NO: 2506 - DNA, 321 bp, Triticum aestivum
  Clone ID: LIB103-004-Q1-E1-H8
gactgacaaaggtgaccgtccgaagaagaaggtggtcattagtgagtgcggggagcttccagtggtctgagttttagatggcttatcatcttcgatctgcacatctggattttgttctggacttgttacaggtctttctcctactagttagagactgctgagttgaagccaatatttctaatctgagcatacggcattcaactactgttcggctggaataagaatgtgattgctttcctcaacctgttttgtagcattgttcatgatagataatgccttgtgaattttctggcagatccatgaaatgcctggatatctctt

SEQ ID NO: 2507 - DNA, 213 bp, Triticum aestivum
  Clone ID: LIB103-005-Q1-E1-A1
cgggcaaggatgatgattccatcttaggaggccaaacttcgaacaaaataggtagtacaatcagcagacgcttcaagatgactgactgggagctaaacatttatatgattacttgctgtattgggtctgttgttgtatgggagtttgtgagggatgttctaaaaacctctgcaccgggaaatccttggcgattaatctatgacctcccatagt

SEQ ID NO: 2508 - DNA, 407 bp, Triticum aestivum
  Clone ID: LIB103-005-Q1-E1-A10
gggtccacggcgtactagtaaatgattgtggttagtaagaatattggtgttaaggtttgtgattcttgaagcatgcactatagtctctcgttatgctataaagttggagcatgatttattattgattgtctttcttatgaatggcggtcggggacgagtgttggtcttttcctaccaatctatccccccaggggcatgcatagtagtactttgcttcaagggataataaacttttgaaataagtatatgagttctttatgactaatgtgagtccatggattatacacactcttacctttctgcaatttgctagcctctacagtaccgtgcattgccctttctcacctcaagacgtggtgcaaactttgccggtgcataccaaactccgtgatactctatcacaagac

SEQ ID NO: 2509 - DNA, 384 bp, Triticum aestivum
  Clone ID: LIB103-005-Q1-E1-A11
ctcacacgcgaaaatgagtcgcgggatgatggccccaagacataggaatcctcaaacataaagtggctgctcaacagtttgatcggcaagccggagccagacaaagtgtctgtcgaacatgcatacccctttgcacagggcaagctctttgtcctaaccatcacagtcggcctcgaaagctaccatgtcaatgtccattagcgacatggtacatccttcccttaacgcactggttacaacctcgaagacgcaacgggcctgtcgttgaacggggaccttgacatcgactcggtttctgcagcccatctgcccaaatcacaccctagcttcgacccacagcgatacctcgaaatgtctgaacagtggaaggcctcgcctctgcca

SEQ ID NO: 2510 - DNA, 385 bp, Triticum aestivum
  Clone ID: LIB103-005-Q1-E1-A12
gggtccacaccattttggcaagcgatgcccgaaatcttgagcacctttacatcattgggaatgtcaaccgaaccaaacatttattgggggctgtatacaaacctggcaaacaactcccaaggccttgtggcaagcaagtaaaggtacacaaggacatcgctgcgcatgcacatctaagcgacgacgaccttgggacgagacccgacacgagtgccggtgtactcgatgtcgaacccgaccaccttgtacttctcctcggcaagcaacaactccatgatgtggatggagtgctccacccagaccgggttgttggtgtacaccaccgagagctccgtgaacattctgtgggtgtccaacacggcatgcattgtgaactgctgctcat

SEQ ID NO: 2511 - DNA, 407 bp, Triticum aestivum
  unsure at all n locations
  Clone ID: LIB103-005-Q1-E1-A3
ggtcgatgggcgaccagtaacgggggttgatgcgctccaccctacgatcattatgctgcgtgacatgccgtttctgaagatcaggcggcatcagcaagcaaggagctggcttaaaaagctccgtcctgagggctttgagtaaacggcacagccccgacgagcacgcggtgagcggcatgctactgagattgtccacacgcttgattaactctgtggggagcgaattttagccactctttcggtggatgctgctcggttctgccattgttagtgcttgggtttcggacgagggggggaggcgccttagcggggatggaagattggacgagattatgtgcggacaaagatggagaagcaaatatgtgctgagggaagtggatangtcatgatgactacagcacgccgct

SEQ ID NO: 2512 - DNA, 405 bp, Triticum aestivum
  Clone ID: LIB103-005-Q1-E1-A4
gggtccacgcggattcggaagatgaatgggacgaggacgaggacgaagactccgacgaggagggggacgacgaaggccaagattccgatgacgacgacgaacacgaggactctgatgaggaggaggacaatgacgaggacgatgaatacgaggacgaggacgacgacgacgacgagtatgacgggatggaaatggagcctgcggcgttcgcatctgggtgaggataacatgaagatgcaagtagctgaatggtctgttttgcactgatgctcaagtgtatgtatgtaatggatggcaatcggtaatcatatgttgcggatgcagaacattggctacggcatgactaaatatttgcctcaaggtgacctctgaagcttctgttgctgattctcggttcccactatg

SEQ ID NO: 2513 - DNA, 397 bp, Triticum aestivum
  Clone ID: LIB103-005-Q1-E1-A7
gggtcgacgggacacgaaaaacctctcgaacagcgaccggtctctcgcctcatcatgacagtcagttttagctttctccactgaggtgcttaacccaactcaaccggggcacaatcgcagtggttctcctagtgctaccttagccgatatagcggaacgtaaggcaccaaaatatagaagccgggcaaacccaactattgacccaaatcatgattcggagccgatgcatatagtgctataagttcggggtgccgcacttgtgaaagtgtacggacttctcacgccatattaaagggcactgaagcccctggcgtacttgccgtaccatagtgtacgggtgcaacatgtcattaatgaacatatataaaagagattataatgcaaaagatagacaaaa

SEQ ID NO: 2514 - DNA, 389 bp, Triticum aestivum
  Clone ID: LIB103-005-Q1-E1-A9
tcacgggtccacgggtatcgctgaaataagacgacagaagtcgacggggagtatatgggccttattgggccatacgggaatagaggagagagaccaaaaggaaggaggcatgtgccctccctctggtccgaattggacaaggggcgcagcccccttttccttcttcctctccccctctttccccttctcctactccaacaaggaaggagggagtcctaccgggagtaggactctccttggtgcccccctcctaggccggccgccccctccccccttgctcctttatatacggggggaggggggaacctctagacacaacaacaattgatcccttggatctcttagccgtgtatggtgcccccctccaacatagtccaactcaataatat

SEQ ID NO: 2515 - DNA, 443 bp, Triticum aestivum
  Clone ID: LIB103-005-Q1-E1-B10
gggtccacggggattcccgaagcatgcacgtatggtgaaccgttatgtaacgaagtcggagcatgaggtatttattgattgtcatcctttgtgtggcggtcgggatcgcgcgatggttaactcctaccaacccttccacttggagcatgcgtagtagcactttgcttcgagggctaataaatttttgcaataagtatatgagttctttatgactaatgtgagtccatggattatacgcacacttaccatttcgcaattttctagcctcttcggtaccgtccattgccctttctcaccttgagagttggtgcaaacttcgccggtgcatccaaaccccgtgatatgatacgctctatcacacataaacctccttatatcttcctcaaaacagccaccatacctacctattatggcatttccatagccattccgagatatattgc

SEQ ID NO: 2516 - DNA, 220 bp, Triticum aestivum
  Clone ID: LIB103-005-Q1-E1-B11
ctgagacgaactcgacatctggggtggagatgctcaacgggctgctttgcccaagtccggattgaacatgcttaagatcaatacatctatcacatctgtgatacctgcagttcaactatagcctcaacgatgttcatttaatcctccacatcaagtccatcatgacgcacttgcgcaagccgttgcggaaaacatgcacagtatctaccccaatgagtta

SEQ ID NO: 2517 - DNA, 404 bp, Triticum aestivum
  Clone ID: LIB103-005-Q1-E1-B2
gggtccagtcctctgtcaaaacttactcgtcagctcagtgtccatgataacagagctgcagttgcatcatattctgatgatacttctggtccggagagtggcccacagagccctagccagtccggtgaggactggaggtctgccttcagtgctgcagcaaatggctctgccgcccgatccagttcacagaacgagtcaagatcgagaagtgctgacagtcgtggtcggcggtatgaaaatggggatgccaacggtgccaattcaggcagccgacgcacacccaaccggttgccacctgcaccaccgaaatactaagcatgttgattggcatatgtgagaattatatttttcatggaatgctctcactccctcctgatactgattgggaaacaaattggcatgac

SEQ ID NO: 2518 - DNA, 395 bp, Triticum aestivum
  Clone ID: LIB103-005-Q1-E1-B3
tgtacccatggaagaggattcagctgagaagaacctcgacatctggggtggacatgctaaaagggctgctttgcccaaaaacgggaatgaaaatgcttaagaaaaataaatctaccacatctgtgattcctgcagttgaacttgagcctcaaggatgttcatttaatcctccacatgaagcccatcaagacgctcttgctctaaccgttgctgatgaaatgcgcaagatctacactagagagttaagccccacaccagtgccacttactgttcttggtcaagcagtaactgaagaagataaattttttcttgatgctgctgatgatggagatgctgctgctggagatgtatatgctgcagaaggtgataaagaccacgatgctgatgctctaact

SEQ ID NO: 2519 - DNA, 418 bp, Triticum aestivum
  Clone ID: LIB103-005-Q1-E1-B9
ggtccacggcacggatatacttggactcaagcacgctacacagttctacagaactctacctaggtgaccccgtatgtcgatgaacacaagaacagtctgcgctccaaacacccggagctgtgcgacgactggattacatgtgaacacatcaggactttcagcagttggttggaagcacgtcttataggtgacaacatgtttgtgatgagttgtacttgttgtccaggggaccatcttcgactgttacgatttggaaaggaaacgagataaatgggaatacattttacacgattgaccaagataaaaagagcaccaaccaaaacagtggtgtcctctttgatgcaacaaccgagaggggaaaggacacatattatggttacatagtggacatatgggaacttgactacggacatgattt

SEQ ID NO: 2520 - DNA, 425 bp, Triticum aestivum
  unsure at all n locations
  Clone ID: LIB103-005-Q1-E1-C1
cgggtcgacggggagggacaaatcggcaagatccggtcaccacgcgacctgaagagcaacagtgatctccacaagctgtaggccgatggcgtgctccatcccctgcgatggggtgaccatggcggtggccacaactcctcatgctcgcctcgatcttggcgacacaccctgagtgtangaggcagcaacgacctcgacgaaatcatggcctccatccaggaacgcaatcatgtcgctctaaataaatggattcgatcatgtgactctaattacttcggattgttatgtgcacactaagcggggtgcagttaggaaagaaaatgttctctaattaaagtgattgagtgatttaaggtaaggttaattaatttagatttgatttttagtgattgttagtaaagtacgatgcgtctttaaaatctttt

SEQ ID NO: 2521 - DNA, 386 bp, Triticum aestivum
  Clone ID: LIB103-005-Q1-E1-C10
ggtccacggccaagaccaaacgcaatattcagtttgttgactggtgccccactggcttcaagtgtggtatcaactaccagccaccaggtgtcgtcccaggcggtgaccttgccaaggtccagagggctgtgtgcatgatctcgaactccaccagtgtcgtcgaggtcttctcccgcatcgaccacaagtttgacctgatgtacgccaagcgtgccttcgtccactggtacgtcggtgagggcatggaggagggagagttctctgaggcccgtgaggatctcgctgccctggagaaggactatgaagaagttggtgctgagttcgacgagggtgaggacggtgatgagggcgatgagtattaagcctgcctcctggtgctttcccaa

SEQ ID NO: 2522 - DNA, 307 bp, Triticum aestivum
  Clone ID: LIB103-005-Q1-E1-C2
aggtccagggcttgctgcaaaatgaatctaataaatgtggggcacaggtagtagatcgggcggctatcacgtccggcatccaacgaccgttaaagtgacggataaaatcaagaaatctgccggcggacgcgtatggtcacccatacaatatgcgttacgagaactatgtcatgatcacatgcctgcctgaactactgttgtgcggacggtaactggctaaagactttcatcactatgcctgtagatatttgttaatacaaggttagttcatgacatactctgcatgacttaccggaaccctacatta

SEQ ID NO: 2523 - DNA, 401 bp, Triticum aestivum
  unsure at all n locations
  Clone ID: LIB103-005-Q1-E1-C3
cgggtccacgcggatgccgaagaggactacgaggaggagctcgagaaccacctccgcgtccaccaccacgagcacccaggcggtggcgaggttgatggggacgatgatctcgaggctgatggcgagggcgagggtgagggtgagggcgaggatgaaggcgaggatgacggttctgaagagagcgagtacgacgaggaggggtttgatgaggacgaggaggtggaggatgtggatctagacccggcagagtacgaggacgacgaggcttatgcacgggcgcttcangacgctgaggagcgtgaggttgccgcgcggcttatggctctcgctgggatcagcgattggcgggcggtggagcatgttgaggatcacataaacgacgcgcaagattcatggcaaga

SEQ ID NO: 2524 - DNA, 422 bp, Triticum aestivum
  Clone ID: LIB103-005-Q1-E1-C4
gggtccacgggtatcaattaaaaatccaacataattttccctgcaaaaaaaacaatcgaatttgaaattttgaaatgctaaaaaactattattgaaactaattgtcggtttgccatgtttttaaaatttatacccatttcttactacttatagcccattttctgggcaagcgaatacatccctctcgtcttgaaagatttacagcttagcagggctgagaaaaggaagtaggcctccattgggtattcttttaagaaaatagaactggactagccattttcaaaagaaaaaacaacaactgggctcatcatgtggtgaatattatataaaagcctgggctatacggaccacagcccccgcaaagccccgttgataactgctccacctctaaaactaaataataactacccgacctgctgagt

SEQ ID NO: 2525 - DNA, 393 bp, Triticum aestivum
  Clone ID: LIB103-005-Q1-E1-C6
cgggtaagataagctctatcacacataaacctccttatatcttcctcagaacagccaccatacctacctattatggcatttccatagccattccgagatatattgccatgcaactttccatcgttccatttatcattatgacacgcattacttttgtcatattgccattgcatgatcatgtagttgacatcgtatttgtggcaaagccaccgtgcataatttttcatacatgtcactcttgattcattgcaccatcccggtacaccgccggaggcattcatatagagtcatatcttgttctagtttcgagttgttattcatgtgttgtaaatcaataaaagtgtgatgatcatcgttattagagcattgtccccagaaagaagagaacgcaag

SEQ ID NO: 2526 - DNA, 243 bp, Triticum aestivum
  Clone ID: LIB103-005-Q1-E1-C7
gggtcgacggggcagactaaatctagccgtcataaacctccttatatcttcctcagaacaaccaccacacgtacctattatggcatttctataaccattccgagatacattgccatgcaacgtgccatcgttccatttatcattatgacacgcaggacttttgtcatagtgccattgcatgatcatgtagctcacatcgtatttgtggcaaagccatcgtgcagaatttttcatacatgtcac

SEQ ID NO: 2527 - DNA, 59 bp, Triticum aestivum
  Clone ID: LIB103-005-Q1-E1-C9
ggtcgacggcgtcgtattaatagaaaatccctactcatcacgacatgtttgcaatctgc

SEQ ID NO: 2528 - DNA, 424 bp, Triticum aestivum
  Clone ID: LIB103-005-Q1-E1-D10
cggtcctagattcacgggtccacgggggagcgagagcctctctctccatcccgacctctcgtggccgccgcgaagaaaaggagcttatcatggcttcaaaacgtatcctgaaggaactgaaggacttgcagaaagatcctccgacatcatgcagtgcaggtccttctggcgaggatatgttccattggcaggcaacaattatgggtcctcctgatagtccctatgctggaggtgttttcttagtgaatatccatttccccccggactaccccttcaagcctccgaaggtatcgttcaagacaaaggtcttccatccgaacatcaatagcaatggaagcatatgcctcgacattctgaaggagcaatggagtcctgctttgacaatctctaaggttctgctttcaatctgctcgctgcttaccga

SEQ ID NO: 2529 - DNA, 402 bp, Triticum aestivum
  Clone ID: LIB103-005-Q1-E1-D3
actatgagatggatgtatctttcatactacatgcattacaggcggttcccaaacagaatggtaaaggtttatactcccccaaccaccaacaagcatcaatccatggcttgctcgaaacaacgagtgcctccaactaacaacatccctagaggagttttgtttaattatattgatttgctttgatatttttggatcatgggactgggcatcccggttaccggccctttctcatgaatgaggagcggagtccactcttcttgagaataacccacctagcatggaagatataggcagccctagttgaaacatgagctgctcgagcatacaaaacaaaatttcatttgaaggtttggagtttggcacatacaaatttacttggaacggcaggtaaataccgcatat

SEQ ID NO: 2530 - DNA, 289 bp, Triticum aestivum
  Clone ID: LIB103-005-Q1-E1-D9
cacgggacaacatcaacaacaagctgcagcttgtcatgaagagcggcaagtacacgctcggctacaagaccgtcctcaggaccctcaggaactccaaggcaaagcttgtgatccttgctaacaactgccctccgctccgcaagtctgagattgagtactatgctatgttggcgaagatcactgtccaacactaccaatgaaaacaatgttgatttgggaactgcgtgtggtaaatacttccgagtctgctgcctgagtatcatcgaccctggcgattccgacatcatca

SEQ ID NO: 2531 - DNA, 106 bp, Triticum aestivum
  Clone ID: LIB103-005-Q1-E1-E4
tattcatcatggggcttaaataaattttcaagatcataagaagaatcaccccaatcatgatcattagaacaagtagaaggcatagtaaaaatagcatcccaaagct

SEQ ID NO: 2532 - DNA, 392 bp, Triticum aestivum
  unsure at all n locations
  Clone ID: LIB103-005-Q1-E1-E9
cacgggtccacgggggagcgagagccgaagcagcagcagcagcgcgagcgagggagcgagagccggaacagcagtagcagatccggctggtatggacgctgccgctgaaggggcctcgcactangggagagccgccgtggggatgtcgcccgtggcgctggcttcggggtaccgcgccatgggggtgcaggatggagcaccgtcggcgccgggaggtcaagttaaggagaaggtgcgatgcgatgagtgtacaacctctttggtggcgctgagtaggcctcgacttcgtccgaggagtcgatgaggatgttgcgatttcggtggagcaggttaaggcggtgctgtggggatggagcagccacggtagacgaggcgattgtcgaagcagctcc

SEQ ID NO: 2533 - DNA, 389 bp, Triticum aestivum
  unsure at all n locations
  Clone ID: LIB103-005-Q1-E1-F1
gggtccacgcgccgggagaaccgcaagtacaagaagagcacggagctgctgatccgcaagctgccgttccagcgcctggtccgcgagatcgcgcangacttcaagaccgacctccgcttccagtcccacgccgtgctggccctccaggaggcngccgaggcgtacctcgtcgggctgttcgaggacaccaacctgtgcgccatccacgccaagcgcgtcaccatcatgcncaaggacatccagctcgcccgccgcatccgtggcgagagggcctaagccgtcctccccgtcaacgccgttagtggatcngaagtggaatgtgttgcttccggttgtaatttgttcctaattgccgtgctangtctatcttcctttgtgtaaaagaaata

SEQ ID NO: 2534 - DNA, 376 bp, Triticum aestivum
  Clone ID: LIB103-005-Q1-E1-F10
cacggcgaacacataaccattagaaaaaggactgcaaggccgagtagaaacgatcgccctgaacagcttgctgatccagagacaacgactgatacagacaggaacatggctgctctgtttaatgttctgaggaagaagaaaaaagcaaggctcgaaaaccttgttttgaacagaacgtcctttgcccaaacggtggagaacatatttgccttgtcattcctagttaaagacggcagagtggaaatgaatgtgaatgacgatgggcatcatatcctctctccaagaaatgcacctgcagctggtgcaattgcctcaggagaagtgaaatacaaccattttgtcttcagatatgattttaaagactggcagctcatga

SEQ ID NO: 2535 - DNA, 408 bp, Triticum aestivum
  Clone ID: LIB103-005-Q1-E1-F11
cgggtccacggcttggcaagacccgtagcatgcacgtatggtaaaagttgtgtgacaaatttgttgcatgaggttctcttttgattgtcttccttatgagtggtagtcggggacgagcgatggtcttttcctaccaatctatccctccaggggcatgcatagtagtactttgcttcgagggctaagtagacttctgcaataagtatattagttctttacgactaatgtgggtccatggatatacacacactcatccttccatttagctagcctctattattccgcgcaactttcaccggtatcatgcacccattatttaccttcctcaaaacagccaccatacctacctattatggcatttccatagccattccgagatatattgccatgcaactttccaccgttccg

SEQ ID NO: 2536 - DNA, 134 bp, Triticum aestivum
  Clone ID: LIB103-005-Q1-E1-F2
aggttaatagtattcctgcatgacatgtgtaacagatatatttcaaccaacacaatcaacactcattatatcttactatgccataccgaacatacccgtcacgacggagaccggcggaaagctcacgcctaccc

SEQ ID NO: 2537 - DNA, 419 bp, Triticum aestivum
  Clone ID: LIB103-005-Q1-E1-F3
aacaccacagcgaaatggtgtgtctgaacgtcataacagtacttttttagattgtcgggggactaatccacgagcacctatgggaccggcggaccgagtccctttcggttcggcgggggcgagggtcgcacgaagagcggatcgaggcgaagcacacgagcagtttacccaggttcgggccgcacagatgcgtaaaaccctactcctgctttgtggtttgtattgagttcttgctcgggagcgcggagtgctacagtacaccccagcagctaacgagaccgagcgtgagtgttctcttttttcatctacgttgcgcatgagcctccttttatatgcgcaaggggtcaccgacaggtggcaacgtagacaagggtaaaaatggaaaggtgttgcggttggtacagctacctgctacagtg

SEQ ID NO: 2538 - DNA, 348 bp, Triticum aestivum
  Clone ID: LIB103-005-Q1-E1-F4
tctccccaggctgaggtggctgccgcgctctccaccccaaggtaggagttcttggccgaaaccccctgttccgttccggcaatctgattctgaaactgcgacgtatactcaagcgaattccggtgttccgatgtgcaaattgcccaattcgctgaacggaaaccggacgtgctgttcctggaagtcaactacgaaaaacacaagtccatgtgccacaacctccaagtccaagtcctccctttcctcaagttctacaagggaacccaagggaaggtcagtaacttcaactgcacaaatgcaaccgtaaaccttaatgaataagtttcctcctttgtccaatacaaaaat

SEQ ID NO: 2539 - DNA, 95 bp, Triticum aestivum
  Clone ID: LIB103-005-Q1-E1-F6
ctggctggcgcgctctccatcgcaaggttagagttcctggacgaacacccctgttccgttccggcactctgattctgatactgctacctatagtc

SEQ ID NO: 2540 - DNA, 418 bp, Triticum aestivum
  Clone ID: LIB103-005-Q1-E1-F8
atccgggtcgacgggggaggaaaaagatgagagattgaagatggatgccggtcgttggatgtaaatccaacgactaacatgtcagaatcatttgttgactaaattgacaacacttgcgttgtctttgacctattggcccacatttcagcctccaagaatgtggcacgtattcaacccattttttcagaatttacagtctttttttgcgcagtaaaatttacagtcaatttgatctttttttttgaattacaacaataacctgggctgggtgaccaattaaggtaccttcaagttaaccaattaatttaattcccaaaaagttacaaggcaattgcaacttaaccaaaatcacgaatttgccgaaccgaatccaattaaaatgttgggttgggccaacaatgttatccaaaaattaaaa

SEQ ID NO: 2541 - DNA, 420 bp, Triticum aestivum
  unsure at all n locations
  Clone ID: LIB103-005-Q1-E1-F9
ttcacgggtcgacgacaaatttccatcggaagaagactccatgatatctgctccagcttcgtcttcataatcatcatcattgtcggggtcggagtcggtgtcgtcgatgatgatgtagtcttcgggatggtcgtcacctcctggcatagggtctcccatgaatactcctagcttcttcttcaggtcttcattcttctctagtagtactgcaatttcctcttcatattcatcgcgtgtagacttgagttcctcttctagctccatgttcctggtcatcaccttctttaggtatatcatgctggcgcacatctggttctcctgacgacgaatgtgttggttcaactcttggatgtaggctgcaatggacttgtcnctcctggtgcaaatcatctaccatttctcatcttggcgttcacatat

SEQ ID NO: 2542 - DNA, 424 bp, Triticum aestivum
  Clone ID: LIB103-005-Q1-E1-G1
gggtccagccactagatcaaacataaggcagcgctgtcaatgtaaatgcgggccattcctttctcccaaggacatcgtctgtgaagaagaacacctcagatgttgatgaatcttacgcagaatttctgagcctcatgaagatcaaggatggtttcatggttcttgagctggaaccaggtgttactgtggtatatgagcaagaggaggagacaccccctggatatgatgaattgagaactgtggttatgtctgaacgtggaattgacaggcctgctccagacaatttgcatggtcgggattcaatctgcacagatgagcatggagttgtaccttgtactgaatcttctgattttgaggcatgtgaagattgtgaagaagaaccgcttgctcttaattgtggtgctccttctacatttgatgaaaa

SEQ ID NO: 2543 - DNA, 427 bp, Triticum aestivum
  Clone ID: LIB103-005-Q1-E1-G10
ggtccacggctgcactttacaaccaaattggaatcaccttcaaattcgtccggagcgttgagttgtggacgaaacaatctgatgctgcagcagaatccgagtcaaactacaagtccaaaggtgttacatcacctccacttgggcccattgaccttgtacgacctagatttagttttaggctgccttgggacgtcctcccacctccttggccgccaccccttgctcctatataagtagatccatctagtagcttttccttgggttttgtttagattaaaagttcgacatagctgcaacttcgcgtacttcgtttgtgttcaacgaccagacaaaggcgtcacagaaccccaccttgatcaataaagctttcatcttatattcgcaatatccagattgcaatctcagtttcttgcgtgttcctcgtttg

SEQ ID NO: 2544 - DNA, 405 bp, Triticum aestivum
  Clone ID: LIB103-005-Q1-E1-G11
gggtccacggcgagttcgcaagggaaatggtgcagaggcagggcgcatggcggtgggttgtggcccgggcagtagaggccgggattagcaccccagggatgtctgcgagcctttcatactttgatacctataggtgcaaccggttgccagcaaatctgatccaagcacagagggacttgtttggagcacacacctatgagcgcattgaccgcccaggttctttccacaccgagtggactaagctggcgagggagggcaagtgaatgactttgccgccacctgaggaatttggtggtaccatatgtggtctcggtgactctggggtgatgtctcttcgtggttgtctttaatttatctattgctgtttttgcaatacgagatctgaattgtgtaccttgaataatg

SEQ ID NO: 2545 - DNA, 382 bp, Triticum aestivum
  unsure at all n locations
  Clone ID: LIB103-005-Q1-E1-G12
gtccacgggccgatggaaatggaaatgggcgagttcctcaatgaggggggcgatgacggcgaggtgtccatcagcctggtggagacgaaaggcgggaactggaagagcggcctcatcgtgcatggcatcgagatagacgtaaganatcgggctgagtgaagagcccctgggattcgactcgcccgggtcgatgtaaatgaattaaggaaaacatatcttccgtagtgccttggttttgaacacttcgccttttgcggctaaaccatactatgtgtacacctatgccaactaatatgaatggataaattacggtttaacaaaatttccttcgggcaatttaaaatccttgtgtcttgtgtctaaaagaaaaacagcggactcc

SEQ ID NO: 2546 - DNA, 397 bp, Triticum aestivum
  Clone ID: LIB103-005-Q1-E1-G2
gggtccacggcgccttctcaaagaggtacttgaagtacttgacgaagaagtacctgaagaagcacaacgtgcgtgactggcttcgggtgatttcatccaacaaggaccgcagcgtctacgaactccggtacttcaacattgctgaaaacgaagggcaagaagaagaacaaatgttcaacggcctggttccgttccgttttaaactttgaacttggtggggcaattccgcaataaaattttgaagtttaagttttcaaccctggtttgaattgtgggcaagaagccatgttatggatgcctaaataaccaaactgaagaattgtccgttcctggtcctggggtttaaaaaaatgttggtgaaaatatgttgggcgtaaaaaaaaagttaccgaaataa

SEQ ID NO: 2547 - DNA, 375 bp, Triticum aestivum
  unsure at all n locations
  Clone ID: LIB103-005-Q1-E1-G3
aaatantattatcgaggagggggtatatcgaccccccctcgtgttgaagttacccccctcgtgttgaagttattgggagggggtaatatcaacaacgacaacatacatacacgggaaaataatgttaccggggagggggtatatcgaccccccccccacgtgttgaagttatcacgatggggttatatcgacaacgacgacatatatacacgggaaaataatgttatcggggagggggtatatcgacccccctcgtgttgaagttatcccccctcgtgttgaaattatcgggacgggtatatatcgacgaccatagacccgataaaacataataaaacgaataagaaatataaagatgagagaagaagaaaggaa

SEQ ID NO: 2548 - DNA, 384 bp, Triticum aestivum
  Clone ID: LIB103-005-Q1-E1-G4
ggtggctagtagaatcatccttgatctatatttttgggttggttagtcaaagagcacgtgattaaattagaggaagtacatgttactttgttgtttaccctggatgtgttcctacgaacatgcatatgcatcaaaacaatccaattcatcaagaataattgatccaaagcagttaattcacaaaatccttggacaaccttccaaataagtttcaacaatccaatttccaacctcaattttaaaaaagggccaaccaacaaaccaatccatttatccggcaaatttggtccaaccgaacattgataaattgcatgttaaaatttgggtcccaaaaatttccccggtaagtcaaaggcacaaaggaacaattttttccaacccaat

SEQ ID NO: 2549 - DNA, 325 bp, Triticum aestivum
  Clone ID: LIB103-005-Q1-E1-G6
ccgggtcgacggctaacgctacacctgttagtcacatccgctcattaagttgagttgaagatgaacctctatctcaaagacgccagtagtagctactacgtcggcgctattgcatattctgcaaaaatgtatctcggctaccaatttgttggaacgactcatttagctattttcgacaaatgaattggataaaataagaacatctatgttgtggtcgtgcagtaacgtgcttatgttgaatacagtcaatattccgttcgaaaaaagaaaaaagagtaaaccgcataaaagaagcaggaaaaaaaaaagaagaagagtttttttt

SEQ ID NO: 2550 - DNA, 399 bp, Triticum aestivum
  Clone ID: LIB103-005-Q1-E1-G9
cgggtccacggcaagccataagtatctgtaccgaacggtgtcagtggagagaaacagcaggatgctgtcaatgggaagccaaagtcgcctgtagcgaatggtgttaacggggatgcgaaggttccggcagagaaagccgctgccaccgctgctcctccagccgttacctacgcggcgaaggtggcccaaacagcagcggccgagaagaagcctgcggcgaccgagaagaagcctgtcgttgccaacggtgctgtcaagaccggtgtagctgcttgatcgcatacccgatcctcccagctagccatgaagaacaaacggacggtgctggcgaaccaggcgagacatgcggggtcccaaggtactgatcaccaaaggtggctgctggaaagcgggtcggat

SEQ ID NO: 2551 - DNA, 411 bp, Triticum aestivum
  Clone ID: LIB103-005-Q1-E1-H1
gggtccacgggattagctatccccctcttattctggcattctgcagttcagtccaccgatatgggcctttacacatatacccatgcatatgtagtgtagctccttgcttgcgagtactttggatgagtactcacggttgcttttctccctctttttcccctttcccttctacctggttgtcgcaaccagatgctggagtccaggagccagacgccaccgtcgatgccgactactacaccggaggtgcctactactacgtgcagcccgctgacgacgaccaggagtagtttaggaggatcccaggcaggaggcctgcgcctctttcgatctgtatcccagtttgtgctagccttcttaaggcaaacttgtttaacttatgtctgtactcagatattgttgccttcgctgact

SEQ ID NO: 2552 - DNA, 373 bp, Triticum aestivum
  Clone ID: LIB103-005-Q1-E1-H10
ttctcaatagcgaatcttatcactggcactgtaacctcatatcagtagatatttcggatggtgagcaaacaattcagtgctatgttcaagatgaaggctttcttgcattggtacactggtgaacgcatggattacatcgaattcatcgatgcggagatcaacatgaatgacctcgttcttcgactaccatcagtagcagactctactgctgactacgacggcgagtacgatgatgaggattaggaccctgatgacgacatgtaaagtgggatgtccatgtcatgctttgctaggctggggttctgggggcatattttgatctgtttggtgctttgttataaatctgtttatcatcgcaactatcgcttgtaca

SEQ ID NO: 2553 - DNA, 391 bp, Triticum aestivum
  Clone ID: LIB103-005-Q1-E1-H11
ggtcgacgacgatgaataacccgaagaggagctaggaactgaatatctggtgcagccgcttggccgtgctgaagacgaagagcattccagtgacttcgagccagaagaaaatggtgatggtgctgaggacgaggagattgaggatgacgatgctgaggatggtgaggatcctgtcaaggcgcaatcctcatcaaagaagaagaggtctggtggggaggatgaagatgatgacgacggtgatgatgatggtgatgatgatgagaagcctccatcaaagcgatagtcaatttgttcgtgctgatctgtgatcttctctgcttgggccaagaaggaaaataatcctcatggagaggattgttggtaaatgctgtagctttaggacatctgtggt

SEQ ID NO: 2554 - DNA, 378 bp, Triticum aestivum
  Clone ID: LIB103-005-Q1-E1-H12
gaaagcggcggaggcccgggacggcaagtccgggcgcgcgctggagctgtgggccaaccagccggccatgcagctctacaccggcaactttctgaaccacacccaggggaagggcggcaagctgtacgagcagtacggcgggttctgcctcgagacgcaggcgtacccggacgccgtgaaccaccccgagttcccgtcggtgacggtgaggcccggccaggtgtacaaacacgacatgcgcttcacgttctccttctagctaggctggactatggctgctacggtagtagtagtgctaccattggttaatggatcgtactagatgtgttcactctggatttggaggtggcgcgattcgtggggctgggtactgttatg

SEQ ID NO: 2555 - DNA, 70 bp, Triticum aestivum
  Clone ID: LIB103-005-Q1-E1-H2
gggtcgacggccactccagacacaaaaaggaattgcggccttgaggagcaatgttgatacacggatcgta

SEQ ID NO: 2556 - DNA, 181 bp, Triticum aestivum
  Clone ID: LIB103-005-Q1-E1-H4
ggtctacggagaagcctcatcatgcatggtcttcgaagaagggtcatcctcacggccaggtgtatgggtataggaactccctctgggcagaacaccttggtatggttgatgaccacttcaaggaaccttctagcctggactgtgtaagattaggtgaacagatacccgaagaaaactggga

SEQ ID NO: 2557 - DNA, 375 bp, Triticum aestivum
  Clone ID: LIB103-005-Q1-E1-H8
cggggatgccctagtgaaacaacatgctaaagttgctgaagaagctgtatcaggttgggagaaagctgaagcggaggcctcggcactgaaggttcagctagaaactgttacattgtctaagctagcagctgaggaaagagctgcccatctggatggtgctctaaaggaatgcatgaagcaagtaagaactgtgaaggaagaaggcgagcagaagctacatgatgtagtttttgcgaaaaccaaacagtgggagaagataaaggccgagttggaagaaaagttgccttgaatttgacatgagctcataagggctggtgctgagaatgatgcactctcaagatcactccaagagcgggcagatttgttgatgaaaat

SEQ ID NO: 2558 - DNA, 440 bp, Triticum aestivum
  Clone ID: LIB103-006-Q1-E1-A12
gcgggtcgatgggaatcgcgaaattgagtcatcatatgatgtggacattggagccaatccctctgctgagggtggtggtgatgatgagggtgtcgatgaccatgccgtgaaggtggttgacattgttgacaccttccgtcttcaggagcaacctgcttttgacaagaagcagtttatctctcacatgaagcgctacatcaagaacctctctgccaagcttgaaggggatgacctacatgttttcaagaagaatgttgagtctgccacaaagtatcttcttagcaagctcaaggaccttcagttctttgttggcgagagcatgcatgatgatggcggcgtggtgttcgcctactacaaggagggagctgctgatccaactttcctgtactttgcacatgggctgaaagaggtcaagtgctaatcgcactgtatgctaaaat

SEQ ID NO: 2559 - DNA, 425 bp, Triticum aestivum
  Clone ID: LIB103-006-Q1-E1-A2
cgggtccacagcagccggacaatcgatgcgatcaaatgcaaagatggaattgtccttggtgtggagaagctgataacatcaaagatgatacttgctgggtcgaaccggagacttcattccgtgcaccggaactctggcttggctgtggctgggttagcagcagacggtaggcagatagtctcaagagcaaagtcagaagcagccaactatgaaaaggtatacggagaacccatgcctgtaaaggaattagctgatcgtgttgctagctatgttcatctgtgtacactctaccggtggctcaggccttttggctgtggagttattcttggaggctatgatacggatgggccacagctctacatgatcgaaccttcaggcctctcctataaatattttggtgctgctctgggtaaaggaagacaagc

SEQ ID NO: 2560 - DNA, 423 bp, Triticum aestivum
  Clone ID: LIB103-006-Q1-E1-A3
cgggaaattgaaagcataaatgcagaatggaattgtctatgtgtggataactgatacatctaagatgatacctgctgggtcgaagcggaaacttcattccgtgcaccggaactctggcttggctgtggctgggttagcagcagacggtacgcatatagtctcaagagcatagtcagaagcagcaactatgacaaggtataccgataacccatgcctgtaaatgaattatctgatcgtgttgctagctatgttcatctgtgtacactctaccggtggctcacgccttttggctgtggagttattcttggacgctatgatagggatgggccacagctctacatgatcgaaccttcaggcctctcctataaatattttggtgctgctctgggtaaaggaagacaatctgcaaaaacggacattgac

SEQ ID NO: 2561 - DNA, 428 bp, Triticum aestivum
  Clone ID: LIB103-006-Q1-E1-A4
gggtccacggcacccgtgtatataaatttgataatgatgaatcaattagtgacattagtattacattcaagaaaaagtaaaagataacaaatctaaaacaaacaacaacaaaatttgcacacaattttgagacaagttgcacttttttaatatggaagaataagcatataatagtgtaattttcaaaaagaagaagctttttagtaaggaatgaattagtggcatttgtattttccttaaagaataaataaaatgaaataaaaaataaaactaaataaaataaatcaagtttctaaagaaaatgaattagtaacattggtattgccctttaagaagacatgaatatgacaaaatttacacataaattgcactttttataatatgtaaaataaatgtataatagtgaatatttcgtgaaaatgaacttt

SEQ ID NO: 2562 - DNA, 428 bp, Triticum aestivum
  unsure at all n locations
  Clone ID: LIB103-006-Q1-E1-A5
cgggatanaccaaaacgaagtcattggtgtacgcattgaagatgaagttcatcatgcgagagaatgtcggaggagcattgacgaggccaaaagacatgacagtgtattcgtatgaaccatagcttgtcctgaaagccgtcttgggaatatcttgctcacgaattcgaatctgatgataacccatatggagatcaagcttggagaatacttgggcacctttgagttgttcgaactcctcattgatgttgggaagtgggtatttgttcttgatggtcttcttgttcaatggacggtaatcaacacaaagtcggtccgttccatccttcttcttcacaaaaagaacaccacaaccccacggagaagaactaggtcggatgagacccattttctcttgaatatcgagttgcatcttcagattcttcaactct

SEQ ID NO: 2563 - DNA, 444 bp, Triticum aestivum
  Clone ID: LIB103-006-Q1-E1-A7
cccgggtcgacggggaggcccaattgttatagtttccttttcatcaaggctatccattcttccgtgaggaaactgtaagacttattctacaagttgttcctgatgagtccttcgcgtatcgaaagtctgacatttgcttgaagacaatgtcaatgctatctcgaagcatgtctgtggtaatccaattttcaataagtgcatttgaagcacaatgctaaattttctttagcatttatcctaacaccgttgtatgggtaatatcatgagattcctccccccttacctaaatgattttctactttctatcctgtcatggatatcatgatccgcttgtccttggaaaggatatacccctgaaatatgtgtttaaacacattttcctttccgttgttctgtttaaccttcttgaggtttatatgatctaagcagtaatacgtcactact

SEQ ID NO: 2564 - DNA, 362 bp, Triticum aestivum
  Clone ID: LIB103-006-Q1-E1-A8
gggtcgacgggagtgaggaagccggctggaggtacacgtacgggagagaagcgacggagttaggagttgtaaatatgcattgttgtatcgcgacctgaatgaatggaataaacgaaataacgctgttgttcaaaaaaaaaaaaaaaaaaaaaaaaaacaaaaaaaaacaaaaataaaaaacaaaataaaaaaaaaataaaatgttgaacaaaaggataaatcttcatgatcacttacaccaaacacaatagtacgactacaatcacaacaaacatcaccccatagctaatcgatttacaacttcctaaccgggaaaagatagtagtatccacctgactctccaaacgacacacccctgaaac

SEQ ID NO: 2565 - DNA, 434 bp, Triticum aestivum
  Clone ID: LIB103-006-Q1-E1-B1
ggtcgacggcgatggataactcaaatactgcggctactccagcatggtggtggtgcacgagcgcttcgtggtccggttcccggacgccatgccgctggacaagggcgcgcccctgctgtgcgccggcatcaccgtgtacacccccatgaagtaccacgggctgaacgctcccgggatgcacctcggcgtgctgggcctgggcgggctcggtcacgtcgccgtcaagttcggcaaggccttcgggatgaaggtgacggtgatcagctcatcaccggggaagaagcacgaggccctcgagaggctaggcgccgacggcttcgttgtcagcaagaacgccgactagatgaatgctgcgatgagcaccatggatggcatcataaacacggtgtctgcaaacatccccatggcccctctcttcgggctactcaagccca

SEQ ID NO: 2566 - DNA, 444 bp, Triticum aestivum
  unsure at all n locations
  Clone ID: LIB103-006-Q1-E1-B2
gggtccacggctgcccatcatggaattgataagcacctgaatatgtggagcatacccacaagatctcttctgatctgtagctgtcctcttgattgtctcaacaatcaagctcatcactttgaacttttgagggacatcaaatatatgtaacaagttgatggagtgtcctgttatcattctgtgatctcctgatttcgggaaaagtgtgtgcctcagaatggtattggtagtagacagccctgccagcaaatgcttcacagagccaaacttgtgagtctcaagatcttcatctggaatctctttgtacatgttgtccatagagttgtgatccttcttcatctttgcatagacatctaggtcatcctcatgagtttctggagcattgatcaatttggcncactcatcaactgtggattggtaccttgtaccctcagacatccatac

SEQ ID NO: 2567 - DNA, 326 bp, Triticum aestivum
  Clone ID: LIB103-006-Q1-E1-B3
ttcacgggtccacggcggatccccaatcgatagacaattcccctaatagagtcccactgcccacgaacgttcacgtctacgtcggctaacgacatgtcacatggcaggtgatgtatcgactatgtgcaatcatctggtggatcgatcagcactgccaatcgtgccttgtccggattgcagcatgaacgtctatacgatacattgctacgtgtgcgtacatcccacgtcagcgttcctccaaatgcccgactcacatcacttcagcgggcgtattctaattcgatcggtactagcaaagccatgtcgcgcatcacgccaatcgccat

SEQ ID NO: 2568 - DNA, 418 bp, Triticum aestivum
  unsure at all n locations
  Clone ID: LIB103-006-Q1-E1-B4
gggtccacgggacgcataaacaagaaactatatatgaaaatgctggtcctatacaaaacaaaagtcatggtttanaaacccactaacgaccaacatacccactaacatttatgtctacatggttcanaaatccccactcatcgaagaaaaaacatttcctgcattatgcaagcataaaaaacaaaatgcatacataaataaatccacaaatagagatttggcataaaagaggggaaaacagaagaaaaaaatgcaactgaagaaccccgagggacaaagacccctcccttgagacaagtactccgtggtagatatggtgtctacatggcaattgaaaagttcaacaaaaacaatgaaaaatgcctctcacaaccagcacatcacgcatcaataccgaacacgagaaaaanaannanac

SEQ ID NO: 2569 - DNA, 430 bp, Triticum aestivum
  Clone ID: LIB103-006-Q1-E1-B7
ccgggtcgacgggtaaaactaaatggatgcgactgacgaccagtacacgagtggggctgccgttctcctaccggtgaaatttgaaacttcccttgagagatgctaaagtactatttatttgaccggcttggtgtacattgacctttaccgcctgaatgttatgaattatattcgtggtggatgatatgaatgtcggggaggtgatggagaagtatgacgaggaacttgtgaaggctgagggcatggagaagaatgggagaatctaagtgggaggctgacattggcgaaggagaaggctatatgagtgttggcattggcagacaacgggtcattgcagatggcattcactgaattattcaaggaattgaatctcccaaaatgatcagataaataagatagcaatgagacatagaatgtcgtgttattaatt

SEQ ID NO: 2570 - DNA, 442 bp, Triticum aestivum
  Clone ID: LIB103-006-Q1-E1-C1
gggtcgacggctctatactacttgcattagagtagtgtagcatgttactactttccgttaatactattctgctgcatagcctgtctttgccactactgttgttaccttacctgctatcctaatgcttagtataggatgctagtgttccatcagaggccctacacacttgtccgtctgccatgctatactactgggccatgatcacttcgggaggtgatcacgggcatatgctatatactttatactgttacattactatgatactgttcggagatgggggctgaaggggcaggtggctccatcccggtagaggtgggcctgggttaccgatggtccccgactgttactttgtggtggagcgacatggcaggttgagaccacctacgagagaggtgggcctggccctggtcggcgttcgcggataactaacacatttaacgag

SEQ ID NO: 2571 - DNA, 346 bp, Triticum aestivum
  Clone ID: LIB103-006-Q1-E1-C10
tcgcgggtcgacgggagggcctgaagtgaatcatagcaagatcggctgtggaattatttggcggcttgtctttagtttcctttgcgaatctttccctggttaagtttaccccagtgagtgtgtgtccttgcgagactatttcggctctctcccaagtctctgcgtcttggtagcttctcatgggctccatggtgttggatgatgtggagggaggagggtgcgtgttagctaagttagtccactccctctgttcgtgttttgtaagttaattagtagtatgtactactagtatatggaacttccaatcggttcaaaaagaaaaaaaaaaaaaaaaaaataatgaaaa

SEQ ID NO: 2572 - DNA, 411 bp, Triticum aestivum
  Clone ID: LIB103-006-Q1-E1-C3
cgggtccacatccagggccaatacaaaatctaaggaagcaaggagcatgagaaggactcactggttcacctcgccgaggccatcatcgacccctactacagagacatgaaggattcatgcaacaaggacaagcgtgcctggcacttggcctgtatggagaaactcgacaaagctcacgtcgtgtacgcagccaatgaggagtacacgagctacgacatgtacaagcggatcgttgacatgaggaagtgcctccttccccaaaacatccagggatccagcccgaagcagagcaatggcaagcgtcatcacaacaataactagatgattagatcctcgcttctcctactttagtatgcatgtacatgcttactttggtgtgtggaaatactacgtatgtagtcacttatgtaa

SEQ ID NO: 2573 - DNA, 441 bp, Triticum aestivum
  Clone ID: LIB103-006-Q1-E1-C4
gggtcgacatcctggtacaaacttaactgccgggctactctttccgcttcttcttgctcttcgggaagttctcctgtctgaaggaaacgtacaatctgctgtgcccttgctggagcttgcggctcgacaacaacgactaaaggcacatctgccgctgcgggaacatccgcttctacgtctagaacctgcggctcagccggagcttgatgttccccggcaagtttgcctgagcaaaacttgtcgggaacgtctgcttccacggaacaaagcctaaggcttgccggatcatactgctcctcagcacccttggtgttgatcatgatgaccttcttggctgcggcttcggggagctctgccggaaaatagtcaccataaatcaacttcctcttcatgctctgtccagttgatggcattatagacggttgagtcagcttgagcaca

SEQ ID NO: 2574 - DNA, 351 bp, Triticum aestivum
  Clone ID: LIB103-006-Q1-E1-C9
gggtcgacgggaaaccggagcatcagtcacatacgaagcatattgagctcgatattcacttcctgcacgatcatgttgctcctggccgtgttcgggttctccacgtgctgacgtcgcaacagtttgccgatgtgatgactaccggattgcctagctctgtctacgaggagtttcggtctagtctcagtgtctctggtgacgcatccactgcaatgggtgtttagtatgtatattgtgttgcatgtacattggagttgtggcctacatcctattcttgtatacttgaagtagaggcctagcctttagttaactatacgtgcatcagcatcacatcaatagaacttctactgt

SEQ ID NO: 2575 - DNA, 204 bp, Triticum aestivum
  Clone ID: LIB103-006-Q1-E1-D2
gtcagaattacgggtcgacggcgttcggagagggatagagatgtcgctccgtgcttaccaaggagtatgtcggtgtagatatggatgtctgctgtgtccatatcgttttgcaagacttgttgtggtgctcaaatgttgagtgacaactgtgagacgctttagtccatcgaggatctgtgttccatccatgtacgtgaatgtgat

SEQ ID NO: 2576 - DNA, 441 bp, Triticum aestivum
  Clone ID: LIB103-006-Q1-E1-D3
gggtcgacggcagtatgaaatgttgattaataattttagtgattttctatagaagagtatgataaggtttttgcattggtttatactaacttatctcacgagtccttgttgagttttgtgtggatgaagcttttgagatttagggagaccgtgatatgagaggaattaaggagacacaaaatctcaagcttgtggattcccaaggcatcccaagataatatttcaagaagtctcaagcgtctaagcttggggatgccccggttggcaccccacctttcttcttcaacaactatcggttagtattggttgatcctaattttttgcttcttcacatgatgtttgctattcttagatgtcattttattttgttttgcttgctgtttgaataaagtatcgagatctgaaattattaaatgggagagtcttcacgtagctaaataa

SEQ ID NO: 2577 - DNA, 441 bp, Triticum aestivum
  Clone ID: LIB103-006-Q1-E1-D4
ggtcctacattcacgggtccacggcgaagagccagagcagggagccggcgaggccgggcgacttggcgaggacggcggtcatctccttgaacacgatgtcctccgcctgcgggcacgtcttgttgtacgccccgagctgcgtgtgggcctccgtcgagccacacagggcaaggagcgtcgccgccacagcgacgaccgctagagctgctgacctcggcgccatgtctggcttatgatcgttagcttgagtatatatgcagtacaccacacacgctacctatatgtatataggcttctgaaataatgtcaatacgtctcgacccatttcaatttcaagtactccttgcgcttgtgtacttgcacgcagtgtgtactacgtactacgtactgctctgtactgcgagataggagaatgtcaacggctatctagttgacatatat

SEQ ID NO: 2578 - DNA, 414 bp, Triticum aestivum
  Clone ID: LIB103-006-Q1-E1-D7
ccgggtcgacggggaactctaatctgtctcatgataatatgcagtctccattaccaatatctcgctcgctcggtccgcgcgtctggttgcttgttagtcctagtagtagtaccggtgatacatgtttgctgggtgctccacaatgtttttacttactgttatttcgctgtctcttattggtgatgtactgatgtactgtaatgaatcatggtattgcttctgaataaaacaccaatataaaaagtcaaaaataaatgatgatggaatcacaaatcaaaaaaaaaaaatcactctacaacaaaacatcaaaagagtgcagtattttgttttaacaggtaaaatgtatgcgtgtaatatgctgcctcataatatgttatgtcgttactatcccttacttgttgctattaccacctc

SEQ ID NO: 2579 - DNA, 391 bp, Triticum aestivum
  Clone ID: LIB103-006-Q1-E1-D8
ggtcgacggggaagactagcccgaggaggagctaggaactgaatatctagtgcagccgcttggccgtgctgaagatgatgagcattccagtgactttgagccggaagaaaatggtgatggtgctgaggatgaggagattgaggatgatgatgctgaggatggtgaggattctgtcaagccgcaatcctcatcgaagaggaagaggtctggtggggaggatgaagatgatgatgacggtgatgatgatggtgatgatgatgagaagcctccatcaaagcgatagtcaatttgttcttgctgatctggtatcctttctgcttgggccaagaaggaaaataatcctctgggagaggattgttggtaaatgctgtagcgttaggacatctgtggt

SEQ ID NO: 2580 - DNA, 410 bp, Triticum aestivum
  Clone ID: LIB103-006-Q1-E1-E10
cccgggtcgacgggctagccgaacggtggtcagcgtcgcagcgagccgactcacacaagttcacagtgcctgagttcaccttcagccgctgctactctgacctgaccgatgactcatcgttgctggtgcaggccgtcgagctctctgggccaagatgacatgatcaccaagcgcccacagactgagaacaccaagcagcagtccttgtacagcatgataatcctatgtagatttggaaataatccaatactgacgtaaagtatacatagtgatgtatgtatcttacatgaagtgtacacaggagagtgccgcaactccctggaatggtattgaactattaatattacagatttctagctgaaacaataagactagttgtaacttgtaataaaatccggtagcgagatagc

SEQ ID NO: 2581 - DNA, 427 bp, Triticum aestivum
  Clone ID: LIB103-006-Q1-E1-E2
cgggtcgacggcgagcaagagcttcatcggctggtgcaagcaccatggcccatcggcagcgatattggtgtgacagtccttgagcgcacaatcgacatattgcagaagatgtgtgatgagcaatttgccatacaccatgcaaaagatccagacgtgctcgacggcatgatagacgacccacctgaagagccgccatcaccagagctcatcgagagcctgatgccctgcaaggaatgggtagaggacctccgcaatccagtcaagagacaggaagcctgcagcttcatcattgcccgtggtggccgtgtcaacctcgatcccgatgatgtggtggctaggctcgagcacatccttggcggagctgacgtcgccgacgaagtagaacatcgccaacgtgatatcttgaggatgcaggtgatggacggaa

SEQ ID NO: 2582 - DNA, 436 bp, Triticum aestivum
  Clone ID: LIB103-006-Q1-E1-E3
gggtccacggctcttttgaacttgagcttccaactggtgtaatttcttatgaaaaaaatgcagtgttgacaaaagaatgattgtttttcttccacaaatagagcctaattttgattcgcacagggcctctcatttccctagtacggccctgctcataaacttaatatccaataaatttaagcctattctacaagcattgatgccagtttcgaccttctctgctggatatcagatgcaatctagtcgttgtccacacatgtgagaatacgaagaaagaaaatattttggcgccgcgataacttgcggccttttaggatatttcccatagctttatattagactgacactgacacccaagatgacacaagacaataggatgccatccggaatacaactcgaaccccgatttacaacaccttcacacgacatttgactc

SEQ ID NO: 2583 - DNA, 127 bp, Triticum aestivum
  Clone ID: LIB103-006-Q1-E1-E4
cggcagcacactagatacacaagaccaaggcttaaccgcagttccgcagttcgtgtgttgcttatattatatgttgctattacatcaccattattaactgagggaggaattgattagtgccagtgtt

SEQ ID NO: 2584 - DNA, 406 bp, Triticum aestivum
  unsure at all n locations
  Clone ID: LIB103-006-Q1-E1-F1
gggtcgacggcggtatacaactagaatccctttgtatgtttacgccggactcgtctagccatgtccggggtttgaacgacctgtttaggtgctttggctagcanagctggtttagtgtgtggttgtcaaggcaggcgcacagtcctccgcgctcgagaaacactcgatatttccctttaacgagatgatgcctcgtggactgggcattttaagcgtaagggatacataatgcggtattgcgttaaagcgggcgaaagcttcgcgtcncagtagttcttgatagctatttgtaaatggggcgatgtgaaaggttagcttttcgtggcggaatttgtcggggaagccgaacacaacttctagcagccaaaaaaaaaattgagacagaacaaaaaaaagcggccgctct

SEQ ID NO: 2585 - DNA, 414 bp, Triticum aestivum
  Clone ID: LIB103-006-Q1-E1-F10
ggtcgacgggtaaatgaaactcattttggtaaaatagttcagtagtaaggtggacaggataacagcatgaaacaaacatatatctatgtagtatcgtcactgtatggtctatatcattctagtttatgttgccaaatcaagatagagacagttcaaatcatatctatttaagataaagcagcatagaccgaatataagtgtcggaaactagacaacaataacaacacttgtaatgtgcatggcatgagaacataactgtttcttcaattgaaactaaaatcaacatagagaaagttacaatgaactaacatgttaaagaaataggtttcaaaacatagctgttgcgccattggagtttcaattgcatccttcaaattagaaattagttggtatgagtaaatatagtgagcaaga

SEQ ID NO: 2586 - DNA, 420 bp, Triticum aestivum
  Clone ID: LIB103-006-Q1-E1-F11
gggtcgacgggggaacccaaagcaacagcttcccacttcctcctcagacccaccctcgctggctagccgcatctgctgccaagctccagccccgcgctttctgctagctcgtcgagttgaagattgtccaagagcattttgaaggttgacagtaaccttcggttgtcggaagatgtatcgcgccaagagagctgcattgtcaccaaaggtgaagcgccgtgtcggcaagtatgagctcggccgcaccatcggggaagggacctttgcaaaggtcaggttcgcaaagaacactgaaaccatggagcctgttgctatcaaaatcctcgacaaggagaaggttcagaagctcagattggttgaacagattaggcgcgaaatttgtactatgaagttaataaagcatcctaatgttgttcgact

SEQ ID NO: 2587 - DNA, 433 bp, Triticum aestivum
  Clone ID: LIB103-006-Q1-E1-F12
cccgggtcgatgcgacaccctaactggagtcgcgcaaaccggaagcaaacccggagaagttctgggagagtccgaacatccttctggccaatcaacagccaccacgtacccctctctccgctggggatgcgttgttatttgggtttggcggaaggccgccgctgggatgcattgttatttgggtttggcggaagatgattagcatgcttggctatggcggataacatgtctgaagttcgcggaagccacaaatcactttgtttcactttattttcttcatatgctacaagatttgacgaaagtaggctacttggctactagatttggcggaagctacgctagaagcaccaagattagtagcttcctgccaaacaaaaatcgactactaattaatcacgtagtttctttaagggcatcatgtaattggggggat

SEQ ID NO: 2588 - DNA, 424 bp, Triticum aestivum
  unsure at all n locations
  Clone ID: LIB103-006-Q1-E1-F2
gtgccggtcctagatttacgggtcgacgggcaagagaaaattgtattgagaatcaaaagagagagaggaagccatctagctactaactacggacccgaaggtctacaaaatactactcacacatcatcggagaggcaccaatgaggatgatgaacccctctatgatggtgtctagattggatctggtgtttctggaaatgatataaaacatccaagaatgataatataacaacatggaagaatcaaaattatagatatgttggagacgtatcagcatccgcaagcttaattcctgctcatcctcgagtangtaaatgataaaaacagaatttttgatgtggaatgctgcctaacatgttcatcacatattctttattttatagcatggacatttggacttttatatggttcagagcaatagtct

SEQ ID NO: 2589 - DNA, 414 bp, Triticum aestivum
  Clone ID: LIB103-006-Q1-E1-F3
gggtccacggcgcgcaactatcgcaagtaccataaacccgccatataccttcctcaaaacagccaccatacctacctatcatggcatttccatagccattccgagatatatttccatgcaacttccatcatcatcatatacatgagttgagcatcattgtcgtattgctttgcatgatcgtaagatagctagcatgatgttttcatggcttgtccattttttgatgtcattgctacgccagatcattgcacatcccggtacaccgccggaggcattcatatggagtcatatctttgttctagtatcgagttgtaagtaaataattttgtgatgatcatcattattagagcattgccccagtgagaaaaggatgatggagactatgattcccccacaagtcgggatgagactccg

SEQ ID NO: 2590 - DNA, 400 bp, Triticum aestivum
  Clone ID: LIB103-006-Q1-E1-F5
tatccatcatctcatcgaaagacgggacacctttgcctctatcaagtggtatcagatttccaggttgctcggtgagattttacagtttttcgtagtttagatcgagtctattcttcatacctacagtccacgagaaagccacaaaaaaaattagggttagttcatcatatccgaaccaatctgagcctttgcataatctttttagggttttgctttgttgaatttgcggttgcatcgtcgtgtctagttgctggtcttagagtctagtcttttagagtttcgagttctggtcataagttgtcacgccaccgccgcaccatcatcatcgcccctgccatctaccaccaccgcttatccatcaccgctccgaatccgtatccatataccaccaccaatccgt

SEQ ID NO: 2591 - DNA, 401 bp, Triticum aestivum
  Clone ID: LIB103-006-Q1-E1-G10
ccgggtccacggggaatttaaatgggtaaagtcatgtttaggtcagctaactctgtttaagtgctgaacttgctcgattaaaaaatgtgggtgagctgtaatctccgttacgtacccaaagtaagcaatgtcatggatgaccactgtaaccaaggaaattcacaccaagattcttgacattcagactcatcacacatgggttgggctatcagaaccacttgagatgttcacatatcgtatatcgctctgaacaacggaccgtgtctgaggatacattgcgcgccaactttttcgatgaagcaattccaagttttccgcatctgcggcaatatctatctcactgcctctctccttagcataagccacatttcccctgtttacgccttcctttgcaagttgaa

SEQ ID NO: 2592 - DNA, 438 bp, Triticum aestivum
  Clone ID: LIB103-006-Q1-E1-G3
cgggtccacggccccaagaaacttcacggtggcttgcaagtccaaactggcccgttaacctcgtacatgtactgctactacttgtagccgttccctgatttccttctctcttgcctagggattgggcggctgaggccggcttgtaatcagatagatagatgcgtgggtggttgggaggaactcatctttgaattcaaatcgtaactaatttccaagaaaccttagttcatgtgagccacaaccagagagtagctcacaccggcccttgtaaataaaatatactatggtgatcaccttgtactaaactcccaagctcaggatacgtgtggatgacaacacgaatgggatgtggaataggataaggcacgcgaagtcgtccatgcatgcccacgaaggcacgcatcgcatcgctaaaggcctggttgcgcatcccatggt

SEQ ID NO: 2593 - DNA, 414 bp, Triticum aestivum
  Clone ID: LIB103-006-Q1-E1-G4
gacacaaatgatatggaatttgttagaatactctatgtgcttcacttatatcttttgagctatatagtttttgctgtagtgcttcacttatatattttagagcacggtggtggatttattttatagaaattattgttctctcaagcttcacttatattattttgagagtcctacaaaatagcatggtaattttcttaaatagtgaaattagtcctaatatgataggcatccaagattagtaaaaactttcttataagtgcgttgaatactaggagaagtttgatacttgataattgttttgagatatgaagatggtgatattagagtcatgctaatttagtagttgtgaatttgagaaatacttgtgttaaagtttgtgattcacgtagcatgcacgtatggtgaaccgctatg

SEQ ID NO: 2594 - DNA, 383 bp, Triticum aestivum
  Clone ID: LIB103-006-Q1-E1-G5
ggtcgacgggcgaatgcaatcaaagctggatgccggtgacaccaaggtggatgtacacagatagcccctcagccatcttgttcgtcacacatcgttgacactggacgactaccataccctcaacagttatattgatgacttgtgactagaattgtaatggtaagtgctatgatcaagttgataatgtatgatgacaaccaaacatcaagtagtcgcattgtaatgacatccactgaccttctgtactacaaggttcaacccagtctcgtgcaagggaatgggggagcccggcgacggtccaccgactccgtcatcttttgtaatgaatatcccgtgaaggaaccccgtgccaggccccaagttcacctcacacgtcgggtagc

SEQ ID NO: 2595 - DNA, 321 bp, Triticum aestivum
  Clone ID: LIB103-006-Q1-E1-H11
gagtcgtattatggtggtggtcacggttgattatgggtcatggtcttctcaacctcggccaatgcccatggccattttctgaacatgttatggattagtaaggcttgaaggtttcatggattctaaggtgcaattgaacgtttatccttgtgcacacttccagagatgccaaatgcactacttattcttccacacatcatcaacttatactgctgaatgcatcatttcgtaaagatcaactccaatcaacacacaagctattcacatcatcttgagcctcaataagacgtcagaaatatcatacacttcaactacccacat

SEQ ID NO: 2596 - DNA, 383 bp, Triticum aestivum
  unsure at all n locations
  Clone ID: LIB103-006-Q1-E1-H12
ggcaattcggggcatttagtcacactgtgactttacattcatacgatcgagatacaatgttaaacccgaataaaataattgcagcgcggtggaggtggcgtgctccgttggtgttgttgtcctccatgacaccattgttcaagtctctaagccagcctagaatgttcttgacatggaaacaaagaccctgtcgtcgcgagatcgacaggcggggcgcgggaggacaacatcttgcggtgttgcgcagtagtggtcgatggcggcatcccacgacactgagagggctgcacgcacgggcacggccgcggtgggtgcaggcaaacacacggggactagtgtcgcggtgggtgcagtggtcaggacggacacangcgggggcactg

SEQ ID NO: 2597 - DNA, 440 bp, Triticum aestivum
  Clone ID: LIB103-006-Q1-E1-H2
tccagaagtcccgggtccacagaaacggcaaggccgaacacagtagacaaagctcattggagctacgtcatgatatcgcccaacacagaggtgccgcacacccattgtgcttcacagacgagataatggatcatcaaatccccgagggtttcaaacccgtaaacatcttatcatatgatggctcaacagatcccgcggtatggatcgaaggttatctccttcatatccacatggcccgcggcgatgatttccacgccatcaaatacctcccactcaagcttaaaagaccagcccgacagtggcttaacagcctgctaacagggtcaatcagctgttgggaggacctggaagccgcattcctcgacaatttccagggcacttatgtgcgacccccagacgctgatgacctaagccacgtaattcagcagccagaccaatca

SEQ ID NO: 2598 - DNA, 406 bp, Triticum aestivum
  Clone ID: LIB103-006-Q1-E1-H6
aaaacaatcgactctcctgtcaaaacttactcgtcagctcagcgtccatgataacagagctgcagctgcatcatattctgatgatacttctggtccggagagtggcccacagagtcctggccagtcaggtgaggactggaggtctgccttcagtgctgcagcaaatggctctgccgaccgatccagttcacagaacgagtcgagatcgagaagtgctgacagtcgtggtcggcggtatgaaaatggggatgccaacggtgccaattcaggcagccgacgcacaccaaaccggttgccacctgcaccgccgaaatactaagcatgttgattggcatatgtgagaatcatatttttcatggcatgctctcactcccacctgatagtgatgggaaaacaaattggaatg

SEQ ID NO: 2599 - DNA, 385 bp, Triticum aestivum
  Clone ID: LIB103-006-Q1-E1-H8
gctcatcttcctcctctcttcgtgttagggttagggccgttcgctcccgaagatcagagatggcggtgccgcttctgacgaagaagatcgtgaagaagagggtcaagcacttcaagagggcccatagcgaccgctacattggcctcaagcaaagctggcgcaggccaaagggtattgattcccgtgtcaggagaaagttcaagggatgcaccttgatgcccaacattggctacggttctgacaagaagaccaggcactaccttcccaacaagttcaagaagtttgttgtccacaatgtgtctgagctggagctgcttatgatgcacaacaggacctactgtgcggagatcgcccacaacgtctccaccaagaagcgcaaggacat

SEQ ID NO: 2600 - DNA, 389 bp, Triticum aestivum
  unsure at all n locations
  Clone ID: LIB103-007-Q1-E1-A1
cagcacgacggcgtggggacgatcttgatgtactaccgtctcaaggcttcgcctaagcaccgccacaatattatcgaggattatggtggaagggggcaacgcacacggctaagaatatgatcacgtggatcaacttgtgtttatggggtgccccctacccccgtatataaaggagtggaggaggggagggccggccctctctatggcacgccctaagggagtcccactctcaccgggagtaggattccccttttcctagtccaactangagtccttccatgtaataggagtacgagacaatgaaggggaagagggaagagaaggaatgaaggggcgcaacccctcnccctagtccaattcggactaggccttgggggggcgcgtcctgc

SEQ ID NO: 2601 - DNA, 443 bp, Triticum aestivum
  Clone ID: LIB103-007-Q1-E1-A10
gggtcgacgggatgctagatgggtaatcatgaaattaaagaatgcttgtgttgaagtttgtgattcccgtagcatgcacgtatggtgaaccgctttgtgatgaagtcggagcacaattttatttattgattgtcttccttatgagtggcggtcggggacgaacgatggtcttttcttaccaatctatccccctaggagcatgcacgtagtgctttggtttttgatgacttctaaatttttgcaacaagtatatgagttcttttgattaatgttgagtccatagattatatgcactctttcacccttccaccattgctagcctctcttgtacggcgcaactttcgccggtaccatacacccaccatttaccttcctcaaaacagccaccatacctacctattatggcatttccatagccattccgagatatattgccatgcaac

SEQ ID NO: 2602 - DNA, 384 bp, Triticum aestivum
  Clone ID: LIB103-007-Q1-E1-A11
gtacagtctagcgggtcgacgggccatactgcaagatccatcgaaccaagggccacgaccttcgagagtactatcaggttgagcagttcgtcaagagacaaagagctgagtgtgagaagcgtgacaaggacaaaggccagaatgccgctgatggcaagggccgaggcggtgaagcaaatcgccctggcaagccctttaggagcaaaggaaaacccgccaggcgtcaggtgaaggaagcgtgtgatcatgagagtgatggaggggatgaagaggaaaccagtgagcaagagtttcagaaggccaatgacgccctatgcattgatgggagtgcatctttgcacaccactacaggaattaggcactttgccgtcagccatggctgac

SEQ ID NO: 2603 - DNA, 282 bp, Triticum aestivum
  Clone ID: LIB103-007-Q1-E1-A2
gatggacacatatgaagatgcatatcgcttaccatcagtatctcattttgggtacgcagcaatgcggcatcattgggtacggtgcaggcttacagttccacgctgattacactggttccagtcatttacgtgtgtcttatttagcatgcaagtagcagtctagtgtctgtttctcccagtttagttcaatctagtttgactatcaccggtccttcacgaaggttagaatagcaacacttgatgatcgttgttgtggtttttgcgtacttaacgatcgctctt

SEQ ID NO: 2604 - DNA, 413 bp, Triticum aestivum
  Clone ID: LIB103-007-Q1-E1-B12
gggtcgacgcggaagtataacaacagtgtccctgaaggatcccgcattatagagggcctgtgttcaaaggatatcatgtttgaatgaatgtatttgcgattcccaaactttgcaatgacaacaaagcgttcgtataattatttatcctccattgcatccgtttatgaaatctgagagtcgtccagtcgtcggcttcagcccctcacgtaaatactatgggggtgttcggaacagcacaaaagaacatttaacccaataatttggtccttaaaggaggtgttagtgcggcgaaccaggcaatcggaccatgcggctttatcactctcacttagccataggagttttacaataagattgtacgcttagccctggtattgttcctgtatctgaactcgggtgttgtagacacctga

SEQ ID NO: 2605 - DNA, 429 bp, Triticum aestivum
  Clone ID: LIB103-007-Q1-E1-B4
ccgggtccacgggtttaatgaacttgtagtatgtatctttggtttcgagagtcgttcaacttagatgtaatcaatgctattaatgtcttccttttctcttccgatcgttctgttgcataattatatattgcttatgtattgtctgtgaattggtactaacgtttcgtttggctagtgcatagcgatgccgacgtatgtcgtgtacaagggtaaggttcccggagtctacgatgactgggaggagtgtcggagacaggttcaccgattcagcggtaacagttacaaagggtacaccactatggccgaggccgaatctagatacgcccgctatctagcgggagaggggagggagcgttggaggaaccggatgaagacgagtttcatcgtgattatgctcatcgtgattaacgcagctctcttcgatgtgat

SEQ ID NO: 2606 - DNA, 372 bp, Triticum aestivum
  Clone ID: LIB103-007-Q1-E1-B9
gggtcgagtcggacagactagatgataaattgcttctgcacaaggactgcccctcatcattttgctcaactgtggatcgcaaggctgtagcaagctgccgatagaagttgtggattcataccccttattttgtctttataaaaatgaattttgtggatccaatagtgagctgccctatcttaaagagttgcagctcctactgcatgtaaagttttcagtgttggtttggaccatcagatagacttgctggagttgtttctcagatgctaccatgcaacctcaggaaatatataacattcctactgttcccaaaaaaaaaaaaaacaaaaaaaaaaaaaaaaaaaaaaaaagtaaaacaaaggaaaaaaacga

SEQ ID NO: 2607 - DNA, 426 bp, Triticum aestivum
  Clone ID: LIB103-007-Q1-E1-C1
ctcgacatgaacccttcactaagctcgatgactatctccctgacatggatggatggcacgacatgatggagtgattgtcgatatatgacaatgtgtccgtttagtccatactttcttttatgacaaaactttgagttatgcacggtgaaactttatttgtgatgtaattaaaccgtcctcctcctcgactagcaaaaatcactctagtcaggtcattttgggtacgatgaactttgttatttatgcttatgatatgttgtttctaattttgccaagtctgtctctttctgttgctcaactatatatgttgcatatcatcgactcatgtgatgatgcaggtgcatagatcatagatggcgaagaagtgctacgccaggagtatatatacgacaagtggccgagtgtcaggccctggtgtaccggttt

SEQ ID NO: 2608 - DNA, 420 bp, Triticum aestivum
  Clone ID: LIB103-007-Q1-E1-C10
gggtcgacgggatgtgagaaggatagagctcccagggccgttcctttgagtcatgtaatcaccaataaataaaatgtcaatagagtctcaaaaaaaaaaaaaaaaaaaaaaaaaaaaaaaaaaaaaaaaaaaaaaaaaaaaaaaaaaaaaaaaaaaaaaaaaaaaaaaaaaaaagaaaaaaaaaaaaaaaaaaaaaaaaaaaaaaggggcggctcaaaaggatcaaagttaagttacgcgtgaatgaaaggtaaaagctcttcaaaagggtaaccaaaattaaattaaggggccgtcgtttaaaaaggtcgtaatgggaaaaaccttggggtaaccaaattaaatcgctttgaagaaaatccccttttcgcaaatgggggtaaaaccaaaaaggcccgaaccaattgcccttccaaaaat

SEQ ID NO: 2609 - DNA, 392 bp, Triticum aestivum
  Clone ID: LIB103-007-Q1-E1-C11
cgggtcgacgcgaccttcaaactgatcacgcattcaaaaaagatgaccttctcttctttggtcagagcgtagctggcacgaccttgaaaccattccggatgccggtcatcagggtctttcaaacgttgctggtcctgccgtgcttcctttgtatcatttgtcttcccatacacgcccaagaagcttaggaggttcacgcaaatattcttcgtaacgtgcatcacgtcgattgcagagcggacttctaggactttccaatattctagctcccagaatatagatttcttcttccacatggctgcgtgcccgtcagctcccttcggaactgattgtccgccaggaccctttccaaagatgactttcaaatccttgaccatatcaaatacctcagc

SEQ ID NO: 2610 - DNA, 401 bp, Triticum aestivum
  Clone ID: LIB103-007-Q1-E1-C12
cgggtcgacgcgatacactatgagatcacgggtcaccagtacaacaagggacactatctacctgatggtatatatcctcagtagtcaacttttgtgaaggcaatctcgaagccccaaggtgagaagagaaagagatttgcccaaatgcaagagagtgctacaaaggatgtggaacgtgcttttggtgtgcttcaatcccgatggggtatagttcgataccctgcactgtgatgggatgaaagtaagctttgggaggtgatgactgcttgtgtgatcatgcacaacatgatcgtcaaggaagagcgtgatgaaactatcttcgaccaatgatttgattttcaacgtgacaatgttgatcccctgcatcatgaattcggcacgtttgatcagtttgtccagtt

SEQ ID NO: 2611 - DNA, 89 bp, Triticum aestivum
  Clone ID: LIB103-007-Q1-E1-C8
cgggtccgccaacggccagccgaatcaacggaaaaggaatggcttcaaccaggggagacttaggatgggagttcggcacaggcaaactg

SEQ ID NO: 2612 - DNA, 443 bp, Triticum aestivum
  unsure at all n locations
  Clone ID: LIB103-007-Q1-E1-D10
cgggtcgacgctagcttcgacacagatctggatgactctaagtcacaaaccggatacgtgtatattttgaatggtggggcagtaagctggtgcagttgcaagcagagcgtcgtggcgggatctacatgtgaagcggagtacatggcagcctcggaggcagcgcatgaagcaatttgggtgaaggagttcatcaccgacctaagagtcatacccaatgcgtcggggccgatcaagctcttctatgacaacactggagctattgcacttgccaaggagctcaggtttcacaagaagacaaggcacattaagcgtcgcttcaactccattcgtgaaaacgttcaagatggaaacatagatatttgtaaagtacatacggacctgaatgtagcagatccgttgactaaacctctccttagagcanaacatgatcaacaccagaatcc

SEQ ID NO: 2613 - DNA, 316 bp, Triticum aestivum
  Clone ID: LIB103-007-Q1-E1-D12
gggtcgatgcggcgctctatctcagctggaataacaagcccctcgtcgtctcctccgcatggcactagtgttgtggtgttactgctttgtgacttcgctgctcgtagacgaatctagatgcatgctttgttggactctagggtgatgctgctgctgtggagaagaatagctcccaagtaacctgctgttgtaatgccgaacttaggtctaggcctgaataaggctgatgagatgtagtggtacaagttcgagggctacagtatatgtttcagtttcagacgtctaatcttaatgtaattgcatttaattatgtctc

SEQ ID NO: 2614 - DNA, 450 bp, Triticum aestivum
  Clone ID: LIB103-007-Q1-E1-D2
ccgggtcgacgggggcgcggcaccagccactgaagccggggcgtctcagccggctccaggcgaggacttggaagccgctctgccaggcccgccgccaggaactccacctccgtctgcgatcacccagcaggagactccagcttctccggctgcggctccagaagatgatctgcctctgcctcctccccctccactgacccagcatgaggaggatggaacgccagaagatgatctgcctctgcctcctcctcctccactgccccagcaggaggctggagcgccaggttcagcgccagacgcaggagccgtcgatgacaagtgggcaggaggtggcgatgacaagtgggcgggaggcccggatgacaagtgggtctagtggttgcttagggcgtggaactgaactgaactgaactggttgtacatagatgctcgtaacgtcccctgctgaaa

SEQ ID NO: 2615 - DNA, 248 bp, Triticum aestivum
  Clone ID: LIB103-007-Q1-E1-D3
acggtcctgatttccgggtcgacctcgaagctgcaagcgagagtgaacctgacaaagcttggaacgcccacattatggagatactggaagcacttcaaccttgtgagcatgaacccaactccatcagaggagcagctgttccatggggtccagcagcatttccagtcccagcaattggatgagttgcaggtgatcctggggttcatccagacggcaaagaggctcaagaccctgtacaagaacagctc

SEQ ID NO: 2616 - DNA, 448 bp, Triticum aestivum
  Clone ID: LIB103-007-Q1-E1-D4
gggtcgacgggatcaagttggattgaacttgatgaggcattccatgagttcacggtgggggacagaaaacactcagactcggaccagatatccgagatggttgataggctgagttcacatgttaaggatgttggctgccttccaacagctcatgagctgcttgtgcagtgagtcctttgccaagggtgtgctaaattgctcatgttgcagtcacaaatgtgaaatgctttcgtgaggtgttagcattgcacggtgcaatctatgtaagcaagcaccggctccagtgaatcctgcaatcaagaagatgctgtgacgtggtacagaattacccacgatggactgtaaacccagacatgtgttcaagcatttctcagcatgtgctcttctgccatcaggtttgctctgtcgaaaactgcaactatgttaagacgaaagctggtgatgggat

SEQ ID NO: 2617 - DNA, 416 bp, Triticum aestivum
  Clone ID: LIB103-007-Q1-E1-D9
cgggttcatatatgtaaatctgtattattacttatatcttcagcagtgacactaacttcaaaataagctgatagtttttttttcgaaacggaaagtaagctgatagtttaaatattgtgtcattttcctaagcacctcgagcgtgcctggttaattatctcgttttgaccgcccgcaaaagatcatctcgttttgatacatcttagttcaaatttacttgcaatctttaaatgcaagtttgaaaataaataaatatacttgcagttcatatttagattacactagtaaacatgcccatgcgttgtgacgggaaaaatttgtatattcctagcacaataagcacgactgaagacccctccactggtgcacattatcaatttgaacatggcgccaagtccgtgttgtcacttaacctc

SEQ ID NO: 2618 - DNA, 436 bp, Triticum aestivum
  unsure at all n locations
  Clone ID: LIB103-007-Q1-E1-E1
actacttgagattctggaacagaagaatgcccgctacgtgccgtttgatggctgggagaagatcgacaccaaagagaaggcggacggcgagctgaaaaacaagcctaaggagaagatcaccagatggaatgagctcctggaagccgcaagggagggttgattgaagggcatcgaacggggctgctggttcaagcgtaaaccgaatcacagaaacagactgcgaggcacaatctgaatactgaaagaacagcctatcacgtacataccgatgagccaatgaaagtcaagtgctaataatgcagtcttagcagtgaatcactcgtacgcatacacagtactgccaatcctggttaaaatccccaanaggctcgaccactgcagccacatgaaacgattgtagtcctgangagtanaactgctatatgaacttttgcac

SEQ ID NO: 2619 - DNA, 393 bp, Triticum aestivum
  Clone ID: LIB103-007-Q1-E1-E11
gggtcgacgggggtcatcatcgccatcgagaacccccaggacatcatcgtccagtccgcccgcccctacggccagcgcgccgtcctcaagttcgcgcagcacaccggcgccaacgccatcgccgggaggcacacccctggtaccttcaccaaccagatgcagacctccttcagcgagccccggctgctcatcctcaccgacccaaggaccgaccaccagcccatcaaggagtctgctctggggaacatccctaccattgccttctgtgacaccgactctcccatgcgatacgtcgatatcggtatcccagcaaacaacaaggggaggaacagcattggctgcctctactggctcttggccaggatggttctgcagatgaggggcaccatcctg

SEQ ID NO: 2620 - DNA, 445 bp, Triticum aestivum
  Clone ID: LIB103-007-Q1-E1-E3
cctgagcgtacggtcggatgtccgggtcgacgggggaaacaaacaaggtgttaatgcctccatacatgttttggccccgaaggaaaacttgtaaaggtggtgtccaatctttcctgccacactcgacctttgtcctatgtggagtcttgagcatgctttccgagggaaagagaacggctgtttagactgatcgatagcagtaagagacatggggtcttaattattagtggtgatgttcattttggagaaatcgctcgttttgactgcggtgttcaatatccattgtatgatattacctcgagtggtcctactcagtctgtcgagaattctgtaccagcaatatttcaatctgttatgagacttctggcttggctgacaacaacccccatgccagtcctcagccctaactgccgtcacaaatcatgctcatatggtcagccaaatt

SEQ ID NO: 2621 - DNA, 369 bp, Triticum aestivum
  unsure at all n locations
  Clone ID: LIB103-007-Q1-E1-E4
gtcggcgatgggaatagtanggggcggtgaggcctccgcggcagcacagccggccacgggaggcagaagcattcggcacgatcggcgctgctttgggcggctggagcaagaagagcaaaggttgaagaagcactacggccgttggatggacatcgtacggtcactggagctagaatcgttcatattgactaaattgacaaagcccttcggccccgtcaacttagtaggcccacaagacagcctcccaccaaagtgggtcccagctagccgggggagtattcatttttttgtgcataataaggaggcacttccggtgggtctgagctgacagcgggggaacattttttttcggagttggtgagtagaggg

SEQ ID NO: 2622 - DNA, 72 bp, Triticum aestivum
  Clone ID: LIB103-007-Q1-E1-E8
cggggtccaagaagttaagtcctaccacattggcgatcataatattacggcgccgctatgcttcctcagcct

SEQ ID NO: 2623 - DNA, 420 bp, Triticum aestivum
  Clone ID: LIB103-007-Q1-E1-E9
cgggtcgacggggatgcgaaggttccggcagagaaagccgctgccgctgctcctccagctgtgacctacgcggcgaaggtggcccaaacagcagcggccgagaagaagcctgtggccaccgagaaaaagcctgtcgtcgccaacggtgctgtcaagaccggtgtagctgcttgatcgcatacctgatcctcccagctagccatgaggaacaaacggacggtgctggcgaaccaggcgagacatgcagggtcccaagtaccgatcaccaaaggtggctggaaagcgggttggatagttaggtttattccctagctctctttttctcctgtcatcgtcgtattatccgtatttcagtttgcttagctctaaagactcctcctatagtggtatcaccggaatcaccagaaaaagagaaaagag

SEQ ID NO: 2624 - DNA, 425 bp, Triticum aestivum
  Clone ID: LIB103-007-Q1-E1-F10
atggaaaaggagcttgcggcgttcgcatctgggtgaggatgaaatgaagatgcaagtagctgaagggtctgttttgcactgatgctcaagtgtatgtatgtaagggatggcaatcggtaatcatatgttgcggatgcagaacattggctacggcatgactaaatatttgcctcagggtgacctctgaagcttctgttgctgattctctgttcccactatgtactatggtgaaaattgtattgttctgctcatctgagccctgtatctgctatttgaggaggaaactttgcgtgccacgattctatctttcgtcgaaaacttagaaatcatatgtaaaactttgagtgtatcatcagtgaatggattttcggttcggcttttaagaacctcactcagtgggagcaaatggccatctagttttgtag

SEQ ID NO: 2625 - DNA, 436 bp, Triticum aestivum
  Clone ID: LIB103-007-Q1-E1-F12
gggtcgacgcggactcgtatgctgccacttgttaggttttctcatatgacctgcaggaagttgcggaaggtccttgcatgcagtgatctggataatgagcaagcaactaaaagtgtcactgatgcactcctgtacaaagctgatgcaccacatcgacagcgcgcccttgctacagatgtgttgacctctaggaaatatactgaacgagcttacaaatatcgcccacttaaggtggtggaatttgaccgaccgtatcctcaatgcatagcatacttggatctgaagcgcgaggagtgtggccgactattcccatctgggcggatttactcgcaagcattccatcttgctggacagggattcttcctctcagcacattgcaacatggatcagcaaagcgctttccactgctttggtctcttcttggggatgcaagaga

SEQ ID NO: 2626 - DNA, 442 bp, Triticum aestivum
  unsure at all n locations
  Clone ID: LIB103-007-Q1-E1-F2
gggtcgacgggccagtacaacaagaaggtcgattcctcttatttgatcagccattcgttgtgtcaaaaatgtagagggggatgcaaggagcacaaggcctgcacatccaagcaagtggtaacatggacttgtacatggaacatcccaagcgcaagcagagctgcagtgagcctgtacaacgagctagcataagtccctacatttcatttaattcgtactggcattcgtgtatgatttgtgtgcagtggcggatccacgaattcaagttaccaggggcgaacatttaacttaaaaatacgaaggcacttgcactccggaaatcaacataacttgagaaatgtgaagctacatgcactttgaaaaccagctaatgatccaaagtagttcagattataaacactaaatgatgcaagcaccanaaaacacaaaatgcaacatggtg

SEQ ID NO: 2627 - DNA, 396 bp, Triticum aestivum
  Clone ID: LIB103-007-Q1-E1-F6
gggtatcgctaaaataagtcgtcttaaaaaaaaaaaaaaaaaaaaaaaaaaaaaaaaaaaaaaaaaaaaaaaaaaaaaaaaaaaaaaaaaaaaaaaaaaaaaaaaaaaaaaaaaaaaatttaaaaaaaaaaaaaaaaaaaaaaaaaaaaaggggggcccttaaaggttttaattttttttttccttttaatgaaattttaaacctttttaaattttcccccaattttaatttcaggggctttttttttaaaattttttaaggggaaaacccttggttttcccaattttaaccccttttaaaaaattccctttttcccaatttggtttttttccaaaagggccccaactttttccctttccaaaatttttccccccttaattggaaattgtgaaccc

SEQ ID NO: 2628 - DNA, 441 bp, Triticum aestivum
  Clone ID: LIB103-007-Q1-E1-F7
ttccgggtcacggggaagaagcaactgaaccccatgcgggacatcaaggtgcagaagctcgtcctcaacatctccgtcggcgagagcggagatcgcctcacccgcgcctccaaggtgctggagcagctgagcggacagtcacctgtgttctccaaggcgaggtacaatgtcaggtcgttcggtatcaggcgtaatgagaagattgcgtgctacgtgactatcaggggtgagaaggcgatgcagctgctggagagtggcctgaaggtgaaggagtacgagctgctcaggaggaacttcagcgacaccggctgctttggcttcggtatccaggagcacatcgatctcggcatgaagtatgatccatctaccggcatctacggtatggacttcttcgtggtgctcgagcgtgctgggttacgcgtctcccgccgccgcaggtgc

SEQ ID NO: 2629 - DNA, 439 bp, Triticum aestivum
  unsure at all n locations
  Clone ID: LIB103-007-Q1-E1-G10
gggtcgaggcggatggtgacagttagggctctggcaggggaaacaggggccgtggtggtggttacagaaacaatggaaatgacaacaatgagggaagggcctccagtcaagaccgcggtggtggctggtctcactcttctgcttggaatgctgataaaaagggaagcgctgaagacgatcaatctttctcaaagggcaagtccagctgggggagtgacaacaacggtagctggggagctccaaaaccatctggtggtgatgatcaggcaggaaagaaggatggaaacaacacctggagtcaaaacaagccattttctggcgatggatcctctatcctgggccagtgggctcctgctggcggcgccaccgctggtactgcaggatctgcangcggaggaagatcatggggaaagagcaatgaagatagctggaattcttc

SEQ ID NO: 2630 - DNA, 385 bp, Triticum aestivum
  Clone ID: LIB103-007-Q1-E1-G11
cgaccgcaagataactcctatcacgctttcctatttagggtcaagagtggcgctgatggtgaaggtaccaccagcgccatcctccttggcggacaccttcttggtctcaggtggagctgccattgccttcctacacttgccggtggagctcgatggtgcgtcctcgacggtagcgcagcactccgaagaggtgcacttgccggagtgggcatcagagctcttgccggacttggtcttcttcttccccccgggagcttcagcggcaagtatcttgcgttctgctgcggctgctacttcccggtagatcttgtcggcacaaataagagcatccttcttgtcgcctgggacagagatgacacttatcgggcctggcattttcaatacg

SEQ ID NO: 2631 - DNA, 425 bp, Triticum aestivum
  unsure at all n locations
  Clone ID: LIB103-007-Q1-E1-G12
agggtgaaaggaagcaacaaccccggcggcgcaggcggagggatggctccgggcatgggagcgggcagcagcgacgggcggcacgatgacgaggccgtactcactgaattcctcccctccctcaagggctaaaaccccatgattccggacgaactcctggagcactaactccggcgcaacggcttccactgccctgacctacgccttacaaggttggttgctatagctactcaaaagttcatttcagacgtcgcaagtgactcccttcagcattgcaaagccagggttgcagcacctatcanagacaacaagagcaaacaaccgaaggatagacgtcttgtattgacaatggatgatctttcaaaagccctgcgtgagcatggtgttaacctgaaacatccggagtattttgcggacagcccatc

SEQ ID NO: 2632 - DNA, 373 bp, Triticum aestivum
  Clone ID: LIB103-007-Q1-E1-G8
gaggctaacaaaggccgccgaatacatttaggccgcctcgatgctccaaggatcacacccaatagaaagtccccgaacgctccgattgggcaatttgaaaaactttaaggttcctttttttgtcagtcacatttccatctcttccaccataattcgggtacataacttgggagacattttatgctggctacctgtagcgtgtactcccaggatccactgtgctgctgttgtcgacaaaagctgtaactggttgctaagtgatttgcctacctggtatggcagtataaagcatatgtatcaatatcaagcgctaccacataagtagaagtttacaatgagtcgtcagacaacactgcgggtgtggtggttaaac

SEQ ID NO: 2633 - DNA, 414 bp, Triticum aestivum
  Clone ID: LIB103-007-Q1-E1-G9
gggtcgacgggacatatgaaatgaagaaggtgctgatacagagcagggagcaactggatctggtgaaggaggagatccgcgtttcgtccttgttcaaccaccccaatctgctaccgcttcttgaccatgccataatagcagttaagagtacacagggagattggagccatgaagcctacttactcttcccagtccatttggatggtactctgttcgacaatgctgcagtcatgcagtcaaggaaagagttttattcggtggtcgatgttttgcgaatattccaacagatttgtgaaggactgaagcacatgcatagtcttgatccaccatatgcccataatgatgtcaagcctggcaatgttcttgtaacctgccgaaaagggcaagcacctcttgcaactttgatggattttg

SEQ ID NO: 2634 - DNA, 427 bp, Triticum aestivum
  unsure at all n locations
  Clone ID: LIB103-007-Q1-E1-H10
tccatttatctcaattctattttcagacctcgatttcttggagatctccctccttagccaaccaaagctcttgatcttttaagaagcgaaggagaagtgctcgatctacacattcaccaaagcgaaagttgattcttcccttgtttttgtggtgcatcttgttactcttggaggttggagactcctaggcagtangagtgctccggcgaggaatcgaccattgtgatttcccccggaaagtttgtgagggtttggagaccacccaaggtttaccactagtggttgagaaacgccttggtggtgttgtctcaaagagagaatagggtgagccttcgtggcgttggtgccttcgtggtaacatccacctgtctaaatggtgacgtagcttccctccaaggaagtgaacatcgacatacatcctcgtctc

SEQ ID NO: 2635 - DNA, 219 bp, Triticum aestivum
  Clone ID: LIB103-007-Q1-E1-H12
ggggacgccatagcattagcattgctgtagtagggaggggtttcgttgctgtactgtactgtatttgtactactttatacgtacttggtagagtaagaagaagatggattggaggctcaagttcttgagcctacaactataacacttagagtcgcagtgaatggatcaatcacagcctgtgcgttgttgttattgtaataatcagtagcctgtgcactc

SEQ ID NO: 2636 - DNA, 367 bp, Triticum aestivum
  unsure at all n locations
  Clone ID: LIB103-007-Q1-E1-H2
gggtcgaccggaccggaggactatagtccgtangacgaacaactattacaacaatcataccataggctagcttctagggtttagcctccttgatctcgtggtagatccactcttgtaacacacatcttcaatattaatcaagcaggtcgtacggttttacctccatcaagagggcccgaacctgggtaaaacatcgtgtccctcgtctcctgttaccatccgcctagacgcatagttcgggaccccctacccgagatccgccggttttgacaccgacagtcacctcatcaccactcggccgccccacgcgtcgccatcagttggtcacctcataaccactccgcgaccccacgcgtcgcgataggtt

SEQ ID NO: 2637 - DNA, 425 bp, Triticum aestivum
  unsure at all n locations
  Clone ID: LIB103-007-Q1-E1-H3
gggtccacgggggcggataacaaaaccatcgcactaaaaaaaaatgcattattaaaattaagaaaataatacaagtatctatctaaacatacaagtaagaatatttttcctttcagaaagaagataagaacaagaggctcaccacggtggtgccggcgatgagatcgacgcgggtgatcgacggcggtgaagacggggacggggcgtgacggaccgctaaacctagacaaatattgaagaaaatggagcttggangtcgagcttggagaagagaaagcttaagtagtgtggctcgggcattccatcgaacaacttgtgtgcatangaagtgagctagagcaacacaaaccctctccccctcggcgggcagaanaaacagagcagtgtgctgtgctcttacgcgagggggtatatatangcgcctc

SEQ ID NO: 2638 - DNA, 415 bp, Triticum aestivum
  unsure at all n locations
  Clone ID: LIB103-007-Q1-E1-H4
cacggggccgcacaaaaaataatattttaaattcaacaagcattgcttaaacgacatcgacgacggtttcactgcacatgctgtggacgagcgagtttattcgagagctagatccttagtacattgagacgccacaaggcgggcacccgcaagaacattcttgtaatagttctcgggcttgctatgcgccttggtgtacgaatgggtgggcggatgggatgggagtggggaaacatggcttatggacgcgcttatctgaaatgtggggtaagtcacgaaattacccctaccgatttgagctaggcggttctttcggtttaagggtatcacgggcatttcacgtgtcgagatttcacaggaggtgggagtttttgcgcgcgttgtaattttggaatangaaggtgtgggttgagat

SEQ ID NO: 2639 - DNA, 396 bp, Triticum aestivum
  Clone ID: LIB103-007-Q1-E1-H5
agatgcagtgatacgagtcagaacataatacaagtatctatctaaacatacatgtatgaatatttttcctttcagagggaagataggaccaggacgctcaccacggtggtgccggcgatgagatcgacgcgggtgatcgaccgcggtgaatacggggacggggcgtgacggaccgctaaacctagacaactattgaggaaaatggagcttggaggtcgagcttggagaggagaaagcctaagtagtgtggctcgggcattccatcgaacaccttgtgttcataagaggtgagctagagcaccaccaagccctctccccctcggcgggccagaaagaacatagcagtgtgctgtgctcttacgccagggggttaatataggccctcattggtcccgg

SEQ ID NO: 2640 - DNA, 404 bp, Triticum aestivum
  Clone ID: LIB103-007-Q1-E1-H8
ggggccgcacaaaaaataatattttaaattcaacaagcattgcttaagcgcctatgaacaagttttcagtgcacaggataaaaacgagcgagtttattcaaaaattacatccttggtacattcatccgccacaaggcgggcacccgcaagaacattcctggaataattccccggccttgcaatgctccttccccggcggcggcccgtccttcacaagcttctcaccgtccagcttaccccagtgcacctttgcacgggcaaagggcccgacggcaccttttgatgcagacggagtgcttgatgacctcaagccttggacaggcctccaccagccgccgcaccatcccgaagtagctcccaagcagggcctctccgggccacagctgaactatgaagcctttcat

SEQ ID NO: 2641 - DNA, 437 bp, Triticum aestivum
  Clone ID: LIB103-007-Q1-E1-H9
gggtcgacacgtgtcactcatgaaaatcgaaacatttcaacaaaaataattatccccttgtacaattccattgtattgtaaaaataatgtgccaaggttttcctttaggatgtttacatttgcttgatggtttgtacggtgcaggacagaaactttggctgtagtgcacgattttacatttttagctggaacgtcaaatggttctgattctttttgcactgtcttcctatacaattttttttatttttcctaattttggtagaacttattaagtatcagaagtatggtgaatgttcagattgctacagactgttctgttttagacagattctgtttttgatgcatagtttgcttgttttgatgaaactatcaatttatatcagtggattaagccaatgaaaaagttatacatagtagacacaatgcaaaaacaaaat

SEQ ID NO: 2642 - DNA, 279 bp, Triticum aestivum
  Clone ID: LIB103-008-Q1-E1-A1
ccccggggagctccccaagcacgccgtctccaatggtacaaaggccgtcaccaagttcacctccccctagacggatgcgtccgtcgcctctagttggtatctgtatctgtagtgtcgactctgcttgtcactctgcaagtagtgctggtagtctgtgtgctgggtgctcgccaacgcttcgttggctgattggctgtatgaactgaagttgttgcatttggcagactgatatctatctagaactgaacttgtggtggtacttaaaagaaaccccgaatg

SEQ ID NO: 2643 - DNA, 365 bp, Triticum aestivum
  Clone ID: LIB103-008-Q1-E1-A2
ggtgccccagaaggcatcccctctttcttcaacaagtatcagtatgttttcgtattcgtttcgttcatgcaatatgtgcaagtcttggagcgtcttttgcatttagtgttcactttgcttttatgcaccgtgctggtatgagatagtccttggttgatttatagaatgctcattgcacttcacttaaatcttttgagtgtggctttatagaatgcttcatgtgcttcacttataggatgtgaagtctggattgtctgtttctctttccatagaaaactgccatttgtacaatgctcatttgcttcacttatagatgttagatcgtgggcatatcttttgtagaaattattaaactctcttgcttc

SEQ ID NO: 2644 - DNA, 355 bp, Triticum aestivum
  unsure at all n locations
  Clone ID: LIB103-008-Q1-E1-A3
ggacatgaaggaattcgcgactcataaataccagtttgaagcgccggatgatgtgagggttggtgctaaaagagttgcagttctccgcaatctttgccaaaaggtcggaataacaattgctgctcgcaaatacgatctgcattctactactccattccaaccttcagatatcttgaatctccaaccagttgttaagcactcagttcctacctgtactgatgcaaggaagcttatggaagctgggaaaatccggatggctgaaggaactctaaatgangcgtatgcactattttctgaagctttttctctacttcaacagatcaatggtcncatgcacaangatgctgcgaactgt

SEQ ID NO: 2645 - DNA, 55 bp, Triticum aestivum
  Clone ID: LIB103-008-Q1-E1-A4
gactatgacatcaactctgtctggaaagctgctgacctggcactgcattgcaagc

SEQ ID NO: 2646 - DNA, 374 bp, Triticum aestivum
  Clone ID: LIB103-008-Q1-E1-A5
cgcggtccgaagggcaatggtgcgaataggggctcgtccgcggccgaggacgagcagtccaccgcggcggtggcggtgcagctcgccaaggagtggagcacgtggacgatgaagacggcgaaggtggtggtgcactggggcttcatcccgctcatcatcgtcgtcggcatgactaagggagacgagcccaaacctagcttgctccagcttctgacccccgtctgattcaatccccggcgagccctagactggatcgatccatctccttttagttactactagtagatgtttttgctgtttattgaatcctggtggttgagttcttgatccctgggtggtgatcttttatctgatctgtgtctaataatgttatg

SEQ ID NO: 2647 - DNA, 325 bp, Triticum aestivum
  unsure at all n locations
  Clone ID: LIB103-008-Q1-E1-A7
ttggcgccaaaaggaaatttggtgaaaattgttccaacattgcttatgaaaataaagaaggaataataagagtacttcccccacaaaaagggactacatcttactcaagaaagaaaccaaattttagacaaattgtgtgaattgcaaaaatctattgagcctcttaaaaatgttgttgggaaccttcaccgtatgaatacattgatcactctttgtaataaagcggttggatgctctagatctaaaaatctccgagcatgaagggaaacgtaagaaacctcactgattcgagcacaactccattaanagataagtaccaaaagag

SEQ ID NO: 2648 - DNA, 252 bp, Triticum aestivum
  Clone ID: LIB103-008-Q1-E1-B1
gtttgaaaccctcggggatttatgaatccattacttcattcgtgaagcaaagcgggtgtgcggcgcctctgtactgggctatatcacgacgtacctcggaagcactatgtctgttgtgttcggcccggccgaatttgttgcatccggagtgaagatcattgtcacatgccgtagggcgcctgtgcgatccgtagatcgattttgtttgtcttgccttatcctccagtatgtctcgcaggtccgggccatttt

SEQ ID NO: 2649 - DNA, 470 bp, Triticum aestivum
  Clone ID: LIB103-008-Q1-E1-B5
ggggggggggcgggtggggggggggggaggggtggggggggtggtggggggggggggggggggggggggggtgggtgggggggggtggggtgggggggggggtggtggggggggggggggggggggggtggtgggggggggggtgggggggggggggggggggggggtggggggggggggggggggggggggtggggtttgggtgggggggtggggggggggggggggggggggggtgggggggggggggggtggggggggggggggtgggtgggggggggggggggggggggggggggggggggggggggggggggtggggggtggggggtgggggggggtgggttgggggggggggggggggggggggggggggggggggggggggtgggcggggggggtggggggggggggggggtgggggggggggggggtggggggggggggggggggggggggggggggggggg

SEQ ID NO: 2650 - DNA, 382 bp, Triticum aestivum
  Clone ID: LIB103-008-Q1-E1-B7
gaattcttctccaacggctgcggtggctgccgcgctctccaccccaagattgcgcagttcgctgagcggaatccggacgtgctgttcctgcaagtcaactacgagaagcacaagtccatgtgctacagcctccatgtccatgtcctccctttcttcaggtcctacaggggagctcagggcagggtcagcagcttcagctgcaccaatgcaaccatcaagaagttcaaggacgccctcgcaaagcactcgccggacaggtgcagcctcggcccggcacgggggctcgaggaggcggagctcttggctctggctgcaaacagggacctggaattcacctacaacgagaagccgacgctggtgccgatcgccgaggccatccaaa

SEQ ID NO: 2651 - DNA, 209 bp, Triticum aestivum
  Clone ID: LIB103-008-Q1-E1-C1
gtaaaaccgctcattcggtccgttgaaatttggtataaacgttgccggtaaaaataggttttccaagctgaaaagctcaagtagtacaaatgtacgtaccttgtatgacatgctacctgattcttgttcatttaccaagacttgcataagaataaattattaaatattatggaaaaaaaacagaaggtgttgcaaaataaacaaagcaa

SEQ ID NO: 2652 - DNA, 355 bp, Triticum aestivum
  Clone ID: LIB103-008-Q1-E1-C2
cctgttaagactttagcatgttgtaaaacaacacatatgcatataataatatctaaagatgtataaacaatggtagaaaatatatttgattggaagatctgacagatgataaggcacttgagttcgcctatacttatacacacctgaaaccagtatacgcctcgaaactataacttagacaaaactaatatttcatatgattccatactttctaactttcgaccacatgtctgcactgtgatgcctccttatcctcaataatccatcaacggaaccagtgcatacatagtgatgaccaagcataactatcgcctcagaatacataatataatagattgaattacgagtagtgtgt

SEQ ID NO: 2653 - DNA, 375 bp, Triticum aestivum
  unsure at all n locations
  Clone ID: LIB103-008-Q1-E1-C3
attcncggaccgacttcaacacggagtcacatgaagctgcaaaagacataacagcagagttgctagaatccttgatcgatgaaatggttgctgaccttctatattggtagtttggtcatgcaattattgtgcattttgtttgtcgagaactacaacaggggccctaacctgcccaccatttgatgatagatcagcggctgtcagagccattgtctaccttttttggggaccgtttcggttgtcatgatgcagaaaatagcgaggcattgtaatttttttctttccttactatggcccattgttaatgaaaatagctggtactgtatgttgtacaatgtggcattttagctgtatgaatggtggtctgttctttgc

SEQ ID NO: 2654 - DNA, 191 bp, Triticum aestivum
  unsure at all n locations
  Clone ID: LIB103-008-Q1-E1-C4
caagtagatgttttagattggtcttgctgtttgattagacaggaagagttcagtgacnagaagcatttcagtttggtgtcgttcttatatcttgctgctgaatatcactgctacttgccattagtgccttgttgctgactttcaatttcttgtatcctggaaatgctttctaagtacataatatcatatgc

SEQ ID NO: 2655 - DNA, 417 bp, Triticum aestivum
  unsure at all n locations
  Clone ID: LIB103-008-Q1-E1-C8
accggtcgagccattcccgggccgaaagggaagagatccgtcagcacgacggcgtggtgatgatcttgatgcactacagcagcagggcttcgcctaaactccgctacagtattatcgaggaatatggtggctgggggcatcgcacacggctaaggaatagatcacgtggatcaacttttatgttctagggtgcctctacctcagtatataaaggactagaggggggaaggctggccggccacaggaggcgcgccaggagagtcctactccctctgggagtaggatcccccccccccccaatcctagttggaataggattcgcagagggggaaaagagagagagggggccggccacctctcctagtcctaataggactaggggaagggggaggcgcgcagcccatgtanggctgcctc

SEQ ID NO: 2656 - DNA, 363 bp, Triticum aestivum
  Clone ID: LIB103-008-Q1-E1-D4
taccggtcaagcaattcccggagcgacgggaacctgaagattggcaaggccatgaggtggtgggagaaggtgacgcaccccaacatgagggaggtcgagtccgcgcacgagctcgcctactccctgctcaacgccggcgacaagctcgtcgtcgtcggcttcgtctcccccggctgcggtggctgccgcgctctccatcccaagattgcgcagttcgctgagcggaatccggacgtgctgttcctgcatgtcaactacgagaagcacaagtccatgtgctacagcctccatgtccatgtcctccctttcttcacgttctacaggggagctcatggcacggtcagcttcttcagctgcaccaat

SEQ ID NO: 2657 - DNA, 306 bp, Triticum aestivum
  Clone ID: LIB103-008-Q1-E1-E3
gtggcgtcatgggctccaactcgcaggcgaatatcaatgtcaggcacacgctcatcgccatggacgctgcgcagatgattcactaagcctagccctacaagtattgtcacatcagtctccgtttctgtcccccttcactctgtcctgattttgacgaggaatgctcccgctttaatcagtactgttgaatcgttgtgtcggtttctgacattgcggtaccaacgacctcctgggcagtccactctgaccattgtttcggccctccagttggggaaccccgtttccatgtccccagctggctggtca

SEQ ID NO: 2658 - DNA, 264 bp, Triticum aestivum
  Clone ID: LIB103-008-Q1-E1-F1
tcgcagagctcaacgcccgcggactaactgaacggccttcgcttcacttcaggtaccgctcatgcaatgtgcactcgcctcgccgtacgtcagttgtcaatggctgctcatatctgaagccccgtaaatactgttaacgcccatgtgggcgctctctctgtccgggatctctatgtggatctgtgatatgacgtgttagtccgaatcggagtgtgacactgatatcatgagtcagtaataatacatgtgcttgagaactgccaa

SEQ ID NO: 2659 - DNA, 430 bp, Triticum aestivum
  Clone ID: LIB103-008-Q1-E1-F11
gggtcgacgcctgcatcaaaaccttcggctgcggctccgcaatcgcgtcgtcctccgtcgctactgaatgggtgaagggaaagcaaatggaggaagtagtgagtatcaagaacactgagattgcaaagcacttgtcacttccaccagtaaagctccattgcagtatgcttgctgaagatgcaattaaagctgccgtgaaagattatgaatcaaagaaggcgaagctgggagacagccctgcagagaaggctgccgaagcatgaacatgatatatgcttctgttctatgagggtgagaaatggtgtgcaatgttgacaaactccagtgttgtagcatgtatcataaggatgaacacgaacaacttgaaataaatgtgatgtcatgttaggagaagttgtgcatgtatagcagctgctaagaaaatttgtgc

SEQ ID NO: 2660 - DNA, 445 bp, Triticum aestivum
  Clone ID: LIB103-008-Q1-E1-F12
gacgggatatgccagatggcgcagaagcttgtcaacatcataaagcagatggatcccagggaccctttcagaatcgagatgacggacatgctgatcgataagctgtataatatgggtgtaattccaacaaagaagagcttggttaaatgtgagagactttcagtgagcgccttcgccaggcggagacttgcaacaattatggtgaagctcaagtttgccgaacaccttaaagaggctgtcacctacattgaacaggggcatgtgcgtgtaggcccagagacggtcaccgatccagccttccttgtgaccaggaacatggaggacttcatcacctgggtggattcctcaaagatcaagaagaagatcatggagtataatggtgcattggatgattatgatgccatgatttaaggatatgtcgtgatagtagaaattttgggaacat

SEQ ID NO: 2661 - DNA, 391 bp, Triticum aestivum
  unsure at all n locations
  Clone ID: LIB103-008-Q1-E1-F2
attcgcgagtcgacggggtctgtcagagccgacgaagaatccggtagcatggaccgcgttgcgggggcatccggctcgtcctcatgcttgggaaggacgacgacganggcggcggtcgtcctgcacaccatggcatagctcggggagganggggtggccgcgggtatgccggagccacggttaccgcggcgctcggctccggtccagatcgaaagagaggcgagtgaagggaaagtgggactgctacggttcgaggtagangaagcgggggccatgggttgctcttatccaccaaggaaaacgtcggggaggcgcgggatggctgccatagcgtcatcggtggccatggcaccggtggatcgtttccacgattcctgtgtgtgaacaggga

SEQ ID NO: 2662 - DNA, 268 bp, Triticum aestivum
  Clone ID: LIB103-008-Q1-E1-F3
ttcccggaccgacggggcccggaagatgttggagaaaaccggagaatgagacactgtcaccttacgaactaagtactgttattttgttggtgttggcatatgtaccactggttcttatgaccttgaatgtactagtagttagcacaagaaagagtggcgcaatattcttttgtggcctcggtgcccctatgttgttaccttcatgttgattctcttgacgattcaagtcaggcatacaaaattcgttgtcaatttcccacggtcaaca

SEQ ID NO: 2663 - DNA, 375 bp, Triticum aestivum
  unsure at all n locations
  Clone ID: LIB103-008-Q1-E1-F4
caaatttgacaatgaaaaagatcttgacgccatccgcagtgctgtcctgcgctacaacgttactcatccagttgtaaatgacggtgacatgtacttgtggagagaactgggggtgaactcttggccgacgtttgtggttgtcgcgcccaatggaaaggttctagcacagatatcaggcgaaggccacagaaaggaccttgatgacgtagttggtgcagcacttgagttttatgatgaaaggaaattactacagaataattccctccccttggcgttggagaacgacagggataatcgactaataacttcaccactaaagtttcctgngaaacttgcaattgatgtacagaacaatcgattacttatatcagacag

SEQ ID NO: 2664 - DNA, 378 bp, Triticum aestivum
  Clone ID: LIB103-008-Q1-E1-F5
acggtcagcaattccgggccgaagggtcggccaaccagcggcggttcgccatcgagtcccccttcttcaccgccgcgagaggcttttcttcggctgaaacacttgttccacggaaccaagatgctgggttggctgaactcccagccactgttgctgcactgaagaaccccaactcaaaaatcctttatgaccagtacaaccatgaaagatatcctcctggagatcccagcaagcgtgcctttgcctactttgttctgagtggtgggagattcgtatatgcatcactgctgcgtctccttgtcttgaagtttgtcttgagcatgtcagcaagtaaggatgttcttgcacttgcttctcttgaggttgatctatccagca

SEQ ID NO: 2665 - DNA, 424 bp, Triticum aestivum
  Clone ID: LIB103-008-Q1-E1-G12
tatcctaactcgtatcacctttgatgatcttccatcgagaagcgcaacacggttggcaaggagatagcgcggctttaggccgctgagttcatctgagaggtgtaccactccgagtggctcgccaacgtcgtcatggtgcccaaaaagaataactccctccggatatgtattgattttaagcacatcaatcgggcctgcccaaaagatcatttccatcttcctcgcatagatcagatagtagattctactgccgggttagagcggttatcatttttggttgcgtactccgggtaccaccaggtccgaatatatggtcctaatgaaataaaaacagcgtccattcgggtgtttttgttatatcactatgccattcgggttgaaaaatgttggggccatgattcagcctatgattcagaagtaccac

SEQ ID NO: 2666 - DNA, 394 bp, Triticum aestivum
  Clone ID: LIB103-008-Q1-E1-G2
actcgtgagtcgatgggcgcccggacactaaatcaataaacgtgcatattgactaagttgacaaagccctccgtccccgtcaacttagtaggcccacaagtcagcctctcactatactaagtctcagctagcacggggagtattcatttttgtgtgcgtaataaggatgcacttccttgcgtgcgaagatatagctggtgggtccgagctgtcagcggcggtaacatttttttcgcaaaatacagacgccctttcggtgggtcccagatgttacgtggaggaatcattattttgcgcataataatgatgcatgtccttgcatgcagccgtggacccagctgtcagcctctccacgtacagtccacttcagatgcatgtcggtcgttgaccacat

SEQ ID NO: 2667 - DNA, 372 bp, Triticum aestivum
  Clone ID: LIB103-008-Q1-E1-G3
gacgggagactaaaatgatggaaaatagacccggggggcatacgtttcactagtggcttctctcgagagcataagtattacggtgggtaaacaaattactgttgagctattgacagaattgagcatagttatgagaatatctaggtatgatcatgtatataggcatcacgcccaatacaagtagaccgacttttgcctgcatctactactattactccacacatcgaccgctatccagcatgcatctagagtattaagttcaaaagaatagagtaacactttaagtaagatgacatgatctagagggataaactcatgcaatatgatataaaccccatcttgttatcctcgatggcaacaatacaatatgtg

SEQ ID NO: 2668 - DNA, 393 bp, Triticum aestivum
  Clone ID: LIB103-008-Q1-E1-G4
gtttgtcaattgctctagtgcttcacttatatccttttagagcacggaggtggttttattttgaagaaatagatgaactctcatgctttacttatattattttgagagtcataaacagcatggtaatttgctttggttatgaaactagtcctaatatgataggcatccaagatgggtataataaaaactttcatatagagtgcattgaatactatgagaagtttgatacttgataattagtttgagatatacagatggtgataatagagtcatgctagttgagtaattgtgaaatttagaaatacttgtgttgaagtttgcaagtctcgtagcatgcatgtatggtaacagttgtgtgaccaatttgaagcatgaggtgttctttgattgcct

SEQ ID NO: 2669 - DNA, 280 bp, Triticum aestivum
  Clone ID: LIB103-008-Q1-E1-H1
ttcccgggccgaagggggttgaaagcttcgtgattgtttatcgctgttgggtgcggtggtccgcggtccggtgtgctctgcccgtgtgtcctttgtgtgggttccgtttgttggctccggtcggctgtgccgggtcgtgtcctcttgtctgggatgtcggtgtgatgtgccaggtgggttcatcatggtgaagctgtggtcgtcaatgttactaacgatgtggaagcagcagatcaccatcctgattagcctgatgctcaggtggaagaggaggacgacg

SEQ ID NO: 2670 - DNA, 457 bp, Triticum aestivum
  Clone ID: LIB103-008-Q1-E1-H12
ccgggtcgacgggctatctcatctccaacgacccttctcttctcttctgacagtcggggcaagggctgcctgactggcttggcatcaggtcggacatgtagcttgtgctcggcgaaatccgtcggaacacccagcatgtccttaggagaccatgcaaagatgttccgattctcacggaggaaatcgacgagctcgccttcctatttgctgtcaagatttgcgcctatgacagcgtgcctctctgggtgctccgggtccaagggtaacttatttgcttcttttgccggcttgaacgagccctcagcttccgactccttggggtttggcgacatttccggctgcttgcctgccattgccaccacccggtcaaggagccgcttctctgctgcaatcacgagggactcggctagccggctgctgtctgccgcgcaagcggacgacttcttgtagtctccga

SEQ ID NO: 2671 - DNA, 366 bp, Triticum aestivum
  unsure at all n locations
  Clone ID: LIB103-008-Q1-E1-H4
attcccggactcnatcgcggtccaacgggagtgccaggtggctgcgctgggcaagctgggcgtggagaggtgcacggtggtggggttcagctacggcgggatggtggctttcactatggtcgacgtgcacccgggctccgtccgctcgcacatcgtctccggctctctcttcactatcagtcactctatacagtcataaatgctggagaggatcggcgtcaagtcgtcagcggagctgctgctgccggactccgtcaaggtgctcaaggcgctgctctccatcgccggatagacgatactctggttcccggaacccgttcacagggactacctccaggtgatgttcagcattcgcagcgaaagatc

SEQ ID NO: 2672 - DNA, 308 bp, Triticum aestivum
  Clone ID: LIB103-008-Q1-E1-H6
attcccgtcccgacgggcgctctagactgtgcagcggtggatgcttctgaggaagcacgtgcacgggatctaaggttaagtgcgggcgggatggaggatttacacatagtcgacgtgcacccgagctccgtccgctcgcacatcgtctccggctctgtcttcactatcagtcactctatacagtcataaatggtaaaacacgataggtatcaaatttaatctggttgtactacatccaggtttcgtcagctggcgcaacgcacaactcgccagcaccgatcgcacttcgcaacagttcctgaaactga

SEQ ID NO: 2673 - DNA, 392 bp, Triticum aestivum
  Clone ID: LIB103-008-Q1-E1-H8
ttccggaccacgggggtcaaacggagtgccaggtggctgcgctgggcaagctgggcgtggagaggtgcacggtggtggggttcagctacggcgggatggtggccttcaagatggccgaggcgcacccgggcctcgtccggtcgctcgtcgtgtcgggctccgtcgtcgccatgacggactccatcagcgagaccacgctggagaggatcggcgtcaagtcgtcggcggagctgctgctgccggactccgtcaaggggctcaaggcgctgctctccatcgccgctcacaggaaactctggttcccggaacgccttcacagggactacctccaggtgatgttcaccaaccgcaaggaaagagcagagctgctggaaagtttggtggtcagcaac

SEQ ID NO: 2674 - DNA, 228 bp, Triticum aestivum
  unsure at all n locations
  Clone ID: LIB103-009-Q1-E1-A3
caatattgttgactagaaagtaagtanggcaacaagtaggagaatttaacttggctgtgttttcaaaagaagctggcgcacctgaaagctgattttgcatgtttttccccatgcatgtatgtaagcttccaataacgaagcaaccaatgatcttattagtgataccattatcatcactaggtaaggtttatgatgtggtgcttaaaaaaaaagaagaatttacaacac

SEQ ID NO: 2675 - DNA, 415 bp, Triticum aestivum
  Clone ID: LIB103-009-Q1-E1-A4
gggtcgacggcgaacactaccatgagtcataatatgccgccgaagtccaaggagggcggcgccgacaagaagaagaaggccaagaagagcgtggagacgtacaagatctacatcttcaaggtgctgaagcaggtgcacccggacatcggcatctcctccaaggccatgtccatcatgaactccttcatcaacgacatcttcgagaagctcgccggcgagtccgccaagctggcccgctacaacaagaagcccaccatcacgtccagggagatccagacctccgtccgcctcgtcctccccggcgagctcgccaagcacgccgtctccgaaggcaccaaggccgtcaccaagttcacctcctcttagataatctgttctcgtatcttcttggtcgttcgatggtactctgtaatac

SEQ ID NO: 2676 - DNA, 391 bp, Triticum aestivum
  Clone ID: LIB103-009-Q1-E1-A5
tgtacgacgccaacatcctcatcaacaccgcccgcctccacgcccagcgctacgcgctctcctaccaggagcccatccccgtcgagcagctcgtccagtccctctgcgacaccaagcagggctacacccagttcgggggcctccgccccttcggcgtctccttcctcttcgcggggtgggacaagaaccacggcttccagctctacatgagcgacccctcgggcaactacggcggctggaaggccgccgccgtcggggccaacagccaggccgcccagtccatgctcaagcaggactacaaggacggcatgacccgcgaggaggccgtcgcccttgccctcaaggtcctcagcaagaccatggattccactagtttgactgccgataagct

SEQ ID NO: 2677 - DNA, 405 bp, Triticum aestivum
  Clone ID: LIB103-009-Q1-E1-A7
cggggaagaagaagctgaaccccatgcgggatatcaaggtgcagaagctcgtcctcaacatctccgtcggtgagagcggagatcgcctcacccgcgcctccaaggtgctggagcagctgagcggacagtcaccagtgttctccaaggctaggtacactgtcaggtcgttcggtatcaggcgtaatgagaagattgcgtgctacgtgactatcaggggtgagaaggcgatgcagctgctggagagtggcctgaaggtgaaggagtacgagctgctcaggaggaacttcagcgacaccggctgctttggcttcggtatccaggagcacatcgatctcggcatgaagtatgatccatctaccggcatctacggtatggacttctttgtggtgcccgagcgtgctgggt

SEQ ID NO: 2678 - DNA, 324 bp, Triticum aestivum
  Clone ID: LIB103-009-Q1-E1-B4
gacggcccatttcagggttcatcttaccgcagcgctttgcatgcgccccacgggactccgccatgtcgaggcactattacgggattatctgcggggaacagattcccgctgtcgcctggtctgcccgtggcagctaccgtcaactgcgccgacaacactggctccattaacctgttcatcatctccgtgaatggcatcgacggaaggctcaatcacctgcccttgggctgcgtcagtgacatggtcatcgtgaccatcaacaatggcaatcccgacctcacgaaaagggtcatgcccaccatcatcgttctccagccacaagcc

SEQ ID NO: 2679 - DNA, 423 bp, Triticum aestivum
  Clone ID: LIB103-009-Q1-E1-B5
ggtcgacaggacaagaaattgacttacatatcactgatagaaaaggagtcgagaaccccgtagctgataacttgtctaggttagaaaatattcttgacgatccacaacctattaatgatagttttcctgatgagcaattagccgcaattaatgtttctcataacacttgcagcgacccgacctcggacggtcaagtctctgtccttaagtgtcatccctggatcggtatgctgacacacacagtactcgaggatttataacagaggtaaatcacatgtataaactaacgtaaatactattacctcaatccaaatagcggaaataacaacaaggttgtggattcccatcaacaccaacggcaaggttgagtgtggaaatcgtaaccttaatgtatcatttactcgtcataagaatcctgcaaca

SEQ ID NO: 2680 - DNA, 366 bp, Triticum aestivum
  Clone ID: LIB103-009-Q1-E1-C3
gggtcgacggcgaacggaaccgccgacgcagctgccaaggaaagacgcatcctcccacattttcgggcaacgatatggctccgacaacgccgtgatcttgacctaatagggtgtattagaaagataagaagaggacatttgcggatgtgttttccactgttttgtgcgaatataatgtgctgtgtttgtagcgaagagacggagtacatgtgacgtccatcgacccctccgtaatccggctacctggacagagtttgtttgctcctgatgtaaagtggtgttccacgtttgattagttcaccgaagcgtactattttcactacctgtgatcagacgttgtagtatagactttgctggtctgtgttg

SEQ ID NO: 2681 - DNA, 392 bp, Triticum aestivum
  Clone ID: LIB103-009-Q1-E1-E4
gggtcgacggctacggttgagacggggacactccggtttcgccgggaaagaaaggaaatgacaacgcgcaaagcatttccaataccaaggtgaatgcttctaaagttgagcaataggaaaccggttctgatcatgaatgcaagccaaaatctcataagacaagtccatctgccgccaaacccaagatttccaagagttaagaaaccaaacgatgaatatcatacaaacgacgaaaggaacataaggaatgaacttgatatcaacaaagatgaataaaaggctgctgtggtgaaggggggctattgtggtgaagaaggatagaaagttctattaaatgccatagcagttacatgatcctcatcctgaaacggatccagtgaagatattttatg

SEQ ID NO: 2682 - DNA, 439 bp, Triticum aestivum
  Clone ID: LIB103-009-Q1-E1-E7
cgggtcgacgggcataccgaagccatcatgcttgttgtgagaagctccggtttgtgagaagtatatacccattaatgggacaaagaatttaccacggcattttgatgccgctccatgagatcatgccaagtttcatgaatttcagacgagttttgaattcaccagaatgtaaaaactaggcattccaatgttttgctggcaatcaacggtaccctggtgttggagattcattcccagttcttgcagttgatgtcaacatggatgaaaggaaaggtggttgggttgttcgggcgatttttgtgaaggaaggagagaagttgttttaattgccagggcagaaacattattctcctcctgaaagggatccattgaggatattttatgaatcgctctatgagcaagtgtccaatagtgaaattggtgcattttgggttgaggg

SEQ ID NO: 2683 - DNA, 444 bp, Triticum aestivum
  Clone ID: LIB103-009-Q1-E1-F3
cgggtcgacggggatcaagagaccgcgtgggaggccgagaaaggagagaccgccagaagaaatgtctacagaaactggagatgcaatgcctgctcctgaaactggagatgcagcgcctgatgaaaatggagcagcaatgcctggtgaagctggagatgcttctccaactggattcaagaaactgcgtgggaggccgagaaaggagagaccaccagcatcaatctctgctgaaactgaagatgcaacccctgctgaggctggtgatgcaaggcctgctgaaactggagcagcaacgcctgctgaagctggaaatgctgcatcgacaggtatcaagagaccgcttggaaggcctagaaaggtgaagaagcttgggaagccaagaaaggagaagccggaagcagcaatatctggtgaaaacggagatgatgctgcagcagctatatt

SEQ ID NO: 2684 - DNA, 401 bp, Triticum aestivum
  unsure at all n locations
  Clone ID: LIB103-009-Q1-E1-F4
cgggccnacgggccggaccaccatgaggtctatcgtggatcatctgtggccggaaaggccaaagtcgaacaactattttagccttggtgcaacagttccttggtgtggtgccacgttttaatgcgaagaagaggtcggcgtgcatagaaggctcgcggatggcccttgcccgtgtcaaaacatactgggtggagatggatgccaccactgtcgcggtgtanggttcgaccataggccgagtggcagccgagcactattttgaagaagttcttgaaggcgctccttcgatagaggcccaatgctcgaagaatgttatgtttgagtgacatgtaatcccattgtaacgttttagtgaatttatcaaagctgtatttatactttttcccgaaagtattgtgatg

SEQ ID NO: 2685 - DNA, 423 bp, Triticum aestivum
  Clone ID: LIB103-009-Q1-E1-F8
ccgggccgacgggcgacgataagggcgtcgaagcggccgctcggcgtggtgatggcgtgggtgcggcggcagccgcccaaggtcaaggccttcctcgccgtggtcaccggcatggccgcgcttgtcttcatccgcttcatcgtccacgaccacgacaacctcttcgtcgccgccgaggccgtgcacgcgctcggcatcgccgtgctcatctacaagctcaccaaggagaggacctgcgccggactatcccttaagacccaggatttaactgcattgtttctagctgttagactatactgcagctttgtcatggaatatgacatccatacagtgttagatactgctacacttgtggctacactttttgttatctacatgattcggttcaaacttaggtcaacttatatgctggacaaggacaac

SEQ ID NO: 2686 - DNA, 438 bp, Triticum aestivum
  Clone ID: LIB103-009-Q1-E1-G6
gggccgacgggctggcatgatcgctgcctccttctcctgcgaaccggccttctgtccaccacgacgcgacggcttgcgctccgcagccttggaaaaccccttctctccaccacgacgcgtcggcatggtcgccgccacctcctccgacgaaccggccgagaaagaaggcccctttcgaaccctagcttccgactcggggcgattcagactggggaggagacgacgccgcgtcttccatctatagggagcgaagcctagtcggtgtcggctcgctcttgggctccaactaggcttctcgtgccacgccggccaggtaagcgcccgatgcggcccggccagcccagcacccagacgcacgattccatcctctcgcctgaagagacgttgtaatgggccagcccagtagcactttttgttcagctcattttttttgtccgc

SEQ ID NO: 2687 - DNA, 438 bp, Triticum aestivum
  Clone ID: LIB103-009-Q1-E1-G8
ggtcgacggcacatcatgtgacagagaacaaagttaatcttgtcgagaaagtgaatcccaaagttgagctatttgctcaagcacgtgattgccttctcccaatgggccttacctccgagaatgttgcacagcggtttggcataacacgcatggagcaagatcaagctgctgttgagtctcacaggaaggcagcggcggcagttgctgctggtaaatttaaagaagaaatagttccagttaatacaaagatcgtggatccaaaaactggtgaagaaaaggagattgtggtctcagcagatgatggaatccggtcgaataccacactggcagtcctgtcaaaacttaaaccagcattttccaaggacgggaccactactgctggaaatgctagccaagtaagtgatggagctggatctgtcccactaatgaggcgagatg

SEQ ID NO: 2688 - DNA, 413 bp, Triticum aestivum
  Clone ID: LIB103-009-Q1-E1-H2
gtcgacggcacatcatatatttaaagaacgtcgaacgtgtatctgaaaaatgtttgacgtctgctctaaaaatgcatattttataccgagaaatagtgataaaacagcacacctatatcaacaaacgatccaatcagataaccagagaaacaaacagtaaggaaacaaggataatcaaagtatagcatacagaagatgaaaacaaatgttcacatcgattaaattgatttgtagttccattaaaatttgcatgtgacatttttggaaacaatcacatgtttccaaacaaatccatgaagaaattcaagtagattttcacaaagaatacaaatgttcctgtagtttttgtcttaaagattgattacttccattagcatataaaacttatgtttgggaaatgttgccatgtatgc

SEQ ID NO: 2689 - DNA, 399 bp, Triticum aestivum
  unsure at all n locations
  Clone ID: LIB103-009-Q1-E1-H4
ggtcgacatgaagaacatcagcaggacatggccaagctgagcgaggacatgaagaagctgaaatccgagtccgaagatcaccagaggaaagcgtccgatgcagaggcccatgtcaatgccctgcagaagcaatctgaagagctgctcctcgagtacgaccggctgctggaggacaaccagatcctgcagtcccagcttcactacaaaggctgaactggttgacccgcggcatgtagctatctcgaactcgaagcgctcatcgccaaggctcttgatgtggtccttggctttcattcccctctctaacttatggtgatatggatggatgtactctgtgctctgtantttgttttgaagcactgaaaagtcagggatggtgagatggatatgggagaaaga

SEQ ID NO: 2690 - DNA, 426 bp, Triticum aestivum
  Clone ID: LIB103-009-Q1-E1-H6
tccgggtcgacgggacccaatattagttttgttctttactttttgttcttgtttagtaataaataatttatctaccctatgttattattgtgtttttatgttttaattagtgtttgtgccaagtaaagcctttaggatcttcttgggtgattattgtttgatcttgctgataaaaacagaaagtatgcgctctcaaaaataattttcattttttaccagagagcgataaaataccaattccaactgcagtagatcaatatacaaattatttaggtccttctaatttttttataatttttggagttacagaagtattcgaaacctccagatttctacagactattatgttttgacagattctgtttttcgtgtgttgtttatttattttgatgaatctataagtagtatctggggtatgaaacatag

SEQ ID NO: 2691 - DNA, 390 bp, Triticum aestivum
  Clone ID: LIB103-010-Q1-E1-A1
gggtcgacgccaagaaaggcttctatcaatgtatcatcagtatcaatcactacatgacaccacacaacagatatgctgctgtcagcagtcctctctaaatagacactgcaattatcgtataagtacatcattgctgctgtcagcagtgctctctaaatagacactgcaattatcatgtacatcattgctgctgcaatgaaccattaagaattatttaaaatctagcctaccatctgcgttgtcgtcaacagagggttgaggcggagttacaaaatctgtatgagaaaccgagggattgtccgagtcagcgacatctttgttatcttcagagctgtcagaagcagctgagatggcgtcacctgattctgaatgtgttctgtccacatatgc

SEQ ID NO: 2692 - DNA, 427 bp, Triticum aestivum
  Clone ID: LIB103-010-Q1-E1-A10
ctcgcgcgtcgacacacgcatctagttcgttcagaataaaaatcagaatgaagctgttcatccttgccgctgcccttattgtggccacaagtgccaatctaggtgccttcgaaaaatggaccagttttaaggcaacccataacaaatcttacaacgttattgaagacaaacttcgtttcgctgttttccaagacaacctcaaaaaaatcgaggaacacaatgctaaatacgaaagtggagaagaaacctactacttggctgttaacaaattcgccgattggtccagcgctgaattccaagctatgttggcccgtcagatggctaacaagcccaaacaatcctttattgcaaaacacgtagccgatcccaatgtccaagctgtagaagaagttgattggagagatagtgccgttttgggagtcaaaga

SEQ ID NO: 2693 - DNA, 328 bp, Triticum aestivum
  Clone ID: LIB103-010-Q1-E1-A11
acgaatctacccagacttctgccaacgcgtccgcccacgcgtccgcccacgcgtccgtgtgcgtgtcatccagcgtgcggggagctgatctgactcttaccctgttttatgaaggaaggtgccctgcttgtcatgaatttattctaacacagctatatccttcatacgctaaattaacagatagcttaaaattggacctagtgccctttggatggagtgaatcttcacgtagcgcaaatggaagagtatcatttacttgccagcatggtgatgaggaatgttatattaacagaatacatgcttgtgttcttgatcaaaatccaacctc

SEQ ID NO: 2694 - DNA, 329 bp, Triticum aestivum
  Clone ID: LIB103-010-Q1-E1-A3
caaagattattaattcgaatgtgaagtctgaggccctttaccgttgatttgctcttgcaattaaattggatctgccatttcccctgttttgctcgactagccgacaaataagcaaacctgtatcataacctgaaagccaggtgccatgtttttgtgcctgtgctccatctgttgtactagcatgctccagggtaaaggtttacggcatgtttttgcgattattaaaatgttttcgactctgatggcatcgtgaacataatactggctgtggagttacaatttccctgtcaatacaaaaactcctgggtatgtgtaacacagatacaaac

SEQ ID NO: 2695 - DNA, 420 bp, Triticum aestivum
  Clone ID: LIB103-010-Q1-E1-A4
gggtccgacgggatcatccaaaagtatcggtacagacacctctgaagtatattggaattgacgtttggcaggtaaaatccggctcagtatttgacaacattctcatttgctatgacccggaatatgcataacacgttgccgatgaaacatggtgtgcaaataaggaagctgaaaacgaagcttttgaagaagctgaaaaggatacgaaagctagagaagataaggaagctcaacaagcaagggatgaacgatagcgacggacgagagagaggggtgatcgacaccgtggtatggaccattacaaggacagatacaaaatacgcaacagagatcactgggatgactaccatgatgagctttgaagccccccaaaatcttcaattcttccaaggagaaactgggttttgacacagacattgt

SEQ ID NO: 2696 - DNA, 390 bp, Triticum aestivum
  Clone ID: LIB103-010-Q1-E1-A5
caaagattattaattctattgtctaacttcatttcgttttagactaagttctaaattagaactgagccaaaagacaaagtgcacgtgagggtgcacatataccaggtcatgtcaacttgctttggttttgggggtcgtcaggtcaacttgctaacttagacggcttgcctaccttcctatttttatcttctgagtatctacctaatcctgtttgaaggcgattaattagaagcctctatttatttaaggacaccaatatcaatctgacatcagatttaggaggggactccttaaaattaggctttcacctcattttataaataaatcaatcatcaggtacaggatcaccgagataaccaaatctgctagggcatcagcacaagcacaccc

SEQ ID NO: 2697 - DNA, 410 bp, Triticum aestivum
  Clone ID: LIB103-010-Q1-E1-A7
cgccggtcgacgctccttactgcggagatgctccatgatgacgaatctacagaagctgtcaaggatggatcaggcagtgttgagttttccgtccttgttgcggatggttcaggttgtcatccttccgttgaggatgttcaagatgagagaatcacagtgactgatgatgtacgaggggatgtagagttgatcccactgatgaatacgaacagaacagttgggtgatcatctttttcgtaagagggttgattcatgattcatttacgccacgatcatctgattatacgcgtcggtagctgttgctaggaatgtacataagttcttaccgcctgtttagctgtagtttgtagacgttaaatcaactgattagcaactgaagcatacattttcttcgttctttcgtttttgcg

SEQ ID NO: 2698 - DNA, 414 bp, Triticum aestivum
  unsure at all n locations
  Clone ID: LIB103-010-Q1-E1-B1
gggtcgacgcgacacatgtgctgactgaggaatcagaaagggaggcgatgtgcgaggatgacggaaagaaaaaagttgagccggatgattgggaggatgcagcagacatgtctactccaaagctggaaagttcggactctggaaaccaggctagtgcagttcaactgccagattctgatatgactgaagctaatggccgaaagaaatattctcgtgattttctgctaacttttgcacatcagtattctagtcttcctgttggcatccagatggatactgtcactagtacgctattcaaagatttggcaggaaaatcctatgttattgatcgggaacctcacccaagttctgcaaggggatctgatnagacaacatctcgtggtgatcgccgtggtcctgctatggatgatgata

SEQ ID NO: 2699 - DNA, 378 bp, Triticum aestivum
  Clone ID: LIB103-010-Q1-E1-B10
ctcgtcggtcgatacacgccactagaatatctcgaaccatgtttcagcccttgtggctcttgcagtagctacccctttagaacaaagtccagaaattaaattcattgagaaaggcattagtggagagggaacaactacccgttattgggattgttgcagaccttcctgctcatggaggggaaacgtacatacacctagcggagtaccagttgcctcatgcgatagatctggagtgaacagggttgatgataatgcaaaatcaggttgtgagggtggcggcagtgcttacatgtgcaacagtcaacaaccatgggcagtaaatagcactttggcatatggttttggtgccgcgtctttcagtaacgggattgatgtttc

SEQ ID NO: 2700 - DNA, 376 bp, Triticum aestivum
  Clone ID: LIB103-010-Q1-E1-B3
ggaaagggcaaaaattataaaaacaactgaataccacaagattataacacaggaaccaaattacaatttaccgaattccggtttcgggaaacacaatatcatccaggcaaaaaatttaacgcaaagtttgcgatgtaacgcaccaaagtcaggagcggctaccataagaagcatatataccatgtctggttcatacttcagcacatctaaaatacttccactcgccacacgcattgtgcagcagatgcaatgcctggttcctacttcatcaaatccaataaacttcgactgctccggagtgaataagctgctctccactatcgaaaaacggtcctcgcatgacaaatcacttccttgtttaaaactccatgctttg

SEQ ID NO: 2701 - DNA, 446 bp, Triticum aestivum
  Clone ID: LIB103-010-Q1-E1-B4
cggtcgacaatccgggtcgacagtacaggtgcagatacagagaccaactacaggcgacggacgcatcttcagtctatgaggaggtgaacttggtgacggccttggtgccctcggagacggcgtgcttggcgagctcgccggggaggacgacgcggacggaggtctggatctccctggacgtgatggtgggcttcttgttgtaacgggcgagcttggccgactccccggcgagcttctcgaagatgtcgttgatgaaggagttcatgatggacatggccttggaggagatgccgatgtccgggtgcacctgcttcagcaccttgaagatgtagatcttgtacgtctccacgcccttcttcgccttgctgcccttcttccggcccctcgtcttgccctcgccgccggcggcctccttggacgccggaagccgcttctcggccttgggc

SEQ ID NO: 2702 - DNA, 392 bp, Triticum aestivum
  Clone ID: LIB103-010-Q1-E1-B5
gaattgacgggcctgctccagaaaatttgcatggtcaggatttaatctgcacagatgagcatggacttgtaccttgtactgaatcttctgattttaacgcatctgaagaatgtgaagaagcacctattgctcttagttgtggtgctccttctacatttgatgaaaaacttgattctgttttaagtcagccatatgaccaaaatgaatacaaagagcttatgagaaaagccactgaccagaagcctgtgagcagacaaagacaattgcgaagtggatccaagcgctatgccacaggattcgttggactgtcgtatcttgatcactacccagatctggccaagcaaatcgacactgctgacactaatgagagacgactgaacctcctgcgaaaa

SEQ ID NO: 2703 - DNA, 402 bp, Triticum aestivum
  Clone ID: LIB103-010-Q1-E1-B6
cgggtacagctaaaataagacgacaggaattgacgggcctgctccagataatttgcatggtcaggatttaatctgcacagatgaccatggacttgtaccttgtactgaatcttctgattttaacgcatctgaagaatgtgaagatgcacctaatgctcttagttgtggtgctccttctacatttgatgaaaaacttgattctgttttaagtcagccatatgaccaaaatgaatagaaacatcttatgaaaaaagccactgaccataagcctgtgagcatacaaatacaattgcgaaatggatacatgcgctatgccacatggattcgttggtctgtcgtatcctgatcactatccagatctggccaatcaaatcgacactgctgacactaatgaaagacgac

SEQ ID NO: 2704 - DNA, 372 bp, Triticum aestivum
  Clone ID: LIB103-010-Q1-E1-C1
gggtcgaccgggaggaggaacctgaggaggagctaggaactgaatatctggtgcagccgcttggccgtgctgaagacgaagagcattccagtgactttgagccagaagaaaatggtgatggtgctgaggacgaggagattgaggatgatgatgctgaggatggtgaggattctgtcaaggcgcaatcctcttcgaagaggaagaggtctggcgcggaggatgaagatgttgatgacggtgatgatgatggtgatgatgatgagaagcctccatcaaagcgatagtcaatttgttcttgctgatctggtatcttttctgcttgggccaagaaggaaaataatcctcacggagaaggttgttggtaaatgctgt

SEQ ID NO: 2705 - DNA, 407 bp, Triticum aestivum
  Clone ID: LIB103-010-Q1-E1-C10
ctcgtgtgtcgatacaagcctctagaatatctcgaaccatgtttcagcccttgtggctcttgcagtagctacccctttagaacaaagtccagaaattaaattcattgagaaaggcattagtggagagggaacaactacccgttattgggattgttgcaaaccttcctgctcatggaggggaaacgtccatacacctagcggagtaccagttgcctcatgcgatagatctggagtgaacagggttgatgctaatgcaaaatcaggttgtgagggtggcggcagtgcttacatgtgcaacagtcaacaaccatgggcagtaaatagcactttggcatatggttttggtgccgcgtctttcagtaacggagttgatgtatccctatgttgcgcctgtttcttacttagct

SEQ ID NO: 2706 - DNA, 392 bp, Triticum aestivum
  Clone ID: LIB103-010-Q1-E1-C12
ctcgcgggtcgatacacgcgtctatacagacaccactgaccctgtgaagtacccttcgattatggccgagggacaactattgctgtcagatataattgacgaatcaaacgaaataattaaatcagaaaatgttatgtcgatggaaaggttacctataaataacaattctggtcaaagttacggctatattgtctatagacagtataatctgtatctggcagccaattctgtactaacaatatctggatacgtgagagatacagtacttgttttattaaatggagagctggtatcacctgcacctgtcaacgaaaagagcatcgaaggattcggcttctggaagctctacaactctaccctaagtctacgcaataaagaacttcaaaacgcta

SEQ ID NO: 2707 - DNA, 411 bp, Triticum aestivum
  Clone ID: LIB103-010-Q1-E1-C3
accggtctatcacattcagagccgtatgtattttgcaaaattttctatgtctacaattctctgtacggagctactctagctaattgctcccactttcaatatgtatccagattgagacttacagtcatctggatctgtgtcaaaacttgtatcgacgtaaccctttacgacgaacctcttgtcacctccataatcgagaaacatatccttattctactaaggatatttttgaccaatgcccagtgatctactcctagatcactattggtagagtatacaataggtctggtccatagcatggcatccatggatcctatctcagatttcatggcctctagccatttcgcggaatctgggctcatcatagcttcttcatagttcgtaggtttatcatggtctagtaacatgact

SEQ ID NO: 2708 - DNA, 387 bp, Triticum aestivum
  unsure at all n locations
  Clone ID: LIB103-010-Q1-E1-C4
cggtcgaccatccgggtcgaccggcacaggacattcctgcangctgtatgttcttgttctgtttctcactgtcttctattcctaattcaattgcttctcaaatagtttgtgtagactgtatggtttgatcattcacctgaagtgactttgttgcacttttgatgattttttctgtatctgaacttttgaattttgtacgaatgtgaaagtcttgcaaccaaaataaaagtacagggatcgtgtgcaattcaaaaaaaaaaataataaaaacaaaaaataaaaaaaaataaaaaaaaaaaaaagaacgggcgcacaaaaggataaaaaattaatataaacatacatatgaagtgataccacacacttagcgtcatcggaattcaattc

SEQ ID NO: 2709 - DNA, 428 bp, Triticum aestivum
  Clone ID: LIB103-010-Q1-E1-D12
acaagagtctacactgacgtcgtactagcgcctggtgttacatcccaagtagtgttccttttattctaagtttaatttcgaacagttgcatttactttatttccaaacaatcaaaatgggtaaagaaaagattcatattaacatcgttgtcattggacacgtagattctggtaaatctactactactggacatttaatttacaaatgtggtggtatcgacaaacgtaccatcgaaaagttcgaaaaagaagcccaagaaatgggtaaaggttcattcaaatatgcctgggtactcgacaaacttaaggccgagagagaacgtggtattaccattgatattgctttgtggaaattcgaaacagctaaatactatgtaaccatcattgatgcccctggacacagagatttcattaagaacatgatcactg

SEQ ID NO: 2710 - DNA, 433 bp, Triticum aestivum
  Clone ID: LIB103-010-Q1-E1-D2
gggtcgacgggtactactcattattccttcatccatcgtaagataacccaaaacttgaaaacttcaatcacataaaactcaacaaaaccttcgtgagatccattagtataagaaaataaatcactactataagtgttgtatcataccaattcatattttattcttgcattatatcaactgtattccaacttttctatggcaaaaactcatcaaagaaaaccatagagccatcaaaacatgcacacaacgcaaataaaacatgtcaaaaacagaacagtctgtagtaatctgggtgtttctaatacttatgtaactccaacaactctgaaaatttaggacggcctgagcaatttgcatattgatctactgcaaaatgaatggttattttatcgctctctggttaaaaatgagaattattttcatgaacataaaa

SEQ ID NO: 2711 - DNA, 391 bp, Triticum aestivum
  Clone ID: LIB103-010-Q1-E1-D5
ttcgccggtcgacggggctcatcatctccagcatcggcgaggagctcgcccacttcccgtcgcccccggctctccaatcgcagttctggctgtggttggtgacgtggcacctgggtctgttcatcgcgctcaccttcggccagatcgggttcaagggcacgaccgaggactacttccagaagtagcgagttaactagctttggttcgtgcatgtgcgtcgtccttgggctgctcaagggctgcttctgcgcatgcgtgttcaatgtaaaatctgccatgccttttggttttgtgcatgcgtgtggcttcgcaagccgtgtgattgctgtttgttaattacctcttccatggtaagcacaaaagagttcaacatccccgtcaagctccaaat

SEQ ID NO: 2712 - DNA, 374 bp, Triticum aestivum
  Clone ID: LIB103-010-Q1-E1-D6
tcgcgcgtcgacgggacacaccgacgccgctgacaagaagaccgccgccgccgacaagaaggctgccgccgacgccgaggaggaggccgccgccgacgagtagacagggccaacttgcgtcgcgtagttctgcatctgagaggggagagaaagagagagagcatgggatcctgtatgtaatgcctggtctggagtccgaactggtggtagtctgtagcgtcgattgatcttgaatcaccgctgaattgaagctggaaaaaacaatgtaaagtcagccatgcctttatggatatgtgcatgcatgtggcttcaaaaagccgtgtgatctgctgttatgttagctacctcttccatggataggcacatcatagttc

SEQ ID NO: 2713 - DNA, 385 bp, Triticum aestivum
  Clone ID: LIB103-010-Q1-E1-D7
tcgacattcgccagcgggaaagcaacgagcgcgctttcctatttggggtcaatagtggcgcttatggtgaaggtaccaccagtgccatcctccttggcggacaccttcttagtctcaggtggagctgccattgccttcttacacttgccggtggagctcgatggtgcgtcctcgacggtagcgcagcactccaaggaggtgcgcttgccggagtaggcatcagggctcttaccggacttggtcttcttcttcccaagtgtcctccgttctgctgcagctgctgcttcccggtagatcttgtcggcacaaataagagcatccttcttgtcgccaaggacagatatgacacttattggccctggcattttcagtacgttgtacgcat

SEQ ID NO: 2714 - DNA, 428 bp, Triticum aestivum
  Clone ID: LIB103-010-Q1-E1-E1
cgggtcgaccgggctcctaaagtcagggaaggctctgattaccaacttataacaccctcgatgcgactatagctcccacgtgtcgaggcacgacttagagacataatcgcattgaaggcatatgtcgcaagttaggcaatcttcacaacatcccatgtaatatgaataataaaggggagaacatagttggcttacactcgccacgtcaatcaagtacataaataacattacatcatccaaaacactcacggcccgactacggcgccaaaatagaagaaaacccaacatgcgacaatggtcccaatcacccccaactgggcaccactactgatcatcgggaaaggaaacgtagtaacgctgagagtcctcgtcgaactcccacttgagctcgtactcgtcacctggagcggaatcaactggacctgcat

SEQ ID NO: 2715 - DNA, 424 bp, Triticum aestivum
  Clone ID: LIB103-010-Q1-E1-E10
tacacgaatctacagtgattcgtgcaagtcttgttggaggattaggtcttactccttctggtaacatcggccttaacggtgctctatttgagtcggtgcatggtacagctcccgacatagctggtcaagacaaagccaaccccaccgccttgctcctttcagccgtcatgatgctgaggtatatgggccttaacaaccacgcgaccaaaatcgaaaacgcctgcttcgagaccatcaaggaagccaaatacctaacaggcgatcttggaggcaaagccaaatgttcagagttcacgaacagcatctgcgagaaaatagcataagtccctaaaggaaaaaacgtcgcagtgaccctcgttaaagaagatagacgttattgtgttgagtttaataatatttgtacataataagcacaacatttttt

SEQ ID NO: 2716 - DNA, 334 bp, Triticum aestivum
  Clone ID: LIB103-010-Q1-E1-E11
gagtcatattacggtagggttcatgaatgtggtgatggaagagaaactactagaattcccgaacataatttgtgtcgatgggacacatgggacaaataaaaaaggactggatttgacgattttgctggtgaaagacgatagaaatgctggattccctgttgcgttccttctgtcaaatagattggaccaacgaattcaagaagtttttttagatgccctcaagaataagatacagacagaagttaatgcggaatatttcatgagtgatgatgatcctaaatattataatgcatggaagaagataatgagacatgaaccaaagagactattatgt

SEQ ID NO: 2717 - DNA, 425 bp, Triticum aestivum
  Clone ID: LIB103-010-Q1-E1-E2
gggtcgacgggtatgtggaagagagagtaggagacaaacctacgagacacacacacacacagagagagagagagacagagagaggaagaagttaggtctgtcagaaagatggagacatgtaatatacgtgattctgtatacgtggaaggagaagagacaacatgtttgatgagagagctggaaaaacatggacgagaggggaaggatctcatgggttgagggattgacaattttgtgcggggggagagagggattggtaattttgtgcaagagagagagggtggggggaggagtcagtcagccatcgtcacatcaccctgcttccaaatgaccccgcattctctagcgcggtgtggtcgccgtctttgatctgctcgatgccctctttgaagattgatgtgttgtgcatgttgggggtcaaagaa

SEQ ID NO: 2718 - DNA, 393 bp, Triticum aestivum
  Clone ID: LIB103-010-Q1-E1-E4
cggatacttgcattattgaagggctagaggaggtcaccattcggatagatggaaacaactgtggctgtaataatacaactcagaaaaaaatgaattggaaagaaatacatcgcttatggaaacagattcgagttgcacgaagcggattgagcgttgacgcgcgcgctcgtgaaagagtcctttcgttagttttaacaaggatgacgggcaccaactaacagggagcagcacaaacgaccaatcagaactcgccaaatgaaccaacgctcgacctgcgtttcgaccttaatgggtttatagcctgaattatagcaatactgagttcgccgttgctcatttcagcctccatatttttccaccattgtgctcataacgattttggtggtccaaaat

SEQ ID NO: 2719 - DNA, 376 bp, Triticum aestivum
  Clone ID: LIB103-010-Q1-E1-F10
atacaagaatctataatggtgtcgtagtatcggagaaggtcctaacagtttagaataatgaaatatcttgcagtttttgtgatttttgcgtatttatacgcagctcatgctagtgtttatttagaagagaaattcagtgatgattcctgggaaaagaattggatatacagcatacacccagataaagaatttgggaaatttgttaggacagctggaaaattctttaatgatgacgaagaagataaaggtcttcagacatctgaagatgcacgtttctatgccttaagtagaaaattcaaatccttctccacagaaggtaaagatctagttatccaatttactgtgaaacacgaacaaaacattgtttgtggaggtg

SEQ ID NO: 2720 - DNA, 246 bp, Triticum aestivum
  Clone ID: LIB103-010-Q1-E1-F11
gagtcgtattaaaccgtcggttgcttctcatagattactattcatctgtttgaaattagtatgacattgaacttggaaatcatcatattctccatcacgtggagggtcggtgttaatatctagtgtaacaggtaattcataattcagtcgttttctgccgcattacagtcacaacatgagatcaatgtgtctcaggtgcccataaatcgccaagtgtaagtctccatagatcttccaggccgtttg

SEQ ID NO: 2721 - DNA, 431 bp, Triticum aestivum
  unsure at all n locations
  Clone ID: LIB103-010-Q1-E1-F2
gggtcgaccggtatacattagaaacagattactacagactgttctgtttttgacagattctgttttctatgtgttgtttgcttattttgatgcatctacggctagtactaagtggtatgaaccatagagaagttataataaagtagatattacaccaatatgaatttagaatgagttcattacagtacctaagtggtggttttattttcttatactaacggagcttacgagttttgttttgagttttgtgtggttgaagttttcaagttttgggtaaggattcgatggactatggaataaggagtggcaaaagcctaagcttggggatgcccaaggcaaccaaaggtaatattcaaggacaaccaagagcctaagcttgggggtgccccggaaggcatcncctctttcgtctacgttcatcggtaacttta

SEQ ID NO: 2722 - DNA, 287 bp, Triticum aestivum
  Clone ID: LIB103-010-Q1-E1-F6
cgcgcgtcgacggggttaagaaaagagttggttgttggatgtgttgtccccggttttgcctgatactgtatcccgttgcgagaaatactgtaacaaatccgtccgtggtgtacctagttaaattatcgagaagtgacattagaaatggtctgtggagagctttggtaataaacggtgcttctgtgcctggtagaatcatcaaaaaaaaaaaaagaaaaaaaaaaaaaaaaaaaaaaaaataaaagaaacacaaaaagattaaaacaaaaagcggccgtacaaggggt

SEQ ID NO: 2723 - DNA, 253 bp, Triticum aestivum
  Clone ID: LIB103-010-Q1-E1-G1
gggtcgacggggtgactaaataaatcattctcacacacctcactacaagaattgtatgccatctaaactatgagaaccgattgtcgtgtcatctatttcatgtgacgcgcctgccactgcacagtggcgcggtccctcatctggggcaggaataacatgcttcatcatgtcaatgatccgcgtatccatctcgtaacttgtgtaggcgtccttggacgcacacttgacatgttgtttatccagtctctcatgc

SEQ ID NO: 2724 - DNA, 412 bp, Triticum aestivum
  Clone ID: LIB103-010-Q1-E1-G12
atacacgaatctagaaatcgtcgcagtaatagtaaaaaacaagcacaatggctcccaaacgtaataatatgattccaaatggccatttccacaaggattggcaacgattcgtcaagacttggtttaaccagcctgcccgtaaaattcgcagaaggaataatcgtattaagaaggctcgtgctattgcccctaggcctgctgctggacctttaaggcctgtcgtaaggtgtccatcaatcaggtaccatactaaagtacgcgctggacgtggatttaccctccaggaattaaaagctgcaggtcttaaccccagatttgcaaggactgttggtattgctgtagatcacagacgaagaaacaaatcagtagaatcaatccaactgaacgctcaacgtcttaaagaatacaaatc

SEQ ID NO: 2725 - DNA, 210 bp, Triticum aestivum
  Clone ID: LIB103-010-Q1-E1-G2
ccctcatctggggcaggacgaactcactacgttatgtcagcgatcttcgtatatatcccataacttgtataggagtccttggacgcacacttgacatgtggtttatccagtctctcatgcgatatattgtgacaagcattcttgtccttcgtgctcgtctacgctatcttcatgtctaaggggtagattatggtcgtagtcatgtccacc

SEQ ID NO: 2726 - DNA, 404 bp, Triticum aestivum
  Clone ID: LIB103-010-Q1-E1-G3
gggtcgaccggtcagaacgatgatgaagaagcctctctgctcaccattggcgctttccgtgggaagtgatagcaatggaagcggagctgtagctcttctgaaaattgcaaggatcttttcacaaatctattcaagccttaagaccagaagcaagtttaatcttctctttggattaacatctggctgaccctacaattaaaatggaactagcaagttcctagagcaatgatctctggatgcatgtatcaaagcctccagagaagccttacatcaagcaaatctttgaggatttttcggatgtctccaaggaaatgggcatttcagtcgcacaagattaatgtgtcaaattctagaaatttgtgtgctatagttgtatctacgaatcgcagactacatgctgaaca

SEQ ID NO: 2727 - DNA, 417 bp, Triticum aestivum
  Clone ID: LIB103-010-Q1-E1-G4
acttttacctttcaaccattgctagcctcttcggtaccgtgcattgccctttctcacctcgagagttggtgcaaacttcgccggtgcatccaaaccccatgatacgatatgctctatcacacataagcctccttatatcttcctcaaaacagccaccatacctacctatcatggcatttccatagccattccgagatatattgccatgcaacttccatcatcatcacatacatgacttgagcatttattgtcatattgctttgcatcatcgtaagatagctagcatgatgttttgatggcttgtccatttttttgatgtcattgctacgctagatcattgcacatcccggtacacagccggaagcattcctatagggtcatatctttgttctagtatcgagttgtaatattgagttg

SEQ ID NO: 2728 - DNA, 423 bp, Triticum aestivum
  Clone ID: LIB103-010-Q1-E1-G8
gtcgacgggccctagggcggctgccctggccgaactctccccttccatatttgtgtaggcctgtttgcaaatttttagaatcctcaaattctgaaaggaaaaaaagatatactaaatttccagttttttgacttttcattaaatcaggtcaaactgtctttaaactacttattcaagaaatattagcgttaatagataattattttagttcttttggcttttggttaaactgtggtcaaactatgttcaaatctggtcaaactgtggtcaaactatgttcaaactacttattcaagaaatattagtgttaataactaattatttaagtttttttgacttttggtcaaactgtggtcaaactatggtcaaatctggtcaaactatggtcaaactgtgctcaaactatggtcaaactacttattc

SEQ ID NO: 2729 - DNA, 348 bp, Triticum aestivum
  Clone ID: LIB103-010-Q1-E1-G9
tcgcgggtcgatacacgcgtctagatcactccataccatatcccacttttgctacgaacgaagctatacatatgacggaaatctatgagtatgcttgtggactgaatgattcggcattcgttcttcctcatttccaggtgtataaatatctcatagcgactaagctggttgatcgaggacttgtggaaaaatctttagcgtatttggaaaacattgcttctgttattgttgcgaatccttccctggttgaaatatcattcgtggataatgtatataacctagccgatcgactgaaatactacgatcttgtcggcgaagttgaagatgagtcccaatttggtggaatgt

SEQ ID NO: 2730 - DNA, 432 bp, Triticum aestivum
  Clone ID: LIB103-010-Q1-E1-H1
cgggtcgacggggaattctcacaacacaatcggcatacaattcaagattttggggccgtcaaaccacacaccggcagcacagttcacatggaagtcccgagcggcgctgagatgcagattctttgcatggcttgccctacgtaacagatgctggacatctgacagattagcacggcatggactagaccaccaagaagcctgcccgttctgcgaccaagcggaggagaccatagatcatatcctcgcccaatgtgtctttgcaagggaggtatggtatggacctggacctgcacggcaatgaacaaacaagagtggataccaactggggatacacggcttatagagtggtgcccaaataagggtggaaacaatggagacggaaaagatgtccgtgccctcgtcctacttgttaagtgggaattatggaaacat

SEQ ID NO: 2731 - DNA, 387 bp, Triticum aestivum
  Clone ID: LIB103-010-Q1-E1-H2
cgggtcggcctttctccccaggatgcggtggctgccgtgcgctccaccccaagattgcgcagttcgctgagcggaacccggacgtgctgttcctgcaagtcaactacgagaagcacaagtccatgtgctacagcctccatgtccatgtcctccctttcttcaggttctacaggggagcccagggaagggtcagcagcttcagctgcaccaatgcaaccatcaagaagttcaaggacgccctcgcgaagcactcgccggacaggtgcagcctcggcccggcgcggggcctcgaggaggcggagctcttggctctggctgcaaacagggacctggaattcacctacaacaacgagaagccgtcgctggtgccgatcgccgagggcatcc

SEQ ID NO: 2732 - DNA, 270 bp, Triticum aestivum
  Clone ID: LIB103-010-Q1-E1-H8
ggccaacttgcgtcgcgtagttctgcatctgagaggggagagacagagagagagcatgggatcctgtatgtaatgcccggtctggagtccgaactggtggtagtctgtaacgtcaattgatcttgaatcaccgctgaattgaagctggaaacttgatcggttagccaaaataatcccgttgataatacacaatacgtaaatcctgtcaactgtgtcactcagaaccggacatactactgttgttcctaatgataaagataaattgatccc

SEQ ID NO: 2733 - DNA, 426 bp, Triticum aestivum
  Clone ID: LIB103-011-Q1-E1-A10
ggtcgagggcataaggtgcgataagtcgttgtcatgcactcaactatgcggttagagttgatgggctcatttacctttgaagcttccgcagtagtttagtttagatggccttcagccatattatttttgtgtaatcgtgttctttatcaggactcgatgtaataagtgtgtgattgaactcttctataattcctcgagtactgtgtgtgtcagcattatcgatccagggatgacacttaagcacagagacttcggttcattgggatcgtggtcgctacaagatggtatcagagcttacgctgactgtaggacacgaccactagaataagccgcatgaattttcttctttgctcatttctaattctcctctaattctactctatagatggcggaccccagaaacaagttcactcaaccggatgacga

SEQ ID NO: 2734 - DNA, 400 bp, Triticum aestivum
  unsure at all n locations
  Clone ID: LIB103-011-Q1-E1-A11
cgggtcgacggcgatatctatgtgaacaagcaaacacccaaggttaccaatagaactcctggtactgcattaacagacagggactatanggactcaccagctgtttacaaaggtgtcgatggtgagactaccgttgtagatcgtgtaatgctttgttcggatacaaatgacaaattgaccattaagtgtattatccgtcacactaagaggccggaggttggtgacaagtttagtagcagacatggacaaaaaggtgtttgtggcaccattgttcagcangaagacttccccttctctgagaaaggaatatgccctgatttaattatgaatccccatggatttccaagtcgtatgacaatcggtaaaatgattgaacttcttgggggaaaggctggtgttt

SEQ ID NO: 2735 - DNA, 278 bp, Triticum aestivum
  Clone ID: LIB103-011-Q1-E1-B1
aaaaaaaaaagggggcccccccaaaggttcccccttttcacaccccctaggccaggttcaaaccccccccaaggcgcccccaaaattcatttccggggcctttttttaaaaccccctgtgcgggaaacccccggggcttccccacttataccccctggaaaaaaacccccttttcccccggggtgctagacgcaaaagcgcccccaatgttttccctccccaaaatttccccccccccaattgtgcaagggcccccccccttttggggccattaaacc

SEQ ID NO: 2736 - DNA, 395 bp, Triticum aestivum
  unsure at all n locations
  Clone ID: LIB103-011-Q1-E1-B10
tgtatttcgcaaatattctatgtccacaatgctctgcatggagctactctagctaattgctcccactttcaatatgtatccagattgagacttagagtcatctggattggtgtaaaagcttgcatcgttgtaacttttacgatgggctcttttatcacctccataatcgagaaacatctccttagtcctcactaaggatattcttgacccatgtccagtgatctacttattagatcaaaattgtattcctttgccaaacagagcaaggtatacaataggtctggttcacagcatagcatactttatagaacctatgactgaggcatanggaatgacttttcattctctttctattttctgcaatggtcgggtcttgagtcttactcaacttcaca

SEQ ID NO: 2737 - DNA, 411 bp, Triticum aestivum
  Clone ID: LIB103-011-Q1-E1-B9
ggtcgacagctatcgctaactcttacaatatgtcgaagcgagggcgtggaggttccgctggaaacaagttccggatgtcgctgggtctgccggtggcagccactgtcaactgcgctgacaacactggtgccaagaacctgtacatcatctccgtcaatggaatcaaggggcgcctcaacaggcttccttccgcctgcgttggtgacatggttatggccactgtcaagaagggaaagcctgacctcaggaacaaggtcatgccggctgtcatcgtcaggcagcgcaagccatggcgccgaaaggacggtgtcctcatgtactttgaagacaatgctggagtcattgtgaacccatagggagagattaaaggttctgccatcactggaccgatttggaaagacttcgccaacc

SEQ ID NO: 2738 - DNA, 352 bp, Triticum aestivum
  Clone ID: LIB103-011-Q1-E1-C8
cgggtcgacattagactcgaaatcgagtagtctcacattaatatgcctccaatcacaaaacccatcattcctcattgcattcgtgcatttatcagaattgaaaagattacaggaaaagaaacactctttttgcgtgttttgaaaaaacgaaccatttcctatcacgcacctctccgttgctcatctttgttgagtaatgacgatatgaaaaatgttttgaattttcattcagaggatattcagtattttcttcgtcccttttagtcgcctttttcacgaatatgtccctcgctttgttagcaagattagcccagttgcgtgagttatgaataccgacagtaaccggttagtg

SEQ ID NO: 2739 - DNA, 419 bp, Triticum aestivum
  Clone ID: LIB103-011-Q1-E1-C9
ggtcgacggcagggggaaaggccaaagctatgcgacgttctggacgcggccattgcacgccaaagcaatggtcaccgtgtagactggcagtaagaagagccaaatggctggcaattgttttctaaggtgaagttcttctaggggaggtttcaactgcggtggtagctcggttaaagactctgtggttaaatggtaagtgagctctgaagtttactgcatcaaactgaatcattatgcagtgatcaacaaagtgaggttaagaggcaaactagatgtcaggggagtttatgttaggaagaactatagtcctgttaattttgagatgattaggaaaagtattttatacagttgctttacaactagataaactggtctagagacataaccaagaagaagcactcacatagtgtgatggatta

SEQ ID NO: 2740 - DNA, 379 bp, Triticum aestivum
  Clone ID: LIB103-011-Q1-E1-D12
taaattgactcctattataaagggaataataaatatggcagagagaaagtttcagaacctaaagtctcatgactgccacatgattatgatgcaactgcttccggttgcattgagggggcttctaccggaaaacgtccgattagctattgtgaagctatgtgcattcctcaatgcaatctctcagaaggtgatcgatccagaaatcataccaaggctaaggagtgatgtggtgcaatgtcttgtcagtttcgagctggtgttcccaccatccttcttcaatatcatgacgcacgtcctaattcatcaagttgacgagattgtcattctgggctccatatttctacataataagtacccctttgagaggttcatgggagtc

SEQ ID NO: 2741 - DNA, 381 bp, Triticum aestivum
  Clone ID: LIB103-011-Q1-E1-D9
cgggtcgacgccgtgcacgaatgcaagtcgcggcacgaggtgcgaggttcagcagaagggcaacagccatggcgaggaggcctggcatgaggagttggagctgggcgtccatggcgaactgaaggaggcaacgaccctggctcctgcagatgacagacgcggtgggcatgaggttcaacgagacagagatggccggatcctgcgagcaggcgtcggagagggccggatttggtgtccggaggcgtctgggagctccggcgtcaaaggagaactacaggacgccggtgctcgctggaggcgtccattgcatgggcgtgcttcttcctacacaattaggagaccgggaggaatgagagggaccagggtggtagggagaggagg

SEQ ID NO: 2742 - DNA, 426 bp, Triticum aestivum
  Clone ID: LIB103-011-Q1-E1-E11
gggtcgacgggcagggcaaaggcgactgtggccattgtggtgttttcaagggagagcgaggcaactgcaatcacgcaactgaagaagtcgaaacccgaggcgaagttggcgaacatgaaagctgacaaacctaaatgccggtgataggttgttcgcctctgtcgcgccgtctttgaacttggtggagacgcataagcagtggcagagctaggatcaagccacgacccgggcaagccccaggccaatcacttggtacagtgctaaacagtgtaaaatccactacagtaaacgaaggagccaagcctcaggacccaggacgccgcccggacagcctggggcttgtctccgccactgcgcagaaagagaacggtggcgccgtgaagaccttgacgactgctgccatgaccacaaccattatgattgtgt

SEQ ID NO: 2743 - DNA, 432 bp, Triticum aestivum
  unsure at all n locations
  Clone ID: LIB103-011-Q1-E1-E12
cgggtcgactcattacacaaaacattttgttggcatatgagagcattcatacaataaaaaataagaagaaaggcaagtgtggctattgcacggttaaactggatatgcacaaggcctatgatanggtggaatggaatattttgaggagaatgatgacacgcttgggctttcatgtagagtttgtaaatctgttgatggcatgtgtccggtcagttaaatagaaggttagattcaataatcaagaaacggattattttattcctgaaaggggactccaacagtgagaccccctatctccatatatgtttttgatttgtgcagaagggctttctagtcttatggctcatagagaggaggttcctggcattgaaggtgtcacggtttgcagaaatgcaccaacaatttcacactttttttttgctgatgaactgc

SEQ ID NO: 2744 - DNA, 405 bp, Triticum aestivum
  Clone ID: LIB103-011-Q1-E1-E3
cgggttgtcccatttggggcaggtttgggtatatgcttctcacaaaccggagcttctcacaacaagcatgatggtttttggtagtgaacgtcccacctttggggacgaaacgatatctattgcctcttattgctttcaagtttttttctcgtgtcaacatagaacaacaggagtgttgtgcgaatttttgtgatttttcggggttcgtttggacatgtttatgcattaactgagttttcaatgcatttatgtgcataattcaaatttgaactacatgcgcatgctccagtgcatataaattggttgaaaaatcaaatctgtgtccttgggtgcatgcttaagtcccatgcaagaaatgggaatgaatttcaaacaccagggcaccgttgattgccggcaaaacat

SEQ ID NO: 2745 - DNA, 414 bp, Triticum aestivum
  Clone ID: LIB103-011-Q1-E1-F10
gggtcgaggcgtgagaaatatagaaatattgaggctatatccaatcggcatcagctgcacaataagaagaacacagttgataagttatctaataataggaagcccatgataaatgcaagccgagagaaagttgttacacttctctccagttgcttccatactgaggattacaaagatgagttgaggcctctttgtaattctatgttgagtggaacaataaattcctttaggaccagaatactgaactttgttgtggccaaccgcccataccaaggtcctacaaagctgttccggatcattttcaaggataagcctgatgggacagtgggaatgcaatatggagacccagaagatttcgacaatcggaactcacatgaatgtacactcatattacccaccaagttacatgccgac

SEQ ID NO: 2746 - DNA, 423 bp, Triticum aestivum
  unsure at all n locations
  Clone ID: LIB103-011-Q1-E1-F12
gggtcgacgggaacaggcaaaatgtatcaattctagggttgggcctccggttaataggttagtcncaaaaataaaataaaagtggaaaataaagcccaataatgtccaaaacagtagataatatagcatggagcaatcaaaaattatagatacgttggacacgtatcacccaacatattaggactaattttatagccaaagcaaattaccatgttgttctaaaagactctcaaaataatataagttaatcataagagatcaataatttctataaaataaaaccaccaccgtgctcttaaagatatacgtgaagcactagagcaaaattatctagctcaaaagatataagtgaagcacatagagtattctaataaattccgattcatgtgtgtctctccaaaaggtgtgtacagcaaggatgac

SEQ ID NO: 2747 - DNA, 419 bp, Triticum aestivum
  Clone ID: LIB103-011-Q1-E1-G8
ccgggtcgacgggtcaaccacagcatgttgatgccgctccatgatagcatgccaagtttaatgaatttccgacgacttttggatttactagaatttaaaaaccaggcatctcaatgttttgctggcaatcaacggtgccctagtgtttgaaattcattcccatttcttgcatgggacttaagcatgcacccaaggacacatattgatttttcaactaatttatatgcactagagcatgtgcatgtagttcaaatctgaattatgcacataaatgcattgataactcagttaatgcataaacatgtccaaacgaaccccgaaaaaacacaaaaattcacacaacactcctgttgttctattttgacacgagaaaaaaaatgaaagcaataagaggcaatggatatcgtttcatccccaat

SEQ ID NO: 2748 - DNA, 429 bp, Triticum aestivum
  Clone ID: LIB103-011-Q1-E1-H1
ctgcaggacggtcgaaattacgggtcgacggggccatcatacagcttgggagcttcacacccaaggggccaaagagagatctgttgctactagcacgactcaaacataggcacccattgagcacagctcacaaagttacttgggggctctttgtgtaaagtaacaaagagtttgaaaggacccttgtaaccgggtatcaacccatggcttggaagcctggtgtattcacctaaaaccccgggttaacctgccttcatcaagtaagccactcctatccaggtaatcctggcatgacccgccgaacgtttgacagttactctcattgagaccctgaacttgtcaaagttaaaacgatgattggttagttcgaggcccatcttaaaaggctttgtcaaatggtttaactcagcgggctggcagcacacgaaa

SEQ ID NO: 2749 - DNA, 407 bp, Triticum aestivum
  Clone ID: LIB103-011-Q1-E1-H2
gggtcgacggcgaccaaaaagcactccagttcttcaccagccccctcgcaccttccggtgaatcaccgcacctctcaccggcgaagcagcagcgtctgatggcccccaatgcggataagaagccggctgccgcggtagaatactccggcggtcgataagacaccgcgggcaagaagcccaaggccgagatgcggccgtccaagtctaacgagggcggcgccgacaagatgaataagaaggccaagaagatcgtggagacgtacaagatctacatcttcaaggtgctgatgcaagtgcacccggacatcggtatctcctccatggccatgtccatcatgaactccttcatcaacgacatcttcgagaagctcgccggcgagtccgccaagctcgcgcgctacaacaag

SEQ ID NO: 2750 - DNA, 389 bp, Triticum aestivum
  Clone ID: LIB103-011-Q1-E1-H8
ttcttttgagttttgtgtgctgaagttttcaagttttgagtgagatcgtgatggatgaaggaataaggagtggaaaaacctaaacttgaggatgcccgaggcaccccaaggtaatattcaaggagacccaagtgccccggatggcatccccctctttcttctaccaaccatcggtaaattacttggagttatatttttattcatcacatgatatgagttttgcttggagcatcatgtattatatgattctttgctttaattgatttttagtttgccaaaatcatatttgttggacacacctttttgagtgggacacacattattcatgatttgttaaaatactccttatgctacacctatatcttttgagctaggcagttgctctagta

SEQ ID NO: 2751 - DNA, 427 bp, Triticum aestivum
  Clone ID: LIB103-011-Q1-E1-H9
gggtcgacgggtgggattcagcttccttcaactgctcagtctaaacctcagagtggtgaggtggtttctgttggagagggaagaaccattggggatagcaaagtagaagtcggcattaaggttggggctcaggttgtatattcgaagtatgctggaatggaagtggagttgaatgattccaaccatctgatcctaaaagaggacgatatcataggtattctggagacagaggatgtgaaagacatgaagcctcttagcgaccgtgttcttatcaaggtagctgtagctgaagataaaactgctgggggcctgctgctgactaacagtgttcaggagaagccatctgttggaacggtggtcgctgtcggcccgggctatctggacgaggaaggcaagaggatcccgttgccggtatccacaggcaatt

SEQ ID NO: 2752 - DNA, 340 bp, Triticum aestivum
  Clone ID: LIB103-012-Q1-E1-A2
gggtcgagggcggagtcaacagtaacgtctccacgaagtccatagttatcatctcagcgcaggatcgggacactccgcctcaatcaagtggtattaggtttcaggttgctcggtgagagtttctagttttcggagattagatatattttcttacctagtagccaagaataagccatacaacaaagagttatatccgttcatcctttatcgaagcgagtctgagcctttgcaattttctaatcattgcttgcatagtgtgaattatcggttgcatccacctgtaagttgctggtcttatcctcgaggatctttaaagtttcgagttctgttcacattagtc

SEQ ID NO: 2753 - DNA, 372 bp, Triticum aestivum
  Clone ID: LIB103-012-Q1-E1-B1
gggtcgacggggaatttggttcccatctgatgggggtcgggctgtccaagtttgtgccgtgggaggtaatgcacgagcggaccgtcaaggcggcaacatacggataccttgcccccgagttcatttacaggaacgagctgacaacaaagagcgatgtctacagcttcggcgtgctgcttctagaaatcatcagtggccgtcgcccaacgcagtcggttgaatctgctggatggcagacaatattcgaatgggcgacgccgctggtccaatcacaccggcatctggagctgctggacccgctcatcaacgacatgccggagataggagtgatccagaaggtcgtggacctcgtctacgcctgcacccagcatg

SEQ ID NO: 2754 - DNA, 96 bp, Triticum aestivum
  Clone ID: LIB103-012-Q1-E1-C4
ggtcgacggcggaggtatactcagctttactcagccgccccttgttgtcttgaaattttcgatttactcccttatggccgaccaaacccatcccct

SEQ ID NO: 2755 - DNA, 403 bp, Triticum aestivum
  Clone ID: LIB103-012-Q1-E1-C5
cgggccgactcgagtggcaccgtcttgaatatgatgacgaggtagaggagcggttgaccatcatagctcagatgtcctccttgagagatgccatggatgtgtcgaagtagtcttttgtacgttgctcggattgtcacaagtcggaagcaagtaggtccatgtggttgcccaatgcttcattgccttgatgtaaagctctttgcgggccaagaggtggttcttagtgacgtagttgttcgggtcctcatcttgctcgatgaagagtgggttggtagaagtacttggcctatccatcattccaagtaaagtgtgagtgggagaaagagaagaactatacaaaatgtaccttgaccgatgtttagtatggatcaaagatcactcaatgatgttgcaagggaattac

SEQ ID NO: 2756 - DNA, 399 bp, Triticum aestivum
  Clone ID: LIB103-012-Q1-E1-C7
gggccgacgggactacggagaaaaagacgtatcgagtgtgtatgagcgaggcacaaagacacaatgtttgagagataaaccaattgacagattaatattagatcgagttgtcacccttctgttgtcattgttagggttggggggtggagggagagaaagacatatcgagagtgtgcgcggtaggcacagacgcacaactagcgagtgtgtgtatgtgggtgtgtttgaaagaggagtagatagattacgatcaagatcgaggtgccatccctacgccatcggtgtcaggtactgtgtgtgtgtgtgtgcatgtgtgttagagagaatcgactcgatagaggactatcaggatcgaggtgtcacccgactcgttcggtgtccggaagtgtgtgttcggtg

SEQ ID NO: 2757 - DNA, 389 bp, Triticum aestivum
  Clone ID: LIB103-012-Q1-E1-D2
gggccgacggggaagagaaggcagcaccaagtcgcctctatctccccctcacccaaagctccgacctttcgctcacccttctcctccgccttcccaattccccaattcggagcgcccgaggaattcggcgtcgatccgacgcgaccgaattcgtcccgattcagctgctgctcttggttcgtccgtcctgcgggccggcctctttgtctgtctcaactcgatccacgccgttgcggcacgcttcctccctgcggggtttggcctgcactgatctggcctggaaatactcctactctagtttcgcggatttttgtgttcggtaccatttctcggttttcccagtggttcgtgctgatctctgtctctgtgtactatcttctcctggcccg

SEQ ID NO: 2758 - DNA, 302 bp, Triticum aestivum
  Clone ID: LIB103-012-Q1-E1-E8
cccaatagtgacgtcgtattagggcgccggcgaccaatgacgccggaggcgaggggaacacgaggggcaggaagaatggcatcaaggccaataagggcgtgtagacgtagaagatctacatcttcaaggtgctcatgcacgtgcacccggacatctgcatctcctccaatgccatgtccatcatgaactccatcatcaacgacatcttcgagaagctcgccagggattccgccaatctcacccgtaacgccaggaaacccatcatcacgtcccgggagattcagacctcagtccgtctcgtc

SEQ ID NO: 2759 - DNA, 252 bp, Triticum aestivum
  Clone ID: LIB103-012-Q1-E1-F2
actggacgtgggtttcagggatttttgcagtgggatttgtacggtactatgccgcactgtgtttgggatgttgaataagacgatgggagatgtgccacgctcttatatgccaacgggacgttgacgcggaaaaacatgctgctggacaggaagaagtcagtgaaaattgccgactttggcgtggcccctgtgcaggcgctcgacgacgacaacattatgggggacacgggcactctggggtatatggccccc

SEQ ID NO: 2760 - DNA, 413 bp, Triticum aestivum
  Clone ID: LIB103-012-Q1-E1-F4
aagaatatttggaagatgaagaagatgacgaatttctgaaaggtttcaaggttgcgaacttcgagtacatagatgaagctaaagctttagcagcaaaagaggaggcacgcaaaaaagcggaagctgaagccgcatccaataaagcaaactattgggaagaattattgaaagacagatgcattgagcaagaagtagaagaaattgctatgggaaaaggaaaaagaagccgcaagcagatggctgctgctgatgaggatgacattactggcctgcacgagttaagttctgaagacgaggattactcctatgatgatgatgtgtcggataatgacacgagtttaccagcaaatgtttctgggaggaaggctcagtattctaagaaaaactcacgtaatgtagattcactccctttg

SEQ ID NO: 2761 - DNA, 430 bp, Triticum aestivum
  Clone ID: LIB103-012-Q1-E1-G2
gggccgacgcggagacaaacaacaagcttgaagggattcctggtgttctctttgtgctccctgattcctatgttgaccctgaacacaaggactatggagccgagctgtttgtgaacggggagatcgtccagagatctcccgagaggcagaggagggtggagcccgtgccgcagagagcgtcggacaggccgaggtacaacgacaggacccggtacgcgcggcggagggagaaccagcagcagcagcgatgatccatcacacgaacgaggccgaggccagagccagaggcaacctgctgtgcctgtttcaccccctcgacataacgagtacttgttattgctttggttttagtaatccgtttcgtgttgccactctgttatctgtatgtatttgaccacttgggacttgagactaagaatcttgatagcat

SEQ ID NO: 2762 - DNA, 418 bp, Triticum aestivum
  Clone ID: LIB103-012-Q1-E1-G4
cgggccgacggggctctccatggcgtccaccttcgttggcaactcgacctccatccaggagatgttccggagggtgagcgagcagttcactgccatgttcaggaggaaggctttcttgcattggtacactggtgaaggcatggacgagatggagttcaccgaggcggagagcaacatgaacgacctcgtctcggagtaccagcagtaccaggatgccactgctgacgaggagggcgagtacgaggatgaggatcaggagcctgaggaggacatgtaaggtgggatgtccatgtcgtgctttgctgggtgggggttctgggggcagagtttgatctgtttggtgctttgttataaatctgtttatcatcgcaactaccgcttgtacgccaccgccattcttcctgcctttcctaagctc

SEQ ID NO: 2763 - DNA, 422 bp, Triticum aestivum
  Clone ID: LIB103-012-Q1-E1-G6
tcccgggccgacggggaggagagagcaggcagtcccgccggcgcttgtttgagcggctggagcaggaagagcagagattgaagaagcacgacggccgttggatggccatccaacagtcactgcttgtgcgtcaaccttttttttaggaaagcctcaaatctgtggaaaactgcatacagcccatctaccattatttctaataatttacagcccatttgctaattattaaggtttttttggagcccgtattctttttgttagcattacagcccatattgtggccacggttaaaaaattatacgaaattttgcatatttcggtgcagtccgaactgtttttaatcccgaaatttcgactcacagtcaaactgattttaaaaataaatgtatatcaatataaaatccaacaaattctccacgcat

SEQ ID NO: 2764 - DNA, 428 bp, Triticum aestivum
  Clone ID: LIB103-012-Q1-E1-G8
tcccgggccgacggggaggaggagcctgaggaggagctaggaactgaatatctggtgcagccgcttggccgtgctgaagacgaagagcattccagtgactttgagccagaagaaaatggtgatggtgctgaggacgaggagattgaggatgatgatgctgaggatggtgaggattctgtcaaggcgcaatcctcttcgaagaggaagaggtctggcgcggaggatgaagatgatgatgacggtgatgatgatggtgatgatgatgagaagcctccatcaaagcgatagtcaatttgttcttgctgatctggtatcttttctgcttgggccaagaaggaaaataatcctcacggagagggttgttggtaaatgctgtagctttaggacatctgtggtaggtgtagcagctcgaacttgagtctacccat

SEQ ID NO: 2765 - DNA, 430 bp, Triticum aestivum
  Clone ID: LIB103-012-Q1-E1-H2
agaaggagcattgagagatggaacggtcagctatggaatggatgatgctgatgacatatacatgcggtcatggactggcaccattattggccctcacaatactgtccatgagggtcgcatctaccagctgaagctgttctgtgacaaggactaccctgagaaggcaccatctgttagattccattcaagaatcaacatggcttgtgttaatcacgagactggggcggttgacccaaagaagttcagtttgctagcaaactggcagcgggagtacactatggaacatgtcttgacccagctgaagaaagatatggcggcgacgcagaaccgcaagctagtgcagcctccagaagggacattcttctagcggggtgtttgctggcccatctccagttccagcagcagctatctatgtcactcccatgggatt

SEQ ID NO: 2766 - DNA, 401 bp, Triticum aestivum
  Clone ID: LIB103-012-Q1-E1-H4
gggattgctgatctgcggcagaatgtccttgttgtccatgacagatgggcctttgtaattctgtctgggaagttccgcaggagtctgccagcaatcatggcctccttcctggacttcttacagcgccttcctgtctttattggtgatgacgacgaatgccagccgtccgtcagaacatggatctcaatctaggcgcttagtcgcttctggagggatttatgtggacttccaatcatccagtggttgacattacagagatctcgtgggacttgcatcatcgttggatctggagactgcacatatccagtgtgtactgctgacagcttcacgtggtgctgcagatgcgccggtttctgcagaccaggcaaaagcgggtggtgctgctgttgttgtggaaaccg

SEQ ID NO: 2767 - DNA, 428 bp, Triticum aestivum
  unsure at all n locations
  Clone ID: LIB103-012-Q1-E1-H6
caataactctaaaagattataatgactcatatcaatgacataatcaactagcgagcaataataagatgtctcaaacggcaacacattgtcaaaacaaccatgatataatatgacaataatggtatctcgctagccctttctgagacggcaaaacataaatgtagaggacctccaaagttcaagtagcgactaaacattgtaattcattgtagaaaagatccagtcatgatgcacccaacattagctacacacaatgcataaatcatgaccgctgtgctctactcagtttctggcgcttgttttagaatgtgatgacacaacataaaactaaatagatagtcccttcgctagagggaagcagtgatttgcagaggtgctagagatcaatttttanaacagagataaatgtaattttaagacatgcacct

SEQ ID NO: 2768 - DNA, 421 bp, Triticum aestivum
  Clone ID: LIB103-012-Q1-E1-H8
gacgggattgcaatgatgttattgtaaattctattaatgtcaattgtgctaataatatgcaaaaccctaagcttggggattctagttttgctatgtccactacttgttgcaatgatcatgattggggtgattcttcttatgatcttgaaaatttatttaagtcccatgatgaatatgagattgataaaaatgtttgcaatattgaaagtgggtttggaatagtgtcaactttagatcccacatatttggagaatgttcaatattatgaaatttttgataaaagtgggtttggagaggtcatgactttagttaatgttaatcccactattttggaagagtgtcaacttcgcatgcatgtggatcgtgttgacaatatgttatgtgatagctataatgctgaatttgcttatgatcccacatg

SEQ ID NO: 2769 - DNA, 446 bp, Triticum aestivum
  Clone ID: LIB103-013-Q1-E1-A11
taaggtctaaaattcccgggccgacttgtcatgcgacccgctgcaccatgcgtcgttgaagaatagccgtcggcacctggaattgtagcagatcttcatccagcgttggcagctctagcatgatcattgttgaaggggggactgccgcccgcagctgagagacatgaatgaccggatggatccgagcttgctccggcaatgccagtctgtatgccacctcgcctacccattggagtacctgaaacggtccaaagtaacgaaaggctagtttatgattagctcttgccgccaccgaggacagtgcatacggctgcagcttcaaatacacccaatcatggactgcaaaagccctgtccgagcgatgttgatcagccttctctttcatactttgtcgtgccctgttgagatgctaccgtaacagagccaccatggctgccctgtcccga

SEQ ID NO: 2770 - DNA, 377 bp, Triticum aestivum
  Clone ID: LIB103-013-Q1-E1-A12
ttcgcgggccgacggggaacactaagctctgttaagcggggccccaatcttcacagttccgtttaattctctccagtagttcccatgtgagatcaatagacctcagcatagaggtactaccacaggtggtatcaagcatgttgcgattaccatcagatggccgttcatcgtaattgcgactaagcaattctgtgagagagctcatgattggggcatgattcagcacattgagttaagcctgatccacgcttgggcatgcattctcctgcgcgatgccaatacttatatatgtaattacgatcacgatgaacaggatgcataagctagatcttcagttgagattctaacttcaatagcttagcattctaagatctcgt

SEQ ID NO: 2771 - DNA, 396 bp, Triticum aestivum
  Clone ID: LIB103-013-Q1-E1-A3
ggacgaatcaaacgagaacatcaagtcatctacgcgcgcgccaagcaatacgccgaggggtacgatgcccaggacaaggagttggttcagcttaagcgtgaggcccggatgaagggtgggttttatgtcagtcctgaggccaagctgctgtttgttgtcagaatcagaggtatcaatgccatgcacccaaagaccaagaagatcttgcagctgttgcgtttgaggcagatattcaatggagtgttcctgaaggttaacaaggccaccatcaacatgctccgcagggtcgagccatatgttgcatatgggtacccgaacctgaagagtgtgagggagttgatctacaagagaggttatggcaagctcaacaagcaaaggattcctctgaccaacaac

SEQ ID NO: 2772 - DNA, 406 bp, Triticum aestivum
  unsure at all n locations
  Clone ID: LIB103-013-Q1-E1-A4
gggtcgagncggaccatcactcataccacttcgagcggcgcctcctgtcgcgtactcgtacatcgtcatccgtcccatcgtcaggtccagatcgaagtcaagatgagtcgtgaccggagtgctggacgtgggcaaagttctctgggttaccagtttggagatggtgagcctgcaaagcctgctgcaatacaaactgcgatgccagcacgtgctgacaaaccagcactggcagctgccgatgtaaccaagcagattgcagttggcattctaagtagccgggagaataactactaccgtgcagatgggcacaatacgggcaacttccttacggaccgtccgtcatccaatgttcatgctgcacccggaggtggtatgtcactgtgctacttgtctggcgggaactgat

SEQ ID NO: 2773 - DNA, 434 bp, Triticum aestivum
  Clone ID: LIB103-013-Q1-E1-A5
gacgaataaaacgaaaatctaagagacaagctaaaggaagcatcgaacaccatacaagagttgctgctggagaaatcaaacgctggcaggaaaggtcaaaaggtgtgagaaactcaccatgttgctaccgcctcactaaccagagtgactccagtttcacgttttcacgccctgggacatggcatcacagttgcttttgcaactctagcttgtctacagccattgtttagccccgccccacctttgtttagagttgagtggtagttgaatcatctcgtccagggtaagcttggagcgctttgtgcatagccatgaatgagatgaccaataagttgattcaatgtaaagtagaataaccacttgttcgtacggccgttggcgattccatgtttagcccgtcctacctttgtttaaagttgaatggtatttgcaac

SEQ ID NO: 2774 - DNA, 437 bp, Triticum aestivum
  unsure at all n locations
  Clone ID: LIB103-013-Q1-E1-A9
tcccgggccgacggggtgggggtcgcttctcctttgttctctttgtgctagacctttgttatgcactagggaaagaaggagttgcgaccatcatcgatggttgaaaaatgggtgagggagtgtccaccatatatgagagaagaagaatgccgactgttgttgtgggggtcgcttctccttcttttccttgtgctagatatttgtaacgcactagggaaaggaggagtagcgaccatcaccgacggtcgcaatatcagagagggagtgccaccatatacgtgagatgagagtttaggaaggaagactcgacagacctaaagtcaacccgttgcttattgagtaatagtgatctgtgtgttgagtttcttgcttgttgcctttgattgattttcaattaatgtttcaactatgaacatangaaatgcctgacgatgaaa

SEQ ID NO: 2775 - DNA, 417 bp, Triticum aestivum
  unsure at all n locations
  Clone ID: LIB103-013-Q1-E1-B1
gtcgacggccatggggtcgtgaaaagaacaggtttagggagcaagcacatggatcgtttacctaggttcgggccgcgaggatgcgtaaaaccctagtcctgctttggtggatgtattgagtgttcttgagctttctaaactagctacgggggctgtcctgttccaaatagcggaatccttctcctggtcgcctcgggcctccttttataggaaaaaggggctgccacagtggcacacaggaggtggaaaggcctacagtgtgcgagcttatcgcacggcattacgggacaaagtgcatcaaatgtgctacgtangtgtccattagctttatcgggggcgggaatgaggcccgtcncatctgtcaccgcttcgcctcgcttcgacacgcgcctaagatggcgatgcatgcagcgccat

SEQ ID NO: 2776 - DNA, 417 bp, Triticum aestivum
  unsure at all n locations
  Clone ID: LIB103-013-Q1-E1-B4
cggtctagaattaacgggtcgacgggggggtgtatcgctctctaaggaatattccgtgccaggccaccgcttcttaaaagcttctctgactctgactcgataggcggaggaggaggctacgcttataaggaggagaaggaagcaaggagggaggcagcaaagcaccatggattccctctggcacgcctccgtcattgtcctggtgctcctattcattggaggatccgatgccaacccagccgcccgtcgccacggtcagctggatgtaaaccacaagaagcagccactacagacatccagaccttacaacattgcccacaggggttccaatggcgaaatacccgaagagacagctgcagcatatttgagggctatcgangaaggtgcaaacttcatagagactgatatacttgcatc

SEQ ID NO: 2777 - DNA, 390 bp, Triticum aestivum
  Clone ID: LIB103-013-Q1-E1-D3
ctaacacaaaaccctactttgtttgcatgtgcagctagaaccctagcagcactgtgtgcaagtcatgcatgaaaaaacctactgtccgcgaggctctggtatatagtgcgtgcgtgcaaacagtagtacatacaaggtgacaatggaatgtccaagaaacagaatgcttccaagcatgcatcatgtggacgtggtaagagtaatactagtactactatacataccgctacaggttggcatgcatgcatatggttttaatatatttgcaaagcttgattggcatcgaactaaaccatatgcatagtataccatataaacacacgagcggcgatcccatgttcctcacctctgcggttcatctcccctcgctgccgcctccaaggaaaatat

SEQ ID NO: 2778 - DNA, 401 bp, Triticum aestivum
  Clone ID: LIB103-013-Q1-E1-E10
cccgggccgacggggagtttttaatgacttgtagattttttcaataagtatgtgagttctttatgactaatgttgattccatggattatacgcactctcacccttccatcattgctagcctcttcggtaccatgcttgccatttatcaccttgagagttggtcaaaacttcgtcggtgcatccaaaccccgtgatatgatacactctgtcacacataaacctccttatatcttcctcaaaacagccaccatacctacctattatggaattttcatagccatttcgagatatattgccatgcaactttccatcgttccatttatcatgacacacatcatcattgtcatattgccttgcatgatcatgtagttgacattgtatttgtggcaaatgcaccatgc

SEQ ID NO: 2779 - DNA, 373 bp, Triticum aestivum
  unsure at all n locations
  Clone ID: LIB103-013-Q1-E1-E2
ggccgaggcgggtccaattcgatccccaaatcgcaagacgaaaccctagactcgccccacagtttcttctaggtcgcaccaaattggagcagatagatccctaggtatcgaagatggcggatccagctgctctgccaatcgtgccttgtccggattgcggcaggaacgtggtgacctacgttgctaggcgcgggcagaacgccggtcggtgtttctacaagtgccggaatcacaacccttcatcgggcggatgcaatttctacaggtggcaggaaggctatgcagcgcgtctggccaatcttgaaggaggagaagctgctgtgggtcaaatcggtccgggtcagatgcanggtgggcaagctgtcgaagctca

SEQ ID NO: 2780 - DNA, 408 bp, Triticum aestivum
  Clone ID: LIB103-013-Q1-E1-E3
ggccgagggggtcacgaagaactagagccgttgcgccatgggccccaagacgcacgccacgaccagggacacggagcagctcatcgcaacagacgctgcgcacaggttaagctaaacctagcctgagatgtgagagcatatgggatgtagtttcgctttcagtgtgtcatggttttgaagatgaacgcgagaccttttagcaccagtgtggcatcctattgtggctttcagagtcgctgtccacattcgcgatacgtaagcatttatgagatcatgtttacccatgtctggattcgcacagcagtaatatcggttgtacaatgaaaggatccccgttaggatgcatgcccaagaaactgttgctgttatgtcagagttcatccaaactggaggcataataccatttgg

SEQ ID NO: 2781 - DNA, 433 bp, Triticum aestivum
  Clone ID: LIB103-013-Q1-E1-F1
ggtctagaattagcgggtcgacggcagatttccatcagaggccctacattcttgtccgtctgctgtgctatactatcgggccgtgatcacctgggcggtgatcacgggtatatacttgtatactagatacatgacacatgtgatgactaaagtcgggtcggctcgtatgagtacccgcaagtggatcttgtggcggagcgacagggcaggttgagaccgcctatgtgagaggtgggcctggccctggtcagcgttcgcggatacttaacacgcttaacgagatcttggtatttgatctgagtctggccatttggtctatacgcactagccatctacgcgggagtagttatgggtatccggcgtcgtggtatcagccgaagccttcgtgacgtcagcgactgagtggcgcgcgccgttttggaccgctttgacg

SEQ ID NO: 2782 - DNA, 426 bp, Triticum aestivum
  Clone ID: LIB103-013-Q1-E1-F10
ccgggccgacgggagttgatacatgagctattcgagcatacaaaacaggatatttatttgaaggtttagagtttggcacatacaaatttacttggaacagcatgtagataccatatataggtaggtatagtggactcatgtggaataactttggggtttaaggagtttggatgcacaagcagtattctcgcttagtacaggtgaaggctagcaaaagactgggaagcgaccagctggagagagacaacagtcatgaacatgcattaaaattaatcaacaccgaatgcaagcatgagtaggatataatccaccatgaacataaatatcgtgaaggctatgttgattttgtttcaactacatgcgtgaacatgtgccaagtcaagtcacttaaatcattcagaggaggataccaccctatcataccac

SEQ ID NO: 2783 - DNA, 424 bp, Triticum aestivum
  Clone ID: LIB103-013-Q1-E1-F2
gggattatgcttacttcaactgctcagtctaaacctcagagtggtgaggtggtttctgttggagagggaagaaccattggggatagcaaagtagaagtcggcattaaggttggggctcaggttgtatattcgaagtatgctggaatggaggtggagttgaatgattccaaccatctgatcctaaaagaggacgatatcataggtattctggagacagaggatgtgaaagacatgaagcctcttagcgaccgtgttcttatcaatgtagctgtagctgaagataaaactgctgggggcctgctgctgactaacagtgtccaggagaagccatctgttggaacggtggtcgctgtcggcccgggctaactggactatgaaagcaacaggatcccgttgccggttatcaaaaggcaattccgttccg

SEQ ID NO: 2784 - DNA, 289 bp, Triticum aestivum
  Clone ID: LIB103-013-Q1-E1-F4
ctctccacggtgaagatgaatccacatgcccctggatggaacaagaggtaagcctgatgcttgttagttcattccaccgtaggacataggaggcgaattcagtatggcaggcaggtggaatgatttagcgtagtaatggatgtgcaaaaagaatttaggtatggccaggtaggtgttgaaaaaccatcatgtggaatggaaaggaagtttgtgtgggctgtagtatggtgaagcacatgccagtttctgggctgaaaaaattgtacagatttagatgcaaaataaaaga

SEQ ID NO: 2785 - DNA, 426 bp, Triticum aestivum
  Clone ID: LIB103-013-Q1-E1-F5
ccgggccgacggggcatagtaaagcccattaaacatccaagatggataatataatagcatgaatacttcataaattatagatacgttggagacgtatcaggagcatgcgcgtagtgcttggtttttgacgacttgtagatttttgcaataagtatgtgagttctttatgactaatattgagtccatggattatatgcactctcacctttccatcattgctagcctcttcggtgccgtgcattgccctttctcaccttgagagttggtgcaaacttcgccggtgcatccaaaccccgtgatatgatacgctctatcacacataaacctccttatatcttcctcaaaacagcaaccatacctacctattatggcatttccatagccattccgagatatattgccatgcaactttccagcgttccattt

SEQ ID NO: 2786 - DNA, 405 bp, Triticum aestivum
  Clone ID: LIB103-013-Q1-E1-G10
gacgggatcagaaagactatgaaacaactccggttagaacgaggtaagaaacgaataagactgaaaggatttaggcagcactccggctgaagatggaaggaatagaacacgagcttcacccaatgagatggcacttgacgagatgaataatgcaatgcctccggaagaattgaaagaattgaataaaaagaacttagaaggaaggattgaatggagttgttgagaaaatcaacaacgaaagaataagcttgttgtggtcttataggtaacatctcaagatcataaggtgataaccggccacaaacggaaatgattggatagctgagaggaacgaagaaatgcaaaactccacttcaaaacaatactaagaattaattacacttcgagacgccagaagaaaagata

SEQ ID NO: 2787 - DNA, 397 bp, Triticum aestivum
  Clone ID: LIB103-013-Q1-E1-G12
cgggccgacggggaagtccaccgccaaggagggcggcgacaagaagggcaagaagaaggccaagaagagcgtggagacgtacaagatctacatcttcaaggtgctgaagcaggttcaccccgacatcggcatctcctccaaggccatgtccatcatgaactccttcatcaacgacatcttcgagaagctcgccggcgaggccgccaagctggcgcggtacaacaagaagcccaccatcacgtcccgggagatccagacctccgtccgcctcgtcctccccggcgagctcgccaagcacgccgtctccgagggcaccaaggccgtcaccaagttcacctcctcgtagagtgctcctgctcctgtgtctcgtagttagctgtccgggtgtgtttgtggc

SEQ ID NO: 2788 - DNA, 418 bp, Triticum aestivum
  Clone ID: LIB103-013-Q1-E1-G6
gggccgacggggaagtccaccgccaaggagggcggcgacaagaagggcaagaagaaggccaagaagagcgtggagacgtacaagatctacatcttcaaggtgctgaagcaggttcaccccgacatcggcatctcctccaaggccatgtccatcatgaactccttcatcaacgacatcttcgagaagctcgccggcgaggccgccaagctggcgcggtacaacaagaagcccaccatcacgtcccgggagatccagacctccgtccgcctcgtcctccccggcgagcttcccaagcacgccgtctccgagggcaccaaggccgtcaccaagttcacctcctcgtagagtgctcctgctcctgtgtctcgtagttaactgtccgggtgtgtttgtggccgttttatcgtgtaagaatcca

SEQ ID NO: 2789 - DNA, 392 bp, Triticum aestivum
  Clone ID: LIB103-013-Q1-E1-G9
gggccgacgggggccgccacgtctccggggaacggagccgccgccgcagctgccaaggaagacgcatcctcccacatttccggcaccgatatggctccgaccacgccgtgatcctgacctaatatggtgtattagaagataagaagaggacatttgctgatgttttttccattgttttgtgctaatataatgtgctgtgtttgtagcgaggagagggagtacatgtgacgtccatcgacccctccgtagtccggctacctggccagggtttgtttgctcctgatgtaaagtggtgttccacttttgattagtttcaccgaggcgtactattttctactacctgtgatcagacgttgtagtatagactttgctggtctgtgttgttagtcgtc

SEQ ID NO: 2790 - DNA, 419 bp, Triticum aestivum
  Clone ID: LIB103-013-Q1-E1-H10
gggccgacgggaggggacacgatgtttacccaggttcgggccctctctatggaggtaataccctacttcctgcttgattgatcttgatgatatgagtattacaagagttgatctaccacgggatcgtagaggctaaaccctagaagctagcctatgattatgattgttgtgtcctacggactaaaccctgcggtttatatagacacccgagggggctagggttacacagagtcggttacagagaaggagatctatcatccgaatcgccaagcttgccttccacgcaaaggagagtcccatccggacacgggacgaagtcttcaatcttgtatcttcatagtccaacagtccggctgtccggatacccccttatccaggactccctcagataccaccactgaacgtagctgacacgaaag

SEQ ID NO: 2791 - DNA, 397 bp, Triticum aestivum
  Clone ID: LIB103-013-Q1-E1-H2
tactccgacaaccaccgtgctctaaaagatataagtgaagtactaaagcaaaactatatagctcaaaagatataagcgaagcacatagagtattctaacaaattccaaatcatgtatggctctctcaaaaggtgtgtactgcaaggatgattgtggtaaactaaaaagcaaagactcaaatcatacaagacgctccaagcaaaacacatatcatgtggtgaataaaaatatagctccaagtaaagttaccgatggaagtagacgaacgaggggatgccttctggggcatccccaaactttggctttttggtgtccttagattatcttgggggtgccatgggcatccccaagcttaggctcttgccactccttgttccataatccatcaaaatctttc

SEQ ID NO: 2792 - DNA, 367 bp, Triticum aestivum
  Clone ID: LIB103-013-Q1-E1-H4
cgggatctacatgtgaaccggagtaaatggaacccttggaggaaccccatgaagcaatttgggtgaaggagttcatcaccgaccaaggagtcatacccaaggcgtcggggccgttaaaacccttctgtgaaaacactggagctattgcccttgccaaggagcccaggttcacaagaagaccaggcacatcaagtgtcgtttcaactccatctgtgaaaatgttcaagatggagacatagatatttgcaaagtacatacggatctgaatgtcacatatccattgactaaacctctttcgcgagcaaaacattatcaacaccagaactcaatgggtgttcgattcatcacaatgtaactagattattga

SEQ ID NO: 2793 - DNA, 326 bp, Triticum aestivum
  Clone ID: LIB103-013-Q1-E1-H5
ccgggccgacgggaagctcaacaagctcatctggagcagtgggatcagaagcgtgccccgtagggttcgcgtgaggattgcccgcaggaggaacgacgaggaggacgccaaggaggagctctattcactcgtcaccgttgccgatgtgcctgctgagggtttgaaggggctgggaaccaaagtcgtcgatgacactgagtagactctttctttatctacatcgctagaatgagctgttattttgcattgcaccagcatgttttttgtatcctgtggaagttttggagtatggaatatcgcaagctatctattttccttcacaaaaa

SEQ ID NO: 2794 - DNA, 423 bp, Triticum aestivum
  Clone ID: LIB103-013-Q1-E1-H6
gacggggagttccagacggacggactcatccgcatcaaggtcgggctcagcgggatcctgatggtgaagggcacgccctactcccacatgaaccaggtccggcgaaacgaggagatgcacgggaccctcctctctgagaacgtcatcggcgtcatccacgaccattacgtcaccttccgccttgacatggacgttgatggcgccgacaactccttcgtccgcgtcgatatggcccgccaggacaccgcgcccggcgagtccccccggaggagctacctcaaggccacacgccacgtcgcgagcacggagaaggacgcccgggtccggctgaagctctacgagccggccgagttccacgtcatcaacccgacgaagaagacgcgggtcgggaacccggtgggctacaaggttgtccccgccggc

SEQ ID NO: 2795 - DNA, 377 bp, Triticum aestivum
  unsure at all n locations
  Clone ID: LIB103-014-Q1-E1-A11
gtcgaacaggtcaggatatgctcattcctgtgaaaagcccgacccagttaaaattagcaggccagcccatataaggcctacttgtgtcaggtccatttaagcccacggcccatacgagatgagccaattcggcccgtcaacggcccgttaaagatttgacaccattgcagcccatcgtcagttcgaccccgttaacagcctgctatatatttgggctcaatatcggcccgatgagatttcggcctgttaacggcccgtttaatggatgggccaattttcaagatgtacatctttcggccttttagcgacccatttaaatgtanggctagtttccggcccggtgtgtctttcatcctgttgacgacccataaatctga

SEQ ID NO: 2796 - DNA, 399 bp, Triticum aestivum
  unsure at all n locations
  Clone ID: LIB103-014-Q1-E1-A2
gggtcgaccgggaangacaactcaccgctcaaggccatcgatttcggcctctccattttcttcaagcccggtgaaaagctttcaggaattgttggaagcacctattacatggctcacgaagtattgaatagatactatggaccggtaatagacatatggaatgccggggttatcttatacattttactatgtggagttcctccgttttgggctgagaccgaacaatgggtagcacaagctattcttcgtgggaatatcgattttaagcgagaaccctggcctaatgtatcagaaaatgctaaagatttggttcgacctatgttggaaccagatccaaagctcaggttaactgcaaagcaggttcttgagcaccattggcttcaaaatgctaagaaagct

SEQ ID NO: 2797 - DNA, 354 bp, Triticum aestivum
  unsure at all n locations
  Clone ID: LIB103-014-Q1-E1-A3
gcgagcatgatcctctcggcctccagtctcccaccctctctggcgttcggcggcggcggttgaacggcggctggcagcggcgtatctgcagttttctgaagaattgcgtctgtccgcccttgttgcagagcaatccgagaatggcctggggtcagggtgctagaaggcccatactanggcttctgtctcgtgctcaacgacaagctgctcgagggtatacttctgcaacgttcgaaactcacctgtcgagcaatcattttgccccaaatggcatgatttgtaggagatttagctctgaggtgcctgcttcggagcaaatgaatcttattaaacgactacgcgaaagaacatgtg

SEQ ID NO: 2798 - DNA, 403 bp, Triticum aestivum
  Clone ID: LIB103-014-Q1-E1-A4
gggtcgactacattacacttcaccattatttgggcctagaggaaggcattgggaagtaataaatagatgatgggttgctagagtgacagaagcttaaaccctagtttatgtgttgcttcgttaggggctgatttggatccatatgtctaatgttgtggttaggtttaccttaatacttcttttgtagttgcggatgcatgcaataggggttaatcataagtgggatgcttgtccaagtaagggcagtacccaagcaccggtccacccacatatcaaattatcaaagtaccgaacgtgaatcatatgagcgtgatgaaaactagcttgacgataattcccatgtgtccttgggagctcttttctcattataagaaattgtccaagcttatcctttgctacaaaa

SEQ ID NO: 2799 - DNA, 400 bp, Triticum aestivum
  Clone ID: LIB103-014-Q1-E1-B1
gggtcgaggcggaaagtttagaatggagtttggcagcagcagcaggttctcaagccctccaacgctgtccatgcggaagtcaaggaacaatatctcgtctccgcagcagaggttgaggatgcagtcaggctctggaaatgccagcaagctatgcttcagtatccagaagagagtagctcttggttcacctgctccagcaagaacgacttccatgacgtctggtactggcatctttgatccagctctgcgcgagcagataatggcagggagattcggcaatgcgcagagggtgttcaacggcaagaggagaatgtccgtcctctaaggtgaagaagatcggttcggaatgttgagacagcggtgcggaaccgggatgctgaaggaatgtggtggtactttt

SEQ ID NO: 2800 - DNA, 419 bp, Triticum aestivum
  Clone ID: LIB103-014-Q1-E1-B11
ggtcgacgggagctgtggggagggctggctgccctggccctccaaacggccggcttcatgaggctcacattctgggagctctcctgggacgtcatggagcccatctgcttcttcgtgacgtcgacgtacttcatggccggctacgccttcttcctccggaccaagagggagccgtcgttcgagggcttcttccagagccgttttgtggtgaagcagaagcgtctgatgaaagcccgggattttgacgtccgccggtacagcgagctccggctagcctgtggcctcccggcgctacaccctcagagcccctgcgcgtcctcgcaggagagccaccaccattgccattctcactgccattgtcattgatgtgttgcttggaattttttatgcccatttgatgtggctgctgctgctgcttc

SEQ ID NO: 2801 - DNA, 395 bp, Triticum aestivum
  Clone ID: LIB103-014-Q1-E1-B3
gggtcgacgggtctatttcggacgaggagagtttgttttgccgcccaccgtgtatgaatggggaatggagggagaaacagaggtctttcggacgagcttgaatcaaatgagtttttctgccatgttttacacccaccgtgtcggaatgggctcagaggtggtcgtgtcacgtctaattgaagttactaacctacccctatttagagtagtggaaattgggccgatggattgtccgtgtaatgggtagacagtaatttccatctcccaaacacttggcttcaggcagccgatgtgggagtggacattttgccgtttctttcgaaatttgggacaataagcatccacgtttaccctggcaactaaattcgaatccattttatattcctatatgaatc

SEQ ID NO: 2802 - DNA, 397 bp, Triticum aestivum
  Clone ID: LIB103-014-Q1-E1-B4
gggtcgacggggggttctacacctcactcggcaagctaatcggaggagcaaaatcatccgttgcagagatcgtcggtgcagcattttccaggaagaagcgcccaaacgtccaccaataccagcagggcagagcaagcccctggccagtgcaagaaagctacgccatcccgcgtgatgagacgcctccggtggtggacacgaggacaccgacccctcgcaagaactacgctttcatgtccaaggagccggagaagatccaccacatccggcagggccgggccccatacaacggctggaacaacggagaatcgcctcagcagcagcaacagcagcaacagcaggtgcatcaccggcagtacctgcagcacaacaggcagtactccctggggccgcagac

SEQ ID NO: 2803 - DNA, 368 bp, Triticum aestivum
  Clone ID: LIB103-014-Q1-E1-B7
cccgggccgaccggtttggtgttgtgcacagactccattggacggcgggtaacttgtcgagccaactgccgggtgagcggacgagtggctcgatgagtcgcggcttgatgccggacaggatgagtctgttggcccgctcgacctgcccgttggactgcggatgtgccacggaggccaggtcgaggcggatgccggagacggagcagtattgctcgagcgcgcccttggcaaagttggtgccgttgtctgtgctgatgttgttcggcatgtcgtagcgcacctctatgtccttgatgaatcggacgactgttggcccatccaatttcttgattggtcttgactcaatccatttggtgaacatgtccaat

SEQ ID NO: 2804 - DNA, 410 bp, Triticum aestivum
  Clone ID: LIB103-014-Q1-E1-C10
ggtcgacgggatagcaaaacccaatagacctgatatcatcacgggaatcggtatatgggagcttgacaagacacaatggtaagaggtgagtcggatgcctcacaaattcttccaaggatttggtgagctggatgatgttttttgtagcggcggtgccgacgaccttgtctacatccaaagctatggtgcaactgctttgcttggatttgacatgaagcagaggcaatggaagtggtcggcaaaatgccctgtgcgcaaaaagtttcctctccagctgttcactggcttttgctttgagcctcggctggatattaccacctaatacttgtaccggtctgtaccgttgatttgctcggaatcaaacaaaaccagtgatcctcgtcttttgtggaagatggatgataaactct

SEQ ID NO: 2805 - DNA, 409 bp, Triticum aestivum
  Clone ID: LIB103-014-Q1-E1-C11
gtcgacggggaacattaacaacgtctcctgtgagcgatacttcggtttcgggtgtgagattgatgaggaaacatccaacaaactggaaggcattcctggtgttctgtttgtgcttcctgattcttatgttgatcccgagcacaaggactatggagctgagctatttgtgaatggagagattgttcagaggtctccggagaggcagagaagggtggagcctgtgccgcagagagcatcagataggcctaggtacaatgacagaacccgctaccaacgcaggagggagaaccagcagcggtgatgagccaaggtgctcaattgaagatcaaaaaataacaatccctggtggcttccgccgggtaaactgaaaggataaatatcatctacggaatagaagaactgcatgttc

SEQ ID NO: 2806 - DNA, 374 bp, Triticum aestivum
  Clone ID: LIB103-014-Q1-E1-C9
acgggcatttaaatttctaatatgtgaaagcacatggccattgatagcagaagagagattaagcatgttgcgaaaattcatatctaaactagccttcatctctttaatttttttcattttgataaaagtacataagagtagttgattcaacattttctcccttggggtgcccaaatatggtcttcatcttctcataagtctcaacggcatccccttcaagaaaaccattttcaaaaatagagtctgaaacttgcttgaaggaagaaggtaaaccaagataaaaacttttcaggtatatctctagttgatattggggcacatagctagctcgaattctcaacaacctatccgaagcatctttcaaagattcatca

SEQ ID NO: 2807 - DNA, 316 bp, Triticum aestivum
  Clone ID: LIB103-014-Q1-E1-D1
gggtcgaccgggagaatgatgtgcttctccttggagacgacccttgggagtcagttgtcaatagtgtatgggacatcaagatactttcaccacatgatgtgcacaagttgggcacacaggggaatgatccacgttacctttcctaattgcatgattaatgtgctgtctctgtggagttccatgggcaaaagtcaaattttgagtgcatcacgggttgcagcgacgactcgacagcacatggtaggagacttgcacacggagggacagtatccccggaacctcccaacttcacatcttcgtacctgtctcttgtatg

SEQ ID NO: 2808 - DNA, 390 bp, Triticum aestivum
  Clone ID: LIB103-014-Q1-E1-D10
gggtcgacggcatagaaagcgtgaagatagggatgtctcatcaagcaaggtagacgacagggatagggacaaagttaatactgtgaaagaagatagtgatcctaatagtgcatccaaacggcggaaggttaaaagagaacagtctgctttggaagctggggaatacgcgccttctgctccacagcctccgagcgttggacctggtaactcacagtttgaaatacgagagagagaaagaaagggtgctatttcacagcatcggccatcacatgctgatgaccttcctaggatgcatgccaaggattcaacaagcaagacaagtcgtaaagaggctgaccaaacacatcatagagactgggaagaggagaagaggcaaggactgaagcaaaa

SEQ ID NO: 2809 - DNA, 319 bp, Triticum aestivum
  Clone ID: LIB103-014-Q1-E1-D2
gggtcgactaagccttccagctttcccgtctcaagagctcgactaagcaatggtctagcccactcaacaaggctctcatcgcccaatggtctggatgaatcaacaggctttcgaccagtcataagctctaagagtacaacaccaaagagagaacacatcagatttctcagtcagtttgccactcgatgcatactctggagccatgtatccaaatgtccccataacccgggtagttacatgtgttacagcatcgaaagccaatcttgcaagtccaaaatcagccaccagtgcgtcaaagttattatccaacaaaatgttt

SEQ ID NO: 2810 - DNA, 325 bp, Triticum aestivum
  Clone ID: LIB103-014-Q1-E1-D9
gactgtacttttacaattagataactcgttcacccattatcttcatctctcgagcagggccgtatctgagaatttgggggccagtgcaaaatcaaagttcaggtccagatcttacgaaatcgttatggaaagaagtttttttaagttaccatatgcgcaacatactttttccaagagctatatggtgcaaataaagatgaattaataaccatgaatcggtattttagcttgaaggaacaatcatttccaggaagttttaccacaacgtcttaccgtgaatacaacacagactcactggttaacttattatcaaaatcggtcttag

SEQ ID NO: 2811 - DNA, 385 bp, Triticum aestivum
  Clone ID: LIB103-014-Q1-E1-E4
gggtcgacgggggaacgtactggacttgcgagatatattggaggataaggcaaggcaatcaagatcgatctacggatcgcgtgggcgccccatgatacgtgacgacaaccgtcacgccggacacaacaaatccggccgggccgaacacagtagacaaagctcttttgagcttcgtcatgatatagcccaatacagaggcgccgcacacccactatgcttcacaaatgaagtaacggatcatcaaatccccgaagggtttaaacccgtgaatattgaatcttatgatggcacaacagacccagcggtttggatcgaagactatctccttcatatccacatggcccgcagtgatgatctccacgccatcaaatacctcccactcaag

SEQ ID NO: 2812 - DNA, 397 bp, Triticum aestivum
  Clone ID: LIB103-014-Q1-E1-F1
gggtcgacggggatggatgcgtgtgatcgagttgatcaacacccacacgtgtgggcgttaacatttccgaaaattaattagttacgctaatagactgaaggagtttaatgtgacgttcagagaagcatttaaaatggtatgaaaatgcaattgtcaaacagaggtactaactatctgtgttatcattcttctgaagtcttgaggaagatgtccaaattatgttttccccttgaccatcagatgaagcttggtctccggctttggtcatatgtttgagaggaagcttctcatggaagggtggggagagtttcggttcggaaggtggtgggtgggagcggaggaaggaaaggggagaaagatgtgctttcctcgctgcaacgcacgggcaaattactag

SEQ ID NO: 2813 - DNA, 380 bp, Triticum aestivum
  Clone ID: LIB103-014-Q1-E1-F12
ttcacgggccgacggctgaagaaaacgcatcttgtcaaggctgctccggcggacaagtcgggagctgctgtgcgagaacggacctgagctgtgtgcggtggtgtcataaggagcctatccatctccactagaattatcccaagtttcacttcacatcgtgatgttgttttacctttttcctgtcattgtcctgctataacggatagcgctccctgttggcgccgccgccggcggggatgccctagtggtggagggtgtatgtcctcttccgcggggtgcccctgcttgtacctagatggttactctttccgtccattgtcaccggctaacattgtgataatatcagtctgggtaatgttagattaagctgttgtcctccg

SEQ ID NO: 2814 - DNA, 380 bp, Triticum aestivum
  Clone ID: LIB103-014-Q1-E1-F3
gggtcgaccgggaagaagcccaaagcggagaagcgggcggcggcgaccaaggaggccggcggcgaggggaagacgaggggccggaagaagggcagcaaggccaagaagggcgtggagacgtacaagatctacatcttcaaggtgctcaagcaggtgcacccggacgtcggcatctcctccaaggccatgtccatcatgaactccttcatcaacgacatcttcgagaagctcgccggcgagtccgccaagctggcgcgatacaacaagaagcccaccatcacgtcccgggagatccagacctccgtccgcctcgtcctccccggcgagctcgccaagcacgccgtctccgagggcaccaaggccgtcaccaagttcacatc

SEQ ID NO: 2815 - DNA, 423 bp, Triticum aestivum
  Clone ID: LIB103-014-Q1-E1-F4
gggtcgacggggactactatgaagatgtatacaaggtttgatctgatcattaccaacttgtggcagacgcggaagaagagttggtgaagatcatcggtgcaggttgacgcagctagggttttacaacctcccaaccgcaagattatttctgggtgatggagcattacgaggctaaaaaatgggctttcaagtaccgaattgacttgtcaacattggtggcgtcaagacaactgtagtcagcttattccaaaaaggataggataagataatttgagtcaactgcgcagccgttgagcgacatggctttgctaaaccagtgtgagttactggtcatttccaacaaaaaccatgtgctacgctactgccatgttgtgaccattggaaagtgagtaatgcatgccgcttaattgcaccaactccaag

SEQ ID NO: 2816 - DNA, 440 bp, Triticum aestivum
  Clone ID: LIB103-014-Q1-E1-G1
ggtccagaaaaccgggtcgacgggatgtaatgctaggtggctgacattgcaagtataatttactagtggctcagtgtctaattgcaagtgtaatattacttttttcttttgtaactgctgatttcgagtcattttattatgtccaaaaaaaaaaaaaaaaaaaaaaaaaaaaaaaaaaaaaaaaaaaaaaaaaaagaaaaaaaaaaaaaaaaaaaaaaaaaaaaaacgggcggcccaaaggattcaaacttaagtaaccatgaaaggaaagtcaaaacccctccaaaaggtcaaccaaattcaaatcaatggccgtccttttaaaaagtcctgaatgggaaaaacctggggttaaccaaattaaacccctttgaaaaaaaaccccttttgccaaatggggttaaaaccaaaaaggccccaaaaaatttcctttccaaaaa

SEQ ID NO: 2817 - DNA, 388 bp, Triticum aestivum
  Clone ID: LIB103-014-Q1-E1-G11
ggccgacggcgtgggcgatggcttataccggtggctcctcgcgggcgatatagaatgatacattttgcctgggtctttgacgggtggggacacatggtggatgcgggaaaaactagtgaattggagggaaaagagtacctgggtggaggggaaatagttttttttgcgaggagatggtttattttcagcaattaatttccacttagtatcaggtaattcacttacttcgacataagtagcaaattattacttataaactaaatcttacatgaaaattatgatatgtggtattttcactgttttctgtggaaaattgtaaataagtatgtcgaaagttgtacaaaagggtcctacgtatgtgatctggactgcgtctctccacccttca

SEQ ID NO: 2818 - DNA, 382 bp, Triticum aestivum
  Clone ID: LIB103-014-Q1-E1-G2
cgggtcgacgggcacgcacccatgtggaagaagaaatctatattttgggagctagaatattggaaagtcctagatgtccgctctgcaatcgacgtgatgcatgttacgaagaatatttgcgtgaacctgctaagcttcttgggcgtgtatgggaagacaaatgatacaaaggaagcacagcaggaccagcaacttttgaaagacccagatgaccggcatccggaatggtttcaaggtcgtgccagctacgctcttaccaaagaagagaaggtcattttttttgaatgcctgagcagtatgaaggtcccgtctggcttctcgtcgaatataaagggaataataaacatggcggagaaaaagttcaaaacctgaagtctcacga

SEQ ID NO: 2819 - DNA, 397 bp, Triticum aestivum
  Clone ID: LIB103-014-Q1-E1-G4
gggtcgacggggagtaaaagaaaataactaaacacgaattttaatttaggttcacattagttcaaattaaatccattaaattataaaattccaatttaagctttgttaccaaataaaacaaacgaaaattttctcgccctaaattttggaaaactttttcttaagcattccgataatcgggatgttacacaccctgttcactaaagatgagagaactcgttacttttatatccttaaaatatttccattctcattaaagggtgatgctaagatatggtttaattctcttgatcctggttgtgtgcgtagtccccatgatatgatttattacttctctgctaaatatttccctgctcataagaaacaagctgctttaaaggatatatataattttgtg

SEQ ID NO: 2820 - DNA, 350 bp, Triticum aestivum
  Clone ID: LIB103-014-Q1-E1-H3
cgggtcgacggggaggaagagcccgaggaggagctaggaactgaatatctagtgcagccgcttggccgtgctgaagatgaagagcattccagtgactttgagccggaagaaaatggtgatggtgctgaggatgaggagattgaggatgatgatgctgaggatggtgaggattctgtcaagccgcaatcctcatcgaagaggaagaggtctggtggggaagatgaagatgatgatgacggtgatgatgatggtgatgatgatgagaagcctccatcaaagcgatagtcaatttgttcttgctgatctggtatcttttctgcttgggccaagaaggaaaataatcctctggg

SEQ ID NO: 2821 - DNA, 391 bp, Triticum aestivum
  Clone ID: LIB103-014-Q1-E1-H4
gggtcggccggcttttatttctcagcgtgctttttctttttatttctcgccccacggacaaatgggcccggcgtgctttttctttttatttctcagcccacagacaaatgggcccgtcagctatagaaatacgagatacatatgcaacatgtagagccaggactactgtttcaacctcagagaccgtattgagcacatatttccttgtaccgggaccgtattgaagcaatacgcaagttccaggaccaaattggacgtcgccagcgactacgaggactatagatgcaattatctcatgtctgagaaagagagaaagagctaccgagaaagatttgtgatgtgtgcatgcatgtgaaagaaaatgagagagaaatgcatgcatgacagagaa

SEQ ID NO: 2822 - DNA, 366 bp, Triticum aestivum
  unsure at all n locations
  Clone ID: LIB103-014-Q1-E1-H8
acgacctacctaaacacttaagcctctagtccaggtttatcgcctatccaggttccatccgcagggagtccggccgaggtttcccatacggccccgaacgatgtgaacagggttcccgagataactaacgtgtattcggtacacccggccacgtacctaccgcatcacagcccacccctacggtcagcgctgtccacggcctccagtacgctacaaacaccagaaactacttgcaactcctggacagagagctagggtgaataagaagtcgagcggcgtcatacttcagggcccaacgcatggtagtagctgtatcttaaatcacacatacagatctcagtgcttaaagtcngcttcaatgaaaca

SEQ ID NO: 2823 - DNA, 398 bp, Triticum aestivum
  unsure at all n locations
  Clone ID: LIB103-015-Q1-E1-A3
tgacggaccgacaaacctagacaaatctcggggaaaatggagcttggagctcgagtttcgagatgagaaagattaactagtgtggctccgacatttcatcgaacagctcatgtgcatangaggtgagctagagcacccaaatgtgccctcccctcgccggccagagaaaacagagcactgtagagtgctctgccgtggcaatggggtatatatagccaactcatttgttccagttcgtggctggaaccgagactaaagccaagccttctgtcccgggtgaagccaagaaacgggtccaatgattgtgggccaggagcgaggcccattggtcccggttcgtgcctcgaaccgggacaaatgggtcaatacgaaccgggaccaatgcccacgaggcccca

SEQ ID NO: 2824 - DNA, 436 bp, Triticum aestivum
  Clone ID: LIB103-015-Q1-E1-A4
cgggtcgacgggttatcttgcgccatggcaacaagtaatccaacacacaagcaaacataaaaacggcaagcaaaaagagaggaggagattgggaaagagagggcgaataaaacggcaagagtgaagtgggggagaggaaaacgagaggtaaataatgtaaatgcgagagagatgggtttgtgatgggtacctggtatgtcttgacttgagcgaagacctccccgacaacggcgccagagatccttcttgctacgtctggagctaccattggttttccgcgaataggagagggtaatgcagcaagtgtagcgtaagtatttccctcagttttgagaaccagggtatcaatccagtaggaggctcctcaaaagtcccacgcacctacacaaacaaactgagaactcgcaaccaacacaataaaggggttgtcaatccc

SEQ ID NO: 2825 - DNA, 420 bp, Triticum aestivum
  Clone ID: LIB103-015-Q1-E1-A5
ggtgaatccatattaattcctgtcagggacgagcgatggtcttttcctaccaatctatccctctaggagcatgcacgtagtgcttggtttttgatgacttccaaatttttgcaataagtatatgagttcttttgactaatgttgtgtccatggattatacgcacttttacctttccatcattgctagcctcttcggtaccgcgcattgccctttctcaccttgagagttgctgcaaacttcgccggtgcatccaaacccgtgatatgatacactctatcacacataaacctccttagatcttcctcaaaacagccaccatacctacctattatggcatttccacagccgttccgagatatattgccatgcaactttccaccgttccgtttatcatcatgacacgcattactattgtcata

SEQ ID NO: 2826 - DNA, 442 bp, Triticum aestivum
  Clone ID: LIB103-015-Q1-E1-A6
ctcgcgggtcgacggggtcaccaaaatgcagtccgagaaggtcaaggacgagatcgtcctcgacggcaacgacatcgagctcgtctcccgctccgccgccctcatcaaccagaaatgccatgtcaagaacaaggatatcaggaagttcttggacggcatctacgtcagcgacaagggcgccatcaaggaggagtagagagccggaaaccgtcccgcccaccagaagccgtgtttctgcctgccgtgtttgtttcatcgtgtttgtgtctgtctgtcgtcgtcgtcttcgtggttttgaactttctctagactgaattttgtagcggagttaaatttttagggatgtgccgtggagcatgctatctttattgttatcctgcatatcgtcgccgccgcgagaaccggtgcgacgcttatctagccccaaaggctgaagacatgg

SEQ ID NO: 2827 - DNA, 420 bp, Triticum aestivum
  Clone ID: LIB103-015-Q1-E1-B10
tcgtgggtcgatggggatcactaaaatcaatcctctcacgcgggcaatccaaacctttccctattcttgcaaggtctcggaaacggaaaggcccctgctccgctgcgcgtttgcgagtttgggaagaagccttgcctgccggagggggggaaacgggcgagatggggcgagggcgcagcgagataaagaggatcgacaaccccacgcagcgccagtccaccttctacaagcgcagggacggcctcttcaagaaggcccgggagctcgccgtcctctgcgacgccgacctcctcctcctcctcttctccgcctccggcaagctctaccagtacctcgcgcccaccgtcccctctgtcaaggagttcgtcgagaggtacgaggcttcgaggcacaccaaagtttggtccgacatccgccaag

SEQ ID NO: 2828 - DNA, 392 bp, Triticum aestivum
  Clone ID: LIB103-015-Q1-E1-B11
cagtcatagtatgaaggtttcaacttggaaaggaaggcggaaagaagggaaatgtggcttttggtaggggggagggggcagggagttagatatttccgtggaagccaaaaatttggaatcgcttcagcgagaaaactggcgcgcaaagtgtcatcagacacagtcccttattcagaatagtgtacgatatgtggacatcgcaaacgattcagatagcttaactcgtgtgtgatgaggttgaacgtcaaaagttttggttcgaatttccatggttacagtggtcatccacgtcattgcataatttgggtacacaaaggagactacaacacacccacacttcttaatcgagcaagttcagcaattaaacagagctagatgacctaaacatcact

SEQ ID NO: 2829 - DNA, 409 bp, Triticum aestivum
  Clone ID: LIB103-015-Q1-E1-B12
ctcgcgggtcgacatcatcccccacggttgctgtggctaccgtgcgctccaccccaagattgcgcagttcgctgagcggaacccggacgtgctgttcctgcaagtcaactacgagaagcacaagtccatgtgctacagcctccatgtccatgtcctccctttcttcaggttctacaggggagcccagggaagggtcagcagcttcagctgcaccaatgcaaccatcaagaagttcaaggacgccctcgcgaagcactcgccggacaggtgcagcctcggcccggcgcggggcctcgaggaggcggagctcttggctctggctgcaaacagggacctggaattcacctacaacaacgagaagccgtcgctggtgccgatcgccgaggccatccagatggaagctgcctcc

SEQ ID NO: 2830 - DNA, 384 bp, Triticum aestivum
  Clone ID: LIB103-015-Q1-E1-B2
gtcgacggcatacacgaaggttaaactgattaggtgctggtgcacatattaaaaaacagtataacacagttagctatgactcttcacagtgttttcagcctctcagccatcggatcaccttaacgtgcgatatagatcagctctggatcgtctccaggtcatttcgcgggctgctgctccgcagaacgagcgtccatttctgtacgtaatcgggccgccaaaggcccaggtccagtcgaaatacttccacgggcatgggccacaagtcgtccagcggcattctccgactgctcattttccgttccgtcctctgtgccactgcccttccgtcgtccgcgatgtgccgccaggattcgctgcgctgtcgcaagcttctgttgtgtg

SEQ ID NO: 2831 - DNA, 426 bp, Triticum aestivum
  unsure at all n locations
  Clone ID: LIB103-015-Q1-E1-B3
tcacgggtcgacggcgaacagtaccgtcagcacgacggcgtggtgacgatcttgatgtactactgtcgcagggcttcgcctaagcaccactacaatattatcgaggactatggtggctgggggcgccgcacacggctaagaataagatcacgtggatcaacttgtgtctctttggggtgcccctgcctccgtatataaaggactaaagggggggggtgcggccggcctangagaggcgcgccaggagagtcctactccctctgggagtaggatccccaccccaatcctagttggaataggattcgcggaggggggaaaagagagagagaggggccggccccctctccttgtactattcggaccaagggaggggaagggtgcgtggcccatgttgagctgcctcttctcttttccactagggaccac

SEQ ID NO: 2832 - DNA, 249 bp, Triticum aestivum
  Clone ID: LIB103-015-Q1-E1-B4
attcacgggtcgacagccttttttattttttttttttttttttttttttcttcagaagctccctaaccggtcggtaagcagctgtcacacaaagattcttaagatcactgccgctgtaaccttcggtcatagtcgcaagctcctcctgtcgtcgagaagtttgtcccatggagtaagcatttttcaagaaactggccttggtgggaaagacacgggtaagctcgaagcgaacgaggatggtctgaaagg

SEQ ID NO: 2833 - DNA, 377 bp, Triticum aestivum
  Clone ID: LIB103-015-Q1-E1-C1
ggtcgacggggatatcgtagcagaaggagaggaaggggtaggcgtgggtcctttgggcctggaaggggttatggtggtgatgggtatggctatgtaaatgaagaagctggtgggtatcatggcatggagcataatgggcctcctgtgcaaggatatgagggtgatggaggaaggggccgtggtcgaggccgaggtcgtggacgtggccgtggacgcggtgggggtcgtggccgtggaccatttcctcaaggatctcctcaagagtagattggctggcccatcgactgaatgcgacaagtctcatctttgctagattaatggctgttgtatctggttaggtttatgtttaaagttgatagagtgactcagtgtggggg

SEQ ID NO: 2834 - DNA, 395 bp, Triticum aestivum
  Clone ID: LIB103-015-Q1-E1-C11
ctcataggtcgatgggcgaccatagtgtgagtcgtatcagcagcaagaagtctccgaccacccacgtccacgttagcagccggcgcggcgaccaaccggaaactaccgacaacggacggactgactgatttcacccaggaaactccataaaaccttccaattacaaccaccaaatggttgtataacttccttcgccggacaaacggaccaatgtctctgtgctacggcacgctctcttgcatcaacaaccttccttttatatatttcccctttacagggtatctctagtgtaaatttcacgcacatttgtctcagtgtatatgtaaaatgttgtagtggcaggagcagcagcatcatgtgtttctgacccgagcatcgtggcacatccactgttt

SEQ ID NO: 2835 - DNA, 393 bp, Triticum aestivum
  Clone ID: LIB103-015-Q1-E1-C2
ggtcgacgcctctgtggaagctaaatcatattaatgatggcctcggtcctcttcccccaaaacgtaagcatgaagggatcccacagtggccaatttcaaaataggcaagtagtacatcttatcctgacaaaaggtggtcttcgcctgctaagcttctggtcgtgtcgctgtggtgggctcggtgatgacatctatcctaccgtgctggcgatcttggtctcgttgcaccgaaatggaaacctttgccagatgacatccgtcctactgtgcctgtccttgactccttagcaccagacaccaatacatgaaactgcctcctctgcactcgctggagcccacctgccattgttatcacggcttgcgtcactgctagattgagggggagagaattgg

SEQ ID NO: 2836 - DNA, 193 bp, Triticum aestivum
  Clone ID: LIB103-015-Q1-E1-C4
cgggtcgacggcgaacatgaaagcaaatctggataggccccccaaggtcctcattgtgctctacatgacttaggcggacttatcccatgtgtgtaggtacaagtgcggccacactgggtctttcgatcaattcagcgtccgtcctacatcagtatccgtatcgggataacgtttaattcagtaatcttctaca

SEQ ID NO: 2837 - DNA, 250 bp, Triticum aestivum
  Clone ID: LIB103-015-Q1-E1-C5
cactgctctgaccgtgcgccaggcttcccaatgcacgcccagggacatcgaccagcgcgcggaaatctcccattcatgctgcgcgaacagggccaggcgcctcacggtggccccatactcctcctcggacagcacgggtggcacgcccggcgccagcaggcgttcgcggcgaaattccgtgcgccgccggttttccgcatcccagccctccaccagcgtgtcagcctggcccacggtcgtgctgtacgtg

SEQ ID NO: 2838 - DNA, 421 bp, Triticum aestivum
  Clone ID: LIB103-015-Q1-E1-C8
ctcgtaggtcgatgttcaaatctaaacatgaatcggataaacaacatacatctggtcaaaatatcgaacgaatgccacattcacatgactactaatagcaagacttctcccttgtcctcaggaacaaacgtaactactcacaaagcatattcatgttcataattagaggggtaataatgtgcataaaggatctgaacatatgatcttccaccaaataaaccaactagcatcaactacaaggagtaatcaacactactagcaacctactagcaccaatcccggacttggagacaagaattggatacaagagatgaactagggtttggagatgagatggtgctggtgttgatggagattgtcctctcccgatgagaggagcgttggtgatgacgatggtgatgatttccccctcccggaggga

SEQ ID NO: 2839 - DNA, 420 bp, Triticum aestivum
  Clone ID: LIB103-015-Q1-E1-D10
gggtcgacggggaatctgaatccaaaaccggccatgaagcctggccggtagatatagtccggcgggcgctctttttcctgaggagagcataagcgttagcgcgactcgagggcataaaccctaaacgttaaaattgcgcgccataccgttgtgccggagtctcgatctggtccgcacttctttttatcccgcctggcttcgatggcccatgttggctacccaccgcgggctcggccctccgccgcaaggatttcccctgcaaaacgaaacacaattggtttttgacaaacaaaatgagcatggatggatcctctgaagagtactgggacttcgatctcggtcacctttgaggctggaagtagtccgggataatcggtcgtaatggccactaaggtgttatccttccttaactgaagaaac

SEQ ID NO: 2840 - DNA, 416 bp, Triticum aestivum
  Clone ID: LIB103-015-Q1-E1-D12
cccgggtcgacgacgaaccctactacaccgtgatgtgactactactacgtgcagcccgctgacgacgaccaagagtagttaggaggatcccatgcaggaggcctgcgcctcgttcgatctgtatcccagtttgtgctagccttcttaaggcagacttgtttaacttatgtctgtactcagatattgttgcttccgctgacttgtctatgatcgagcacttgtattcgagccctcgaggcccctggcttgtattatgatgcttgtatggcttatttatgttgtagagttgtgttgtgatatcttaccgtgagtccctgatcttgatcgtacacgtttgcgtgcatgattagtgtacgattgaaccggaggcatcacagtcatatcgttgcagtgcttaggcgaagccctgcgtcggt

SEQ ID NO: 2841 - DNA, 378 bp, Triticum aestivum
  Clone ID: LIB103-015-Q1-E1-D4
gggtcgacggcattttataagagggagaggcaggagctacatactttctctacttggatcatatgcacttatgattggacccctagcaagcattcgcaactactaaagatcattaaggtcgtgaaactcaaccatagcattaagtatcaagtcctctccaggggcattcgcagatctgccacgcagcgtatctgatgctgcggagttctaccatgccgaggaggggagctcaacggagaaactgctctggtcccagtatgctggagccgaacacttgatgcctctgagtgaccaactgaagcagttggttgaactccacagggtgggcgaagtgggcaggcatagatttcatagtccggatgtggcctggtgagcccc

SEQ ID NO: 2842 - DNA, 421 bp, Triticum aestivum
  Clone ID: LIB103-015-Q1-E1-D7
ctcgcgggtcgacggggctagccaccggatctatccatccgcccctcgctgccgctgcgtctcgtctccaccacccaacttgcccccggactcaggaggatcgtcggagatgtcggacaccgatgagcaccacttcgagtccaaggccgactccggcgcctccaagacctacccgcagcaggccggcgccatccgcaagggtggacacatcgtcatcaaggcccgtccctgcaaggttgttgaggtctccacctccaagactgggaagcatggtcacgcaaagtgtcactttgttgccattgacatctttaatggaaagaagcttgaggatatcgttccttcatcccacaactgtgacgtcccccatgttgaccgccaagattatcagctgattgacataactgatgatggatatgtcagc

SEQ ID NO: 2843 - DNA, 405 bp, Triticum aestivum
  Clone ID: LIB103-015-Q1-E1-E11
ctcataggacaatagggctccctaaagtgagtcctagtacctggaggaagaaggttacggtcggacaattccgagaatcagacctgccaatatgagaggttaaatgcaagaaacgagaataaggcccatgccaaggaaggcgagggtcctgcggctggctgctgctaaggatagcaggcagtagagaagtttctttctgatttgaagtgtgcagattgggacagctcgctttctgtgggcaaccagctgaatgctaaaatgtcataaatggctgtgaacagatcggatatgattcgtacatcagggctcaagatatgtggttttggattatggtacgactcaagatatgtgacctccaaggaaactgcaaactcaagatatgtggtcttggactagcaagatttg

SEQ ID NO: 2844 - DNA, 420 bp, Triticum aestivum
  Clone ID: LIB103-015-Q1-E1-E12
ctcgcgggtcgatatcacgcactaaatcgagtcggaatacctgcaccaccacctcaggtacgagatgatgtccatattcctaaactgaaattgaatattccaccatttgagggtagatatgttcctgatatatatcttacttgggagttagaaactgaacaacattttacatgtttacaatatcccgaggagagacgggttgctgctgctgtttgtgctttcactagttttgcatgtgtctggtggtctgaacattgtagattatatcctattccaactacttgggctgctttgaaaaccgctatgcgtacgcgttgggttccaccatatcatcaatgtgaattgcttcaaaaattgcagcgtttaagacaaggaaaaaattctgtagaagaatattatcaggaattacaaactggcatg

SEQ ID NO: 2845 - DNA, 381 bp, Triticum aestivum
  Clone ID: LIB103-015-Q1-E1-E6
acgcccgggtcgacgggccacccatcacatgctggcgatagtacgggaccatcatcaactactgctaccgagtagactcaaagattgggccgcgagcgtgtcggcaatccaggacgcggacatcagacaagaattctttcgcatccagtcggagtttgcggaaatcatccatcaagatgtccttcgtacctcggggtcgttctacctcagaaatcaacagtccaacaatgacatcgacacaatcctacaaatgcaggctgacaacgcccgtggtttcatgactcccacgatagacggcggcttcatccacgctccggtcccttgagtcgagtcgaaagcagtgatgctgtgtctagttcggaaacatcgattggctcatgt

SEQ ID NO: 2846 - DNA, 308 bp, Triticum aestivum
  Clone ID: LIB103-015-Q1-E1-E9
gatccactatgatgagtcatattaataagaagaagaagaagaagaagaagaagaagaagaagacgaggaggaagaagaagaagaagaagaagaagaagaagaagaagaagaagaagaagaagaagaagaagaagaagaagaggaagaaagaagaagaagaagaagaagaagaagaagaagaagaagaagaagaagaagaagaagaagaagaagaagaggaagaacgaagaagaagaagaagaagaagaagaagaagaagaagaagaagatgaagaagaagaagaagaagaagacgatgaagaagacga

SEQ ID NO: 2847 - DNA, 390 bp, Triticum aestivum
  unsure at all n locations
  Clone ID: LIB103-015-Q1-E1-F1
gggtccatgatccaccctaaactaatgtcgtaatagaaggttattactgttggtgaaccctgtggttgcggaggtgggtgcatgacaggactcatctcccttcgtagcggatcgttgcaacaggggctaaaccagataccacctatatataggctgcgtccatggggacctctttcnccttaataaccgattggtaaccggagtggggaagaacggtggtggtgtatgtgatacgaagctgctgagcgtatgcacatatctgtaccggctttgctcacaaatagaaacatgtaaagtggcttaggaatccgaagtagtattgtgtttatgcaccgctatagatgcacactataatggatttcggactcgctgggacgcttagtcccattt

SEQ ID NO: 2848 - DNA, 426 bp, Triticum aestivum
  Clone ID: LIB103-015-Q1-E1-F11
tcacgggtcgacggggatacatatgataaatcatctcagaatatttctcctctctctcccaggagtcggaggacagaaaccaggaggcgacggaggggacgcaacgcgactccacactcttccgcacgaatcaccgctctcctctagctggagcaataagggtcacccggatgaccggggcagacctggcaccagtaatggagttgaaggctgtggcaaatggaggaacacccactgaagttgttgcttctgataagaaggataataccaagatggaagaggctgacgagagcaaggatgttgcagtagcgaataccaatgctgaccaacagaataaagcctcagaaaacggcgctaagggctcatctgatgatgatgccaagatggaggaggctgaagatgcaaaggaagatgatgtgggtgctg

SEQ ID NO: 2849 - DNA, 400 bp, Triticum aestivum
  Clone ID: LIB103-015-Q1-E1-F2
gggtcgacgtcctctcccaaggctactgtggctaccgtgcgctccaccccaagattgcgcagttcgctgagcggaacccggacgtgctgttcctgcaagtcaactacgagaagcacaagtccatgtgctacagcctccatgtccatgtcctccctttcttcaggttctacaggggagcccagggaagggtcagcagcttcagctgcaccaatgcaaccatcaagaagttcaaggacgccctcgcgaagcactcgccggacaggtgcagcctcggcccggcgcggggcctcgaggaggcggagctcttggctctggctgcaaacagggacctggaattcacctacaacaacgagaagccgtcgctggtgcccatcgccgaggccatccagatggaagctgc

SEQ ID NO: 2850 - DNA, 413 bp, Triticum aestivum
  Clone ID: LIB103-015-Q1-E1-F3
gtccacggcgccgcggaaactcaggcgacagatcatgcgctgcgcctcggtgcacttgtaggccgcagacgatggaccagcgtccgcgatgacgacggacgttcgccatgacgacggacgtccgccggcgagcccagcgaagccttctggccacatgctacatcaacaatcaaccccagcatccttctttgttaacgacatgtataattaatcttctcactttttctctcttttcatctcccgtttcagtgaggagcgacgatggagagcgcgccccggggaagggagaggaccaagaggagatgctactggcggcgacataatcggcaccgggtcggagcaacatgaaagaagaatgcatccgcgacgacggcggcggcaggagtacgttgccaacgacgggcaggcggccg

SEQ ID NO: 2851 - DNA, 415 bp, Triticum aestivum
  Clone ID: LIB103-015-Q1-E1-F4
ggtcgacggcactcttgaaaggtgatggaggaaccttcagtacatgccattagggaaaattgtggcagagcaagcagtttcagcgctctatcagtctaacgtcggatgctgggcaacaaggaaaactcttacgagatcaacaacagcaccgctcctaatgtttcccgagggtcaccagttttaccccatcaggaacattgtggagcaacaattggaattcaaacaattcagtattccttcgcaccaggtaacattgtagggattctaggtgtgcttgggcaggcagttaggcacaaataagtgaactatactgaggaccggctactgagccataatgctacccctttccctatgttctctactatctaaaaaataagtgagggtaccaagtgcgagttcctcctccaaggttttc

SEQ ID NO: 2852 - DNA, 413 bp, Triticum aestivum
  Clone ID: LIB103-015-Q1-E1-F8
ccctatgttgagtcgtattacggtgtcagtggagagaaacagcaggatgctgtcaatgggaagccaaagtcgcctgtagcgaatggtgttaacggggatgcgaaggttccggcagagaaagccgctgccaccgctgctcctccagccgttacctacgcggcgaaggtggcccaaacagcagcggccgagaagaagcctgcggcgaccgagaagaagcctgtcgttgccaacggtgctgtcaagaccggtgtagctgcttgatcgcatacccgatcctcccagctagccatgaagaacaaacggacggtgctggcgaaccaggcgagacatgcggggtcccaaggtactgatcaccaaaggtggctgctggaaagcgggtcggatagttaggtttccctagctctctccctttt

SEQ ID NO: 2853 - DNA, 415 bp, Triticum aestivum
  Clone ID: LIB103-015-Q1-E1-F9
cggggtacccaagggtgagtcccagtactccttctccctcaccaccttcagcccatcggggaagctggtgcagattgaacatgcactcacagcggtcggatcaggccaaacctcccttggcatcaaagctgccaatggtgtagttatcgccaccgagaagaaactgccttctattttagtggacgaaacatctgtgcaaaagattcagtcgttaactccaaatattggagttgtctacagtgggatgggtccagattttcgtgttcttgtcagaaaaagtcggaagcaggcacagcagtattatcggttgtacaaggaaaccatccctgttacccagcttgtccgagagactgctgctgttatgcaggagttcactcaatctggtggcgtaagaccatttggtgtatcactgttg

SEQ ID NO: 2854 - DNA, 440 bp, Triticum aestivum
  unsure at all n locations
  Clone ID: LIB103-015-Q1-E1-G1
tcacgggtcgacggcgctcactaattcgcctctaacgggcctggtttttagcgggccacaattggtccggcctgcatctttcttaggcccgaatggccattggtgccttcacactttgcgccaagcccacaacttactttggcctatattcgacccatattttagttgggccttttgtggacccatcacttagattggcccaggtagcgttgggccattaacaggctgaatattctactggcccgttacggcccanaagaaaccatgggcctttagtaggccgaaatgcatgttgggcctcaattttcactagtcatcgacgggccttcagtaagctaaaatgtagaccgggccttttttggcccagttatatgataagccgttactaggccaaaacatatcttgggccttagttggcccactgaaatcttggcctttaa

SEQ ID NO: 2855 - DNA, 422 bp, Triticum aestivum
  Clone ID: LIB103-015-Q1-E1-G10
tcgcgggtcgacgcgcaacactaaaatgcgtccatgcagacccagtacatactgttaatgtagctgaggctgacggggatcagatcacagtgaagggggttgatgctcgccaccctatgatcgttatgctgcatgacacgctgtttctgaagatcaggcggcatcagcaagcaaggagctggtttaaaacgctttggcctgagggctttgagtaaacgatacagccccgacgagcacgcgacgagcggcatggtactgagattgtccacacgtgaaacaatgagcttgattacctctgtggggagcgaattccggccactctttcggcggacgctactcggttctgccattgttagtgcttgggtttcggacgacgggggaggcgccttagcggggatggaagcttggaccagattatgttc

SEQ ID NO: 2856 - DNA, 415 bp, Triticum aestivum
  Clone ID: LIB103-015-Q1-E1-G12
ctcgcgggtcgacgaagcacactattatcagtctaaccacttggatgccacattgtcccattgctgcataaaatcctttcatctttctgtttcagcaatgacgggtcggccattccataagaatatcaatggccacgtaatctggagtccacctctcttccatcatacgacccatcgattcaaaggccttttcaggcatattctatatcacgaagtctcttcaacaataattatctgatgagaataagagactcatttgatgtagatggcttcatgtcaagaatgtgttgctgcctgttacactactatctactgaccagctgagcactgatataactgctttctgcactcctcaataatggcgctcatggatgcaaacaccagaaaaaggaactgatgagtacccaaccaacag

SEQ ID NO: 2857 - DNA, 435 bp, Triticum aestivum
  Clone ID: LIB103-015-Q1-E1-G3
gggtcgacggcgatctatcatatctgcatttgtgcttcaaattgctgatatgcaaaattaaagcagtttgaatggttctagaacaagtaccatccataaaatattgcgtccattgtaatgagtgattgcttcgatctatttagaacttcatagtttcgacaggtcatctaaattgcttctacagtcacaacaaccagaattgctcacaaatgtatgcttgacaatagcaaacaacgacgtaggggacaagctggcaatgacatggaatttggtatttgcatcgattaaattgggactttgcttccaaagaatttggtatttgcatcctaagaaacgagaatttccttccgaagaattaggaacctccatctaaaaaaaatgaagatttgcttccaaacaacaaaaaatgatgcatatggacaggatttggcccaa

SEQ ID NO: 2858 - DNA, 412 bp, Triticum aestivum
  Clone ID: LIB103-015-Q1-E1-G4
ggtcgacgggagcatcgtatattaaattagtctttgctttttagtctaccacaatcatacttgctgtacacgccttttgggagaagcccacttgattagaatttattagaatactctatgtgcttcacttatatcttttgagctagataatttttgctcgagtgcttcacttatatcttttagagcacggcggtggtttaattttgaagaaatttttgatctctcatgcttcacttatattattttgagagtcttttagaacagcatggtattttctatggttataaattggtcctagaatgatgagcatccaagttgggtataatagaaactatcataggaagtgaattggatgctatgatcaatttgatacttgataagtgttttgagatatggaggtagtgatattaaa

SEQ ID NO: 2859 - DNA, 363 bp, Triticum aestivum
  Clone ID: LIB103-015-Q1-E1-G5
cacgggccattgatctacaataacatagacatgcaaaatactatccggtactaagttcatgataaattaaagttcaattaatcatattagttaagaactcccacttagatagacatccctctaatcatcgaattgctcacgtgatccaaatcaactaaaccatgtccgatcatcacgtgagatggagtagttttcaatggtgaacatcacgatgttgatcatatctactatatgattcagcctcgacctttcggtctcagtgttccgaggccatatctgcatatgctatgctcgtcaagtttagaccgagtattcttcatgtgcaaaactggcttgcagccgttgtatgtgaagatagagctt

SEQ ID NO: 2860 - DNA, 406 bp, Triticum aestivum
  Clone ID: LIB103-015-Q1-E1-G7
gtcgatgtcaaagtctaaagtgagtcgtaatactatcatcaatgctgaagaagaaagttaccgcaaaagatatgatttcagggaggcttctaaatggtcatgctagggacgcaacaataagagaagcttctaatactgatgatatgacctacagggaagcattcccaaatcagtggcagtgaaagcaccctgagtaggtctttcttcataattaacagttttgttttgctgtgctgttgcatgcttgaagtgcttgaagtacgcggggcactgaatctgcttcgaacccgtgcatggaaaatttcagaaaggaaagtcgtagaccatttgtattggcagtcggattgagaatccatatcataacaacgcgacagtagataagcactcgattttgtgaacatgccaa

SEQ ID NO: 2861 - DNA, 396 bp, Triticum aestivum
  Clone ID: LIB103-015-Q1-E1-H12
gataccctatatgcaatcatagtattgcttttctcttccgatcgttctgttgcatacttatatattgcttatgtattgtctgtgaattggtactaacgtttcgtttggctactgcatagcgatgccgtggtatgtcgtgtacaagggtaaggttcccggagtctacgacgactgggaggagtgtcgcagacaggttcaccgattcagcggcaacagttacaaagggtacgccactagggccgaggccgaatctagatacgcccgctatctagcgggagaggggagggagcgttggaggaaccggatgaagacgagcttcatcgtgatgactgcagctctcttctatgtgatggtagtttagatgatcgatatcgacttgtaatgtgaagacaaact

SEQ ID NO: 2862 - DNA, 369 bp, Triticum aestivum
  Clone ID: LIB103-015-Q1-E1-H4
gtcgtcactaacatgaatcttgggacagttcgagcttgtcgctgccggagaccctgtagaggtgcgcgaagagacctggttagatttgttggccaccactggtagatgctccatgtctcctcctctggttccttgtgcattattgggttgtctcaattttcagtttggaacacttagctatgaatatttttttgattaatattgatgtcgttgttacatattggtactgggaagattttatgtattattgctgagctctcatgagcaggcctaattttacagatgtttagtgcaccggttcctgttcatttacaacacagccctgtgatctaattgatgtttccctgaatttatgacaggtaaactgca

SEQ ID NO: 2863 - DNA, 353 bp, Triticum aestivum
  Clone ID: LIB103-015-Q1-E1-H5
tacgacaccctagactgagtcataataggcgagggctgctggccgaggcaaggttcgtggcgtgatggcagcgttgatggtggaggtcgtggcgtggtggcggctttgatcatggaggttctgtttaattccccgggggtgtcatcgctgggctgtcaaatcctgaagggaggagtctgccggcagaacatttgttttgaaccgtagatctgtttgtagtacagtggatgtaacatggaccgttggatgcaaccatgtgggtttgatcagaccttgtgggttatcctgtgtgcactttcttgggtgcacgtatgggaagtcacgtttggtcatttaagagtagtatatataca

SEQ ID NO: 2864 - DNA, 433 bp, Triticum aestivum
  Clone ID: LIB103-015-Q1-E1-H7
ctcccgggtcgatgggaaactcaaaaatttgtcatcagatttagaccaaaggaaggatgaatcaattgaacgcacatttaaaggagttgcaaggcacttccgcgaagtgttctctgaattagtgcaaggtggtcacggatacttggttatgatgaagaaaaaggatggtgatgctggcgatgatgacatggatgaggacgtgcctcgtgaagcagatcctgaagggaggatagagaagtatattggtgtgaaagtcaaggtttccttcactggcaagggagaaactcagtccatgaagcagttgtctggaggacagaagacagtggtggcattaacactgatctttgctatccaacgatgtgacccagctccgttctacctgtttgatgagattgatgctgctctggatcctcagtacagaacgggtgtccgg

SEQ ID NO: 2865 - DNA, 415 bp, Triticum aestivum
  Clone ID: LIB103-015-Q1-E1-H9
gtcgatgggttaccccataatgcgtccttctagcagtgacatcgacacaatcctacaaatgcaggctgacaacgcccgttgtttcatgactcccacgatagacggcggcttcatccacgctccggtcccttgagtcgagtcgaaagcagtgatgctgtgtctagttctaaaacatcgattggctcatgttgtaattaaactttaatgaacttgtagtatgtctctttggtttcgagagtcgttcaacttagatgtaatcgatgctattaatgtcttgcttttctcttccgatcattctgttgcatacgtatatattgcttatgtattgtctctgaattggtactaacgtttcgtttggttactgcatagtgatggcgtggtatgtcgtgtgaaaggggtaaggttcccggagttc

SEQ ID NO: 2866 - DNA, 397 bp, Triticum aestivum
  Clone ID: LIB103-016-Q1-E1-A10
gaatcttgctattctacgtatgttgcctattgacgtgcggcttgaaggcccggtcgcatgttcgatcctcgtcctttattttttaatttgtatatgggtccaaatttgattcatgacatgtgggcccctcggtgtgtagtttgtagcactttaattagtgggtcaaaatttgttccattccaagtggactatcggtgtgtagttttgtagcttatttataataattaaagagaacaacatagttttttcaataataccatggtgcgacgttgaaggtgagaaaggacgtgcgagagactgatggcccagccggagggaaatcaactaggggagttgcgttggttgcaacggtgtttggagtagttgtgggccgaatgctacgaaaatataatctaaa

SEQ ID NO: 2867 - DNA, 384 bp, Triticum aestivum
  Clone ID: LIB103-016-Q1-E1-A11
gggtcgacggtatcctgagtactcaccatttccacaagaaggcaaaaaccaccaagaagattgtgctgaagctgcagtgccagagctgcaagcactactcccagcgcgccatcaagaggtgcaagcattttgagatcggtggagacaagaagggcaagggaacatccctcttctagattgctttcacctatctgtagtcattgtgttcaagaactattactacttgtcgtaatgttttgatgttatgagttgaatcaatcatgtatccaaacccctttatctggcatttgagcaacgatcgacttggcagaatgatcttttgtagcttgaatcctcttttaatctcaggcattgccgtaacgtggatatggatgtcctgtgccc

SEQ ID NO: 2868 - DNA, 429 bp, Triticum aestivum
  Clone ID: LIB103-016-Q1-E1-A12
tcacgggtcgacgggacacactaaagtgagtcgtatgaatagagccttgcctctaaggtaggccccacatggtttgcctcttttttaacataacgcgtcaagtcgcaatttgtttgttcacccgtggtagacgatcctccctccaccaagtggacaaccagtacacggtcaaattaccacgtgggctgccttttcgtacagaaatgagctccaccatgtgcccgcgcgggtgtggttcggaaagagacgggagtacgtgcgctgtgcgtgcacctcttctcttcgtgcatgtcccccacctaagtgggtgtgtgtgagacatacaaacctagacaaatggcttgtgtggaataactactcttcgtaagccattgtaagagtggacaaaatggtgaaggagacgataggggagccggcgaggtgtgcccc

SEQ ID NO: 2869 - DNA, 356 bp, Triticum aestivum
  Clone ID: LIB103-016-Q1-E1-A2
catgctcttagagataacagtaaagatgttatcgggagcatgctcaacctctctaaaccatgacatcaaactccatcataatttgtgggagaaaaggataacagatgatacatccaccgaattttgcgtttgcaaaactatagccaccaatacacatgcaaccttggtgaatatggaacagtgttacatttattataaacataaagttcctggggtcaaaagcagttgtgtctcgaactctcgattcatggttggaaaagagtatacgtgcaaacagtacaataacaaatggattgacctgtttaactcgatccttttatttatacaacagtagaaattaaatactactatgctga

SEQ ID NO: 2870 - DNA, 427 bp, Triticum aestivum
  Clone ID: LIB103-016-Q1-E1-A3
ggtccaggccaactgaaaaatcaatcctgatagaccaagtcagtaagttgactgggaagaaaaatgatctggaggccttcctgagtggtcttgccaagaagctgtttcttatgcttgaaggtaaacctctatgctcggcaaacatttccaattgtggtttttccattcgaccatccccttgacttagtgatcatccttgcagaattttgtcaaaactttgaagaagaaactagccggctggagccaaacctcgaccccgtcaattctccggtgaacgacgaagttgccatggatgttttctgactggagtctcgtgttgcagctgtcgtggactatctcgcaaggctgaaggccgccacatctcgcatcgactcgacgctctggcctgaggagacacttcataatgaccttgagtcgtttaagggcg

SEQ ID NO: 2871 - DNA, 148 bp, Triticum aestivum
  Clone ID: LIB103-016-Q1-E1-A6
gggcaccatctgatggatcatattcaggagcagaaggagaagcaggagaaggagaagcagaagaagaagaagaagaagaagaagaagaagaagaagaagaagaagaagaagaagaagaagaagaagaagaagaagaagaagaagaaga

SEQ ID NO: 2872 - DNA, 407 bp, Triticum aestivum
  Clone ID: LIB103-016-Q1-E1-A9
cgggtcgacgggtatcttttgagcgttacaattttgctctatgtgcttcacttagatcttttagagcacagtggtggatttgttttaaggaaactattgatctctcatgcttcacttaaattattttgagagtctcttaatagcatggtaatttgcttaataataatatgcttggtattcaagatttgtgaaactttcttttgagtgtgttgaatactaagaaaagattgaagcatgataattgttttgagatatggaggtgataatattaaagtcatgctagttaagtagttgtgaatttaaagaatacttgtgttgaagttagtgattcccgtagcatgcacgtatggtgaaccgttatgtgatgaagtcggagcatgatttatttattgattgtcttccttatg

SEQ ID NO: 2873 - DNA, 416 bp, Triticum aestivum
  Clone ID: LIB103-016-Q1-E1-B10
gggtcgacggccaagaagaaacggagaaaaacaagacattggtagatgttcttgtttgctcagacatctcataggaaggacgaagaatagttagcgagtctctgaagccgaagttcaacctctttgtcaagcaggtgtccgccagcattgggatggcagagccacacattgatgtatggatattttctggttgcttgccccgttctcaaactaataaaaaggaagtacatgctaatcttttgttttgctcatatgatattgctcatcttttgttttctgtctgatgcctcctgtatctagagcagaaatattcttaatttagtgtttcttgaacatggccagggcaatggataaaatctactctggatagttgacagagggagtacatgctaagttgacttttttcctgcggattt

SEQ ID NO: 2874 - DNA, 416 bp, Triticum aestivum
  Clone ID: LIB103-016-Q1-E1-B11
ggttctagggtcgacggacagtgatttatcaaaaatttagatatctacaacccttctcttcctaaacgaaactgacattgcaaaagtagaagtataaggcactagctgaatttattctagcattctaaaaaaaatgaatttagtctagcgcgccctccagctcgcacattcataacaaaattccatgcaaaacatagaattagttgaaccatatattaagcaaaaaacaaatactacatgcagaaacatattttaaaaaataaagaactactaaattgtttttttactttacatgttagtttttccctttttgcaaaaaatgatccaaatatattataaaaggtgcagcagtagtataaagcatctcaaacatcaataaaattacattaagggacctggaccatcgaacaacaact

SEQ ID NO: 2875 - DNA, 406 bp, Triticum aestivum
  Clone ID: LIB103-016-Q1-E1-B12
ggtcgacggcttgccccaaactaaggcgcaccataattgcaaacaaagacatagatggatagagcactacaagattaacaaaacatccttactgatcatcctcaaaagaggcacggatcactaggaaacaacatgaacataaggccatatgagacaaacagctcaaggacttagtggaaatgctaagtccctgaaaacagaattaacaagtgcaccactttgcaagcttgcactagtcaccacacacatcacaaaaatacatgggttgcacctctggaaagatgacaaaacccttaacaaaacacatgtagagcatcagggcatatcatgcacacaataatcatggcaaaaatgacaaaaacctaaatggagcagcagatctgacaattatctcaagtaacctccg

SEQ ID NO: 2876 - DNA, 394 bp, Triticum aestivum
  Clone ID: LIB103-016-Q1-E1-B3
gtccacggcgaagctaaaattaaaacgcagcattctgaagccaagaacaaggagctcagcggaaacaatatctttggtccacctcctgagacccctgcaaggccactggctgctcgtaatatggagctacaaggaaatgtacattttgcacttccacaacgaagaagcgtgcacacatcagtgaaagtatccaatcttgctggaggtccaagcaacatcacgttcagtgaggatcctgtagcgaagacagcaaagaaaatccacaaccagaagttccaacagctgacaggcaataacatctttaacgaggatgctccccctggctcagctgacaagtctctgagctcagcaaagcttaaggagatgagcggcaatgacatcttctctgaatgaa

SEQ ID NO: 2877 - DNA, 408 bp, Triticum aestivum
  Clone ID: LIB103-016-Q1-E1-B6
ctcgcgggtcgacacacttatcaagttgcaatgggaacagaacccactgcaggaagcatctggtggaaagaagatatctattaacgaccttgttattaaggctgcagccttggctcttcgaaaggtccctgagtgcaacagttcttggatgaatgattttattcgccaataccacaacgtgaacataaatgtagctgtacaaactgagcatggattgtttgttccagtagttagggatgccgacaagaagggacttggtacaatcggtgaggaggtgaagcagttggctcaaagagcaagggataacagcttaaaaccacaagattacgagggtggcacgttcacagtatcaaacttgggaggtccttttggaattaaacaattctgtgctattagaaatcctcctca

SEQ ID NO: 2878 - DNA, 419 bp, Triticum aestivum
  Clone ID: LIB103-016-Q1-E1-B9
gtcgacgggcgaggtgatgtgatagctgctctgctccccggacaagattgaagccatgatcggagctatgccggcaacaaccaggaaagcagtcaaggctctcgcgatgctttccctgtgggagatctggcaggagaggaaccgttgcatttttagggcaaaagaggccagtgtggctgatgtgctacttgcaatcaggagaagcctaaacctctggcagcaaggcggcgtcaagttctttcagagccccttcggggaccccccgggagagtaggctagtggattgtgccaggggcactttgctttcttcttcattcttcttccttctctccttgatctgcggatcctcgccttgtcacttttgtcatctgctccctgcttaataacaatgaaacaccagcctttgctggtccttaaaa

SEQ ID NO: 2879 - DNA, 155 bp, Triticum aestivum
  Clone ID: LIB103-016-Q1-E1-C1
gggtccacggcaatggttcaaaggtaaatgtgatcgccgtctgcacgctacctctgcatctcccttcgggattagttttaaagcttaataattgttatttagtgccagctgttagcatgaacattggtatcgggatgtcgtttagtttgagatgg

SEQ ID NO: 2880 - DNA, 408 bp, Triticum aestivum
  Clone ID: LIB103-016-Q1-E1-C10
ggtcgacggcggtgcaccaaagtgggttgaaaaatcacatgtgtgtccttggttgaatttctaggtcccatggaagaaatgagaatgaaattcaaacatctgggcgtcatgactcggccgagaacatcgagaaactttgattataaattcatgtaaatccaaaactcgcctggaaatcatgaaacttggcatggtgtcatgtcatggcactaacatgttgtggtaaaaaattgtgccgattggaagctcatggttctaagagggaacgtgccacctttgagtgtgaaacgatatacgctgcccccccttgagtttcttaacaaaggcaacatagaactacattagtgccctgttaaattttggaattattccgggttcgtttgtcgttttttatacattaattgagtt

SEQ ID NO: 2881 - DNA, 408 bp, Triticum aestivum
  Clone ID: LIB103-016-Q1-E1-C12
tacactaaattgagtcgtattatttaaaaactgttggcagcattaaaaaaatgttcacatgtttcaaaaaatatatccctgaaagaatgtttatgtaataaaaaattattcgtgtagttttataaaaatgtctcaacgtgtattcgaaaaatgtttaacaggtattttagaaaatgctcaacaacatgtgtttaagaaaaaaatgtgtaaaaaatgtttaaggtgtatacaaaaaagatacaatatttcagcaaaaatagacatcaaaacatatatttgaaaaatataaatcccgtatttgcaaaatgtaaaacatgtataacataatgttccataaatatacaaaaattgtataatatgtaagaaaaaaatttagacgtgaaaacatatatttgaaaaaatgttaat

SEQ ID NO: 2882 - DNA, 312 bp, Triticum aestivum
  Clone ID: LIB103-016-Q1-E1-C4
ggtccaaaattatcgggtcgacggctatgctatgcctgatttggtacatcgttaatgtgtgttgtactgatgatgcattatatgtcttcacatgttcacttgggagatatttcatataccgccagctgaaataaatatactaccattaagttttgttcacatgtacgaatgtcgtcgtacatgttaacttttgttcccacattggtcctataacataccgttgatctaatgcattgcttctctaaccaattgttttcagttgcggtcaaataacaattgtacgtaccgctgaaatgtcagtcatgatcagtt

SEQ ID NO: 2883 - DNA, 404 bp, Triticum aestivum
  Clone ID: LIB103-016-Q1-E1-C5
ctcgcgggtcgacgggacaccctaaactgcatcctacaacttgtcatgagtagcggcaagtacacgctcggctacaagaccgtcctcaggaccctcaggaactccaaggcaaagcttgtgatccttgctaacaactgccctccgctccgcaagtctgagattgagtactatgctatgttggcgaagatcactgtccaccactaccatggaaacaatgttgatttgggaactgcgtgtgggaaatacttccgagtctgctgcctgagtatcatcgaccctggcgattccgacatcatcaacgcaacaccagctggccactaaacctgtgtatgccattttcagtgtctcgtctgatgcgtcatctaaggtggttctagagtgtagttcttgctggacttgatttg

SEQ ID NO: 2884 - DNA, 281 bp, Triticum aestivum
  Clone ID: LIB103-016-Q1-E1-C9
gtcgacgggcactcctaacacacaggaggtgcctactaatacgtgcagcccgctgacgacgaccaggagtagttaggaggatcccaggcaggaggcctgcgcctctttcgatctgtatcccagtttgtgctagccttcttaaggcaaacttgtttaacttatgtctgtactcagatattgttgcttccgctgactcctctatgatcgagcacttgtattcgagccctcgaggcccctggcttgtattatgatgcttgtatgacttatttatgttttaaaaa

SEQ ID NO: 2885 - DNA, 420 bp, Triticum aestivum
  Clone ID: LIB103-016-Q1-E1-D11
tcgacgggtagtgtcaacgaacacataccagtatctatagataggtttttctttttcgtagaggttgtcgcttaggtccttggacccttccttcatgaagcttgaggaagcactcacttttctatccacggcattcttggttctgcacttagtcttgaacctgtgttggtttgggacgtcaatctcattcgtcagcggtgtgtgccgcgtactatgattgctttcttcttgctgtcaaatcccagtctatctttcactgagcttccttcgcttggaattcagagtccaaaagtaagaaagaaagcgtactgtgaggtatgaatgatcaaatgtctacaggtgtcattgaatatcatggggtacgaacttctaaggtcatggtgtatggtattggataggctggtccgctggtcgaagtca

SEQ ID NO: 2886 - DNA, 434 bp, Triticum aestivum
  Clone ID: LIB103-016-Q1-E1-D12
ctcgcgggtcgacgggacttgaggctattttttttttcaccacatgatatgtgtttttcttggagcgtcttgtatgatttgagtctttgctttttagtttaccacaatcatccttgctgtacacaccttttgggagagacacacatgaatcaaaatttattagaatactctatgtgcttcacttatatcttttgagctagataattttgctctagtgcttcacttatatctttttagaacacggtggtgattttattttatagaaattattgatctctcatgcttcacttatataattttgagagtcttttagaacaacatggtaatttgctttggttatgaaattagtcctaatatgataggcatccaagatggttataataaaaactttcatataaagtgcattaaatgttatgagaagcttgatacttgat

SEQ ID NO: 2887 - DNA, 441 bp, Triticum aestivum
  Clone ID: LIB103-016-Q1-E1-D4
cgggtcgaggacatagccgcacgttatcttgcaggacacggtgtatgcggtgacggatgctgagtacgaggagccgatggagcagatactttggcgctcacttctccacgacgttggtccggcggcgccaccgaagacgctcctccgcgccgtcaagtcagacctgttgtcgcctcctcgctgtcgggtgaaggccgaaccgccttcccttccctgctctccaccgcgctatcatggcattcaaatcggatgccacgtcaaggtggagcggttgtcgccatctcctcgtcgcgtcatggaggagcggctgtcgccacctccctgccatgtcaaggaggagcgaccgtcaccacaacctagttgcaccggtggaggcatgcctcacgcgatcaccgtgaaggcacgccggggcatcatgcgctacctcggtggccgccaaaa

SEQ ID NO: 2888 - DNA, 434 bp, Triticum aestivum
  Clone ID: LIB103-016-Q1-E1-D8
ctcgcgggtcgacgggccctacgagcatgtgtctaataatttgtttcgataactaatagatttttgcaataaatatgtgagttctttatgactaatgttgagtccatggattatacacactctcacccttccaccattgctaacctctctagtatcgcgcaactttcgccggtaccataaacccaccatataccttcctcaaaacaaccaccatacctacctattatggcatttccatagccattccgagatatattgccatgcaactttccatcgttccgttattatgacacactttatcattttcatattgcttgcatgatcatgtagttgacattgtatttgtggcaaagccaccgttcataattttcatacatgtcactcatgcatcattgcacatcgcggtacactgcaggaggcattcacatagagtc

SEQ ID NO: 2889 - DNA, 397 bp, Triticum aestivum
  Clone ID: LIB103-016-Q1-E1-D9
cgggctcatattacagggaccaatgcatggtagtagctgtatcttaaatcacatatacagatctcagtgcttaaggtcggcttcaatgaaacaacccaccatgtactcctacatggcctctcatcgatacctttaccaaatcgtgttcaccacaccactcttattaccgacataatcatttcactctagcccatcacccagatgaaccagacctgacacgactctaagcatagcaggcatagcaaggtaggaacaacacatacatagggctcaatcaactcctacacatgctagtgggtttcatctagttactgtggcaatgacaggtcatgcagaggaaatgggttcaactaccgtagcacacagcagtttgaattgcgttgtcgtaatgcagtaa

SEQ ID NO: 2890 - DNA, 400 bp, Triticum aestivum
  Clone ID: LIB103-016-Q1-E1-E12
ctcacgggtcgacgggccagccaaatcaaagtgtctccgattgatggcatacacttcacatggatgagctgtttgcgattagccacaacaaactgaaacagttagatagatcaacgtgtgtgcgctagacgggcacacacgttataattaaaagaagcgtgtgtgatggtaataacgagcgcgcacggttgttggaacaagacgtgtgctgacattgcctattgaggtgcaccctatggtgcaaacgccatgtacgcagccgagaaggcgtatgtgcccacgttacgccttccgggaatagtgccgcacttataaccgtcagtaaattttgagcatgcgtcccgtcacattccaaattgcaaacctgttcacaccgatcaaaacctaaacggtttcccac

SEQ ID NO: 2891 - DNA, 260 bp, Triticum aestivum
  Clone ID: LIB103-016-Q1-E1-E3
gggtccacggggtggtatcaagtgaacctttgcatcttaaagtttgtatcttgatatcatgatcaatagtgtgtctattcttgttggatactggatcacacaagtaccaggtattagtgcaccaaagaaaagaggttgctacgtgttggttgaataatatattggtcaaattagtgtaccattagaatcttaattcgtgctgagcatgttcttttattacagaaagtgtaacactttataaaaaaaaaaaaatacaagaa

SEQ ID NO: 2892 - DNA, 389 bp, Triticum aestivum
  Clone ID: LIB103-016-Q1-E1-E5
ctcacgggtcgacattcgaccccaagatgactctcagcacgcgttcctatttggggtcaatcgtggcactgatggcgaatgtaccaccagtgccatcctccttggcggactccttctgagtctcaggtgaagctgccaatgccatcatacacttgccggtgtatctcgatggtgcatcctccacagtggcgcagcactccgaagaggtgcgcttgccggaataggcatcatagctcttgccggacttggtcgtcttcttccccccgggagcttcaacagcaagtgtgctatgatcaattgcagctgctgcttcacggtacatcttgtctgcgcagatatcggcatccttcctgtcgccggggacagagatgacccgtaacgggcctggc

SEQ ID NO: 2893 - DNA, 449 bp, Triticum aestivum
  Clone ID: LIB103-016-Q1-E1-E6
actcgcgggtcgacgactgaaaccattcaggttatatgcatatatacataaacggccgcaaaggaggcatcctaatactttcaggcaaaagtataaacatagcctttataactcaaatagcattgttattacaatcgagatacatgtcactcgaacatgacactcttcgagcactgagcctctattaaacgagctccttccaggacttcttcaaagtagtgctcggctgaaacctggcctacggccggattctggcttggaatcgcggtggcctccatctccgcccagtatgtcttgacacgggcaagagccatccgcgcaccctctatgcacgccgacctcttttcagcgtcgatatgtggcacagcaccaaggaatcattgcacaagaccaaaataactattcgggcttggtccttccgggcagagacgatccacgacagacctcat

SEQ ID NO: 2894 - DNA, 412 bp, Triticum aestivum
  Clone ID: LIB103-016-Q1-E1-E9
gtcgacggcgatatacaaatagaaaaactctcagctcagtcgttcccctccagcatccttatccatccgcacacaccactttttccattagccggctgattaagatctcgctgcttgccatcaccaaattgattctcaaaccatcacggctgattcattccttcccatttctcttcgtgtacgtactggcacagtttaccgttgagcagagtgcgcggacgcgtccgtcgcattctcaaggatgtggattctcgacgacctcgtggagtccggcggagcgttctcaagggtttcggccaagatgatgacctcttcttggcgtacggctagaggtccatggcagaggtgttgtagtttggcccagtggaggatgctgcgagggaaatccacgagtcatgtactgagtgagtta

SEQ ID NO: 2895 - DNA, 339 bp, Triticum aestivum
  Clone ID: LIB103-016-Q1-E1-F3
aactaactcattatacatccttcggtaagcatgaaggggaattaaacaatgtatgagttgaggagttactctcattagaacgtgggcacgggtgattaatccgctcttcctccttttgttcttcgctctcctcctcatctttttcatccaatgagctcacagtttcatcaacttcttattccatagattcctgcaaaatattagtctcttcttggacaacggagactttctcaataagtgcattaatatcataattgtattcataattctcataacaattattaaggatatctaaattttcaagttctataacctaatcatcaaaatcttcaaactctt

SEQ ID NO: 2896 - DNA, 308 bp, Triticum aestivum
  Clone ID: LIB103-016-Q1-E1-F7
gggtcgacgggctgatgcaaattgaggcttatgaacatgcctgtcatgtacaattcctttagccctgcatcatcagtgatactagcagtgtcctcagatgaggaattagtgatagcagagacaggtgaagaatttgtagcattagaagcatttgaacattcaggtgaagaattagcagattcacgttcaatgcacttcaaacatggaggaacaaattcttcctgagcagcgctgatttgttgagcaagtaatgaatcgcgctccttctgaagatcttcataactcagccttagcttttcaagatcttg

SEQ ID NO: 2897 - DNA, 385 bp, Triticum aestivum
  unsure at all n locations
  Clone ID: LIB103-016-Q1-E1-G10
cacgggtcgacggcgagaagtattgggccttattgggccatacgggaatagaggagagaggccaaaaggaatgaggcgcgcaccccccctctggtcncaattggacaaggggtgcagcccccttttccttctccctctccccctctttccttctctcctactccaacaaggaaaggaggagtcctactcccggtgggagtangactccccccttggcgcaccctcctccttggccggccgcctccccccttgctcctttatatacgggggcagggggcaccccatagacacaacaattgatctcttgatctcttagccatatgcggtgcccccctccaccataatccacctcgattatatcgtagcggtgcttaggcgaaaccct

SEQ ID NO: 2898 - DNA, 410 bp, Triticum aestivum
  Clone ID: LIB103-016-Q1-E1-G3
gggtcgacgtgtgtctataaagggactacccggaggcgattcagggacaagaaacaacaactcgagagccaggtaaagcggattcgctccctgatcatcgagaccccatcaattccaccacaacgggatcgtaggcttttaccttcaccgcaaggggccgaaccagtataaactccccgtgtcctttgtccggtttaaccccttttaagctaatctcgttgcgatggctccacgactaagtcctcacactaggacatctgacgtgataattccacgacaccatgggtgagagtcaagccatcatgtgtgtcaagcgcttcgcaatcggaattgtgtaagtgtttggtccggagtatttgagagctcccaatgttgaagatgccgcaaagcttttggagatgaacaaagct

SEQ ID NO: 2899 - DNA, 387 bp, Triticum aestivum
  Clone ID: LIB103-016-Q1-E1-G8
cccgggtcgacggggaagacgcggcagtggatgcccacgcgtagaggagtatgagggttcactcgttcggctgcggtgtgaggctgccgtcgccgcagagtaatagggggtgtgggtgcgtagagggatggcctggccagcggtgggagtagtaggggcggtgaggcctccgcggcatcacagccggccacgcccgccaagaaggcccccgccaagaaggccaagaagtagagcgtctccgtcctcccgcaacaagtttccattctcctgttctgtgtcggtggtagtccaggattctgtgttctagactgtaaattttatatccgggttgtgggtgctctggttcattccggcgtacccttggaggtgtatctgtgggtgaaacga

SEQ ID NO: 2900 - DNA, 431 bp, Triticum aestivum
  Clone ID: LIB103-016-Q1-E1-H1
gggtcgacggggtacgttcgcgttattcgtgagaaaatgaaaacatcccaatctcgtcaaaagggccaatatgaccgcaaacataagctcatgacttatgaagtcggcgagaaggattaccttcgggttactcctttaaagggaacccatcgtttcggtatcaaaggcaagttggctcctcgttacattggaccctttcgcattcttgccaaacgaggagaagttgcctaccaattggaactacctccgcatctttcctgagttcacgatgtcttccacgtttctcaactcaggcgttgcttcgcggatcctatccatggggtggaccacgaaacacttgatctccaagataatctcacataccgggaatatcccgttcgtatccttgatcaagccgagcggtacactcgacgccattacatcaagtttcc

SEQ ID NO: 2901 - DNA, 429 bp, Triticum aestivum
  Clone ID: LIB103-016-Q1-E1-H11
ctcacgggtcgacggggttcgctacagttactctggatatggaggcgcctgcgcctgtggaactggaggggcttgatactacggtggtggcggtggatacggtggcggccgtggtggtggtggaggtggctatggtggtgaccatgagtcctactaagaagagcactggctatcaaatttaaaataatgaagtttttaggacagtgtcttgattatgtggaacctaatgttacgtcgttctatgttctttttggttttggtttgtttcttgatagtgcaagagttaatttgtgtatgctgcttcgaggctcggatgagtctcaaggaagttcatgcattttgccgtatattgcactgtacttgtagagaatgatcgcgtatgttagtgtgatcataaattctcttcgaattacattcaaatatattgag

SEQ ID NO: 2902 - DNA, 350 bp, Triticum aestivum
  Clone ID: LIB103-016-Q1-E1-H2
gggtcgacgggagattctacatatattttctaaaagacatgtcacttggtcgaggccttgatcatggtgatatgtgtttattcgtccggtgactcagtagaacgataacctctgtgcacagtgatgtttcagtttctacattgatggtttcaagcataagaaggtttcaaaattaaatgagccttgtacaggactgataacaaattatgctttctgagtttcaagctactgaaagtaattgaagctttgccttcgctatgtaagaatggttgcatgtgttaattagtggtgcacattttttgagactgtccaaaattctattataaaatgcttatatgaaattgatgggt

SEQ ID NO: 2903 - DNA, 436 bp, Triticum aestivum
  Clone ID: LIB103-016-Q1-E1-H4
tccacggcgttgaatgaatccattgtgataagagcccttgtgatcatgcaccagacggacgaactggagtacaagatggagcgccatgtgattgtccgcaaggcttgagctgaactgaaccgatggaactaccatggaaccctctggccatctgatgtgtgtgtataactagtgctgacactgcagcctgtttcctgaggaaatttgttgcttcgttgaaattgaattgtagttgtactacttaaagctgtagctgtagccctgaattatcttgtcgaactgaagatgtaccacagtaagttcagtcatgaatcatttgggcgttctgcagctgagcagagtatgcctaagaaactgatgttgaagtttggaaatcccgtagcatgcatgtatggtaaacgttgtgtgacacatttgaagcatggaatgttctttg

SEQ ID NO: 2904 - DNA, 449 bp, Triticum aestivum
  Clone ID: LIB103-016-Q1-E1-H8
tccgggtcgacaagtaggcctcaacctgctgctcacttcatgggcatgcatcaaagccttggtattcagcttgcacagcttgggaaggatgcttctgcagcaggagctgcacgcagaggtagtactcagcggaagacagttgaggtcgagtctgttgcagctgcagggaagcaacaagctcgagaagtagtgaagaaatctttccgtgccgagttcatcgagaagctgcacaaagatttggatgacgatatcgatgtgagagccttggaaaatggatttatatctgtcactcctctgaatgtgcacggccatgtcgagcctgaactcgaagctccagcgtcagactggctgtcagcagctgtggctgtatccgaagaaaaagaagctccagcgacctaacagaaacgcagaaatgtacactgtaggtggcttagtccttgccctggtgt

SEQ ID NO: 2905 - DNA, 425 bp, Triticum aestivum
  Clone ID: LIB103-016-Q1-E1-H9
ggtcgatgggcaacactaaagtgtagtcatattataaaaaataaataactataagctactggatagacaaaacaataaacaaacagtagcaaaaagaatcaatcaaaaatatttcataaacctcgagatacggccaaaaaagagatatgaataaatttcatcaaattcaattttaatctactcaaatatgaaatccaattacactaaagaaacttcaagaaattataaaactaatgcaaaaaagaatcagtaaatttggatctaaaacatagaagttataagcaaactaaaattagaactattctgaaatctaaaacagagaaagaaaaaagcatgcatgcggctgaaagaaaaaccgaagaggccggttcgatctaaaccagaaaataaaccgtaccgaaccgatcaaatctaataaaacctac

SEQ ID NO: 2906 - DNA, 423 bp, Triticum aestivum
  Clone ID: LIB103-017-Q1-E1-A10
gggtcgacgggcaagctcacaccaactaggttaacaagggcaaaccactagattggatttcaggacaaccagtcgcagatgagcatgaacgcctccagattataaagaatgatgacctcgaagagctccaagaactcggttctggaacttttggaactgtatatcatggtaaatggaggggctctgatgttgcaataaaaagaatcaatgacagatgttttgctgggaagccatctgagcaagaaaaaatgcggaatgacttctggaatgaagcatctaaccttgctgatctgcaccaccccaatgttgtggccttttacggcgttgttctagatgggcctgggggatccattgcaacggttacagaatatatggttaatggctcacttaggacggctttgctgaagaattccaagagcctgg

SEQ ID NO: 2907 - DNA, 426 bp, Triticum aestivum
  Clone ID: LIB103-017-Q1-E1-A11
ccaggtcaacaggcaacgcaatacttggccgtagtgggaatgccttgtggagtagttataatatgatgggttgcgagagtgacagaatctgaaaccctagtttatgcgctattccgtaagggaccgattggatccaaaagtataatgctatggttagaatttattcttaacacttttatcatagttgcggatgcttgcgagggggttaatcataagtacgaggttttttcaagtaagaacaacacctaagcactgatccacccacatatcaaattatcaaagtagcgaacacaaatcaaaccaacatgatgaaaatgactagataaaattcccgtgtaccctcaagaacactttgcatatcataagaggctgttttggcatgtcctttgcctcaaaaggattgggctaacttgctgcacttttttt

SEQ ID NO: 2908 - DNA, 412 bp, Triticum aestivum
  Clone ID: LIB103-017-Q1-E1-A2
attccaggtcgacgggactcgaaaaacctctcaaacagcgaccggtctctcgcctcatcatgacagtcagttttagctttctctactgaggtgctcggcccagctcaactggggcagaatcgcagtagttctcctagtgctaccttagccgatatagcagaacgtaaggcaccgaaacataggagccgggaaaaaacaactattgacccaaatcatgattcggagccgatgcatatagtgctataagttcggagaaccgcacttgtgaaagtgttcggtcttctcacaccatgttaaggggtactgaagcccctggcgtatttgccgtaccacagcgtacgggtggaacatgttattaataaacatatatatataaagagggtaatgcaaaaaaatagacaaaagctatgca

SEQ ID NO: 2909 - DNA, 381 bp, Triticum aestivum
  Clone ID: LIB103-017-Q1-E1-A4
gtcgacgggtgcctgtgacgctgccaatggccggcctaattagtaggtttgattagtttaggccaaattaggtgttaattagtctaaggcttttgcaagtggaccccggctagttaatataattaactagaatagtttagttgatgtccatgacatgtggccccaccttgactagttgaccagtcaaagtgctgactgtatatcacctagccaatgacagatggccccctgcactgttcattgttgactcagtcaacatctgactggacctttgactttgaccctgaccccactgtcatactctatggctggaatagcgctaggtaacaaaagtttaatctggctttatttttcgaatttaagatacatccagtaatttgg

SEQ ID NO: 2910 - DNA, 391 bp, Triticum aestivum
  Clone ID: LIB103-017-Q1-E1-B1
tcgacggggacgaagcccaaggccgagaagcggccgccgaagtccaaggagggcggcgccgacaagaagaagaagaaggccaagaagagcgtggagacgtacaagatctacatcttcaaggtgctgaagcaggtgcacccggacatcggcatctcctccaaggccatgtccatcatgaactccttcatcaacgacatcttcgagaagctcgccggcgagtccgccaagctggcccgctacaacaagaagcccaccatcacgtccagggagatccagacctccgtccgcctcgtcctccccggcgagctcgccaagcacgccggtctccgagggcaccaaggccgtcaccaagttcacctcctcctagataatctgttcccgtatcctcctg

SEQ ID NO: 2911 - DNA, 264 bp, Triticum aestivum
  Clone ID: LIB103-017-Q1-E1-B2
attccgaggtcgacgggggcgaacatgtgtaatactgagctgcacaaaggcaggttggaggtgcctagacttataaaagatttcattgatgaggtttcaactcaattgaaaatggtgtgtgaatctgatacggatgagttgcttttggaagagaagcttgcctttgttcaggaaagcagacatgcctttggaacgactgcgctactcttaagtggggggtgcttcactgggttcattccatgtgggtgtactgaaaaccttggt

SEQ ID NO: 2912 - DNA, 279 bp, Triticum aestivum
  Clone ID: LIB103-017-Q1-E1-B4
tacggctcgagaattccgaggtcgacgggggcaccacccatgatgagatggagcgacacaagtatggagttctgcttgggtagctgcgaaacgaaccgtctaaatacgtggcaagtataagtgcagtgatgtacgcacctgagtgcaacctaacataagaacgatttgagacatgtgtcgacacagcttgactacagcgattaggcacctaccagcgatcctcagtatccaacgcttcgaggtgtatgagatacacatacatacgcatcaagacagccg

SEQ ID NO: 2913 - DNA, 68 bp, Triticum aestivum
  Clone ID: LIB103-017-Q1-E1-B5
cccgggaccgacggaaaacgcgaaacgacgacgcaccagggacatggcggacggaggagggcggggct

SEQ ID NO: 2914 - DNA, 319 bp, Triticum aestivum
  Clone ID: LIB103-017-Q1-E1-B9
ggtcatgccatcaagcggactcgaggggatggggttcaaccgtgagcttgtgttggaggtcttctttgcatgcaacagggatgaagaactggctgccaactatcttttggatcatggccatgagtttgaggaacaacgatagatgttagattggtcttgctgttgaaagacagaagagtcagtgacggaagcagtacagtttggtgtcgttcttatatcttgctgctgaatatcactactacttgccattagtgcgatgttgctgactttcaatttcttgtatcctggaaatgctttctaagtacataatatcatatgc

SEQ ID NO: 2915 - DNA, 412 bp, Triticum aestivum
  Clone ID: LIB103-017-Q1-E1-C2
tccacgggaccgtctaaactcactaatcatatatcgcctcgcaccaatgtcaactctgagacttgaactccagtaggcaggggatatcactgtcctccaaaccattcaacgacatggtttccttgacgtgtaatactcatggggcaaaataattctgttttgctagaacttattataatttggtctcattcacattcaaaggctataaaaggtgaatgagatcaaattatatctcatctagatgagttctatatactcccaaataattaccaaatgcaacccatattatattcacaagaaatcgaaattgtgcagaccattcataacagtacatcttcagacattggaaaactgcactccgcacttggttggcgtgaacccatctcagctcgcactccaaaactcgaaaaat

SEQ ID NO: 2916 - DNA, 404 bp, Triticum aestivum
  Clone ID: LIB103-017-Q1-E1-C4
attccaggtcgacgggcgaggcgaagcggcggttccagcggatccaggaggcctactccgttttgtccgacaaggggaagagggccatgtacgacgccgggctctttgatcccctcgacgacgacgaccaggatttctcggacttcatgcaggagatgctggtgatgatggatagcgtgaaaaacgagaagccggacacgctcgaagacctgcagaagatgctggatgacatagtcaacggcgacggcggtagccgcgccactgctggtgctggtggtagcggcggcggtggtggtggctgcggtggtcgcgttccaccggaggccaaccgcagaactcgtgtcgccccttacccgcagccttcgcgaaggtgatggacgcgccggtgctcgtgacgtgcacgc

SEQ ID NO: 2917 - DNA, 430 bp, Triticum aestivum
  Clone ID: LIB103-017-Q1-E1-C9
gggtcgacgggcagtttacttcaaaaatggaatgcatggttactgaccttactgttgcaagagatcatcaaactaagtttgaagagtttgtagctgatcatccggagtcgaatcctggggtagacttggctgttactgtcttgacaactggattctggccaacctacaaaacttttgacataaaccttccctctgagatggtgaaatgtgtaaaggtttttaaggagttctacgcaacaagaacaaagcacaggaagcttacctggatatactccttggggacctgcaatatcagtgcaaaatttgatgctaaaactatagagctcattgttacaacatatcaggccgcactgctgttgttattcaatggatctactaagcttagttactctgagattgtaacacagctgaacctgtcaggtgatgatgt

SEQ ID NO: 2918 - DNA, 188 bp, Triticum aestivum
  Clone ID: LIB103-017-Q1-E1-D11
atgacactacaccattgtttgggcctagaggaaggcattgggaagtaataagtagatgatgggttgctagaatgacacaagcttaaaccctactttatgcgttgattcgtaatgggctgatttggatccacatgtttcatgctatcgttaggtttagcttaattcttccttcgtacttgctgatgctt

SEQ ID NO: 2919 - DNA, 405 bp, Triticum aestivum
  unsure at all n locations
  Clone ID: LIB103-017-Q1-E1-D12
ggtcgacggcgaagtccgacgccaaggagggcggcgacaagaanggcaagaagaaggccaagaagagcgtggagacgtacaagatctacatcttcaaggtgctgaagcangttcaccccgacatcggcatctcctccaaggccatgtccatcatgaactccttcatcaacgacatcttcgagaagctcgccggcgaggccgccaagctggcgcggtacaacaagaagcccaccatcacgtcccgggagatccagacctccgtccgcctcgtcctccccggcgagctcgccaagcacgccgtctccgagggcaccaaggccgtcaccaagttcacctcctcgtagagtgctcctgctcctgtgtctcgtagttagctgtccgggtgtgtttgtggccgtgtaatcc

SEQ ID NO: 2920 - DNA, 296 bp, Triticum aestivum
  Clone ID: LIB103-017-Q1-E1-D2
attccaggtcgacgggacctatgtaagtctttatgaccaatgttgagtccacggagtagacggactctcacccttccagcattgccagcctctctaatagcgcgcacctttcgccggtatcatacacccaccagagacgatcctcaaaacagccaccataccgaactatgatggcatttccaaagccattccgatatatattgccatgcaactttccaccattccgtttactatgacacgctccatcagtgtcatagggctttgcctgatcatgtagtttacagttgagttgtggg

SEQ ID NO: 2921 - DNA, 427 bp, Triticum aestivum
  Clone ID: LIB103-017-Q1-E1-E10
gggtcgacggcgagcacaaagggcgagtcgccagcaagattggcctcaagtcggtcgtcgtgaaggtgaaaggatactcctttttcaggaagaagaagaaggtgatcatgggctttgcggatggtttccggggcgaaagagtgaggaccccgtctcctatcatgtacgtccacgacgtgacccagctcgcgcataatggatgccgactgcccaaaaaggtaaggaagtaagactgataatagcccccagcaagaagtgtggagatcagtatcctgtcccaaggagaaacaaattaagaacgatatgtatgtatcgacaggttttgtaataatgtcatgagcctggaagtatttatgaatacttattagacagtcttagattggcgcttgtaagacaaacatttttgtcatttcctgtaagttactga

SEQ ID NO: 2922 - DNA, 140 bp, Triticum aestivum
  Clone ID: LIB103-017-Q1-E1-E3
tcgacggggccaccttacacagatatatgactgctatattctctgacttttgtgaaaagattgttgaggttttcatggatgacttttctgtttatgggaagtcttttgatgattgtctaagcagtcttgatcgagttctg

SEQ ID NO: 2923 - DNA, 299 bp, Triticum aestivum
  Clone ID: LIB103-017-Q1-E1-F10
acggcgagctcaaagtgcacatccggccgttcctcgcaaagtggctccgagcacagcgccaccgttgacgcccgacaacagctccccttcacctgcggacatccggaggccggaacgccgtccttttacgacggcggtccttaccgcgcgctgttctggtcgctgcccgagcttgacgaccaaggcccaaaagacgtcttgccgttaacatggtcgcggttggagatgtggggcatgctgacagcggcggcgctggatgggacttgggccgttagacccccgattatactcgatcatgc

SEQ ID NO: 2924 - DNA, 166 bp, Triticum aestivum
  Clone ID: LIB103-017-Q1-E1-F5
atacaactcgctaaactgagtcgtaataatggcagccttaagagaacagcggagttcatcaaggtccacagtcagagagttatcacgagaaagcttacgaccagagagttagttctgaatcagtgtagacacacgggaacagtagtagtatagggtggtcgagagg

SEQ ID NO: 2925 - DNA, 52 bp, Triticum aestivum
  Clone ID: LIB103-017-Q1-E1-G11
cgggtaatgcagatgtaacacggactacactggtgaacgggacctggcaaac

SEQ ID NO: 2926 - DNA, 342 bp, Triticum aestivum
  Clone ID: LIB103-017-Q1-E1-G12
agcgtagggtcatatcgatgccagacaacttgcgtgagtgatcacagtactggtacgccctacagtacatacgacagtactatgccctagcttgcgagagtagagtagtagagtatgactctgctctactacgatcatcggaggagtagtagattctaatctataatagttacaaacttcgaggcccgatcgtggaaccactacaagccatgcgcaaagaccgtgtctatgtggtgtttggacttacatggattatttattttgagaagcgcttgcattactcaacacatcagcatcacgaactcggttttttctctacgcctagtcctactagacactcag

SEQ ID NO: 2927 - DNA, 396 bp, Triticum aestivum
  Clone ID: LIB103-017-Q1-E1-G2
tcgacgggttctgcaataagtaaatgagttctttatgactaatgtgagtcagattatacacactcttacccttccgcaatttgctagcctctatggtaccgtgcattgccctttctcaccttgagagttggtgcaaacttcgccggtggatccaaaccccgtgatatgatatgctctatcacacataaacctccttatatcttcctcaaaacagccaccatacctacctattatggcattcccatagtcattccgagatatattgccatgcaactttccaccgttccgtttatcattatgacacgcatcattagtgtcacattgccttgcatgatcatgtagttgacatcatatttgtggcaaagccaccatgcttaagtttttatacatgtcact

SEQ ID NO: 2928 - DNA, 353 bp, Triticum aestivum
  Clone ID: LIB103-017-Q1-E1-G3
ttcctaggtcacgggggctgtcgaaactacgaggtttcattatcacgattctcaggcataccagagttactcatatccttcacgctatgtgctagcctctatagtagatctgcactgcactatctcaccattagagttggtgcatacttcgccggtggatccaaactccgtgatcagatgagctcaatgtctgatataccaccataaagcatcccccgaatagcttccatagcttgctactgtggtattcccaacgacattcagacagatagcaccctgcatcattctagcgtgcggattaccattctagcgtgcatcattactgtctcagggccttgcataatcatgtcgtt

SEQ ID NO: 2929 - DNA, 375 bp, Triticum aestivum
  Clone ID: LIB103-017-Q1-E1-H1
gtcgacgggtgatggattatggaacatggagtagcaagagcctaagcttggggatgcccaaggcaccccaaggtaaaattcaaggacaaccaaaatcttaagcttggggatgccccggaaggcatcccctctttcgtcttcgtctatcggtaactttacttggggctatatttttattcaccacatgatatgtgttttgcttggagcgtcgtgtatgatttgagtctttgctttttagtttaccacaatcatccttgctgtacacaccttttgagagagacacacatgattcggaatttattagagtactctatgtgcttcacttatatcttttgagctatatagtttttgctctagtgcttcacttatatcctt

SEQ ID NO: 2930 - DNA, 415 bp, Triticum aestivum
  Clone ID: LIB103-017-Q1-E1-H2
attccaaggtcgacggggtcgtcttcagattaccaaacaaacaccataccaaagagtaattcttcggcattatccccttatacagtaactattatatactaccgggatgaaccgctgatacgtctccaatgtatttataatttttgattgttccatgttattatattaccccttttggatgttcatgggctttatttacacatttatatcatttttgggtcaaacctactaaccggaggcccagcccatattgctgtttttttgcctatttcagtatttcgaagaaaaggaatatcaaatggagtccaaacggaatgaaaccttcgggagcatgaattttggaacgaacctgatccggagagcttggagtgcaagtcaagaagcttccgagggccccacgagatacccccccctg

SEQ ID NO: 2931 - DNA, 325 bp, Triticum aestivum
  Clone ID: LIB103-017-Q1-E1-H3
ttccgagtccacgggcacaggacattcctgcaggctatgtcctccgagcctcgtgaaatcatgaggacagaagcttccgtgcctacttcaactctgcaggaccaatgaagcttgaagtttacaagttgggggatgccagtgatactgatcttgcacgctgcttgctgctgtctacttgatgtttttaaatttaagtcaaattaagcgttatgtgtcgttaaactttagttatgtccagtcttgcgattttggttcgtgtgcctgtgtgctaaactactgttggatcctggatgctatgttttgagtcaagatatgattatgtaca

SEQ ID NO: 2932 - DNA, 323 bp, Triticum aestivum
  Clone ID: LIB103-017-Q1-E1-H8
gcttaggaaatctcgagtcaacttttgagaccttggttgatgcatttgtcgtcttggataataataaagatgggtctctgagtatggatgagattagtcaggcagtaaatatgaggataccaggggaacgctctgctggccgtacaaccatgaaaagacttgaggagatggattgggacacgagtgggatggctagccacatcgactttctgtctgcatacaatcgccgtctctggataggcgataaccaggatgacgatgactgatcgatgtgcaagcgacacctcacaaatatggtcgaccagaaccttgatgcatagtgg

SEQ ID NO: 2933 - DNA, 383 bp, Triticum aestivum
  Clone ID: LIB103-018-Q1-E1-A3
cccgggtcgacgggcgactatggtcagctactgactagtgtcatcatcgcgggccaaggacttcaggaacaccagctcgtcgcgatggccgacgccgcgagtgtgcttgtgagagccctcgcgtgcccgtgagagctcgttcgagggctccacggcgcgctgggacatctctgctgcatctgcggcttcgcggctggacctctctagtccttccgcggccttggtctttgctgcctggttatatgtccaccctaaactcctgctgccggtcatggcggaacgacttgacatgaaagaccagttttatgggtgatgatgagggtaattgtgaagtaattttcgcgtgggtagtttttatagcccagtgctaagtgtgaacacat

SEQ ID NO: 2934 - DNA, 378 bp, Triticum aestivum
  Clone ID: LIB103-018-Q1-E1-A5
ccatctgcatcaagcagtgagggccaacaaactcaagaaatcgagacagggacaatgaagaaaggtggccacagtggctacagttcaggatacagcgggccgtcgtgagggaattcttttttacccccccttttttgactttctcgtcgatgcaatttgtaaagtccggttgaatttatatgctgacttgacttgtgtgcgaggaagggatgtttgacccaagtatagcttctggtagctgcagccgttgattctttcatatgttgttgaccgatctgcccaccgccgtttgctatgtaattcaaagagctaattgagtgctgtactgttcatacccactcagggttgagtaagagtaacccaacgattctttttacc

SEQ ID NO: 2935 - DNA, 392 bp, Triticum aestivum
  Clone ID: LIB103-018-Q1-E1-A7
gtcaatactacaccctataatgggtcttaataatgacgccacggcggtttacaagaacaaggtgaaaatgtaaaggaatttttctaagtattgaagattgacatgaacaaattcaaaccaatctagggcctaatgttggggatattactattggacgtaaaccggccaggagtagccgggttaactttatgaagattggaagcccatgaagacttgaagatgatgacgctttacgaagtcccaaggcccagaagtgagttaaggcctatagatgtaaaccgacttaatcatgtaacttgctgtgtaagataggaagtgtggagatcgaaccggacacgtttataatccggcttcaggactctgtaaaccggcgggcgtcaacctatgtatat

SEQ ID NO: 2936 - DNA, 392 bp, Triticum aestivum
  Clone ID: LIB103-018-Q1-E1-A9
cgggcagtgcacgacgtggccgccgtggacgcggcggcgtaccagagctgcgtggtgcccaagggcaagagggcgatgcgcagcgggcacgacaaggtgaggctggtcaaggggatgcactacttcgtctgcaccgtgcgcgggcactgcaaggccaacatgaagatcgccgtcagggtcatctagagtgtttatagctacctgttttgccaactgcattcagatcaggtcgatccaaagcttccgactacagctttttagtttgcttaatgcttgaaccaactgctagtttgcttcccagtttttatccgtgcactcttgttctaggtgcggcaatcgcgagttgtaattcctgttaatttgaatatgggtctgaaggcttactaagaaaa

SEQ ID NO: 2937 - DNA, 357 bp, Triticum aestivum
  Clone ID: LIB103-018-Q1-E1-B1
gtcgacgggacagttgatggtgtttcatcacaacaattgtgtgggatgtcataggcatttggatgctggacgaacattgctgcaagaacttgtacaaactattggatggaacaagccccggttttgtgcttacactggacagttattttgtgcctcttgtcacacaaacgatactgcggttctgccagcaagagttttacaccactgggatttttctttatatccagtttcccagctagcaaaagcatttttggactccatctatgaccagcctatgctctgtgtaagtgctgtcaaccctttcctttttgctaaagtgcctgctctgcttaacatcatgagtatccggaagaaaat

SEQ ID NO: 2938 - DNA, 350 bp, Triticum aestivum
  Clone ID: LIB103-018-Q1-E1-B4
gggtcgacggggagtacgatgctcaggccaatgagctggtgcaacttaagcgtgaggcccggatgaagggtgggttctatgtcagtcctgaggcaaagctgctgtttgtcgtccgtatccgtggtatcaatgctatgcacccaaagaccaagaagatcttgcagcttttgcgtttgaggcagatttttaatggtgtgttccttaaggtcaacaaggccaccattaacatgctgcgtcgggttgagccatatgttgcttacgggtaccctaacctcaagagtgtcagggagctgatctacaagagaggttacggaaagctcaacaagcaaaggattccttctgacaacaac

SEQ ID NO: 2939 - DNA, 401 bp, Triticum aestivum
  Clone ID: LIB103-018-Q1-E1-C2
gggtcgacgagtcacactaatcaggatgataggggatgtgtgaacatttacctcatcaccctcttttctccgtccagttgcctgattacgctgtggtggatccatgaaatcatcatcatcattttgatgatcgccacgagccattctgctgagataggaacagaccaaattgtcatggtggaaatgtaaatgcaagaggtaagcagttgccacctaacagaaaatgtcaactagtgaatgcagaaaaaataacatgaacacacacgcacccctcctatgattgtcggaaacataaacgcggcaagtaagcacgttgttgcattatcaagtaaaaaaagtgtacatatggtaaatgcacttttgaaacaaaaatgttgaagttgccattgttaccccaagat

SEQ ID NO: 2940 - DNA, 287 bp, Triticum aestivum
  unsure at all n locations
  Clone ID: LIB103-018-Q1-E1-C3
atcttcggagacnggctgtgttccatgggttcggctcgagtcngttatccgatgcaagcagacggtacgctccaacagtcangacttggtcaataataaaaggaccttcccatttgggcttgagtttgtcctttttcttgtccggcaggcatagaactagctcgccaaacttgtaagttttggcccgtacttctgtgctttgatatcttcgagcctgctattgatagaatgcggaacgggcttttgccacgtcacgctcctcctccaangcgtccaaactgtcctgc

SEQ ID NO: 2941 - DNA, 370 bp, Triticum aestivum
  Clone ID: LIB103-018-Q1-E1-C7
ctatattgatgtcgtattatcttgcaccagaaggttcagtagcaaaaataaccggcaaggagggactgtttttctcaggtcctgcactagtttttgacggtgaagaatcaatgattacatctatatcagaaaacccagcaaatttcaagggaaaggttgtactgatccgaggagaaggaccaaaaggaggtcccgggatgcctgaaatgttgactccaacaagtgcaataatgggggctggtcttgggaaggagtgtgccctgctgacagatggtacattttctggggggtcgcatggatttgttgtgggccacatatgtcctgaagcacaggaaggagggccaattggtcttgttgaaaatggcgatac

SEQ ID NO: 2942 - DNA, 424 bp, Triticum aestivum
  Clone ID: LIB103-018-Q1-E1-D11
gtcattaggtcacgctatattgagtcgtcttaggtgctgaggccgtcgtgtgagatggcagctccgctggaggcaaggctgaggccgaggcgtgctgtgtgatgacgtggctgggccatgcgggcagggtagacgttggcctcctcttcttctttactactcctactactatcagtgcgtgtagtgtagtggtaatgtagtgtcccgctttggaaatgtacctgctactaaaataggtccggtcctggtacgtgtactgctgtcctttactgttattagcagggtacatgtttaattacgtagttatgaactactatcaggaagtgagtgtgacagttttcttgtgcttccggtttgctgcctagagatgtactacaagttcctatgtaaaaatatttattttaatgcaagtatcagttgtgtt

SEQ ID NO: 2943 - DNA, 307 bp, Triticum aestivum
  Clone ID: LIB103-018-Q1-E1-D2
tcgctacaataagtcgtcttaagaattggagaggaagagagaagattgtagcgacaccgggtagtgcggggttgattttaaactgcggcaccggcaacattaaaagtgggagcaattgggacgaacgtgggcggcggagcctggtcaaagggctcgcctcctggtgagcctgcgtagcggtctgctcgcaggcctccctatcagccggtgcagcggtctgctcgcacgcctcccattgactcacgcccttgctcggacggcacctgccgatgagaagcgggactcgtagcggcacgttaacgaccac

SEQ ID NO: 2944 - DNA, 371 bp, Triticum aestivum
  Clone ID: LIB103-018-Q1-E1-D3
ctctcatcaataacacaggtgtgaaccattgttgcccgaactggccgccatcgtctctctcatcaggtgtgtcttcttgattttctctcaccaactgcagctggcgctcaagcttgttaattagaggcgacagaacacgcttcgcgtgtctagtttctgtaaatctgtttagccatcacttttgtcttcactagtgtatttggcctcagtttagtgtataatttggtttagccgtcactctgttttcactagcgaacgccaagtcttggattggttgcatccaaactctccacgtcctacaaacgctcatgaacttcacttgtcaatgtataatatagactggtgtaaacaaacttttcatttacgcttag

SEQ ID NO: 2945 - DNA, 319 bp, Triticum aestivum
  Clone ID: LIB103-018-Q1-E1-D7
gcgggtcgatggggatcactaaatcgagtctgataactctcaaggtcctcctcatcccggggatcctcaatctagcgccgttctgtatctcttcctgaggctcaactgaacttgtaaataagatctctgtagctagcctaattctttttcttttttgcggaaaatcacctggttaattgttacctgcccttcgatccaggaagttcatgtgaaaataaaaagttccaggaagttcagatttatatgtagcttctctatcttccaagatgtaaccaggatattaagttccaggaagtttacttaatatcctggaagacaa

SEQ ID NO: 2946 - DNA, 421 bp, Triticum aestivum
  Clone ID: LIB103-018-Q1-E1-D8
tcgcgggtcgacggggtgcccgaagccaactcgggatacaatcttggccccaccaaaccccccctcgcccgctcgcgcttcccggtgtcagttgttcgcattcatgtctttgtagagcgtccgatccgcgttgacgctggcgcagaacgaggcgacctctcactaccggctgcacgcccgactaaacacgcctccttgtcgcattcatccagcttcagattgccccgcgtatctccattgaacccgcgcgtgggctaagaaacctactcctgacacacgtccgcccgtgagccgtccaacattaaacaaaatgccggttggctcctcgcatccctagctatttaaatgaggtcagacaccgggcaagacctgcaccacatctccgctcctcatctcctatttgcaccatattttgcacaat

SEQ ID NO: 2947 - DNA, 390 bp, Triticum aestivum
  Clone ID: LIB103-018-Q1-E1-E1
agaacttgaagtgtacatgcagaaccacaaaaaagttatggttgattccttgtggaagcttaatgttgctgacatagaagccaccatatcacatgtctgccagatggtgcttcaggaccccttggccaggaaggaagacctgcgtcttcgtgccaaaggactgaaaactttagggaaaattttccagggtgttaagctcaacagtggcgaaggggaagggtctcacatgaagaatatagataacatggatgacaatgccggtagctcccctgattccgtcacaaaacgggagtcatcaatcaatcccattcctaaccctcctcttacccagagtccatatgtggaggctccccattttggcggaacctattgttcgttaacctcccaatg

SEQ ID NO: 2948 - DNA, 378 bp, Triticum aestivum
  Clone ID: LIB103-018-Q1-E1-E2
gtccatgcggaacgctaaaataagtcgtcataagtcgaacggggacctcctcgaggtgcacggggaacttctgtccgcgatcaaggatgcggaggaagggcttctgcatttgaagcgttctaggctagtgaagcaaatcgatgagatctttccaaatcaggagtcagcatcgctatcaactgaagctgctattgagccattagatccagatgatgttgagccagaaccattggagccacaggaattttcagtcggatcaaagtgtagattcaggcacaatgatgggcgttggtataatggatgcattctgggacttgaagattcaggcaatgcacgggtcccatttctgaaacgcacatcagaaaaaaatgttcatgt

SEQ ID NO: 2949 - DNA, 142 bp, Triticum aestivum
  Clone ID: LIB103-018-Q1-E1-E3
gggtcgacgggtgaagagaaatctagtcaaccaagtgtagtcttgcaacgtgcgtttttgttaaagtccggcactctgcacaatgacctgttcctttgagttttgtttgtcttgctggagttatagattgtgttatctcgat

SEQ ID NO: 2950 - DNA, 413 bp, Triticum aestivum
  Clone ID: LIB103-018-Q1-E1-E6
ctcgcgggtcgacgggagaagataccttcatgttgtagggcacggccgcagtgaaacggatcatgttgccggtgaaagggttgagtacgcgtgcagcgtgaggatgctccctgtccgcgaggacgaacaaggcgccgtcggtggtgacggcgacaacatagtacttgcggagcacaggcatgtccttgtggaggacgcggccgctggcggtgttcaccatgaggcatgagttgggctcgaaggccttgtcgatgatgatccagttgcgaggacagaagcgggggtcggaggagttggaggggtcgtcggtggcggagcgccagctgcggcagacggcgcggaagtccatgtagcagtcaaggtcgttggtgtcgaggaggcactcggcgatgcaacggacgagatccgatggg

SEQ ID NO: 2951 - DNA, 423 bp, Triticum aestivum
  Clone ID: LIB103-018-Q1-E1-E8
tcgcgggtcgatgggggactctaaaatgaggcgtggtaagagcctaagcttggggatgcccctggcaccccaagacaatctaaggacacctaaaagcaaaagcttggagatgccccggaaggcatcgcctctttcgtctacttctatcggtaactttagttggagctatatttttatttaccacatgatatgtgttttgcttggagcgtcttgtattatttgagtctttatttgttagttttccacaatcatccttgctgcacacacctttttgagagagacactgatgatttggaaattgttagaatactctatgtgcttcacttatatcttttgagttatatagtttttgctctagtgcttcacttatatcttttagggcaagatggtggatttgttttatagaaacttttgttctctcat

SEQ ID NO: 2952 - DNA, 414 bp, Triticum aestivum
  Clone ID: LIB103-018-Q1-E1-F10
gtcgacggggaacacgatagtgactcctctgagggcgaagaggaaatctcggaacgagaggaatatgacaaacccaaggccagtgacaccaagaagaaacaaataggcgagggtgaggagaatggcgaggatgatgaggaagaacaagaggagcaggagggtggaggaggcgacgatgatgacgacgacgacgacgatgacaatgaggaggacgacgatgatgacgatgatgtcgctgctgaagacgatgaagatggagtagaagaggaggatgacgaccaggacaacgacgatgatgaggaggaggacgacgaggactcgctccagccccccaagaagaggaagaagtgaagcccttcgatgccggctgctttagtcaccatgcgatgagatgtgcctgttcttcactgtgtt

SEQ ID NO: 2953 - DNA, 337 bp, Triticum aestivum
  Clone ID: LIB103-018-Q1-E1-F2
cctaaagtgactcgtactacaacaagaagcccaccatcacgtcccgggagatccagacctccgtccgcctcgtcctcgccggggagcccgccaagcacgccgtctccgagggcaccaaggccgtcaccaagttcacctcctcctagactgacgacgcgccgcttgttgtgacagatgtggccgtctgctgtatctgtagtcgctgttgactctgcttatctccatctgcaactagtggtagctgtagtgcgcgtgctgggtgatgattgccaacgctttgttggctggttggatgtaagaactgaacgtgttgccttttcaaactgaataaatccat

SEQ ID NO: 2954 - DNA, 361 bp, Triticum aestivum
  Clone ID: LIB103-018-Q1-E1-F8
cccgggtcgacgggagacccgaaagtgatacaaaagaggaaaataaagcccaatatagtccaaacagtagataaagtagcatggagcaatcaaaaattatagatacgttggagacgtatcagatgcccacgcagggaggagtacgagggttgactggtttggctgcggtgtgaggctgccatcgccgcagaataatagggggtgggtttgtagactgatggcctggccagcggtgggagtagtaggggcagtgaggcctccgcggcagcacaaccagccacgggaggcaggagcatgcggtggtttggacagctagaggaagaaaatcagaggtataagaagcaggacgaccgttggatgt

SEQ ID NO: 2955 - DNA, 432 bp, Triticum aestivum
  Clone ID: LIB103-018-Q1-E1-G11
gcccgggtcgatggggcaccctatgttgagtcgtagtagcagtggctgatcgagaaccacagctaccagccgcagtacgcggtgacggagctgaacgagaaggacttctggcgcatgttcgacgcgtcgcactacgagcactgccggcagaaatacggcgccgtgggcaccttcatgagcgtctactacaagggcaagaaggggcgcaagtccgagaaggaggtgcaggaggccgaggccgccatcctcgagcctgcctacgccgacgaggcctaggcgtgttcgtcgtccatcgccgtcgtgctcgtcgtcggccgcctgtgtctcgccggtttcggtttcggtttcttcggtcgtcggaactctggattaattggttcccttttgcttggttgcttattaataagtagaacttgatcgatcgtgtagcgt

SEQ ID NO: 2956 - DNA, 357 bp, Triticum aestivum
  Clone ID: LIB103-018-Q1-E1-G2
gggtcgacgccgaacacgaacatgactcataatcgggcgccggcgaccaaagatgccggcagcgacgggaagacgaggggcatgaagaagggcagcacggccaacaagggcgtggagacgtacaagatctacatcttcaaggtgctcaagcacgtgcacccggacatcagcatctcctccaaggccatgtccatcatgaactccttcatcaacgacatcttcgagaagctcgccggggagtccgccaagctcgcccgctacaacaagaagcccaccatcacatcccgggagatccagacctccgatcgcctcgtcctccccggcgagctctccaagcacgccgtctctgaaggcacc

SEQ ID NO: 2957 - DNA, 342 bp, Triticum aestivum
  Clone ID: LIB103-018-Q1-E1-G4
cgggtcgatgggtgaccctatatcgatgcgtcttaacatgagttgtgctatccttgaaatgtcattttgttttgctttgctttgcttgctgtatgaataaaataccaagatctgaacttcttaaatgttatagagtcttcacatagttgcataattattcaactactcattgatcttcacttatatcttttgcagtagtttgtcatttgctctagcgtttcacttatatcttttagagcacggtggtgggtatattttgaagaaataaatgaactctcatttttcacttagaataatttgagagtcttttagaacaacatggtatttgctatggttataaaa

SEQ ID NO: 2958 - DNA, 301 bp, Triticum aestivum
  Clone ID: LIB103-018-Q1-E1-G5
ctcgcgtttcgatacgagtcactagagtgactcgaactactctcttgtacatggatggatggaagcgttggaccagcctgttgtcttcttgcccgcgtgttgtctctgtgttgtatcataactcgaatcaattcgttggttgtacctgagaggccattcctttcattgcctaggaatgattttaagttggtgcattttggatgctgtcctgtgttgaaatcagggaataatgtgtatctcgccctgctgccttttcctgtatgtactctaatgaaagtttggtcatatgcaccctccttgg

SEQ ID NO: 2959 - DNA, 401 bp, Triticum aestivum
  Clone ID: LIB103-018-Q1-E1-G8
ccgggtcgacggggtaccacaatggacaccagtctatcgggtccagagagatatccctatgccacttgttacttccggtgtcgagaaaggtaacctgcgtgagcttgctttggctcgaatggaagacttgggcttgaaatgcagagatgtcagaacacgtgaggctggaattcaggatatccatcacaagatcaggcctgatgaagtagagcttgtcaggcgtgattatgccgcaaatgacgactgggagacctttctctcgtatgaggatacacgacaggatatccttattggcctgttgcgcttgcgtaaatgtggccgcaatgttacaggctctgaactcgtaaggaggtgttcaattgtccgtgaacttcatgtctatggaacagcagttcctgtgc

SEQ ID NO: 2960 - DNA, 422 bp, Triticum aestivum
  Clone ID: LIB103-018-Q1-E1-G9
gggtcgacgggggagacgatcatgcatccgttgaatgctgtcggattcctcggtgaggagaagatcgccgccaaagtggcctacttgaagaagacgttcaggtggtcagacgctgaggtgagcattgctctgcgtaaggctccgtctgtgctgaggaagtcaaaggaattactgcagcgcaggtctgatttcctcatctctgaggtggggttggaaccgtcctacattgctgaacggtcagtaattatcaattacaagctggagggccggatgaaaccccggtactacgttgtaaagttcctcatggaaaatggattgctcaagtgcaacccaggctactaccagaccgctttcaaggtgagagagaacgtattcatggagaagttcatttgccctcacaatgaagttgcgccgcacctctc

SEQ ID NO: 2961 - DNA, 373 bp, Triticum aestivum
  unsure at all n locations
  Clone ID: LIB103-018-Q1-E1-H1
tgatgagaaaaggagatgcccggaacaaggttgctgcagatgcctgcaagaatgaccaaccccacaggtagccttcacgacgagcgcactgctgatgacgtgaatgctggaggccagtccgtgtatcaaggacttganatggcgctgattgaggttgttgctgcgactgggcagttgaccacaggttgatcatcaataccgtactggtaacttgtggctctgtctgtctttaatatggttatccaacatcaacatggagtttatcttgtgtgccttgatctggcaatgatccgtttcgtccgtcaaatgaggtagcaagaatattagcttcatttgtattttactagtttaattatgactatgtggttgtgat

SEQ ID NO: 2962 - DNA, 417 bp, Triticum aestivum
  unsure at all n locations
  Clone ID: LIB103-018-Q1-E1-H12
ctaaattgagtcgtattagcgcanattaggaaatctatccttacgcaaatgtaaccaaacaagatctccaggtgcaaacacaacatgttttctacccttatctcgagcaagtttatatttagcattcatacgctcaatgttttccttagttaactcatgcatttttaaaatcaattcagcacgttctttagcatcaaaaataaccttctccgaagatggaagaggcaacaaatcaataggtgcacgaagtaggaaaccatacacaatttcaaaagggcacatcttagtaatagaatgcaatgaacgattataagcaaatccaatatgaggcgagcattcttcccacattttcttattattcttcagaacagccctaagcatagtagacaatgttcaattgactacttcagtttgtcc

SEQ ID NO: 2963 - DNA, 404 bp, Triticum aestivum
  Clone ID: LIB103-018-Q1-E1-H2
ggtcgatgggacagctcaagtcttgatagagatagagatagggttagtccagcggcgccgccctcgcgcgtggggagcttcgaatcgaaatttaggaattgagagcgggagcgggacgggtgagatccagatttccctcctccttcttcctcccttttcccccttctctttatctttatagattattacagaagagagagagagagagagagagagagagagagagagagagagagagaggtggagatcctgattcctcgcttctcctcccggcgggatccgaagtaagatcgatctccaaagttgggccaaataaatagctaccgtactagtccaaagctagcgttggaggaggcagaacacaaagggttggtgatttctcgactcaggtcccaggctaaatc

SEQ ID NO: 2964 - DNA, 323 bp, Triticum aestivum
  Clone ID: LIB103-018-Q1-E1-H4
gagatgactattcatttatattcgagaataatggttgttctagttatatgagtaacatattttatggtcatggacccaatgtgaatggtttattcttgttgaatctcgacagtagtgatacacatgttcataagactaatggcaaaagatgcaaagtgaataatgatagtaccacatacttgtggtactaccccttaggtcatattgggcaaagtgatgaaaaaactcaaacggagggtttttggaatcacttgacttggaatcattttggaacatggtgagccatacctcatgggcaaaataccaccagactgttttctcgc

SEQ ID NO: 2965 - DNA, 81 bp, Triticum aestivum
  Clone ID: LIB103-019-Q1-E1-A11
agcaacaaaactaactaataagggaattccaaaagcaatccgagaaaaaatttcaaggaactttccaacggtccggttaat

SEQ ID NO: 2966 - DNA, 415 bp, Triticum aestivum
  Clone ID: LIB103-019-Q1-E1-A12
gacggggatctggaacggtggatgtattgagctcgagctgaagatcagccactccatccacgaccaatgcttcttttccttattttcatggagatgatttcagtactctttatccgtgtcatgttagagccaagatgcatgtgccactcgttccatcaagtgtctaatgaactttcagttttgttcctggtttatcttggcttcttgctgcttaatatgcctatgattcaataacaatacctactataaaaaaagaaaatggaaggggtgcttcctacctggcaccgcccaacttgctctctttgttcaatattgtgtcgagtccccaagggaacatggtgctgtataaacaatagtggaaagcacagggctcttgagaattaggatttgttggtttcagtcgtttcaagtttta

SEQ ID NO: 2967 - DNA, 390 bp, Triticum aestivum
  Clone ID: LIB103-019-Q1-E1-A5
ccgggccgacgggtttataaatggttgtatccctggggacagtgtcagcttggaaatagactgtgcgtacctcacagagagtgttgaggcagtgatcgaggtctatgcagaggttagccacccttgccatgtgagattcgtcgctttcagcagtggctatgacgatgagattgtgctcttcgacggaaaattctctggggaaaagcttttcaagcatgttgttgctgtgaaggcagagagagaactgaaggttcagttagaggtggagaaatcagttttccagtggatttttcagggtggaaatgccggacctcttagcttccccgatgactcgatgttgaagtatggccagtttgatgtgggtgtgtgtttttatccatcgacgggcta

SEQ ID NO: 2968 - DNA, 423 bp, Triticum aestivum
  Clone ID: LIB103-019-Q1-E1-B11
gacgggatgttggaatactaaatttggaggatttaattgcaacggaggtggtaccccctcaacaatggttgaattggcaaattcccgtagggttaactcaaagttttaataagatccataaataggtctcggaagaaaatgctcttgcttgtcataaataatttactccagaactattctggtgtagttgttctgcgaagaagacagtatgtttgtgggaagagcatgctcttgcttgtcataaataatttactccagaactattctggtgtggttgttctgcgaagaagacagtatgtttgtgggaagagaatgctcttgcttgtcataaataatttactccagaaatagtctggcgtttctgcatatcctggcctgtgaagaagacatagtaatgattgtactataatttagcttcaaaaa

SEQ ID NO: 2969 - DNA, 435 bp, Triticum aestivum
  Clone ID: LIB103-019-Q1-E1-B12
attcccggagcgacggggtcaccaacttgcggtccgagaaggtcaaggatgagatcgtcctcgacggcaacgacatcgagctcgtctcccgctccgccgccctcatcaaccagaaatgccacgtcaagaacaaggatatcaggaagttcttggacggtatctacgtcagcgacaagggcgccatcaaggaggagtagagtgcgaaaaccgtcccagaagccgtgtttctgcctgccgtgtttcatcgtctttgtgtcgtggttgtgattttgaactttctctagactgaattttgtagtggagttaattagggatgcgctatgcaacatgttatctttattatcctacatattgtcaccgtgagaattggtacgatgcttatcttcgcctaaaggttgatgacttcaggtatttgaagttaaaacaggacatgaa

SEQ ID NO: 2970 - DNA, 161 bp, Triticum aestivum
  Clone ID: LIB103-019-Q1-E1-B3
tctcttcaattcaggtgttgatagtttgctttagttatatgtttataatcagggtgtatgttgtgatatatagtttcgagttttgtttgaagatttacttagagcatttttagagtcgaggatgacaggatggtaattttcaaaaagttgtggctctagag

SEQ ID NO: 2971 - DNA, 402 bp, Triticum aestivum
  Clone ID: LIB103-019-Q1-E1-B9
tcggagaccctagtattcttcactgaaagaacctgcacattaaagatgatccttaaatcagttctgctaactgtttcaagtctcaggggctactgatacatataaatcgccagatttactcacccatacatcctttacatactgatccgtggctctggctagaccatcttgagcagcacggaggtacgcctctccagaattaaaggcgtcgaacgcctctggtgagaaacaagcgttgcggagtacggcccggcggcgcctatgattcatgacgctttccacttctgagtttgtatcggacaatcttttagagcactctatgtgcttcgcttatatcttttgagttatataattttgctctagtacttcacttatatcttttagagcatggtggtggatttg

SEQ ID NO: 2972 - DNA, 333 bp, Triticum aestivum
  Clone ID: LIB103-019-Q1-E1-C11
gacggggtactacatcaggtccaggatcgtggggatcaagaagaacgcaacaatcaaggccggaaccgtcgtgtaaagcgccgccgggccggcgcaacggggttccgcaacaacctctgcgctgcgctgatcgttgtcgtcggcttctcggggccgggactggaggattgacccggggacgggggccgtttgaagctttgaatggctgagactgaaagtggaggcgcgcgcaggcagcatcagtagtaagtagtaagtagtaagtagcagtggaacaaagtaatagtcgttcgttttgcccctgtaataaataagaagaggctgtgtgttgag

SEQ ID NO: 2973 - DNA, 357 bp, Triticum aestivum
  Clone ID: LIB103-019-Q1-E1-C7
tcgcgggtatttcaaacaggtatgacgatcgttagcagagaccacctgggtattgccttgtacgtctgagcccctagctttcttggcgtatccgtcccgctatggatccgatgagaaggtttatcagaaacggcctcgagaagacaaaaaacttgaaagaaagagaaacgtgaaggtatgtggatccaagagcggttgagccgcattgtggaccatggtctagccgtgcctccgtccatgcccatggtattttaagtgcatattgtgtacggcgacacgaatttcatcgctttgttggggctaggacgtaggccggattgctagctgagctccggacgagtcagacggtcctgttgc

SEQ ID NO: 2974 - DNA, 433 bp, Triticum aestivum
  unsure at all n locations
  Clone ID: LIB103-019-Q1-E1-D10
attcccgagccgacggggacgangaaagaacacagcgaaaccttttgcggaacctgcaccggaatatacaatgcaagcaatttcgggttcggctgcaacatttgcaaccggtggttcaacggcaaatgcgtgcggataaccccggccaaagcggatcacataaagcactacaagtgccctgaatgcagcagctccaagaaaatgaggcagtangccgtcgcctgcaagtctgcttcagccgtctctgacccatctgatcaaactacaccatgtttcttttctgcccaaggtcgcggctagcggatgtggattcctctagaaactgtgctccctcccatgtggtagtctcctagccgtangtgctgtgaaagactgatacatagctcatactctcgtagcgttataaatgtttccttggttgtcatttgatgtg

SEQ ID NO: 2975 - DNA, 421 bp, Triticum aestivum
  Clone ID: LIB103-019-Q1-E1-D9
gacggggcccaagaggcgttcttttggtggtggtgtggagagcggcattgatgcatcgatgcttggacaggatgggtgggctgagggtgaggagggtgaaggtggacagcgggaggaggtaagagagattaacataaatgaggaggcacgggctacagatggtactggcagggcaaatgtcacaggaggagttgaggacctgggcagcttccatttggatgttgatccaactgaggatatactagggaatctgggaaatttacacaacttgccgttcttgagggtggataatcttgggaggatgctgtaactgttgccattgcttgtcatggtgctgaagacctgaagtattgtatgattagctgggttggaacagatgctccaaggattgtctttacctttcctgttgtaattcctggta

SEQ ID NO: 2976 - DNA, 421 bp, Triticum aestivum
  Clone ID: LIB103-019-Q1-E1-G11
tccggagcgacgaacggcgcgatggcgacacaaattccaagaaggaccacctccttcaggcaatgaccgccaacttcaaaaacctccaaccgctcaaccgtgcccgccagaacaaggtgaagtccaagacggcggcggtggacaaggtggaggcggattttgaggagcgcgtcgcccagacgtagatctggttcggcgaggcccgggaagagttgaggactgcctaaggtgagctggatgtgcgcaagcgagagctcatcctgaagcaggccgacattgagaaggtccaagaggcggcgaaggaacaggccaccaaggatgaagctgcccggcagcagcagcaagctctactggacaaccaagaagaacaccttgttgcgcgtgagcaagcgcttgccgccacgcttggcagcaaggacgg

SEQ ID NO: 2977 - DNA, 427 bp, Triticum aestivum
  unsure at all n locations
  Clone ID: LIB103-019-Q1-E1-G4
ggccgacggccgacggaggaggcgcccacatcaacctcaaggtcaaggggcaggatggcaatgaggttttcttccgcatcaagagatccacacagctgaagaagctgatgaacgcttactgcgaccgtcagtctgtggatctcaactccattgctttcctttttgatggtcgtaggctccgtggtgagcagacccctgatgagcttgagatggaggaaggcgacgagatcgacgccatgcttcaccagaccggagggtgctttcctggcccttagaaggagcttgctgcagcctggctgttctatgtcgtatgctacctttagaactagagtaaaatgtaagaagtgaaggaacttgtgaggctatggttctgtgccatagcctganggggggtctggaggtgaaacaacatcggagtactgttgat

SEQ ID NO: 2978 - DNA, 219 bp, Triticum aestivum
  Clone ID: LIB103-019-Q1-E1-H10
attcgcggatcgatggggaggtccaccatggagctagggttgtcgggatgaagaagaccctcgtccttcaacccgggcccccccccaaaggggaacgcaacaaccgggtcaatccacaatatcccctttaaggccaatgggcaacccggattccaaaaggttcatttgttatgttcccaatcctccaaaaaggttggccttgtcctcaaaaacgggcac

SEQ ID NO: 2979 - DNA, 396 bp, Triticum aestivum
  Clone ID: LIB103-019-Q1-E1-H11
tacggtcaaaaattcccggaccgacggggatgaataaatccattgtgagaagagcccttgtgataatgcacaaaaggaacaaattggattacaaaaggaaccccaaggttaattgccggcaaggcttaacctaaactgaaccgatggacctacaagggaaccctcgggcaatctgatgtgtgtgtataagtactgctgacactgcagcccgtttcctgaggaaatttgttgggtcgttgaaattgacttgtagttgtactactttgagctgtagctgtagccctaaatcatattgtgtcgaactgaagatgtaccccagtaagttcattcatgaatgcagcattttggcgttctgcagctgagcagagtcaatgcctaaaacataaatggtcaaaa

SEQ ID NO: 2980 - DNA, 383 bp, Triticum aestivum
  Clone ID: LIB103-019-Q1-E1-H12
cgggggaccagatttcaggttgctcggtgagaatttccagattttccaaaattagatttattttcttaccaattgtccaagaaaaaccacagatagaagtagatcagtcaccctttgtcctagcaagactgagcctttgcaattttcttttcattgtttgcattgttgaattatcggttgcatcgccgtgtcgagttgctggtcttagtgtctagttcctttagagtttcgagttctgttcacattagtcatgcagctgctgcatcattatcccatccgctgtccaccatctcatccaccaatttcaccatgtgctacgcactgtttattgtcatattcatagttgaggtcactcacatcttcgcctgatcgaatctgcatct

SEQ ID NO: 2981 - DNA, 409 bp, Triticum aestivum
  Clone ID: LIB103-019-Q1-E1-H2
agagagggaatgggaggccaagaaaggacaagacagcagcagcagcaatgcctgctgaccctgggtctgcggggatcaaaaaagggcgtggaaggccaagaaaagaaaagaagccagcagcagcaatgttggctgaaactgaagctggagatactgtgtcaactgggatgaagggggcgcttgagaatccaatatcaggtaatgtcgtgtcaactggaaccaatggagcacttcttagaacggagaatccagcggcaggtgattttgtgtccatggtaatgaagagagggccttgctttgattgaaacctggtttggagacatgtctgaagaagctagtccatgtgtaggaaaggaaaccaggcctggcctgaagatgcatgctggatgtgtgatttgagtctagtctc

SEQ ID NO: 2982 - DNA, 420 bp, Triticum aestivum
  Clone ID: LIB103-019-Q1-E1-H3
ggccgacggcgatcagaagagggagtgggaggccaagaaaggacaagacagcagcagcagcaatgcctgctgacgctgggtctgcggggatcaagagagggcgtgggaggccaagaaaagagaagaagccagcagcagcaatgttggctgaaactgaagctggagatactgtgtcaactgggatgaagggggcgcttgagaatccaatatcaggtaatgtcgtgtcaactggaaccaatggagcacttcttagaacggacaatccagcggcaggtgattttgtgtccatggtaatgaagatagggccttgctttgattgaaacctggtttggagacatgtctgaagaagctagtccaggtgtaggaaaagaaaccagcctggcctgaagatgcatgctggatgtgtaatttgagtcgagt

SEQ ID NO: 2983 - DNA, 399 bp, Triticum aestivum
  Clone ID: LIB103-019-Q1-E1-H4
aatcacttagagctcattattatgatgtattaccgagtgggcccagagatacctctccgtcatacggagtgacaaatcccagtcccgatccgtgtcaacccaacagacactttcggagatacctgtagtatacctttatagtcacccagttatgttgtgacatttggcacccccaaagcactcctaagcatccgggagttacacaatctcatggtctaaggaaatgatacttgacattggaaaagctctagcaaacaaactacacgatcttgtgctatgcttaagattgggtcttgtccatcacatcattctcccaatgatgtgatcccgttatcaatgacatccaatgtccatggtcaggaaaccatgaccatctattgataaacgagctagttaact

SEQ ID NO: 2984 - DNA, 415 bp, Triticum aestivum
  Clone ID: LIB103-019-Q1-E1-H8
taatgatggtgccgatggcgatgttcctgagagtggtcctgtcaaaaatgaggagcatattgcttccctgaggcctaaaagatcaaagagactagtgaggagcacgggtgaggataaggaacccgttgctgcttgtgatgttgagaaacctgcagatgcagctgaaaacaatgacaacaatgatgcagaagagttgcaagaccagactccttctgcctagttgacctactgggctgacctgatgagaacataagatgcgaatggcaagactctaatttgtggtgtcgagtaggagcatcaaagatggcacccagaggaggagctctggatctgcttaaggtgttacgcggtttattaagtattttaactctgctgtgcagcttcttttcagaagcctgggactgcaacttgggtg

SEQ ID NO: 2985 - DNA, 437 bp, Triticum aestivum
  Clone ID: LIB103-020-Q1-E1-A3
actcccgggtcgacgaagggagaagagctcgatcgttccagatcactcggcaaacgtcgctccccgggtggcaaaacggtttgacccaaccggtgcttgcgccaaccatgaggtcccttggttccttcccaaattcggggtattcgaagttcaacacttgccactggctcgcatccttagggtgactcagcatcttgtctttttaatttatctccggatcatttccgtcatcttcccgcttcttctccttcctatccgtgtgccaacgcatgagctttgctaccttagggcccgcgaaataccgctgcagacgaagagtgatcggaatgtatcacaccgattttcgaggagctttcctcctcatcttgtatcgagtgacgccgcacaccggacatatggtagactccgcgtgctcgtcccgataaatgatacaattg

SEQ ID NO: 2986 - DNA, 438 bp, Triticum aestivum
  unsure at all n locations
  Clone ID: LIB103-020-Q1-E1-A5
gggtcgacggagggagaaaagctcgatcgttccccatctctctcgtctcgtcggcgacgcactccacggcggcggggaagcaccggtgctcctccccggcggcgcacggcatggggaatttcgcgtcgagtgacgcttcttcttcagtcaaagaggcacaaagggtatcaacaaccagcttcacgcccaaggactcaaggaggaagcactgggactctgggagcattcaggattggttggagacggcggaattggttgggccgcggctttacagctgccgccattgccggaaccacgtctgcctccacgacgatatcatctccaaggacttccagngaaggaatggccgcgcgtttctctcctaccacgccatgaacgtcaccacaaggggcaaaggaggacaggcagctcatgacagggctccacacgatcgccgac

SEQ ID NO: 2987 - DNA, 261 bp, Triticum aestivum
  Clone ID: LIB103-020-Q1-E1-A9
atgggaagaaaaacttgatgaagttgacaagaagtgtcatttcaagaattatgatcttatccaaccacagaatagcttttgctttgaaaggagggattggatgactgtgcagccagacgaactgcctggcggaaggcaactgataatggggcttaatcctccttttggagtcaaagcagctctggcgaacagatttatcgacaaagcattgtcttttaagcccaagcttgttatactaattgtcccaaaagaaactaaaag

SEQ ID NO: 2988 - DNA, 410 bp, Triticum aestivum
  Clone ID: LIB103-020-Q1-E1-B1
gtctacgggttaactacagagttggttgaaaatattgagaaggtaaaccccctctcaatcccaattaaaagtaatcattaacaacccaacaaattaattatgaagtgatgagatcaacatgataatccaagaactagatactcaagatgtccataaccggggacacggctaatcatgattagtttgtacactctgcagaggtttgcgcacttttccccacaagactcgatcgcctccgttggatttctcgcactacatggtgtttgagaaacggatgaccgagacacagtcttttagaagcgttagcaccttacgatgggtagacagtaccacctacatcccctacatctgctagtataccactgtaagagttcacacgacttaatcaactatgctagaacccaaaataa

SEQ ID NO: 2989 - DNA, 432 bp, Triticum aestivum
  unsure at all n locations
  Clone ID: LIB103-020-Q1-E1-B3
gtcgacgggccattcataacattggacaaattgtttacggcttgacctcaactgtcgccgaacactaccgggggctattaactggcctcccaaactaaatcctcaatattttgctcttacattggagatgaggtttcatgatcatgcttagcatgacaacccatagaaaggaaccgatagcgggactattttctttggaagacatttcttctgttaaacagtaatataacatgtctctccgcgtacctttgtttataaaaccgtatggccagattgccttgtttgttgtaaatctttgccctcataaaggctttataaagtaggacaaacactcctcgactattggccgangaggtggaagccgatggtcggtcaacaaagttttgtacaatgcagatccgagcattaatgacttaaagtacttggatacat

SEQ ID NO: 2990 - DNA, 322 bp, Triticum aestivum
  Clone ID: LIB103-020-Q1-E1-C7
ttcccgggccgacgggtacttcaaaatgagatgaatcaggaacgatgaactcatcatatttacaaaaacaagagaggtcgagttcataccagcttttctcatctcaatcagtccatcatatatcgtcattattgcctttcacttgcacgaccgaatggtgtgtataataataatagtgtacatgcattggactaagctggaatcctgaagcattcaactcaagagaaaaggccaaggtaatgtgggctttgagtttaattaacaatccaggctattggaacctctaaacaaatttaaaatgggcctctaaactcgaaccccc

SEQ ID NO: 2991 - DNA, 430 bp, Triticum aestivum
  Clone ID: LIB103-020-Q1-E1-G11
cggtctagcattcccgggccgacggggtcgcagacttggttaaggaaggagatcaacgaactcgcgcttaaaagatatcttcattttccagcgcgctttggattcctggagcgttgcaagatcacgctcaagtccgtggagaggaacaagtcttgggaggtggaaggtgtcaactaccatccaggcaccagcaggtcctataattgtcttacgagaggctggaaggccttctgtaaggagaacgagctcaaggcaggagacatctgcaccttcaaagtcgtcaacagcacgctgtggcatgttgtcatcgaccactgctagaaatacggttcatagatgatcatggctgatggcggacctgctggttttgcaaacctaagtagtatcatgatgaatattgtggtgacatgataatccacagctggtgttg

SEQ ID NO: 2992 - DNA, 391 bp, Triticum aestivum
  Clone ID: LIB103-020-Q1-E1-G4
gacgggacttgcataaaatcctaataagctaggtattcaagaataaaaattctcttatgattgtgttgaatacaaggataagtttgatacttgataattgttttgagatataaagatggtgatattaaagttgtgctagttgagtagttgcgaatttgagaaatacttgtgttgaagtttgtgattcccgtagcatgcacgtatggtgaaccattatgtgatgaagtcggagcatgatttattttttgattgccttccttatgagtggtggtcggggacgaacgaagggcctttcctaacaatccaaccccctaagagcatgcgcgtaatactttgccttgagaacctgtagatttttgcagtaagtatatgagttccttaagaccaatgt

SEQ ID NO: 2993 - DNA, 418 bp, Triticum aestivum
  Clone ID: LIB103-020-Q1-E1-H10
ttcccgggctcgaaggataagtatacgagttctttatgactaatgttgggtccatggattatatgcaccctttcccatccttccaccattgctagcctctctaataccgcgcaccttttgccggtatcatacacccaccatataccttcctcaaaacagccaccgtacctacctactatggcatttccatagccattccgagatattgccatgcaactttccaccgtttcgtttatcatgacacgctccattattgtcatattgctagcatgatcatgtagttgacatcgtatttgtggcaaagccaccgttcataattatttcatacatgtcactcttgattcattgcatatcccggtacaccatcggaggcattcatatagagtcatatttgttctaattatcgagttgtaattgt

SEQ ID NO: 2994 - DNA, 335 bp, Triticum aestivum
  Clone ID: LIB103-020-Q1-E1-H12
attcccgggccaaagatgttgccgatcaagacgagtacgatgaatttgatgagttgccagccaagggatcgcgcacaagtgcaacagagaagcataaaatcatcaaaaaacccaagttcattccgggtcaacttaatgatcccagttcccccatgtacatgggaatgaagccgtaagactagtctttatgcctaccccgcaacttaattcgtttaatttagaactgtcgcgtgtactgaatttgtgagttatgcctggttttctgttgatgtaagaactgttaatatgttgaccttgatatgctgtcagctcaagcaatgaatatgaactatttt

SEQ ID NO: 2995 - DNA, 404 bp, Triticum aestivum
  Clone ID: LIB103-020-Q1-E1-H4
tcccggaccaaccatggacgcagacaagcaggttgtaaggaagacatggaaaaagggttagatgaaaggcgtcccgccgggggtccaaaatttcaacgggaaaaatgaatttcctaaagtcctacaggcacctggttgggctaagaggtgtgtttccctaaatcaatcaaattagtatgcattgctgaatatttgttgttgagcgattaggagtgatgctgtcatacgtgtattgacgtccccttggggttcagaacattcagacaggtagttgatgctgttcttaagcagtgtacggttatgaatggatgatgatctatccagcttggagcatgttgttactaatttgaaggttgctgtacaattggttatgagttatgaattaaggggagtgaattgtagtt

SEQ ID NO: 2996 - DNA, 415 bp, Triticum aestivum
  Clone ID: LIB103-020-Q1-E1-H8
cgggccgacaagggacacacgacaaggtggtgctcgattactttcctgggaacaccggggatatctgacggttgcaatgcaaacacatcaacattcgcccgcaggaaagcaacgaccgcgctttccaatttagggccgaccgtggaactgatggtgaaggtacaaccagtgccgtcccccttgggggacacttcttgggcccaggtggacctgcattgcttcctgcgcttgcggtggagctcgatggtgcgtcctcgacgggtagcgcagcacttcgaagaggtgcgcttgccggagtagacatcagagctcttgccggacttggtcctcatcttccccccgggagcctcagccggcaagtgtgttgtgattagttgcggctgctgcttcccggtagatcttgccggcacagata

SEQ ID NO: 2997 - DNA, 342 bp, Triticum aestivum
  Clone ID: LIB103-020-Q1-E1-H9
ggtctagcattcccgggccgacgggaaagggaaagggggcggaaaagggaacgccaaagggtttggtaaaggtaaaggaaaaggcaaaggcaaccccaaagggaggggtaccaggcgattatctggccacaagaaagaaatattgttgtagaaccaacaggaaagaagtccgcgtgtctgatatgtctgcgtgcttgttacttaacctagaccgggtccctggttcagttcagttttgtttcacttctattgtgatagccggggaaataaccatgattttgccagatatatgtaaccgcctttgttgtgacgagaagtaaccatgggctcaatttgatttgc

SEQ ID NO: 2998 - DNA, 471 bp, Triticum aestivum
  Clone ID: LIB103-021-Q1-E1-A10
cggtccggtagtccgggtcgaccgggaggttggtcagatggattcgtatgaaattgaaggaggtgaaacaaaatcagaaatcctgcagaatcttaccgagttccagttttcttgtgttatgtataatgctgttctagagaatgcgtgcagtgagcttggtgcccgtatgtctgctatggacagctccagcagaaatgccggtgaaatgcttgaccgtcttacactgacatacaacaggacacgtcaagcatctatcactactgagctcactgagatcatatcgggtgcctctgctcttgagggatgatgatgaaactttacgctatcatcttttttatttttctgttccaatgaaggccacttctaatctaaaaacagccttttgcattctcctgtgagtggatctgagcatcaataattagcctgaatacgggacggatatgccttgtggcgctatcaaccttgctttgt

SEQ ID NO: 2999 - DNA, 430 bp, Triticum aestivum
  unsure at all n locations
  Clone ID: LIB103-021-Q1-E1-A2
ggtccagnaatccgggtcgaccggggaagcaacaacactagcagcaggggcaacattctcaagtggctttttaatgccaacatcagaatcttcttgccgactggtgggaatagcatcatgggatccttgagctacagaaggatctacactgtcaacggcaaccaatacagaagcatcaacactaccacggccatcaacaacacaactgccctgattcagatcaacatgaagttccacgctatgttctccaacctgtggaaagtttaaaatacacagagtcaacctgtggaaagtttaaaatacacagagtaacacaaaaatgagcgtggggataactaacacaacaacacacaacacacttatgtcaaaagactgctgacaacatacacataacaactacagtccccatatgcaaaacaacaccaacaca

SEQ ID NO: 3000 - DNA, 379 bp, Triticum aestivum
  Clone ID: LIB103-021-Q1-E1-A3
ggtcgcacgcggatcaggatagccgtggatgccgcgctcgcgaggacatgattgcgcagttcgctgagcggtatccggacgtgctgttcctgcgagtcaactacgagaagcacaagtccatgtgctacagcctcgatgtccatgtcctccctttcttcaggttctacaggggagcccagggcagggtcagcaacttcagctgcataaatgcaaccatcagtaagttcaaggacgccctcgcaaagcactcgccggacaggtgcagcctcggcccggcgcgggggctcgaggacgcggagctcttgactctggcggcaaacagggacctggaattcatctacaacgagaagccgacgctggtgccgatcgccgacgctat

SEQ ID NO: 3001 - DNA, 420 bp, Triticum aestivum
  Clone ID: LIB103-021-Q1-E1-A5
ggtcgacgggatcaagatatccggggagaatccatggtggggagtttgtagattatataaccaacgaagaggctcggagtcgccgccgcggagtctaactgtcttgtgacgaaaggcggtgtccacccccaaactgtataaaagtgaggaagattggtttagtagtgcaggaattatggcgtggcgtggcatggcgcatctaccggtttttgtcgcagcggatgtcgcccccctgaagcagcggctttgaatcgcagtcgggagtttgctaggtccccccctcttttgaccccccgaactctgtacagatagatgtggggagttgatgatgactggatgatgatgcttttggtttggatttctgtaaataacaccaattgtacagtcggatggatacttgtgctagttctgcatgccttt

SEQ ID NO: 3002 - DNA, 371 bp, Triticum aestivum
  Clone ID: LIB103-021-Q1-E1-A7
gggtcgacttcttctcgcacggctgcggtggctgccgtgcgctccaccccaagattgcgcagttcgctgagcggaacccggacgtgctgttcctgcaagtcaactacgagaagcacaagtccatgtgctacagcctccatgcccatgtcctccctttcttcaggttctacaggggagcccagggaagggtcagcagcttcagctgcaccaatgcaaccatcaagaagttcaaggacgccctcgcgaagcactcgccggacaggtgcagcctcgggccggcgcggggcctcgaggaggcggagctcttggctctggctgcaaacagggacctggaattcacctacaacaacgagaagccgtcgctggtgccg

SEQ ID NO: 3003 - DNA, 433 bp, Triticum aestivum
  Clone ID: LIB103-021-Q1-E1-B1
ggtcgggtgggtattataaggttcaggctggcgaagcccgcccttgacgtgtcaaaaagaaaatttctcattattactgatgaagattaaaaagaagggaacatagtgtttcttgccgatgagttgcgtcctgcttcagccacccaatcgttgctgtcaacggtttagtcaaccctggagacttttctactttgcaaagagtatatgcgaaactttgcttttccagaacactttaggactagtttaacagaggccacctgatttgtctatacactaatgattcaaaggtatctatcctgtaagttgcatcatgctattttccttttatttatttttgataaagggtggcttttattgcctcaaaatggagtatcaagaggatacataacacaatgagcacacacccggtctctgtataaataggatgcacaca

SEQ ID NO: 3004 - DNA, 505 bp, Triticum aestivum
  Clone ID: LIB103-021-Q1-E1-B12
cggtccggtagtccgggtcgaccggctgggtgcaggaacctcatattcaagagctgcttctcaagcagacggataacgcaagagctgccgcccgagagaaagccaagatggatcaacttgagttagacgcggttactccattgtatgaaggatgcaggcccgaggatacccgcctgaaagtaacgctaatggctctggagatgaaggtaaaacacaaaatgaccgacgcatgcttcgacgagaacatgtcattctggcacgaacgtcttcccaaggggaacaagtgcccgaccagtttggaggaggcgaagaaaatcgtgtgtcctctggatttaccgcacgtgaaataccatgtgtgcatgaacaattgcatcatttatcgggacgagcacgcggagtctaccatatgtccggtgtgcggtgtcactagatacaagaagaggaagaaagctcctcgaaaagtggtgtggtactttcggatcactcctcgtctgcagcggtattt

SEQ ID NO: 3005 - DNA, 425 bp, Triticum aestivum
  Clone ID: LIB103-021-Q1-E1-C3
gggtcgagacgggccgtgagctcatctcctttggccccaagtccgactaccaccacaacctgacatgctcctccataggccttggattactgttagctaccagatgaagttcggagaaaggagctaagacatgactcaccaggtctgctctatattgtaccatacagttcatattttggtagtcttgcttcttcggaaatttctgaaattcaaagttaccctcgaagtggtagagaatgaacagaactagagcatgggccattgtcagcttctgtgttggtagggcgattcttaggcgcaccaagatactggtcctggacgaagccactgcttcggtgacagtgcaaccaataacctgatccagaacacaccacaacatcatttctcagggtcaactgtcatcacgaccgtgcatcgaatcacct

SEQ ID NO: 3006 - DNA, 444 bp, Triticum aestivum
  Clone ID: LIB103-021-Q1-E1-C4
ggtccagatatccgggtcgaccggtagtccagaattccagttgccggcatttttcctcttcatgcaaaccttgtaaaataagtgagaaaaggcataagtattgtaccataatgtgtaataacaacccataatgcaataaatatcaatataaaagcatgatacaaaatggacatatcagttctcaagatgagagggcatcttattataatttccataagaattcttgtaggagttaccataattattagaggaattacaaggaaatggcccagggttgaaattacctctatatgcgttattaccaaaattgttcgtaccaacaaaattcacaaccatagattcattattattctcaatcaaacgagaggcaaatggcaaataatgtaatgcaacatatgagagtttatgatgggtacttggtaggattgatgtagatctccccgg

SEQ ID NO: 3007 - DNA, 509 bp, Triticum aestivum
  Clone ID: LIB103-021-Q1-E1-D12
gcctgggcgtacggtccggtagtccgggtcgacggggggttaagacgcatttaaagttcgggtgaacaaagatatgatattagtacttcggtacatacaatcattatacataaaattcttttacccaagtcacttgggggctcctaaatttatatgagccattttataataagtgttcttcttcttagtcgttgcaaagtttttattactattattatttatcactccttttttcgacatgagcgtgtggtcactagccggggagcctaatttctctctcaaagccgctagagtttagtttggtaaactggcctaatgagaagtactccggcctcgggataggaggttgaagccgtaggctgacccgcttgaagtcttgagataggatgtgtcatgttaaagcacgatagaagcacttctttttctaaggccaattttcggattggcaccgaacacttgatcctgttcggacgtcaagtttttactgacgttttttggttttccaagct

SEQ ID NO: 3008 - DNA, 421 bp, Triticum aestivum
  Clone ID: LIB103-021-Q1-E1-D3
gggtcgagcggtagcattccttgatatgctaattatgctaaattatattgttgctaaatttataccacctagcttcacataccagcaaaagaaaaaaaattctatgacttgcgacattacttttgggatgacccacatctttataaagaaggagtagatggtttcattagatgttgtgtacctgagcatgaacaggaacagatcctacgcaagtgtcactctgaagcttatggaggacaccatgctggaaatagaactgcacataaggtattgcaatccggtttttattggcctaccctcttcaaagatgcccataagtttgtgttgtcttgcgatgaatgtcaaagaattggtaatattagtagacgtcaagaaatgcctatgaactattcgcttgttattgagccatttgatgtttggg

SEQ ID NO: 3009 - DNA, 416 bp, Triticum aestivum
  Clone ID: LIB103-021-Q1-E1-E4
cgggtcgactgacaaccatacatagagcagagcaaaaatactgacgaccccaaagattttagcatactgtgccattagcacttgacctctttcagcccatgtgcaaagtacaggaaagttggatcagcagctccctccttgtagtacgcgaacaccacgccgccatcatcatgcatgctctcgccaacaaagaactgaaggtccttgagcttgctaagaagatacttcgtggcagactcaacattcttcttgaaaacatctaggtcatccccttcaagcttggcagtgaggttcttgatgtagcgcttcatgtgagagataaactgcttcttgtcaaaagcaggttgctcctgaagacggaaggtgtcaacaatgtcaaccaccttcacggcctggtcatcgacaccctcatcgtc

SEQ ID NO: 3010 - DNA, 337 bp, Triticum aestivum
  Clone ID: LIB103-021-Q1-E1-F10
tcgacggggctggcgtcggtggcttgctggccgtccttacttcttgcctgaccaacatggatggcttcattcacagccacctcaacctgcttgcgatagccagccatgcatgcacgcacgcgcatgtaggtgcgcacctgcctggaatgcagctcggtcagcaggctcgtcctcctgcatgcaccatcgagacagcttacctacgtccctctcgttcgtttgatccaggtcggcactgagcgcactcacctattcacgcagcatgcggtcagtcagcaggcagtaatcacccgccgggtaggtcaagctgatagtttatttccaaccaagaatttgg

SEQ ID NO: 3011 - DNA, 296 bp, Triticum aestivum
  Clone ID: LIB103-021-Q1-E1-F3
gggtcgaccgggaggagagcgatatagggtcgcagctggactaactcgccttcgtctcgcgcttgtgatgcacagaaatgtttctatgaactgttcccttgtggaagtacatttctgcgattgcatccagtttaggcctttaggtaccctatttatgcatcatgagcgtttaatttcgaggtatgacctaatttaagtgtttttatcgagtaaacaagtatcactgctggtgcttctggattaaaagaaaaaaaaaaaaagaaaaaaaaaaaaaaaagaagaaacaaaaaaaagaa

SEQ ID NO: 3012 - DNA, 65 bp, Triticum aestivum
  Clone ID: LIB103-021-Q1-E1-F4
tcccgcggcatcgatcttcccccagtgcacctttgctatgggtaaggtcactcacgctccgtcta

SEQ ID NO: 3013 - DNA, 70 bp, Triticum aestivum
  Clone ID: LIB103-021-Q1-E1-G12
cggtcggtatccgggtcgacggggaagatcagaaaagatcttgataaaagatatatgggcgggaaaagct

SEQ ID NO: 3014 - DNA, 428 bp, Triticum aestivum
  unsure at all n locations
  Clone ID: LIB103-021-Q1-E1-G2
cgggtcgaccgggaagaagaccaaggcggagaagcgggcgccggcgaccaaggaggccggcggcgaggggaagacgaggggcaggaagaagggcagcaaggccaagaagggcgtggagacgtacaagatctacatcttcaaggtgctcaagcaggtgcacccggacatcggcatctcctccaaggccatgtccatcatgaactccttcatcaacgacatcttcgagaagctcgccggggagtccgccaagctcgcccgctacaacaagaagcccaccatcacgtcccgggagatccagacctccgtccgcctcgtcctccccggcgagctcgccaagcacgccgtctctganggcaccaaggccgtcnacaagttcacctcatcctaggctagtctgccgtgtccgtgaactgatggcggcattctgt

SEQ ID NO: 3015 - DNA, 432 bp, Triticum aestivum
  Clone ID: LIB103-021-Q1-E1-G3
cgggtcgggcggggaaggggggagagaccacgcccatccagtcccgatgggtcgctcgattggatcgaccggaagtgcgggaagcatcgatgcgcgcgttgggatcgaccagaggatctgggtccagctgatgcgctccagcgcgcgattggatgcgaggtgcgcaaggggatcaacggaggcggacaatgcgggtgaagaaaggtggggacgagggcgaggcggtggcacgagcatggaatcatctgctgtcgattcgagttcgtttgtcggcgattccgtaattaaatcgcagtttctacatgccattactggtaatggttgcaggtttttaagctcgttggaacttgcttacggtgggtttgctctttgctggttctgcttgattgcaagcatcatggactatccaaatgcaaacatgcgcaactttcc

SEQ ID NO: 3016 - DNA, 434 bp, Triticum aestivum
  unsure at all n locations
  Clone ID: LIB103-021-Q1-E1-G4
cgggtcgaccgggaagaacacaaggcggagaagcgggcggcggcgaccaaggaggccggcggcgaggggaagacgaggggccggaagaagggcagcaaggccaagaagggcgtggagacgtacaagatctacatcttcaaggtgctcaagcaggtgcatccggacgtcggcatctcctccaaggccatgtccatcatgaactccttcatcaacgacatcttcgagaagctcgccggcgagtccgccaagctggcgcgatacaacaagaagcccaccatcacgtcccgggagatccagacctccgtccgcctcgtcctccccggcgagctcgccaagcacgccgtctccganggcaccaaggccgtcaccaagttcacatcatcataggtttcgtcgtctgtttcatggattgatggccgcatgcgtcgtgcatg

SEQ ID NO: 3017 - DNA, 494 bp, Triticum aestivum
  Clone ID: LIB103-021-Q1-E1-H11
acggtccggtagtccgggtcgacggctaaatcgagcaaaggcgaccagcgatggcgatgacgtttgctttgctccgctgccggctgcgatcgcaatacgtacggtttttcaggcagattggcaatacacattttttttgaggggtaattggcaatacacatatgtaactctcatttcccagccgaacaggcctggcccaattcatcctgcttcttcttttccttttctctaatttcttaccaggctgacatcccgtgtcgcgtgttaggcgctccctatggattttttttctgtacgcgtctttgggctctagatgttttttttggtttattcggctttttggtttttgcccagtccccctaagcttcggaccaaaaaatttcaaaaaaaaaatttgcttgaagaaacatgtttttttcttccgcggtagacatgggtttgctttccatggaggcacaagtttgattccatgagaggcaaagacacctgtgcct

SEQ ID NO: 3018 - DNA, 428 bp, Triticum aestivum
  Clone ID: LIB103-021-Q1-E1-H2
ccgggtcgaccggaactatgcacttttctatcaattgatcgacagtaatttgttcacccaccataatacttatgctatcttgagagaagccactagtgaaacctatggcccctgggtctattttccatcatataagtttccgatctattttattttgcaatctttactttccaatctatacaacaaaaatatcaaaaatatttatcttattatctctatcagatctcacttttgtaagtggccgtgaagggattgacaaccccttcttcgcgttggttgcaaggttcttatttgtttgtgcaggtacgagggacttgcgtgtagcctcctactggattgataccttggttctcaaaaactgagggaaatacttacgctactttgctgcatgaccctttcctcttcaagggaaaaccaacgcatgctca

SEQ ID NO: 3019 - DNA, 365 bp, Triticum aestivum
  Clone ID: LIB103-021-Q1-E1-H3
gggtcgggcggagacggatgccaagaaacagctgtgagactgagcaagccaagcgccgcgctgagggggacaggaagagggaaagcgaacggttcaaaatttccctgtttggtcacgccatattcagatattctccccccttttcactggagaacgcaatgcgatgcaagagaaaaatagcctttcctcttccgttattcgatgtttgcagtagcaagtagtggcactcctagatgtattctcttgagttggttttcttttctctatcctctactatggtaagaagaaagagatgtttgaagactcagaaataagtgaattaagtaaaataggatttgtaacaatggtgcatgtgaagcttaagg

SEQ ID NO: 3020 - DNA, 433 bp, Triticum aestivum
  Clone ID: LIB103-021-Q1-E1-H4
ggaatgggtaaagaagctcttaatgttcgagcagctgcagaactatttgataaggcaaatgatatacttggctatgacttgctgaatctttgcatcgatggaccaaaagaaaagctgaactcaacagtgatcagtcagccagctatatatgttaccagccttgcagctgtagaagtgttacgcgcacgtgaagaaggccaatctgtaattaactccgtagatgtcacatgtggtctcagcttgggagaatataccgcgcttgcatttgccggtgcctttagctttgaggatggtctcaagcttgtcaagcttagaggagaagccatgcaggatgcctcagatgctgtcaatagtgcgatggttagtgtgattggtctagattcagaaaaggtgcaacaattatgcgacgctgcaaatgaggatgtggatgaaa

SEQ ID NO: 3021 - DNA, 444 bp, Triticum aestivum
  Clone ID: LIB103-021-Q1-E1-H9
tggttcttttatcaactactacatgtatcatggtggaacaaattttgggcgcaccgctgggggtcccttcattacaacaagctatgattatgacgctccacttgatgaatatggacttgcaagagaaccaaagtatggacatcttaaagaacttcatagagctattaagttatgtgagccggcattggtttctgttgatccaactgtgacttcccttggaagtatgcaagaggcccatgtctaccgatctccatctggttgtgcagcttttctcgcaaactataattctaactctcatgcgaaagttgtcttcgacaatgagcattacagtctaccaccttggtcaatcagcatccttcctgattgcaaaacagttgtttataatactgcaacagttggtgttcagacatctcagatgcaaatgtggtccgatggggcctcttc

SEQ ID NO: 3022 - DNA, 284 bp, Triticum aestivum
  Clone ID: LIB103-022-Q1-E1-A3
agactcatctatgacgccacatgcactacacgataccggggattgtccgctcaagagggtagaatcgttgatcaacgaccatggaccattgtcactctccattgtggcagcatcagataagatcaactacattcgtttaggggaaaatgcaatgcaagacttgctgggtaagacggtttgatcaccttgcaggaaatcatcaatattttggcggatttcaccgcgttggggggggaacttgtcccggatcctgcgaggttcccatcgaaaatgctcatcgagaa

SEQ ID NO: 3023 - DNA, 282 bp, Triticum aestivum
  Clone ID: LIB103-022-Q1-E1-A4
ggtcaagaattatcgggccgacgcgcaatggaagatgtaggtgtgatatgtcaagtagtggacagataagccaaccactggatgtggttctgagggatttttgcagtggggtttgtacggtgctatgctgctgaactgctctgtgtttgggatttgaaataaaacgaagggagatgtgccccgctcttaaaaaatcaaaagaaaacaaaaagcaaaaaatccaaaaaaaaaaaggtttacaaaacgatccaaacatcaagtaacactcatatgagatttcat

SEQ ID NO: 3024 - DNA, 419 bp, Triticum aestivum
  Clone ID: LIB103-022-Q1-E1-A5
cggggagaaagatgtgcttctccttggagacgacccttgggagtcatttgtcaatagtgtatggtacatcaagatactttcaccagaggatgtgcacaagttgggcaagcaaggaaatgatccacgttacctttcctaagtgcaagatcattgtgctgtttctgtggacttccatggagaaaattcagatttttatggcatctctgatccagcgaggattcgacagcacatggtagcacccttgctcacggcggcacaacatccccggaacctcccatcgtctcatcttcgtacctgtctcttgtgtgtgctccgtgcacgtctcgagagctccccgtccgttacctatctccgtccggtgcaagccaccgacaccatgaactgatatctctgtaggttcctcttgggaatctgtatcg

SEQ ID NO: 3025 - DNA, 428 bp, Triticum aestivum
  Clone ID: LIB103-022-Q1-E1-A7
gacggggaaagaaaagcagaagaatcctgcagattctgctggtattgatggtgcaatagaaggtcaaagtccggcggaaaattgtaccgacagggtatctcgtgctaaacgagctgcagaacaagccaaacagaaacaaatagctgccaccaaacaagcagagacaaccctagttcttgcaacaccttccacagtaccaccagctgcacgatttactcgttggtcaactcagctagcagcacattcccaagctcccttgccacctgacactacttctgaagcactcttgacacaagatgagttggcaagatcagatgaactttgtgagcttcaagtgcaagaaggttgttgctggagtcaatttacagttgcatgcttctttatatgtagtctcacagtttgatgtacactaacacttcctatgtttc

SEQ ID NO: 3026 - DNA, 435 bp, Triticum aestivum
  unsure at all n locations
  Clone ID: LIB103-022-Q1-E1-B1
gggtcgacggcgtctttgactgcagaaccaaagttccatgcagctcgaactgaccaaatttggccaattactaagcagttcataaaaacatcatcagtggaagggaatggtccgttggatggcaattcatcctgcatggctgatgcttgcaatgaaattagttcctgcaatgcttcacccatggaatacagtggcaattctgattctgatactgaaattttccgagtcaagcgcaggtccagcatattaggaagatctgctcctgacacgaagacaacaaacatgtctgaacagaaggttctgaagcggctgaagaatgcatccccagaaacacaacatgacaataagcgacctgaagaagactctgagcgtacttcagttccctcagttagtatgaggcacaataagtcaaattctgcctcttctgangaagat

SEQ ID NO: 3027 - DNA, 138 bp, Triticum aestivum
  Clone ID: LIB103-022-Q1-E1-B10
acggggaagaataactggctgctgctttcttgcagggccaccgttcatcgttctctcatacttgtcactcttgattcattgcataacccggctcaccgccggctgcatacatatagatttatatctacttctaagtat

SEQ ID NO: 3028 - DNA, 431 bp, Triticum aestivum
  Clone ID: LIB103-022-Q1-E1-B3
gacgggttttgaagtacgcaaaatgatgtaccttctgacagttccgcatataaaatgcgccctgtgtagatagtagcccctgaggctcggtgtgttgtcaaaaatgacagcgcgccgaggatcataatcccaagtataatgtgtcgcccttcctatgtaggtggcgaagggtccggtggctagccagactgataaatttgctgaactaaagcggcaacttgacgtggcggatgccgacatcgcgcttgtcaagaagcgacttgacgagtcacaaggtatgcaatttctccgcagacacctggtaagggagcttgatgcccgtgccttacaacatgtatgcttgatgcagatggtgcagctgccatggagaaccttcgggcggagctcgcccgagccaaggagcagaccagatagagtgatgcggctgcctt

SEQ ID NO: 3029 - DNA, 435 bp, Triticum aestivum
  unsure at all n locations
  Clone ID: LIB103-022-Q1-E1-C1
gggtcgacgggggtaccgggatgatcatcggggcagagattctagaaggcgaagtcggagtcggagtggagatagatatggacgtgacaggtacagggagagggatcatcatcgtcgtagcaggagtcttagcgctagtcctgatgattacaagaggcgtggcagagacagaagtcctagtcgtagcaggagccgcagctacagtcctgatgatgacaggaagggtggcagagacagtttgtcgcctgcacgcagaagcactagtcgctcccctcgcaagacaccacctcctcgcaagacaccacctcctcgcgaggggtctcctgctangcgcaatgatgaccggtctcctgttgggcgcaatgatgaccggtctcctgttangcgcaacgatgaccggtctccaggctctcgtagcccttcaacatgagctga

SEQ ID NO: 3030 - DNA, 423 bp, Triticum aestivum
  Clone ID: LIB103-022-Q1-E1-E1
ggtcagaattacgggtcgacgggcaccacaagcatcaatccatggcttgctcgaaacaacgagtgcctccaactaacaagagtcccagggggagttttgtttgcaattattttgatttagttcgcataaagcatgggactgggcatcctggtgaccaaccatttatctcgtgagtgaggagcggagtccactcctcttgagaataacccgcctaacatggaagatacagacaaccctagttgatacatgagctattcgagcatacaaaacatgatatttttttgtaggtttagagtttggcacatacaaatttacttggaacagcaggtagatacagtatataggtaggtatagtggactcatgtggaatacctttggggtttatgggattttggatgcacaagcagtattcccgcttagtac

SEQ ID NO: 3031 - DNA, 378 bp, Triticum aestivum
  Clone ID: LIB103-022-Q1-E1-F4
ctatcccaccataggcgttgcccacgaaggacttgcctcactaacggtagatcttcacgaagtaggcgatctccttgcccttacaaattccttggttcaactccacaatcttgtcggaggctcccaagtgacacctagccaatctatgagacaccactctccaagaagtaacaaatggtgtgttgatgatgaactccttgctcttgtgcttcaaatgatagtctccccaacactctactctctctcgcatgatttggatttggtggaaagaagatttgagtggaaagcaacttggggaaggctagagatcaagattcatatggtaggaatgaaatatcttatcctcaacacatgagtacgtggttcactctcagaaac

SEQ ID NO: 3032 - DNA, 282 bp, Triticum aestivum
  Clone ID: LIB103-022-Q1-E1-H1
ggtgttggtgctgacgcagttcatgtataccactgtcttgtgtttcatctctttcactgtcgtgttgacttgtcagaacgtgctggtctctgtggttctgctgtgtgccataatgtcctcctggctaatctatgcgacttttcgccttgatcgactaaacaccatccactctggggatcaatctcgtcaactcgcttcacaacatagacaggcgcatgcgtcatcttcaatcaggcattaatgaacacttttaaccctcgagaagcgtgtgttttcaaattc

SEQ ID NO: 3033 - DNA, 417 bp, Triticum aestivum
  unsure at all n locations
  Clone ID: LIB103-022-Q1-E1-H2
gtaacggtcagcaggtcgagggcggaacacgggacatcgggtcattcccctcaatcctcggtccaatccgccttccctcccgacctccataaattaagggaccttgcaacctacccgttgccggaagcttcttcaacttccttctccccttctccttcggctcccaactccctctctccgatccagcgatctctcgggtctcgcggccgatggcggggccgatccgcgtcaccatggaggtcggcgccgacggcgtcgcgctcatcaccatctgcaacccgccggtcaatgctctgcaccccatcatcatccangggctcaaggagaagtacgccgaggcccttgatcgcgacgacgtcaaggccatcgtcctcaccggcgcggcgggcaagttttgtggaggcttcgatattaatg

SEQ ID NO: 3034 - DNA, 407 bp, Triticum aestivum
  Clone ID: LIB103-022-Q1-E1-H4
gcttgtctgcatggagccgcccccaggagacggcgccaaccccgatgtcacccgcgatgagatcatcgacgggtacatcaagaccctcgcccaggtcgtcggaagtgaagacgaagcacggatgaagatctactctgtgtcaactaggcattattttgcttttggtgccctagtatctgaggaactctcctacaaactcaaagagttgcctaaagtccgttgggttcttcctgattcatacctggatgtcagaaataatgactatggaggagaaccatttatagatggacaagctgttccttacgaccccaaataccatgaggagtgggtgagaaacaatgcccgtgccaatgatagatctcggcgcaatgacaggcctcgcaactttgaaagtccaggaactttga

SEQ ID NO: 3035 - DNA, 247 bp, Triticum aestivum
  Clone ID: LIB103-022-Q1-E1-H7
atcgacgacgtagttcattgctctcaaagctgacctgatggctaggggtgtacgtatggatctgctcggaatggcacccgagtttggccgcaagtgcaagcctccgaataagaatattcggccgggggagtagcattccccttggttaacaaccttggaagagatctccagagtctggcaaccattttgggacaggttaacggaaggccggattgaaaccacaatttccaagtcaaaactggtcgat

SEQ ID NO: 3036 - DNA, 392 bp, Triticum aestivum
  Clone ID: LIB103-022-Q1-E1-H8
gctacccactgacatgccttgcttgcatgatcacgccagatgtcaccgctctttctacttttaacacatggtgggcccataacccacagttccacaggatcgagacctgactctcctgtacaccctgttgccaaagttattcctagagcttgacttcgtatgtagttcacgggccacctgcctagtgatctattctggtatcagacgcaatacatattcccattgctctgaacccctttcacatttcgtatcaggcaacgaacgattgcctatgcgcttgaaacttctactttgcacattcttactttgctctcgataatttcttaagtttcaattcaagagttatttttcgccaccttccctaatgttatctaccggataagcacccatgc

SEQ ID NO: 3037 - DNA, 427 bp, Triticum aestivum
  Clone ID: LIB103-023-Q1-E1-A11
cgggtcgacattcgcccgcaggaaagcaacgagcgcgctttcctatttggggtcaagagcggcgctgatggtgaatgtaccgccagtgccatcctccttagtggacaccttcttagtctcaggtggagctgtcattgccttcttacacttgccggtggagctcgatggtgcgtcctcgacggttgtgcagcactccgaagaggtgcgcttgccggagtgggcatcagagctcttgccggacttggtcttcttcttccccccgggagcttcagcggcaagtgtccttcgttctgctacggctgctgcttcccgatagatcttatcggcatagataagagcatccttcttgtcgccagggacagagataacacttattgtgcctggcattttcagtacgttgtacgcatagtgggaggctgccatgaac

SEQ ID NO: 3038 - DNA, 369 bp, Triticum aestivum
  Clone ID: LIB103-023-Q1-E1-A3
gacgggtgcattatttatgactaatgatacagccgaagctcaagtgagagctccaggaggacctttgatcgtttctatgtctcgtttcctgatgatgagtatggagcccaattgggatgatcggggatctagcatttggggttgtcttcttttaatttggttccgtagttagaccttgattgtactctgatgatgtatgtttaattcatgtattgtgtgaaatggcgattgtgagccaactctttctcccattcttgttcattacatgggattgtgtgaagatgacccttcttgcgacaaaaccaccatgcggttatgcctccaagtcgtgcctcgacacgtggggtatcgtgggtgttacaacagtgt

SEQ ID NO: 3039 - DNA, 351 bp, Triticum aestivum
  Clone ID: LIB103-023-Q1-E1-A4
cccgggccgccggggaccaaaagtatccaaccccccgatctagggtttcttttccccaccgcgcgggcacaacacagagagcggcggcggcggggaggagccggcgtggaagacgatcgatctcgggggcggcgcgctggagacgcagatgggtggcggggttaaagccaaggaggagtaccgctttggctcgtccaaggtttctcccttgcctacggtgaatgccgaagaagtggccgctgccaaggggaagaaatccagggcgaagaaggctgcgtcgcggatagacttggacaaggctgaatcccttgcgtataaagccaggattaaggcgacggagtctgccagggt

SEQ ID NO: 3040 - DNA, 397 bp, Triticum aestivum
  Clone ID: LIB103-023-Q1-E1-A5
ggtgaattagttatgactaatgttgagtccatggattatacgcactctcacccttccaccattgctagcctctctagtaccgcgcaacttttgccggtaccttaaacccaccatataccttcctcaagacagccaccatacctacctattatggcatttccatagccatttcgatatatattgccatgcaactttccaccattccgttattatgacatgcttcatcattgtcatattgctttgcatgatcatgtacttgacatcgtatttgtggcaaagccaccattcataattctttcacacatgtcactcttgattcattgcacatctcggtacactaccggcggcattcacgtggagtcatattttgttctaagttttgagttgtaatctttga

SEQ ID NO: 3041 - DNA, 410 bp, Triticum aestivum
  unsure at all n locations
  Clone ID: LIB103-023-Q1-E1-B10
cgggtcgaccgggatttattggaaagaattaaacgcaactctgaagattggggttccgacgatggtaaggagtcaggtatgacacctaagtttgattgtgttatatcttttatggataccgatgcttttcgtggatttagtgctaaatatggacttgactctgagatagtagcttctttttgtgaatctttcgctgctcatgttgatctccctaaggagaagtggtttaaatataatcctcccactgaagtaaaagtagttgcacctattacagttgaagaaaagactattacttataacgatcctattgttcctactacttatgttgagaanacaccttatcctgttaggataaaggatcatgctagagcttcaactatggttcgtaagagtaatactagaacatatac

SEQ ID NO: 3042 - DNA, 423 bp, Triticum aestivum
  unsure at all n locations
  Clone ID: LIB103-023-Q1-E1-B12
cgggtcgaccgggaagaagcccaaggcggagaagcgggcgccggcgtccaaggaggccggcggcgaggggaagcagcggggcaggaagaagggcagcaaggccaagaagggcgtggagacgtacaagatctacatcttcaaggtgctcaagcaggtgcaccccgacgtgggcatctcctccaaggccatgtccatcatgaactccttcatcaacgacatcttcgagaagctcgccggcgagtccgccaagctggcgaggtacaacaagaagcccaccatcacgtcccgggagatccagacctccgtccgcctcgtcctccccggcgagctcgccaagcacgccgtctccgagggcaacaaagccgtcaccaagttcacctcatcctangcttcatcgtcgtcgttttaacgaatcgatgatga

SEQ ID NO: 3043 - DNA, 397 bp, Triticum aestivum
  Clone ID: LIB103-023-Q1-E1-B3
cgggccgacgggtttgatacttaataattgttttgagatatggaggtagtgatattaaagtcatgctagttgggtgattatgaatttaaagaatgcttgtgttgaatttagcaagtcccatagcatgcacgtatggttaaagttgtgtaacaaatttgaaacatgaggtgttcttaaattgtgcatccttatgaatggcggtcgggacgagcgatggtcttttcctaccaatctatccctctaggagcatgcgcgtagtgcttggtttttgatgacttctaaattttttgcaataagtatatgagttcttttgactaatgttgagtccatggattatacacacttttacctttccatcattgctaacctcttcggtactgtgcattgccctttctca

SEQ ID NO: 3044 - DNA, 405 bp, Triticum aestivum
  Clone ID: LIB103-023-Q1-E1-B4
cccgggccgacggggtcagcaataactctgacccccaaattctggaaataatagcaattagagaggctcttgctcttgcagaggatctttacataaacaaaatgtccattgcatcagattgcaagatggccattgatgcgatcaaagaagggagttccgctgcctttggagcaataattaaggagattatagctagaacgagcatttttcttcatgtatttttagtcatgagtataggacctcgaatgtacaggcccataatctcgcaaagtatgctttatccttaggttttggccgtcatgtttggttacgccagatcgaagatctcgtatttatccttaccaacattgcgaagcagtaataaagttttgcgagatactcagaaaagaaagataatgttggcat

SEQ ID NO: 3045 - DNA, 437 bp, Triticum aestivum
  Clone ID: LIB103-023-Q1-E1-C1
ggtctagaaatcccgggccgacggggctcatattaaagttctccgtcgcactgccatccctcttggcactaccgtgattgacaagatcaaccctgctgaattggtgaacctggttgacattttgggcccttcatccacaccggtaatgatcaccatcactatacggatgggagctaataacatgagggtgaagttgcctcatcccatccgtgctgtctgcaattctggacatattgtcacatggattactgatcccatgcacaggaacaccatcaccgccacatgtggactgaagactcatccatttgactctattaagaattacgtgcctccaatcttccatctgcactaccaagaaggaagccatccacgaggcatccaccttgaaatgacagtacagcatgtcatctaatacatcggtggatcacggaccgtta

SEQ ID NO: 3046 - DNA, 389 bp, Triticum aestivum
  Clone ID: LIB103-023-Q1-E1-C10
ccgggtcgaccggacagggcacgaatacctgcagcacgagaatttcatggaatgagcagtcagttagtcaaggcaatgccgagtcttatttttacaaaagtccaggaagacaattgtacttcgtcaacatgtgccatttgcttggaagactacagtgttggtgaaaagataagggtgctgccttgtcgtcacaagttccatgctgcttgcgtggacctgtggctcacatcatggaggacattctgccctgtatgcaagcgagatgcaaatgctggaatgtcaaatttccctccatcagagtctacccctttgctttcttctgctattcccttaccagctgaatcgacagctttgtcttcttttcgttcaatggtagcagcatctcctcc

SEQ ID NO: 3047 - DNA, 266 bp, Triticum aestivum
  Clone ID: LIB103-023-Q1-E1-C2
aaccccaccatcacctccagggatatccagacctccgtcggcttcatcccccccggggatctcgccaagcacgccgtctccgagggcaccaaggccgtcactaagttcacatcctcctagactgaccgattgcatttggtttccgcatctgcatctgtactcttgacactgcgtatctatcgatcagcaggtaaaggtcgccgtactagtacctgtgctgggtgattgccaacgctttgttggcccgtaggttgtcacaactgaaa

SEQ ID NO: 3048 - DNA, 402 bp, Triticum aestivum
  Clone ID: LIB103-023-Q1-E1-C3
cccgggccgacggggaggataatgaactggggatccaggtgcaacgcattgacttggtaatgcgagagcacggcgttgaagaaatcggagaaggggggattaggccagcctagagggcgtgaagatgaatggggatctcggtggctgtcctatcaatcgcggagcgggaagtaggtcaagccaccgtcaccttgcactcattgaaatctgaggcgagcatggggcaaaccttgtccattgcttcctggttgagcaccaccgaccgctcgatggcgggctcgaggaccggcggtgtctggattgaggtgtgggtcttcttcttccccttcttcttctgtttcggggcgcagcagagaggattggagccggttcaagccatggcaggaggcagctgtttctggg

SEQ ID NO: 3049 - DNA, 252 bp, Triticum aestivum
  Clone ID: LIB103-023-Q1-E1-C8
gacgggtaaattaacgtgaggctatatttttattcaccacatgatatgtgttttgcttggagcgtcttgtgtgatttgagtccttgatttttagtttaacgcgatcatccttgctgtccacaccttttgggagacacatgcatgaatcatgatttagtagaataatctatgtgcttcacgtacatcttttgagctatagactattgcgcgaatgcttcagttatagcgttttatctcacgacagtgggttta

SEQ ID NO: 3050 - DNA, 423 bp, Triticum aestivum
  unsure at all n locations
  Clone ID: LIB103-023-Q1-E1-D12
cgggtcgaccggaccttcatactaagcaggcattcaaagaagatttccttctgttctttggtaagagcatagctggcaggaccttcatactgctttagaggcatgccgtctttttcgtgcaaacgttgtaggtcctcccatgcctcagctgtatcttttgtcttcccatacacgcccaagaagcctagaagattcacgcaaaggttcttcgtcacgtgcatcacgtcgatcgaagagcgaacctataggtctttccagtagggtaggtcncaaaatatagatttcttcttccacatgggtgtgtgtcncccagcgtcactcggaacagctagtgcgcggggaccctttccaaagattatgtgtaaatcattgaccatagcaagtacgtgatcacaggtacgcatggcaagcttcttccggtga

SEQ ID NO: 3051 - DNA, 369 bp, Triticum aestivum
  Clone ID: LIB103-023-Q1-E1-D2
acggatgtctattcaaaggttaaggttctcggatccaacaataactggaaggattttcggaaacaggttaaccgattcaccggtaaaatttacaaagggtacaccactagggccaaggccaaatctaaatacccccgcaatctaccggaaaagggaaggaacctttggaggaaccggataaaaacaattttcaccgtgataatgcccattgtgatgaccgaagctctcttcaatgtgatggaagtttaaatgatcaatatcaacttgtaatgtgaagacaaactcgctactcgcggtctcaaaacttgtaatataatgttcaacctttgttcggtcttttcaattcggagactaatatgatgaattgta

SEQ ID NO: 3052 - DNA, 410 bp, Triticum aestivum
  Clone ID: LIB103-023-Q1-E1-D3
cgggccgacgggtcctcgaaggcagcaatacaatacgtgccttgctgcccctactgtcactgggaaagaacaccgcaagattgaacccaaagctaagcacttctcgcattgcaagaaagatcaatctagtaggccaaaccaaaccaataattcgaagagacttgcaaagataacttaatcatacataaaagaattcagagcagattcaaatatttctcagagataaacttgatcataaacccacaattcatcggatcttgaaaaacacaccgcaaaaagagttacatcgaatagatctcctagaagaggaaggagaacatggtattgagatccacaaatagagaagaagccatctagctaataactatggacccgaaagcctgaggtaaactactcacaactcatcggag

SEQ ID NO: 3053 - DNA, 413 bp, Triticum aestivum
  unsure at all n locations
  Clone ID: LIB103-023-Q1-E1-E10
cgggtcgacgggactctagctaattgctcccactttcaatatgtatccagattgagactaagagtcatctgatttggtgtcaaagctttcgttgacgtaaccctttatgacgaactctttattacctccataattgagaaatatctccttagtcctcttaggtaactaaggataattttgtccattatccagtgatctactcctggatcactattgtcctcccttgccaaactcatggcaaggtacacagcaggtttggtacacagcatggcatactttatagaacctatggttgaggcatanggaatgactttcattctctctctatcttctaccgtggtcgggttttgagtcttactcaacttcacaccttgcaacacaagcaagaaccctttcttttactgttcattttg

SEQ ID NO: 3054 - DNA, 359 bp, Triticum aestivum
  Clone ID: LIB103-023-Q1-E1-E2
cccgggccgacggaaggggcaattgaaagttggaaggaggaataaactaattatagtatttattgtgactaaaagttgctgattagcaactaaatcatactgcatattgaaacaagcacttcaggccatctatgtgttaagagtttaggggcatagcttccatcatccaactaaactacacaacttatactaacccatataagttttaacacttcactgatattcttcataacccatataattgtccactagtcagtaccatgttttgaccttgttgatcttcaccaaataactgggaacattaaaacacctaatacaacagtataaactaggctgtcttcaccagtataacacgaaac

SEQ ID NO: 3055 - DNA, 421 bp, Triticum aestivum
  Clone ID: LIB103-023-Q1-E1-E3
cgggccgacgaaacacaataccagccgccgcaagttccagaaccaccagatccaatctagacaccatcacggagggcttcatcatcctcattggtgcctctccgatgatgcgtgagtagttcattgtagacctactggtccgtaggcagtagctagatggcttcctctatctcttttgattctcaatgcaatggtctcttggagatctatttgatgtaactctttttgtggtgtgtttgttgggatccaatgaactttgagtttatgatcagatctattttatccatgagagttatttgagctttgatcccttatatgcatggttacttctagcctcgtatttcttcttcgaatatttggtttagttaggccgactagatcaatttttcttgccatgggaagaggtgctttgtgatgggtt

SEQ ID NO: 3056 - DNA, 258 bp, Triticum aestivum
  Clone ID: LIB103-023-Q1-E1-E4
ggggatgccaattgatgaatttgtgggcaatggcgcctccaatgttgatgaacaaccacctacagattatgattaaggttgtggtgctgccaagggttcaaaccccgaagaattcaaccgcaacctttaagaagctgcccaaattcttaagaaagccaaggaattcaagattggcaaggaccaccaagaaggcccaaaaacctttccgtacaaggccgcaaaggctccgttcaaccgccttggaattaaggccaaaaa

SEQ ID NO: 3057 - DNA, 421 bp, Triticum aestivum; identical to SEQ ID NO: 3055
  Clone ID: LIB103-023-Q1-E1-E7

SEQ ID NO: 3058 - DNA, 381 bp, Triticum aestivum
  Clone ID: LIB103-023-Q1-E1-F1
cgggctcgacacaagacaggtacagacgcgcactgttggaccctgaggaggttccggaggaacacaacatacgtgcgtcactcggcacctctgagtttgcgcaagaagtttctggaacattcagtctttatggaatggacagtcagaacatactaacatcacttcctctttgtcaccatcgttcacacatacgggccctcctgacaatcgaagggaaccacttccaccagaccagtgcattgtaataatagcatcatgggcttcttcagactcagttggatataacccaatgcacttggtgtctacgtgcatcctctctaagcaacgatctatcggccaacgcactcattctccgtgtatatgtctcagtcaagttgacta

SEQ ID NO: 3059 - DNA, 403 bp, Triticum aestivum
  Clone ID: LIB103-023-Q1-E1-F10
cgggtcgaccggcggggcaacgatgcaggtagatgaagtcgagcacgggaaagctactagacaagggtttgcatcgagacgaggagggaaacaacaggaaacggggcgacaacatgccaaagcacagttttggctgatgcatcccatggtcgccgcgtgagctggcatgcgcggcgcgtcctggcaaaactgaccatgcccagtgcatttatattagtaccctgagtccaaacggagcaacaagtcggctcaggggcaaagaagagaaaagcaggaggggcccaaacatatcagcagcaacctgtttgtgttgtctagtggagacacaaacttggcaacgaaggaactgatttgtctggggcttatcatacactaagttgacttttatcaccaaaactcagct

SEQ ID NO: 3060 - DNA, 408 bp, Triticum aestivum
  unsure at all n locations
  Clone ID: LIB103-023-Q1-E1-F9
gggtcgaccggtggcagggactaccgagcatgctgcgatgtgacattgagcggcccatttaatgcgccctgtcagcctgtagagttaggtatgatagcactgtttgctatctaatcagtgcataatgattgatttgccacatggtgaccccttgacctataaaaggaggctcatggcaaccatagaaaggattcggaccctcacacgtccttgggcgcgtagccgttctctcncgaggcaaaccctgccgggaaaacgtgctgcgctcaccaccatttttccgcctcacggtggcccgagcctgggtaaaactgcccgcgtgatctctgtcatgctgctcaacgctcccctgctctttgtgcaatgtgtcatccccccgtcgaaccagcaagggactcctggtcccat

SEQ ID NO: 3061 - DNA, 449 bp, Triticum aestivum
  unsure at all n locations
  Clone ID: LIB103-023-Q1-E1-G10
ggtccagatatccgggtcgaccggcgaacgggtggagggaaaatcccagtacgcggacgaagtgagagacgaacactaccctctcctggggctccggggtggggacgatttgtccctcggccggaagccgatgggtgatctccttggccaggtacccggcctcccggagcttcttgatgtccttatccttgatggaggaggccatctttaggatcgaaagtatgtctagaggggggtgattagactacttgaccaaataaaaatctagccttttccaaattttagttcttggcatattttagcaacttagcacaagtcaagcaatcaatctacacatgcaattctaagagtatagcagtggaatgtaaaacaatttcatatgaaggtaaaggggaggagtttgagaaagcanatgtaatangagacacggatgtttttgttgtgggtcc

SEQ ID NO: 3062 - DNA, 289 bp, Triticum aestivum
  Clone ID: LIB103-023-Q1-E1-G11
gggtcgacgggtggtcgcaaaggggacgtggggtgtttgcatcggtatttcttccatttacgttttgttgtccgcacgccaatctgtagggtatatctatcttcaccactgtttagggtactgtgatttgcttccagtgatttagccgtgtagcatcagaatgttgtttctccttcctttcatctttgcagttgtccactctcttaaacgggttcagacataaaatgtgaacagacatcactatgtaaggaatacatcaactgtgacagttcagtcaaaatgcagttag

SEQ ID NO: 3063 - DNA, 368 bp, Triticum aestivum
  Clone ID: LIB103-023-Q1-E1-G4
gacgggaacggtaaccaaatccagggaacaagttttacaaaccaccttatggttaaaataataatacaattacctatatatccaaatcacacaaacatcaatttttaatataaaccattcatgaacaaaaggctcaccacaaggtggtgccggcaacgggacggtgcgggtgatcggcggtggttacaacggagatttacaaggcactaagtaaaccacacctacatatgcaaactaagtgttattttaacctcaaattgcatataaatcaaatactagcacatatatatatttcctcccaaattactaaactcacaaattaataactatataaagcattgcaagagctaatctagcaatgagagatg

SEQ ID NO: 3064 - DNA, 430 bp, Triticum aestivum
  Clone ID: LIB103-023-Q1-E1-G9
tcctgcggcacggtcgagtattccgggtcgacggggcacggcgactccgccgaccagaagcctctccggcccttcttcgacgagtggccgcacgagaagaccgggagcaaggggtcgtggatggggctcgagggggagacgcagctctccatctccatcgccaacgaactccccatcaccaccacctcccgctaccaccatggtgaatgatcccaagtcccaacgagaagaccgagaacgaagctgcaacgagagaccatctccacgaagaacacgcacgtacggagcgaatccattggccctttcccggcgtgctactccagctgcatgccgccgagacctggaccagctagctatcttgactctcgaggcatgcatgcacagttcgagtgctgaagatcttgaaaaggcggaaccctactacgacatc

SEQ ID NO: 3065 - DNA, 253 bp, Triticum aestivum
  Clone ID: LIB103-023-Q1-E1-H1
cggtcaagaaatcccgggccgacgggattgcgtagtctagaatgagtgtagttgaaatgctcattttttacctctcgggatgggtgcttgcctggaaccctgggaaagggtacttttgtccccctatatggtgcaagataatctgccctgtttggggaaccccgagtcaacaagataaaattttcctattgatggcaatgcatttcagtcaaagtcaatgtcaatgtataacaattcaatcatgtactaaatg

SEQ ID NO: 3066 - DNA, 412 bp, Triticum aestivum
  Clone ID: LIB103-023-Q1-E1-H10
cgggtcgaccgggagatgagaagaaggcggctccagggtgcgacgtggaggcattgcgcaagtgcctggaagagaacaagggtgatggcgccaagtgccaggctcacattgacgccttccgatcctcatgttctgtcagccccaccaacacctccgactaccgtcccaccgtacaaaaggagacctgaaacactggtgtctttgctggggtggttttacaagaaaccttgtggaataattaggatgaggtgcgactgtgcaaatgctcatgtgaaagataggataattagggcttagactagcagtttttttttttgagaaaattatacttttcatccctcaattcttcgcgaagtttagatttggtccctcaattccaaaaccggacaacttgcatccttaactactgaaa

SEQ ID NO: 3067 - DNA, 377 bp, Triticum aestivum
  unsure at all n locations
  Clone ID: LIB103-023-Q1-E1-H11
gggtcgacagaagatctgtaaaaaatgttggtttagctgtgaaacaaaaagttttgcctgaggcccttactttgatcaggagtgctctgttgcaaggacaagcactgcangcactacagaagttttttgctgcactggtccaatctgcaaatataagctttgaaactttgttgaactcccttatttccactgctaaaccatcacagtcaggcggtctttccaagcaggcactattctctattgcacagtgtgttgctgtgctatgccgagcagctggtgatcagaagtgtgcatcaactattganatgcttaaaggcattctaaacgatgacagttctactaattctgctaaacaacacatggccttgttatgtttg

SEQ ID NO: 3068 - DNA, 332 bp, Triticum aestivum
  Clone ID: LIB103-023-Q1-E1-H2
gacgggaacttcaaccaaaaattctccccctaattttccaaggccaaattgacttatatccagaataggggacggaggtggcgggctagcaaaccacaggcatgcctggtgtcttttgctcaccaggtggccccccacctgtagttatttgctccagtatttttgatatattccataaaaattcctggtaaagtttcagctcatttgtagttgtgcaaaataggtggcctggcgtagctttttcaggtcccgatttccagctgccggaattctccctctttgtgtgaaccttgcatattatgagataaaatgcattagagttactccaaaaa

SEQ ID NO: 3069 - DNA, 413 bp, Triticum aestivum
  unsure at all n locations
  Clone ID: LIB103-023-Q1-E1-H3
gggccgacgggggtccatctctctttctatccatcaaaaatccccaaccggtttctcggtcccccaactcacaatcctcaagccaacctcctcctcccttggcttcggaaacctgcccttctcggcctcgccctctcggtaaccaaactcctctcccagacaagatacatagcggtgctgctgtggcggcaatggctgtcaaggcgcggttcctctcccaggccttcccccacgacctcaacgcctacaggtccatggacgccgcggcgccgggtaactcccagttcctggacgagcacgccgggtgcgcgccagcggtgccgtgtattgggaacaacactgtgctcagcgatctcncgcgaagcgagctcacatgcaacgacggtgggcgtacgtcgcgcggccgagctcgt

SEQ ID NO: 3070 - DNA, 337 bp, Triticum aestivum
  Clone ID: LIB103-023-Q1-E1-H8
tgcttatccatattgcttcatccatcgtaagataacccagaacttgaaaccttcaatcacacagaactcaaacaaaacctacgtgagatctgttagtataagaaaccaacccactactataagtactatagaaaacctattattattttgtttttgcattatatctactgtattctgacttttatatggcaaaaactcatcaaataaaaccatagaatcatcaaaacaagcacacaatgcaaagaaaatagaatctgtcaaaaacagaatagtctgtaaaaatctgaaaatttcgaatacttctgtaactccaaaaattattaaataaactttttga

SEQ ID NO: 3071 - DNA, 420 bp, Triticum aestivum
  Clone ID: LIB103-023-Q1-E1-H9
cgggtcgaccggtatgtgatgaaatcgaagcatcatttatttattgattgtcttccttatgagtggcggtcggggacgagcgatggtcttttcctaccaatctatccccctaggagcatgcgtgtagtacttcgtttcgataactaatagatttttgcaataagtatatgagttctttatgactaatgttgagttcatggattatacacactctcacccttccaccattgttagcctctcttgtgccgcgcaacttttgccggtaccatacacccactatataccttcctcaaaacagccaccataccaacctattatggcatttccatagccattccgagaaatattgccatgcaactttccaccgttccgtttattatgacacgctccatcattgtcatattgcttttgcatgacatg

SEQ ID NO: 3072 - DNA, 339 bp, Triticum aestivum
  Clone ID: LIB103-024-Q1-E1-A10
ggggtgagaacgatgatgagggcgatgagtattaagcctgcctcctggtgctttcacaaagcttgctactgctatcctatgatctgcgcgattggctttatctgttatctgtctgtttgaacgtttgcgttgtggtgtttgttttacaacctgttgtgttgtaagaaccttgtaactttgaacctgctttgcaccttggttaatatgcatgctatctggttatctaaaacaaaacagaaaatgacatggcggacataaaaagtaccaaaacagaaaatccaaacaaaaaactaaatcaatgcatgaacagaaaataaaaaatgcggccactccaaaggt

SEQ ID NO: 3073 - DNA, 345 bp, Triticum aestivum
  Clone ID: LIB103-024-Q1-E1-A12
gggccgacggggatcagcgccacgccgtcggaggagaacatgcgctacgtcactgtcatggtctctggcaccgcacaatcgccctacgaaggtggagtcatcaagcttgaacatttcttacccgaggaatatccgatggctgcacctaaagttaagtatctcacaaagctataccatcctaacattgacaagcttggtatactatgcctcgacatcctaaacgacacatggagtccaactcatcatatacgcactgttcttcttatcattcaggcactgctgagcgcaccaaacccagatgatcccctctcagaaaacgtcgcaaaacactggaaatccaatgaa

SEQ ID NO: 3074 - DNA, 337 bp, Triticum aestivum
  Clone ID: LIB103-024-Q1-E1-A2
gtccagaataccgggtcgacgcgatggttgcatggaccaaaaatatcaaggtgtcagaccctctcaaggagggatgcaggcttgggccagttgttattgaaggacagtatgagaagatcaagaagtttgtagcgaatgctaaaagtgaaggtgccaccattctgactgggggtgtcaggcccaagcatctggagaaaggtttcttcattgaacccacaatcatcactgacatcaacacatcaatggaaatttggagggaggaagtctttggtccagtcctgtgtgtgaaggaattttctactgaagaagaagccatcgaactggccaatgatactca

SEQ ID NO: 3075 - DNA, 373 bp, Triticum aestivum
  Clone ID: LIB103-024-Q1-E1-A5
tccgggtcgacgggttccatgctattatatattctattttggatgtttaatgggcttatttatacacttttatattatttttgggactaacctattaaccggaggcccagcccaaattgttgttttcttgcctatttcagtgtttcgaagaaaaggaatatcaaacggagtccaaacggaatgaaacctttgggagagttatttttggaacggaagcaatccatgagacttggagttgacatcagggaagcttcgacgtggccacgatgcacggtggcgcgcctgccccctgggcgcacccccaccctcgtgggcctctcgtggctcccctgaccgacttctttcgcctatatatgtccatataccctgaaag

SEQ ID NO: 3076 - DNA, 361 bp, Triticum aestivum
  Clone ID: LIB103-024-Q1-E1-A6
ttcccgggccgacgggttccatgctattatatattctattttggatgtttaatgggcttatttatacacttttatattagttttgggacgaacctattaaccggaggcccatcccaaattgttgttttcttgcctagttcaatgtttcgaacagaaggaatatcacacagagtccaaacggaatgaaacctttgggagagttatttctggaacggcagcaatccatgagacttgaagttgacatcagggaagcttcgacgatgtccactatgcagggtagctctccagtgaccagggcgcaatcccactctcgtgtgactctcatgactctcctgatcgagttcttactcctatatatgtc

SEQ ID NO: 3077 - DNA, 355 bp, Triticum aestivum
  Clone ID: LIB103-024-Q1-E1-A9
cgccgccaagtcgcccaagaaggccaccaagtcccccaagaaggccaccaaggcctagatcgtagtagtgcggtgtgctgatggttccagtttggttagatgtagtagctgtttcactctgtatcctgcgcccctgatgtaatcggaatcaaaggggaagccgcttgcttcctcttgacttatgaattagtatcaactaaaaaaaaaaaaaaaaaaaaaaaaaaaaaaaaaaaaaaaaaaaaaaaaaaaaaaaaaaaaaaaaaaaaaaaaaaaaaataaaaaataaaaataaaaaaaaaaaaaataataaaaataaaaattaaatattgaaagggtttgaagagaattttttttt

SEQ ID NO: 3078 - DNA, 374 bp, Triticum aestivum
  Clone ID: LIB103-024-Q1-E1-B1
gggtcgacggggctgcatctggcagagctgcagctgccgccccaaagggcaaccttcatcaaacacaaccccataacagggcctcaaggttatgtgccccatcgcccctctttctaaattactgaaacgaaaatggctaagcctgatgtgcctcttgtatctgttgctggatttgttatgatttgattcaccaagagtgattcttctacagtcttgtagtatggttaaatggaacaacgaaggatatttctaatttggttattgctagaataattcatggacttgatatatgctgggatgttttgcctgtccttactgaagaagatgagaatggaatttaattggatggtccctttcatcgtgcttaataatgt

SEQ ID NO: 3079 - DNA, 379 bp, Triticum aestivum
  Clone ID: LIB103-024-Q1-E1-B11
gggtcgacggggccatcgacgcattcgtctccggcgccaccgtctatggctacagaggaaagagcattaagtctgccctcactggtggttctagcctggcattcacatctgccatcctggacgttggtggtaatactaccacagtggacaatggcaaagcgtaccatgcatacacaacggcaaagaatcccgagcctgcgcattgaccaaggctgtttacttgtagcacacatcatgcaaaccacctcagtgaatttttgagctgatgcgtgctgttatgtctgttttgctgatgcacctaattcctttgcaaagctgtagtaacttgttttgctctagggcaatacaacagacctggaataaataacgtgttttaatt

SEQ ID NO: 3080 - DNA, 417 bp, Triticum aestivum
  Clone ID: LIB103-024-Q1-E1-B3
ggtctagaattaacgggtcgacttcgaccaaagcgaaatccaccatctcatcgaaagacgggacacctttgcctctatcaagtggtatcagatttccaggttgctcggtgagattttacagttttttagtagtttagatcgagtctgttcttcatacctatagtccacgataaagcacagtgaaaattagggttagttcatcatatccgaaccaatctgagccttgcataatctttttagggttttgctttgttgaatttgcggttgcatcgtcgtgtctagttgctggtcttagagtctagtcttttagagtttcgagttctggtcataagttgtcacgccgccgccgcaccatcatcatcgcccctgccatctaccaccaccgcaccgaatccgtatccatataccacaaccaat

SEQ ID NO: 3081 - DNA, 314 bp, Triticum aestivum
  Clone ID: LIB103-024-Q1-E1-B5
gggtcgacgggacacccaaaagtgagtcgtattagaagaagatttccttcttttcttggtaagagcgtatctttttgcctcaagtcgaagacagtcagtactcctcggtcaagcttaatatctagctgaataaagtggaatctgcgcatgcatgcagaacacatcaattacattactataccttcgattaagggaaaccgaatatgtacagcacagtaacatgcacgtgcagttgtaaagatacagtagtttcgactcgttgtgattcacgagcaacgattgtaacacgttgtcgtcggtatctgtgatccaat

SEQ ID NO: 3082 - DNA, 354 bp, Triticum aestivum
  Clone ID: LIB103-024-Q1-E1-B9
cgggtcgacggggagaagaaggactctctgtgcttcatcgaggtgatcgcgcacaaggacgacaccagcaaagagcttctggaatggggctccagggtctctgctgccaactccaggccacccaacccccagtaggccaagcacgcctgcatcactagtagtcgcatccagcagcacgttgccatcaaataatgttgaacagtttatctttgctcttctgttatgttcttagttttgtgcctactagttacttgtgagctgtggccaaaaaaaaacctgcagttcaaacaaaacaaatttcaaaacatggaatccacttcatgtccgaattccaaaaaaagaatgctcttcaac

SEQ ID NO: 3083 - DNA, 391 bp, Triticum aestivum
  unsure at all n locations
  Clone ID: LIB103-024-Q1-E1-C1
gggtcgacggggtagttcttgccatgggagaagtgcttagctttgggttagatcttgcggtgtccttacccagagccagaaggggcagcaaggcacgtattgtatcgttgccatcgangataacaagatggggtttatttcatattgcatgaatttatctctctacatcatgtcatcttgcttaaggcgttactctgtttttaacttaatactctagatgcatgctggatancggtcgatgagtggagtaatagtagtagatgcagaatcgtttcgatctacttgtcacggacgtgatgcctatatacatgatcacgcctagatattctcataactatgctcaattctgtcaattgctcaacagtactttgttcacccaccatacaatact

SEQ ID NO: 3084 - DNA, 131 bp, Triticum aestivum
  Clone ID: LIB103-024-Q1-E1-C11
ctgccccatgtgctgtatactctatgacgatgattggctaggttaacgctctcgtcactcaatctgcctggcatgtgggcaatgattctgaactctatgcaggtgtgccttggaggggttatcatgggata

SEQ ID NO: 3085 - DNA, 389 bp, Triticum aestivum
  Clone ID: LIB103-024-Q1-E1-C2
gggtcgacgggatagatcattgtatgtcacaatatcctagctttgcgttagataatgctgggtcattattcaaagtcacttggggcaactgcgtatgtattgtaacattgccagctaagacttttgtctagggtttatttcatatttcattattttatctctctacatcatgtcatcttgcttaaggcgttactctgtttttaacttaatactctagatgcatgctggatagcggtcgatgagtggagtaatagtactagatgcagaatcgtttcgatctacttgtcaccgacgtgattcctatatacatgatcacgcctagatattctcataactatgctcaattctgtcaattgctcaacagtactttgttcatccaccatacaata

SEQ ID NO: 3086 - DNA, 234 bp, Triticum aestivum
  Clone ID: LIB103-024-Q1-E1-C3
ggataagactccggactttaggaaacagtgtacaggccatataacctcaagtcaagattggaggccacgggatcccttaaaggatcctgcatttattttcctgcatcttggctgctcgattgggtctctgcttcattttcatcacatgatacttaagtctttcttaacatgtgccggcccatccattaagtgtgcgtccatgtaagactttatggatgtaacatccctgttctt

SEQ ID NO: 3087 - DNA, 263 bp, Triticum aestivum
  unsure at all n locations
  Clone ID: LIB103-024-Q1-E1-D10
gcggagagatcaaggcngggtacctcacgaagtgcccgtgatgcaagccatgacgaccaagggtgccaggcgggcgccagcccgcgcagtgtcctcctttcctctttggtgcaaatggagcaagcgcaggcgagatcatcaagcaaaggcacctctttcggtggaacgagaccaagaccagtccaacggcagggaggaagtcattatggagcccaagccagcgtcaccaccagagcctttggcaggcgaagaccaactttaat

SEQ ID NO: 3088 - DNA, 354 bp, Triticum aestivum
  Clone ID: LIB103-024-Q1-E1-D11
tcgagggcgagacacgagcaagagaagtctgaaaagtatggcaaagcaatggcttttcttcaagaacaagaaagcgcttttaaatgcgggcagatgggaaaaggcaaaaaaaggaagaggtgatgatatgctgatcatgttgctatcacagtccagtttgcgctgggtattggagatagaaaattaggcatgcacctggtgaccctggcatgccccgctttaactgcctttgccacttccatgtcgaagacacgccggaaagagtaatcatgtcgcaaacgctgatgtggatggacgcgttatgtttcttgcacttgagaatgagttgctccggagtgctgtactcctgcaata

SEQ ID NO: 3089 - DNA, 403 bp, Triticum aestivum
  Clone ID: LIB103-024-Q1-E1-D2
cgggccgacggggaactggacctaagagtactacctagggatactagggattgagtgtgtgagatgaaccggagaaggtaaatgcagagagatgaaatgcacaaaagacggagggatgtgatggttgcttgtccgtttattttaccagaccacttattactgcgagtggttgggttttgtgatatgaccgctttactgccgcgccacgagcggggtgagactcgcgtgcagcaccgccctctacactagtactacatcggtcgtggtttattagtcccccattgaatttaactaaagatttaactgacacaatgttattgcatgtcaacaaaaactatatcgttcgattcgtatttgaacatagttttcaatgataaaattttaggtgacatgcatcagcatt

SEQ ID NO: 3090 - DNA, 399 bp, Triticum aestivum
  Clone ID: LIB103-024-Q1-E1-D3
gtctagaataacgggtcgacctcggtgacacggcgccaggggcaaccgcactgaagctctggtacatgagcaggccaccgccgggaagctcctgctcgacgacatcctcgagcaggtacgagcagacctccgcatcggccgcccatgatttggcgaagccttggccaccgaagatggtgacggcgagggagaagtctgacgggcggaagcatgacagcaccctcttgatcaggtcactgtaaaccagggagccagggttgaagttcatcgcttcgtagctcgcgtagctgaagccctcctcgggagtaacgtggattgtggaggctgcagggccgcagacgccgttcatcgagtagccgcacgggtcgaagtcgaagtcgcagatctccatctcgggga

SEQ ID NO: 3091 - DNA, 274 bp, Triticum aestivum
  Clone ID: LIB103-024-Q1-E1-D4
tggggaggcgaaagcgggctccgcgggctgcctcgggtacttcggccggtttgggcggcggagggcctgctccgcgagcgtggtcgagcccgcggtcgggatccgggagatcagcccgtacatgctcggtctcgtctcggcgagtttcgtcggcgctttcaacgctttgatagagtcggtggtgccgtgagatagccacgggaatcgtgtgcgagttcacagcttcattgtcgcagaggttgatggctgttcatctttgcagaacagaggccct

SEQ ID NO: 3092 - DNA, 378 bp, Triticum aestivum
  Clone ID: LIB103-024-Q1-E1-D9
gggtcgacggggctatatttttattcgccacatgatatgtgttttgcttggagtgtcttgtattatattagtatttgctttttagttttccagaatcatccttgctgtacccaccttttgggagaatcccacttgattagaatttattagaatactttatgtgcttcacttatatcttttgagctagatagtttttgctctagtgcttcacttatatcttttaaagcacggcggtggattaattttgaagaaattgttgatatctgatgattcacttatattattttgagagtcttttagaacagcatggtattttctatggttctgaatttggtcctagaatgatgagcatccaagttgggtataataaaaactatc

SEQ ID NO: 3093 - DNA, 372 bp, Triticum aestivum
  Clone ID: LIB103-024-Q1-E1-E1
ccggtcagaatatcgggtcgacgggacacaatatgattttgtgtggctcctgcagtcatatatttgtcgattgttgcttcagacgagtatacatacaggctgtgcaccaagtggcacggtatagatgtaaggagtcataggccctcgggacgggggccaaaattttgcaaatcttgccagctgctggaaatttggaagtgtgtgctgagtcatctgtatcgtaatatccatgtagctgatgcatctataggtgtttgtaatttttttttgttgggtgtagacttgtatttagaggatggttatgcctattgtgcattggctgtctcgggtttagaactcgctcatataagtctccaaactcactttgctccg

SEQ ID NO: 3094 - DNA, 416 bp, Triticum aestivum
  Clone ID: LIB103-024-Q1-E1-E12
cttaaattattttgaaagtcttttggaacaccatggaatttgcaagggtaataaaattggcccaaaaagggaaggaaccaaatttgggtataataaaaacaaccatataggaattgaattggatgcaataattcaatttgatacttgataattgttttgatatatggaggtagtgatattaaagtcatgctagttgggtgattatgaatttaaagaatgcttgtgttgaagttagcaagtcccatagcatgcacatatggttaaagttgtgaaacaaatttgacacatgaagtgtacttggattgtgcatccttatgagtggcggtcggagacgagcgatggtcttttcctaccaatctatccctctaagagaatgcctgtagtccctgggttttggataacttcaaaatttttgc

SEQ ID NO: 3095 - DNA, 386 bp, Triticum aestivum
  Clone ID: LIB103-024-Q1-E1-E3
cgggtcgacactactcgccatcgtaactcgtatgaatctagggtagttctgcttcagtgaccgttcccctcattacagaagcacttactctcgggtttgggttctaccttgggtttcttcactagagcagcaactgatttgccgtttcatgaagtatcccttcttgcccttgcccttcttgaaactagtggttttactaagcatcaacaattgatgctcctacttgatttctactttcgcaggtcaaacatcgcgaatagctcaaggatcatcatatctatccctgatatcttatagttcatcactaagctctagtagcttggtggcagtgactctggagaaccatcactatctcatctggaagacaactgccactcgattcaagc

SEQ ID NO: 3096 - DNA, 418 bp, Triticum aestivum
  Clone ID: LIB103-024-Q1-E1-E4
ggtcaagaattaacgggtcgaccactcaatgacttagaggaacctttaggattcctccgcattaacgaaggaccatttcccggtcatgtacatacgtgcaccatattcggacgagcgcggaggtaccaggggctatatagtagccccactgtcaaactcctatggctaagtgaaagtgttaaaccaatatagtgtgattgcctcgttcgctgcgctaccacctccttaatggaccaacacgttggatcaagtgtgaatacgcgttttttgcaaacacccccgcattatatgcgtgggggctgaagccgacgactgcaaactttcaggttatatacatatatacataaatggccacacaggaggcatcataatactttcaggcaaaagtataaacacagcctttataactcaataaaac

SEQ ID NO: 3097 - DNA, 316 bp, Triticum aestivum
  Clone ID: LIB103-024-Q1-E1-E6
gagtgagtaggattcctccgctttaatgatagaggaattccctgtcatgtacataggtgcaccatgttcttgtcagcgcggctgtaccagaggttatacgatggccccactagtaaactctcatggcaacttgtatgtgtttagccattatgctgtcattgcctcgcgtgtcgtgctagaatctccttagtcgtccaacacttagttgtatgtgtgaatacttgtcttttgcatgtacccctgcattatattccttcgggctgaagccgtcgactgctaagtttcatgttatatgcatcattacatcgttgggcac

SEQ ID NO: 3098 - DNA, 367 bp, Triticum aestivum
  Clone ID: LIB103-024-Q1-E1-F11
gggccgacggggtccggaggctgataggctcaagcctcccgtggagccgtgattttcccagttgatggatctttcctgtgcacgctggcatccaggtcggcaacgcgtgctgggaactttactgcctcgagcacggcatccagcctgatggccagacgaacggtgacaagaccatccggtgattcgctgcttgcaaacaacagctagtaaatcggtcaccgtgggggcggggacatgagattcagagaagagatgctgctgcctgcctatactagttcatatcaggctcgtccctggaccagatgttcaagtacagccccatccaccacatcgacctggagtcagatgctgggctttcatgtttcct

SEQ ID NO: 3099 - DNA, 400 bp, Triticum aestivum
  unsure at all n locations
  Clone ID: LIB103-024-Q1-E1-F12
cggtcaagnaattccgggtcgaccggactcgaaaaaaaaccctctcgaatagcgacccgctctcccctcatcaagaacggcaattttaaccttccccaacgaagggctcgcccagctcaaccggggcgcaatcgcagtggttctcccagtgctaccttagccgatacaacggaacgtaaggtaccaaaacatgggagccgggcaaacccaactattgacccaagacatgattcagagccgatgcatataatactataagttcggggtgccgcacttatgaaagtgttcagacttatcacaccatgatgcgggaaacataagcccctggtgttatttagccgtaccaaagtgtacggatgcaacatgtcataaatgaacatatgtataataaagaaatgca

SEQ ID NO: 3100 - DNA, 175 bp, Triticum aestivum
  Clone ID: LIB103-024-Q1-E1-F2
tggcagaacttttatgcctccttcgcattcaggtacaggacactgatgaaggatatgaccaagatccagcatctacagggaactggaaagctacctcagcatacgatgtatacatagtggacacatcctataggaatgtcaacgaggatcgacagggtgcacagagggatccttc

SEQ ID NO: 3101 - DNA, 316 bp, Triticum aestivum
  Clone ID: LIB103-024-Q1-E1-F5
ccgggtcgacgggaaaagcgaaagaccatcatcgagagatgacctgctctgggcgatggccacgctggggttcgaggagtagatcgagcccctcaaggtttatctgcagaggcacagagagacggatggtgatcttaagcgatctgggaagtctggtgatgtctctgttaaaaaggatgcactgggtcctcatggaggagcaagtggcacaagtgcgcaagggatgggccaacaagtagcatacaatggacgactggtttatttgaatcctcagtaccataatggggacatctcagactgactatatggaccatct

SEQ ID NO: 3102 - DNA, 350 bp, Triticum aestivum
  Clone ID: LIB103-024-Q1-E1-F6
ggtcagaataaccggtcgacggttctatctgatattgctcgactttgactccgaggacattgatggtatggacgcctgatgagagatatgaccaagaatcagcatctatagggaactggatagccacctcatcattgtatgtaaagatggtggagacatccataatgtatttcatcgatgatcgaaagggcccatatagggatcgtacccttgaaaaattatcaaagctgcgatacatgcgtcatgtacatcctcaactccacgtagacccaagcagtcagcacggcgatactgctgacgcataattcactattgagcaatcgtccatcaaagctatcaccggaaaatat

SEQ ID NO: 3103 - DNA, 370 bp, Triticum aestivum
  Clone ID: LIB103-024-Q1-E1-G11
cgggtcgacgggtccattaattaagcactatatgcctagcttaatggctttaaagaaagcactgccagggagagaacccggaagtttgagagagtcatttatttcttttatatgctttcataaagtttaaaaaccaaaaaataaagaggggaacccaaaacttttcaaaaaggaaagtgaaagtgagagagacaagcattgttgaagtgggagagctccttgaactttgttcacgctcacagaaactttgtgaatcttaattacagaaactttttcaacaaaaataattaccccctgtacaattccattgtattataaaaataatgttccaaggttgcctttaagatgtttacaatgcttgttggtttgt

SEQ ID NO: 3104 - DNA, 402 bp, Triticum aestivum
  Clone ID: LIB103-024-Q1-E1-G12
ggcgggattatgaatataaggattatttaggatataaagtggggtaataacaacaagcccgtttaactgaatgtttggttcagctagagaaatcgttacgcccgctcataattcctttttcgacgctctggagaataataactactggtatatcattctatatcaaagccgacttgtgaaataaatgatccgccgtcttgccttcaaaaaaaaaaaaaaaaaaaaaaaaaaaaaaaaaaaaaaaaaaaaaaaaaaaaaaaaaaaaaaaaataaaaaaaaaaaaaataaaaaaattaaataaccaaaaataaaaaaaaaaaacaacatcaaaatattcaccaaaaattaaaatatctaaacatcatctaaaaaatttaaaaaataaaaaaaacccggccccta

SEQ ID NO: 3105 - DNA, 450 bp, Triticum aestivum
  Clone ID: LIB103-024-Q1-E1-G4
cgggtcgacggggggacggacgaatcgagagagatggttgttgtgttacggatgctcctctctctgtctctctctcacacacacacacacgcgcgcgcgcgcgcgcaagtaaactagaagaccgttctctcatgtacacacaacgtatcggcatctgtctatgtctcactcatgcatgatcatttgcacattcacacctctctatgtatgtatcacacacacaccgtctccacactgcccttccgccacaacacacatatggacacatacacacgttctctctcagtcacacacacaaaatcagtattaaaaaactagggcgcacctaaaacgtccaaatccaaataaacacgaactgcagctaaattcaaatatatggaaatattgcagcgtcaagaactttcacaggaaaaaagttgagtaatactcgaggattgtttcacacacaaa

SEQ ID NO: 3106 - DNA, 373 bp, Triticum aestivum
  Clone ID: LIB103-024-Q1-E1-G9
tcccgggccgacggggataatgaagcatccatcaatagattcttgtcaccagtcatgtggtttgtacatccactatcgaggacccactcagtggctttgggttgatcatcctacagatgaattagtgcatcttacaaactcatatactccatcagtgaagaatatgacatcaattcatcagatcaatttcatcaagtaaaagaactaataacgcaatatgaggacgtgagaaatgaaagttcatttcttcatggttagcctgcgtcctttcaggcatgctcaggtctccagcaaattcttcagacgattatgtgcatctagagacctgaccctgcagaagagattagttccttttcttcaccatccacatctg

SEQ ID NO: 3107 - DNA, 424 bp, Triticum aestivum
  Clone ID: LIB103-024-Q1-E1-H10
ccgacgggggggacaggatgagaagatggattcaatggaagccaaacagaatttttcatgcgctggtgtgatgtacctctgccaattcatagagcaaagtggtgggaagctccctgaacgcctggaaggcattaaaccatcagcaaagcgatttgaaacaattggcatacaggggttgcaactagccatagaaacagggaattttagtgatttcagcaatgctgattccactgacaagataagcaggtccaactcgttgaagtctgccaactaatttttttcggggttggtgagaaatgtatccagattcgttacttagtggaacatttaaagggaaatccttgctggataaaatgtaaagagtcccagcctttttggtaattgccttcaggaaattccggttggttaaatttgaaaatgtgtg

SEQ ID NO: 3108 - DNA, 368 bp, Triticum aestivum
  Clone ID: LIB103-024-Q1-E1-H12
gggtcgacgggtcacatggtcgttccattccccgagccctcattctctccctcgcggcaggtgatgagtcgtgcagatgaatcccctggccctggtccttaaattgatatcctcccaaacactcaactctctctaataggattggatttggtagaaagatgatttgagtggaaagcaactcggggaaggctagagatcaagatttatgtggtaggaatggaatatcttaacctcaacacaagtgtaggtggttccctctcagaaaatgtatgttggaagtgtaggcatgttctgatggctctctccatgaataaagagtgggtggaggggtatatatagcctccacacaaaatctaaccgttacacac

SEQ ID NO: 3109 - DNA, 361 bp, Triticum aestivum
  Clone ID: LIB103-024-Q1-E1-H2
gggtcgaggggattattaatcttgcatgatgaaaaatgatgatattgttagaaatgattctggattaagtgaggtttgatcttaaccagagaagtatcttgagttgatgatggctcagtgggagcatggttgatttagttatttttatggttatgtgatgcatgggtagtgtgcatagcatggcattgtgacaccggttgttttcattttaagttgaacctgataaataactcaactggaatatgttgttgaccgggtcatggtgccgctgaaatgagtctttcccagtgcaaccacatttgccggtatgggacggccttaatgcgtttcatggtcgtgccattggtcggtgcctccattt

SEQ ID NO: 3110 - DNA, 270 bp, Triticum aestivum
  Clone ID: LIB103-024-Q1-E1-H3
cgggtcgacatgaatcttcacccaattaacgaacatcattatcaaacctaaaataaatccaaaaaatgcaaacaccattgtcaagtcaatgacttgaactttgatgggttggtttcatcacaagggacgccgtaaaaaagaagttccatctccttcggcttgcttggctgaatttgctacggatctttttttcaaagggcaactccaacgcggttcgttataacagacacaaaatgtttgagggcacgtctggaccagtgatagggcgga

SEQ ID NO: 3111 - DNA, 345 bp, Triticum aestivum
  Clone ID: LIB103-024-Q1-E1-H6
tcccgggccgacgggaagaagacaaggcggagaagcggctgccggcggggaagtccgccgccaaggagggcggcgacaagaagggcaagaagaaggccaagaagagcgtggagacgtacaagatctacatcttcaaggtgctgaagcaggttcaccccgacatcggcatctcctccaaggccatgtccatcatgaactccttcatcaacgacatcttcgagaagctcgccggcgaggccgccaagctggcgcggtacaacaagaagcccaccatcacgtcccgggagatccagacctccgtccgcctcgtcctccccggcgagctcgccaagcacgccgtctccg

SEQ ID NO: 3112 - DNA, 371 bp, Triticum aestivum
  Clone ID: LIB103-024-Q1-E1-H9
ccgggccgacgggaggtgaaagctagcaaaagactgggaagcggccaactgagagagcgacaacagtcgtaatcatgcattaaaattaattcacaccaagtacaagcatgagtaggatataatccaccatcaacataaatatcgtgaaggctgcattgatttgattcaactacatgcgtgaacatgtgccaagtcgagtcactcaattcatttaaaggaggataccatcccatcatatcacatcataatcattctaatagcatgttggcacgcaaggtaaaccattataactcatagctaataaagcatgacacaagtaactataatctctaaatgtcattgcaaatatgtttacttcataatagctgact

SEQ ID NO: 3113 - DNA, 364 bp, Triticum aestivum
  unsure at all n locations
  Clone ID: LIB103-025-Q1-E1-A1
cgggtcgacgggaactctcatcatgacgaccaatcgtgttgatgtccatgagcagattattgagagcatgaagaacctcaatgccagggcctacatgctagcaaagagcgtcgtggatccagggcatgcagcagcacagcaggctgctcggtgagaccaacagatgatctgcagctttgaggcggtaaaaattactttgggaactttgttgttaggcagtgacttcgttgctagtatttgaatcatattgctacagcttatgctgatgttttaaatgctttgtactccttttactcaagtttatcgtcctatgaattaatactgcaaaagacgtttaacgtanaaaaaaagaaaaggagaggtg

SEQ ID NO: 3114 - DNA, 387 bp, Triticum aestivum
  Clone ID: LIB103-025-Q1-E1-A10
gggtccacgggatcgagtcaaagtgccaccaaatcgagctttctccagtgcagccacatttgcctttatgggaggccctagctaggtctattgtcatgcctctcgccggtgcctccaactagggaaggttatgggcgcgcgctaccctgatcaggtaggcggacataagccttgtgagcccgagtttggttatgtgcacatgtccctttttgggaccgtttttgccacgatggtggtcgtaggtgactttggtaggcacggggccacccatgacttagcccaaaggggagttggtcggagtggccgggagagtgtcatggcagtaggtcagttttgtcggaacgccgttggtccaaccgaatgggagtgcaaggccatggggttcgt

SEQ ID NO: 3115 - DNA, 382 bp, Triticum aestivum
  Clone ID: LIB103-025-Q1-E1-A12
cgggtccacgacagcatgcctaatgcacctacacccctgcgctgggcaaagtggtccagccggatttgtgaccaggcatgagcagagaaagagagtgtgtagccgcctatgtcctgctgacatccagagagcatcacacactgaagtacacgcaacctactaaagcaagcactgatgctcctgcttacatatatgctgtaatgattttgttgtaccatcttcaacatcatgcgctcctacgtgtatccgcgagtgggtgtgagagaactagtgcgtgcgttcatcacttcgcatcgtgagagtagaatatacgatgcccaatgaatgttcaccacaatactaatactataagtgtgtgacatgtgagctaacataaaaggta

SEQ ID NO: 3116 - DNA, 347 bp, Triticum aestivum
  Clone ID: LIB103-025-Q1-E1-A3
cgggtcgaccgggaggaagagcccgaggaggagctaggaactgaatatctagtgcagccgcttggccgtgctgaagatgaagagcattccagtgactttgagccggaagaaaatggcgatggtgctgaggatgaggagattgaggatgatgatgctgaggatggtgaggattctgtcaagccgcaatcctcatcgaagaggaagaggtctggtggggaggatgaagatgatgatgacggtgatgatgatggtgatgatgatgagaagcctccatcaaagcgatagtcaatttgttcttgctgatctggtatcttttctgcttgggccaagaaggaaaataatcctct

SEQ ID NO: 3117 - DNA, 349 bp, Triticum aestivum
  Clone ID: LIB103-025-Q1-E1-A9
gtctgcaggttcatgggagataaattacagaattacgacttgatcataggcattgttgtatcgcgaacgtgaatcgataaactcacatgaatgctctgtgttcattgcgatcaggcttatcaaagacttcgaaacgagttgtcaaagatgaggcaagcagtgttgatcccaacactgctaaatttctgaacgagaagaaagcagtcgctgatcaaagaagtgaactcttgtgttgctctgaaaaaaacaacatgcacctgaaaataatcgagttgatctttttgatgccccaagtggtgaagatgcctttggtgaagaaaatttcatgttagcatcacctatgtcaaac

SEQ ID NO: 3118 - DNA, 367 bp, Triticum aestivum
  Clone ID: LIB103-025-Q1-E1-B1
cgggccgaccgggagaagaagaagtccagcgagaacgtcaaggtcatctacgcccgcgccaagcagtacgccgaggagtacgatgcccaggacaaggagttggttcagcttaagcgtgaggcccggatgaagggtgggttctatgtcagtcctgaggctaagctgctgtttgttgtcagaatcagaggtatcaatgccatgcacccaaagaccaagaagatcttgcagctgttgcgtttgagacagatattcaatggagtgttcctgaaggttaacaaggccaccatcaacatgctccgcagggtcgagccatatgttgcatatgggtacccgaacctgaagagtgtgagggagttgatctacaaaa

SEQ ID NO: 3119 - DNA, 274 bp, Triticum aestivum
  Clone ID: LIB103-025-Q1-E1-B11
cactacccttcggtccactcgatctctgctgggttgcgtttgatgtaaggagcagtctccgcaatgtatcattccatacggatgccgtttgaaataccttttccgccactgacatcagataagcattctcacagcagtttgcactgcgcctttgtgtagtaggttagtccgataagtaatagagaactgtaggagaacacccattacgcatccagcacagataatattatattaatgtagaatctcgtgttatagatactgtcgtgtcattgtc

SEQ ID NO: 3120 - DNA, 405 bp, Triticum aestivum
  Clone ID: LIB103-025-Q1-E1-B12
gtccacgggtttaaatcaggcatccccacacggctcacctcctggaaagagagcggccggacatggggtgattcggaggagctgaccggactccaagcctacatccaaaagctagtggacaagaagctcaagcttgtcaacatagtccaggtcatgctcatccgccggattctcccgtgccaacaacagggcttgaacatgtgggagttcgatccggcgcagcaccagactttgagcaggctcttcgacactacgtatgaagatgtctggaaggtgttgtttaagggcgccaaggctcccgcatccgctaccgaagatcacggattcagctcgcagcgtccggctgttgaggtgagtgattttgtcctttacgggacgcttgttttccatagtttgactctatgc

SEQ ID NO: 3121 - DNA, 341 bp, Triticum aestivum
  Clone ID: LIB103-025-Q1-E1-B2
acgggtgtatgataacttgattagggatgttgcaaccattaattgctccaaattctcctggccaagtgtgttacaggcgagacctcgctgacttttggaaacctgtatgtctgacaagtgtctatacttgctttgttacatgtgtagaatgcattctttgcactctcaataactcgacgatttgatctgatcaagtgaccatgattgtagtgctcaacccatgattctatcttgtaggtatcattaccacacaacttcatgtccataaaacttatagaacttctcaacagcctgtaatccttcaaatatcatgcctaaattaggcttcaaattctcttcac

SEQ ID NO: 3122 - DNA, 388 bp, Triticum aestivum
  Clone ID: LIB103-025-Q1-E1-B3
gggccgacgggagatccaaaagggcatggctgcagttgaattcgaaaagaaggcacatgctgataaccttttacaaagtaaagcaatggagaaaaatatgattgccgtggctagtgagattgagaggcttcggggtgggcttgtaaatgctgaaaagcgggccactgctgtcaccacggcagcagctgtaactaaccctgggtatgctcaaccgtacagcagttctgaggcaacatatgccacaatgtatggcaatcccgaggcagcatatgcagcatatggcagtgctgaggcaacatatgctggaacatatgccaattctgatgcttatagcaccactaatcaggctcagactcgcactgatggtaatccacatcacatgacccaa

SEQ ID NO: 3123 - DNA, 395 bp, Triticum aestivum
  Clone ID: LIB103-025-Q1-E1-B9
cgggtcgacggggaagatgaatccagcgagcaagggttccagaaggctacgggggccatgtgcgtcgatggtggcgtgtcgctgcatacttctcaacgccagctcaagcagtgggcgcgtgagattagaggagcggcgccatcgttcgacgcttagaagccgctaaagtggtccagcacgcccctcatctttgatgccgaggaccaccctcaccgcacagccgcggtcgggtgtttgcggttggtggtcccgccaacgatacgcaacctcaaggtgaacaagatgttggttgacggcggggccagccttaacttgatctcgcccgtcgtgatcagaagactgcaaattcttggtggagaccttgatgaaacgggcacgtttcgaagggtcaatcc

SEQ ID NO: 3124 - DNA, 379 bp, Triticum aestivum
  Clone ID: LIB103-025-Q1-E1-C10
ggtcgacgggccttacgaacggcgatccggtgagccgcctcatgcaaacacggaagcagaatgacagcatttaccgtcgctttgctgaaaatgatttcacaggcggcggtagcaggtctggccgattaaacatggaaataacgtggacagcggctctgcgagtaaagatagatgttctacgcatcacacccaaggagaaaaagacctttgtgaccgttaaggacgtcaaggagaacaggaaggcccgggcttctgctggctgcttggaggatcgaaaagggcggtctcgtcttgctcggtatgccggtgaagcaacaggggaacacatggggcgatccgccagcaagattggcctcaaatcaattgtcgtgaaagtgaa

SEQ ID NO: 3125 - DNA, 428 bp, Triticum aestivum
  Clone ID: LIB103-025-Q1-E1-C11
cgggccaaatcaaagaaggtgcaaacataataaccatctaactgaagttttagctgacgtgtcttagacatacatatgctgagttccggaatacctcttgtacatccgccactgagcattgcagtgatcgtagaaaatcttttggtttacatacaccatccgtgaaaccttgtaaatagagaagtggatggtagagtgagtgttcatattatctataatgtcacttatctgatcaaggcaaaactgcggaagttgaaatgtcagaactggaatcgtcgttggtttaactgaagacttagaccacaactgtcgttgacctctttaatccatgtggctgccgtatgctaagaattattacaccgtccaagtgcagaagtgcattccccgagggtaggaagttgtatgggtccaaaacacgtctgagtgga

SEQ ID NO: 3126 - DNA, 411 bp, Triticum aestivum
  Clone ID: LIB103-025-Q1-E1-C12
cgggctcaacgcagacaaccgggtctaccacaaggcctgcttcaggtgccaccactgcaagggcaccctcaagctcgcgaattacaactccttcgaaggagtgctctactgcaggcctcactttgaccagctcttcaagaggaccggcagcctggacaagagcttcgaaggcactccaaaggttgtcaagccagaaaggaatgttgggaatgagaatgctactaaagtctcgagcgcatttgctggcaccagagagaaatgttttggatgcaccaagacggtctatccaattgagagggttactgtgaacaacaccatgtaccacaagagctgcttcaaatgctgccatggagggtgcaccatcagcccttcgaattacatcgcgcacgatggaaagctcttctgcaagca

SEQ ID NO: 3127 - DNA, 443 bp, Triticum aestivum
  Clone ID: LIB103-025-Q1-E1-C3
cggtctagatatcccgggccgacgggtttcatataaagtgcattgaataccatgagaagtttgattctttatggttgttttgagatatgaagatggtgatattagagtcatgctagtagagtagttgtgaatttgagagatacttgtgttaaagtttgtgattcccgtagcatgcacgtatggtgaaccgttatgtgatgaagttggagcatgatttatttactgattgtcttccttatgagtggcggtcggggatgagcgatggtattttcctaccaatatatccccctaggagcatgcgcgtagtacttcgtttcgataactaataaatttttgcaataagtatgtgagttctttatgactaatgttgattccatggattatatgcactctcaacctttccacattgctagcctctccagtaacggtgcaactttcgccgg

SEQ ID NO: 3128 - DNA, 406 bp, Triticum aestivum
  unsure at all n locations
  Clone ID: LIB103-025-Q1-E1-C4
ccgggccgacgggtaaggaactaaccagatctaacgccgaagcaccgctgcaactccttgagcagatccgggcaaggcacgaagaccggattgccgcagggctaccttctgatgcggttgatccggaggaggacttggaggaggaggaggagcatgaggagaacgtgggggacactggggccgtggatctgtaggctgagcaataggcgatcctcgattccctctggtgggaatcagcgacgaaggccaagcgttgtcttctgcacgaggtggaggcggagcacgccacagacgttgacaagatgctcgctgatatggatgagaaggaggatccggagccctccaacgtgcccaactacncggcaccggcatggacgtcgtggacatctccgctgaaagaacttag

SEQ ID NO: 3129 - DNA, 400 bp, Triticum aestivum
  Clone ID: LIB103-025-Q1-E1-C8
acgggggagagagagaggaggagacagatatttcccccgaggtcaagtcgtctcgtcccgtgttgcctttctcctcctccccgcattcgccgtctgcggttcgcaccaccggacaagctcacacatcaagacaataaatagagccttgtctgtttggggccaatcaaaccaaacaacaagttcatgtctgatctcgacgtccaggttccaactgcttttgatccgtttgctgaggcaaatgctgaggactccggcgctggtgctggatcaaagaactatgtgcatgtgcgtgtccagcggcgcaacggaagaaagagtctgacaactgttcagggtctgaagaaagactacagctacaacaagattctcaaggatctcaaaaaggaattctgctgtaatg

SEQ ID NO: 3130 - DNA, 413 bp, Triticum aestivum
  Clone ID: LIB103-025-Q1-E1-C9
gtccacgggctgaaccacaagacggaaaagaccatcacaattggtggcgagcatggcacggtcgcctgggtggacctctggcgtggcatcttcttttgcgacgtgctcaagaaacgcccactgctccgggatgttccactgccggtgccggcaaggtctaactgggatcgcctcctcataaatgatgaccccggctatttccgggacgtaactatcagccgaaacaaagactcgatcaagtatgttgagttggaattccggtcaatagaagtgctcaaccccgccaccacccctgtttcctacaccgactgggtggcggtgaagaattcctcaaggaaatctcttcatgtcatccgcgatggctggaagtccacaacatggagcatggcaatacccgttggtttgcatgagcg

SEQ ID NO: 3131 - DNA, 425 bp, Triticum aestivum
  Clone ID: LIB103-025-Q1-E1-D10
gggccacgggggcagcggaggctcgcgccgcgattttcgggcacgcggtgaacccgttgggaaagcgcgcggcgacgaagctgctgcggaagaagctcatcggcgagcatgtcgcgcagtggtaccccgacgacatcaagcgcgacgaccccgaagtcatggcgcgcgaggagaaagagcgtctcgcgaagctggaaatgcttaaacgtcgtgggaagggtccgccgaagaagggccagggaaggcgtgcgatcaagagaaacaaataattgccttgcttctgtttaattttagtactgatctggcagctatgctgaaatatttgctgcgaaactaccctctgtattctctctctaaaaaaatctaccctttgtattaggtcagtcatgcttcattttgtcacggatttggcaatgatgggtttg

SEQ ID NO: 3132 - DNA, 398 bp, Triticum aestivum
  unsure at all n locations
  Clone ID: LIB103-025-Q1-E1-D12
ggtccacggtggcatctgactcctggactccaatatctggttgcgacaatcagatagataggaagggggaaagagggagagaagcaaccgtgagtactcatccaaagtactcgcaagcaaggagctacactacatatgcatgggtatatgtgtaaaggggcatatcagtggactgaactgcagaatgccagaattaaaagggggatagctagtcctgtcgaagactacgcttctggtcatctccatcttgcagcagatagaagagagtagattgaagtcctccaagtagcatcgcataacataatcctacccggcaatcccctcctcgtcgccctgttagagagcgatcaccgggttgtatctggcacttggaaaggtgtantttattcagtatccag

SEQ ID NO: 3133 - DNA, 403 bp, Triticum aestivum
  Clone ID: LIB103-025-Q1-E1-D2
gggccgaccgggaagaaacccaaggcggagaagcgggcgccggcgaccaaggaggccggcggcgaggggaagacgaggggcaggaagaagggcagcaaggccaagaagggcgtggagacgtacaagatctacatcttcaaggtgctcaagcaggtgcacccggacatcggcatctcctccaaggccatgtccatcatgaactccttcatcaacgacatcttcgagaagctcgccggggagtccgccaagctcgcccgctacaacaagaagcccaccatcacgtcccgggagatccagacctccgtccgcctcgtcctccccggcgagctcgccaagcacgccgtctctgagggcaccaaggccgtcaccaagttcaactcatcctaggctagtctgccgtgtc

SEQ ID NO: 3134 - DNA, 359 bp, Triticum aestivum
  Clone ID: LIB103-025-Q1-E1-D3
ccgggccgacggggattttacacattgctgctcgctcctacactaacccacacgcacggtcgcacccgcacctcacctcatctcaccagagagaaggagagagaagagagagagtccgaagaagaagacggcggcgggatgtttctgcggcggatcctaagcggcgggggcgggctggcggccatgcgctctgcgcgggcggtgaaggagacgacggggatcgtgggtctggacgtggtctccgaggcgcgggatgtgctcatcgggctctacacgcgcaccctcaaggagatcgaggccgtccccaaggacgagggctaccgcaaggccgtcgagtccttcacccgctaccgcctcca

SEQ ID NO: 3135 - DNA, 368 bp, Triticum aestivum
  Clone ID: LIB103-025-Q1-E1-E1
cgggctgacggggagcgtaaagtagcactgctggcatcgggctggaagtttgggcgagcaagccactccagcgaagaagaaggacccgattgcttttccattttatgttttagggtcctttgtgtaaattagggtcctttgtgtaaatttgaaggactattctctaactttagttctctggcggtcctatttacactttgtactcactaatgatgaatgaaaggcagttggtaaaaaaaaaaaaaaaaaaaaaaaaaaaaaaaaaaaaaaaaaagagaaaaaaaaaaaagagaaaaaaaagaaaaaaaaaaaaagaaaggaaaagaagaaggagaaaaaaaaaaaaaaaaggggccgcccaaaaggtt

SEQ ID NO: 3136 - DNA, 450 bp, Triticum aestivum
  Clone ID: LIB103-025-Q1-E1-E11
gggtccacgggtcggctcgatcgacttcaatgctggtaggtggctagccgctgcgacggtgttaatgtggcgggggtgctagagctggcaaaggtttgattgtcacatgcgatgtggcggacctccgaactcccgaagaccggccttcggtttaagccgaccgggggaatttcgaacatgacaccgatccagcccaaaatgagagtccgcgttggtggcctaaaaatgttaggatcatcatgtctgcacttgttgagccgggttggagatgccttagtcaaccgagatcatcatgtccctttttacttcacaatgcaaaattaatattatttgattcttcatgaacttaattttatattgtattactttattgtttttgatgttaatttattttacataaatatatagttaaactttacgaagtttaacttgagacacaaatcttatata

SEQ ID NO: 3137 - DNA, 418 bp, Triticum aestivum
  unsure at all n locations
  Clone ID: LIB103-025-Q1-E1-E12
ggtccacgggtacactatatgttcatcaccgggagcatgtaaaatgtttgcatcaaatccttcattagcagtctgttcattagacacttcaggctcaagaacaacatgagcttgtatgtgttgcaccggaaacttgattagatacatcagattcagtcagttcagtattgattgggggagttataaaataagcagaaattggtttcattttctcatagattccctacatacaaccagaaattgaacaattgaattagatagaatcggcgatgtgatgtacctgctcgttgcgcatgctactcttgcaagctgcgactgtccgtttgtgcaagctcgatgccatgctcgtgctgccgccgctgcctcccatgcaggttacacctanggttggatcntcatcttcntgtccttccgttca

SEQ ID NO: 3138 - DNA, 382 bp, Triticum aestivum
  Clone ID: LIB103-025-Q1-E1-E2
gggccgacgggacatcgccacaggcctcgggcaccccactacagggcctcgacgtgcgcgcggatccggtttgccgaggcggatggttgcccttcccaggtgcattaatcgcgcgctataaatgcgcggaatacatggggtcgtgtgggggcatgggtgtagttaaccccacgccccaacgatcgtcgtttcggtttcgccgccgccgccacgggtataagtagggggacggtgcacggctagaacgcctcgtgtcgctccccgctctccatcttcttcttcctttgtctcccctgctccctcgctaccgccgtgctgccacgccgtctaagcgccgctgcagctccccgtcgcgcaatttctctgcatcaccatggccttg

SEQ ID NO: 3139 - DNA, 423 bp, Triticum aestivum
  unsure at all n locations
  Clone ID: LIB103-025-Q1-E1-E4
ccgggccgacgggaaaacaattgcagcaatggatctattggttcctcgggtaggtgaactcattggaggaagccaaagagaagaacgacttgattaccttgaagctcggctggatgaatcaaatcttaacaaagatagctattggtggtatttggatttgcggcgatatggatcagttcctcatgctggttttggccttggatttgaacggcttgtacagtttgcaaccggaatagacaacatcagagacgccattccatttcccagggttcctggttctgcggagttttagcacttgaagagtatccgtgtataatctctaaaagcattcttgcctgngacttgaagaaaaccttacgttgatttgtcattgtaaagagtttacctgactgatttctaatctgcangagcgcactgtatcat

SEQ ID NO: 3140 - DNA, 352 bp, Triticum aestivum
  Clone ID: LIB103-025-Q1-E1-F1
ccgggtcgacgggttcttgagagcctacagtagcatgctgtagcatagtacatgctgatccgagtgaaaagattttgcaacgagcctggcattctagctctgcttccatgattttttttgtgaaatcagactgagtttgcgtgcacaggggaataatttgctgtcatcgcttctgatttgatgataatcaagcctgcaagaggatgaccagttttaatggctgactattgttggttgggccatatgtatgttgctttcttgtatatctgatggtggcatttttctcgacgatatctgatggtggctgtatctagtgctgcaagtcaaatcatatattcatatgtaatgggca

SEQ ID NO: 3141 - DNA, 441 bp, Triticum aestivum
  Clone ID: LIB103-025-Q1-E1-F11
ggtccacgggatacaaataagatatattggataaatagatctcgcgagaacacgagataaaataaataacaataaattgcagtaagatatttttgtgtttttggaaatatagatctaaaaataaaagcaaataaaaatagatcgcgaaggcaaatataataaagaagagaccagggcccatagattttactagtggatttctctcgagaaaaatagcatacgatgggtaaacaattactgttgggcaattgatagaacttcaaataatcatgataatatccaggcaatgatcattatataggcatcacgtccaagattagtagaccgactcctgcctgcatctactactattactccacacatcgaccgctatccagcatgcatctagtgtattaagttcatggagaaacagagtaatgcaataagaacgatgacatgatg

SEQ ID NO: 3142 - DNA, 329 bp, Triticum aestivum
  Clone ID: LIB103-025-Q1-E1-F12
cggggtgagtgtagtgaggtaggctgctgcctgcctgcctgctggggctgccagcgtttaggtgcgtgtgtgtgtgttgtagtagatgagatgatatgagatgagatgagacgagacgggacgggaagccattgcattgctgtagtgactgatttgtctgtaaaaaaagaaaataaaattaaaaaatggaatacacacaaaaaaaactaacataaaaagggtaaacaattaactgttgggcaaatgattaaacttcagattatcatgataatatccacgcaaaagatcattacacaggaaccacgtcgaagattaaaataaacgccccc

SEQ ID NO: 3143 - DNA, 399 bp, Triticum aestivum
  Clone ID: LIB103-025-Q1-E1-F9
ggtccacggcgaaagtgctcgattgcaacgttttcctgacatctacaggtttcgtggaacagtcacagacaggtatcgccagattggcaatgctgtggccgtacccgttggccgtgcacttgggtatgccttggccatggccaacctgaacaagactggaaatgatcccctcatggagctaccacccaagtttgcattctctcatatagaacgcactccttagtcacactggcaaaacctaacagttgacctttccacctgggtttaagtctcgtcatctccgttcattcgccgctagaaaagctgggtacctcatggtcgttaatatcactaggacgcgtgaatatcgttacggcatgcgcattttaacataactcttgattcactttattgccatgt

SEQ ID NO: 3144 - DNA, 448 bp, Triticum aestivum
  unsure at all n locations
  Clone ID: LIB103-025-Q1-E1-G11
ggtccacggggaggtttgatggtacaaaagcaagctggagacagtaacatacaaagtgctccatcagaagataaggagctcttttttcgtagtcagcactcaagtatgatcaatggtctgcatggtatttaccaagcgtatgggccggtagtgaggctagcaaaaaggtggatttccgcacatctattctcttcatttatctcagaggaggcggttgaattggtggctgcctacctatttttgaggccgtttccattccatgccccctcttcacgggttactgggttccttaggttcttgcggttgctatctagttttgactggaccttttcacccatgattgtggacataaataatgacttcaacctgaaggatgagaaagaaatcaatgaaaactttatgctgagcagaagatcttatgaacanaatcctcatgatatagagcctg

SEQ ID NO: 3145 - DNA, 391 bp, Triticum aestivum
  Clone ID: LIB103-025-Q1-E1-G2
ccgggccgacgggtatggcaaatctggagacaggagaaggtgagatcgagagagagctagggttttccccgaatcgggctgaattggggattttgaccagggaggggatgcacaatttgcaaaaaaaaccttcacaattatcctgacagtgggccatacgctgagtcagcaagccacgtcggccccgtaacggctcgcaacagggaagtgacacattcgctcataaagcaaaccaaattgaccaattctccacattttgagacttgtgtgaccaacgtgctcatcttgcgagagttcagtgacaaacggtgcgtttatgtctttcataaaacacattacaatcgggaaattgaaatattatatttcacttgtttcaaaaaactgattacac

SEQ ID NO: 3146 - DNA, 369 bp, Triticum aestivum
  Clone ID: LIB103-025-Q1-E1-G5
tcgcgggcccacagaaagcgtcacacgtgaataccgagtgtcgtgtaggacaaccatcgactgcatgtggccaaaacatgtatgtatgaaagggttatgtaatgttctaaataacgaattcacgactctgatgtggcacctgcctaacaaaacggccaacgcacacggtggctcacaactcgtagtgtactgcaagccacccgccaccccccagacgcacacgcccacacacacacaacaaatccaccgcaactacgatgcatgttaaattatcccgtggtgaacatatgttaccaaaggagggacgttttaatttaaaaaaacagagatcgttaagaccgtttagtacatttgattgatttccaaggg

SEQ ID NO: 3147 - DNA, 408 bp, Triticum aestivum
  Clone ID: LIB103-025-Q1-E1-G8
ccgggccgacgggtatcccatggagtaccgttttccggtacgccacacccctcctgatgaacaggacccctgtttcgaccgaagcgctccaacacaagtccatttcctccgttttgcggtacaccacacccctcccgatcaataggaccccatttcgaccgtaggaggtccaagggaagttcgtttcctctgttttgtggtacgccagacccctcctaatgaacatgatcccgtttcgattatggtcggtcgaacacaaggccttttcctctgttctgcggtacgccaggcctcatttcgatcggttgttccatccaagccagttggttcccgatgaacacgacgtattctgttgcctcccgatgaacatgacgcattctgttgcctcccgatgaacacgacgacaat

SEQ ID NO: 3148 - DNA, 444 bp, Triticum aestivum
  unsure at all n locations
  Clone ID: LIB103-025-Q1-E1-H1
ggtctaccattcccgggccgacgggcccggaagagaccacggacatgacgagcagtctcaatatggtcgggacataaagattgatatattggaccatgttattcggacaccggaagtgttccggattgtttcggataaaacaggagtgccggaagggttaccagaaccccccggggaagtaatgggccttagtgggccttaggggagagagagagggcagcagccaagaggtggcgccccccaaggggagtccgaataggactaggggaggggggtgcggcccctctttccctctccctctccctcaccttccttcttctcctacttggactaagaaaagggggagccaattcctacttggagtaagactcccacccttgggcgcgcccccctaggaaggacngccttctcctcccctctttatatacaatggagggggcaccc

SEQ ID NO: 3149 - DNA, 460 bp, Triticum aestivum
  Clone ID: LIB103-025-Q1-E1-H10
ctacgcaaccaccaagctgcgcacccgcacctgcaccgatgggggaaggaacccgtccttcgacgagaagtttcatataccactcatcgaggggctccgcgagctgagtatcaacgtgtggaacagcaacacaatcaacaccgatgacttcattggcagctgcagggttccgctgaacaaggtgctcacaagtggctacgatgattcctcatggcccctccagacacgccatatgaagtctgctggggaagttaaacttatcatgcactttgatgtctcagcaatgaagaacacgatggcaggtaaaacttctggtcagtacgctccttcgccatacggtgcctcctcagcttcgtacccagcgcctttagcatatgctgcagcacccccaccgcacaaggcttatccagctcctagccacgcacaatatcgtgcctcctctgcgtactcaactccgcct

SEQ ID NO: 3150 - DNA, 382 bp, Triticum aestivum
  Clone ID: LIB103-025-Q1-E1-H12
ggtccatcaaatatctttcatgggtatgatggaaaggaaaattgtggcaaagtgttagaagaagaattacatagaattcttggcataaaatatttgaatgatgagcatgattgcaatgttgttagtatgaattccttgaatatccatgatgctaatgatatgcaaagccacaagcttggggaagctatgtttgatgaagatgatattttttctcccccaagttttgatgagaatatttattatgatgaaagcatgtctcctatttatgatgattattgtgagtaaagaataatgataaccatgaaacttgttatcttgatcttaattttcaatcacatgatagttattttgttgagtttgctcccactactaatgatgagaa

SEQ ID NO: 3151 - DNA, 363 bp, Triticum aestivum
  Clone ID: LIB103-025-Q1-E1-H3
gggccgacggggagtcgaccaagctcgcccgctacaacaagaagcccaccatcacctcccgggagatccagacctccgtccgcctcgtcctccccggggagctcgccaagcacgccgtctccgagggcaccaaggccgtcaccaagttcacctcctcctagactgaagatgcgccgcttgttgtgccagatgtggctgtctgatgtatctctgctgttgactctgcttacctgcaagtagaagtagtggtagtagttcgtgtggtagaagattgccaacgctttgttggcttcttggttgtgagaactgaacgtgttgcttttgcaaaatgaaatctatctagaaaatgttgcggttgtggta

SEQ ID NO: 3152 - DNA, 389 bp, Triticum aestivum
  Clone ID: LIB103-025-Q1-E1-H4
atattaaagttatgctagttgagtagttgttaatttgagaaatacttgtgttaaagtttgtgattcccgtagcatgcacgtatggtgaaccgttatgtgatgaagtcggagcatgatttattttttgattgtgttccttatgagtggcggtcggggacgagctatggtcttttcctaccaatctatccccctaggagcatgcgcgtaatactttgctttgataacttttagatttttgcaataagtatatgagttctttatgactaatgttgagtccatggattatacgcacttttcttccttccaccattgctagcctctctaataccgcgcacctttcgccggtatcatacaaccaccatataacttcctcaaaacaggcaacaata

SEQ ID NO: 3153 - DNA, 437 bp, Triticum aestivum
  unsure at all n locations
  Clone ID: LIB103-025-Q1-E1-H6
aattcccgggccgactttcgatccatctttggtaccaggatggattggcctttgtgtacgcggcgagtgcgagttctgcttaccattggcaggggaaggaagggaatggcggcgtgtgtagacagttttttctgctgaatcagcgctaagtctaggtgatatctgtccccgcagcttcgcctttgcagattttgttgcagccatgtagctgggcacagctggagagtttttggagccgttctctggatattctggcttcgttgagaacgaagacctcctgttaccacctttaaggctttcggcggagagaggttcttctctggatctctgctccgcatcattcaccaaagcattttcttcattgtcaatgtcttgcangggcataacttcagctgctgtagcaacaacggtcggctcatcaagtttttcttcacttg

SEQ ID NO: 3154 - DNA, 417 bp, Triticum aestivum
  unsure at all n locations
  Clone ID: LIB103-025-Q1-E1-H8
ttcgaccgaaggaaagtagcgagcgcgctttcctatttggggtcaagagtggcgctgatggtgaaggtaccaccagtgccatcctccttggcggacaccttcttagtcgcaggtggagctgccatcgccttcttgcacttgccggtggagctcgatggtgcgtcctcgacggtagcgcagcactccgaagaggtgcgcttgccggagtgggcatcagagctcttgccggacttggtcttcttcttccccccgggagcttcagcggcaagtgtccttcgttctgctgcagctgctgcttcccggtagatcttgtcggcacanataagagcatccttcttgtcgccagggacaaagatgacacttattgggcctggcattttcagtacgtggtacgcatagtgagaaggctgcatgaac

SEQ ID NO: 3155 - DNA, 400 bp, Triticum aestivum
  Clone ID: LIB103-025-Q1-E1-H9
ggtccacggggctcaaatacccgcagcacgagaatttcatggaatgagcagtcagttagtcaaggcaatgccgagtcttagttttacaaaagtccaggaagacaattgtacttcgtcaacatgtgccatttgcttggaagactacagtgttggtgaaaagataagggtgctgccttgtcgtcacaagttccatgctgcttgcgtggacctgtggctcacatcatggaggacattctgccctgtatgcaagcgagatgcaaatgctggaatgtcaaatttccctccatcagagtctacccctttgctttcttctgctattcccttgccagctgaatcgacagctttgtcttcttttcgttcaatggtagcagcatctcctccaacgacaataagccggcat

SEQ ID NO: 3156 - DNA, 413 bp, Triticum aestivum
  Clone ID: LIB103-026-Q1-E1-A3
gagggcccctttgatgcttaacgaaggatgattgctatgatgattgttatgatcccttgaatttgtttgaaatatccctttttgatgatgcttgctatgcttgtggctaagatgccaataggaattattcttatggagatgaacttgctatagttccttatgttaaacatgaaattgttgctattgcacccacgcatgatagtcctattatctttttgaattctccaaactacactatatcggagaagtttgcgcttagtaaggattatattgatgggttgccttttaccattgcacatgatgattttgatgaacataatatgcatgtgcttgctgctcctacttgcaattattatgagagaggaactacatctccgcctctttatgtttcaaacacgatgaaattgcaagaa

SEQ ID NO: 3157 - DNA, 422 bp, Triticum aestivum
  Clone ID: LIB103-026-Q1-E1-A5
gacggaggggaaacgttcctttctgcaagggccttgatgttatccagcaagcacaatctggaacaggaaagactgctactttctgttctggaatcctccaacagcttgactatggtttggttgagtgccaggccttggtccttgctcccacccgtgagcttgcacagcaaattgagaaggtcatgcgtgcacttggtgactacttgggtgtgaaggttcatgcctgtgttggaggaacttcagttcgtgaggaccaaaggattcttgcaagtggagtgcatgtcgttgttggtacgcctgggcgtgtgtttgacatgctccgtaggcagtctctgcgccctgacaacatcaagatgtttgtcctcgatgaagctgatgagatgctttcccgtggtttcaaggatcagatttatgacatcttc

SEQ ID NO: 3158 - DNA, 378 bp, Triticum aestivum
  Clone ID: LIB103-026-Q1-E1-A9
gactgctaccccagataaaaaaactacagtaacacacccaagcggagacatgctcgagacctatgccagctagccctgttcggtgcatgtacgggcaggagcaatttaaccaaaaactgaaaagaaaagggtcgcgctaactgccacacatgtggcagaaagggagacgcaccacacgtctctaatgtaaacagattgccacgtcatcgcatgcatacatgtaggaatatttttggattttcagtttttaaattgttttatctcttaaacgaaaaatccgactgaaaatccgttttcaccattaaatccctcacgatgagatcttcgaaactagatcccatgttgatatgttttgatgaaatttttttttggattaaa

SEQ ID NO: 3159 - DNA, 355 bp, Triticum aestivum
  unsure at all n locations
  Clone ID: LIB103-026-Q1-E1-B1
ggtcgacggcgcaagctatctggggaaacataaactgatgcatgtgttgaccccttgacgtgttgttaaaatctaggtgcttttatgctgaggtatcattttagtttctgactgcatgtggtaacaacctactagctgtatttagctccatttgatatgtttgttttagaactttgttgaagcaaggtcttggtggcactgtgtcagaacgcagcanaaaaaaaaaaaaaaaaaaaaaaaaaaaaaaaaaaaaaaaaaaaaaaaagaaaaaaaacaaaatgaacaaaattaaaaaaaaaaggaaaaaaaaccaaattaagccagctaagaatgaaagaaaaaaaaacgggccccc

SEQ ID NO: 3160 - DNA, 391 bp, Triticum aestivum
  Clone ID: LIB103-026-Q1-E1-B4
gggccgacggcgaccccaaactccgcatcactgttcgcggtgacgacggccccctcgcgcgccgggccaaggatgccttcatcgcccatggcaagcctctggtcattgcgaagatccgggattatgtcgccgccatggcgaatggtggccccgccaaggacgagatagattctaagaagatttccaccaaggccgccccggcggccggtggcgcagctgttgctcctgctccttcagtgaaggtgacagcagcgccagtgcaggcgccagcagctaaggagaagaaggcgaatggcaaggataaggaaggattcaagactatcgagatgacagagaagttcaactgccgctccaaggacatctatgagatcttgatggatgagaacaagtg

SEQ ID NO: 3161 - DNA, 427 bp, Triticum aestivum
  Clone ID: LIB103-026-Q1-E1-B7
ggtcagggacctccgggtcgacgggaaggggcagcgagccagtttcgtcaccctccgtgacgctgctgccgccggagccaccagccaggagctctggcccttcgtctcccggtaccgtaaatcctgctgcaagattcgcctccatgcctccagcgatggcttcctcatcgtctcgcggggagaccggttctacatctgcaacccgaccacccgcatgcacgctcacttgccatttcctcgccctcctctgccgcgctcctcctgcatcaatgacatctacattcacggcctctaccatcacatatcaaccggcaaatacaggctgctcttgtccaacattcacaagaaagaagccacattgtacgtcctcaccctagaaagagccaacgagttgaggagcattcaaatcgtcatgccaacactgcct

SEQ ID NO: 3162 - DNA, 416 bp, Triticum aestivum
  Clone ID: LIB103-026-Q1-E1-C2
attatcgggccgacggcttctgcacccttgaaactagtactcgggtgttcgtgaagacccaaaaattctttatccaaagttttggtcctttaaggaggtgtttggcgcagtgaacaaggcaatcggactattcggctttataactctcactttaccatagaagtctacaattttaaatttcggcgaagcccatagtattcggaaagccaaactaggcattatacacacctaaatcgaacgaagcccattcctcgccttaagcggaaaaaatctttagggattttggtacctcgcgaacaacgaccaactctcgccgcatcatgacggtcagttttcggctttctctactgaggtgctcgtccggaagaaccaggacacaatcgcagtagttctccctgcgctaccttagccgatat

SEQ ID NO: 3163 - DNA, 398 bp, Triticum aestivum
  Clone ID: LIB103-026-Q1-E1-C4
gggccgacgggaggaggatcagcgcggagttccagctcgtcttccgtctgatcaaggggctgatattcataacattcatctccatcatcataatcttaacagcaatcgcccacatgacagtccttgacatcttcgtctgcatcctcgccttcatgccaactggatggggcttgcttctgattgcccaagcgatcaagcctgtggtcgagatggtcgggctgtgggggtctgtgaaggctctcgcccgtggctacgagattctcatggggctcctgctgttcacgcccatcgcgtttctcgcgtggttccccttcgtgtccgagttccagaccaggatgctcttcaaccaggcgttcagcagaggcctgcagatctcccgtatcctcggcggccacaag

SEQ ID NO: 3164 - DNA, 393 bp, Triticum aestivum
  Clone ID: LIB103-026-Q1-E1-C6
gggccgacgggagctgcaagcatcaggagggtgctgctggatcgacgacgagatgtggagggtgtgcgacaacagcaacggcgagctgcggagagaggtggcgacctgcaacccatggcgatggcagctgccgcagggtgcgcaagctttgtgcggcaaggccgcggggttggggcggttggctgagcgcggtgactcgttgtgggcagaggcatgatgtgcggaaggacagagaggaaatcatgcagctacttttgcctaaatccaacggctgctaggcgaccggccgaaagttgggccggtgcgccggcgcctagcagtggccttgttgttttattggatgcttgcctcttcaccctgctggatgaactcgcctacatttttttgacctgg

SEQ ID NO: 3165 - DNA, 357 bp, Triticum aestivum
  Clone ID: LIB103-026-Q1-E1-C8
gacggagagggcaagtacgaggacgagctcgaggacgatgccgacctccaggactagagatcaaccgagtaccgcgtatgattattggttcttttcttatgttaatttgattgtgtagtgctcttctgtctttcttggtgggtgctgttgttgaggaacagaaaactcatggaagggtggttgttggtgagatagcttggtataacctctggcacaattgctgtgtgcaagcaacgccctgttgcgttctactggtagtggtgtgtgttgtctggtgtccattgtctaactatcatgtccaaatctaatgtaatttgaagttgcttgtgtctgaaaaaaaaaagagcaagagaaaag

SEQ ID NO: 3166 - DNA, 414 bp, Triticum aestivum
  Clone ID: LIB103-026-Q1-E1-D1
agtgcggtctagaattcacgggccgacgggagccagacggccggcgcgcagaggctgctgcttctcctcgctctcgtgattgaagctgtaaacaatggagcagatatcttcactgaagaccagcaagaaattatcaagcaatttggcagaatcaaatccgagactgttcctgagaacaaggatgcagggtctgatgacgatgatgacgatgatgaagatgaggatgatgaaactggtgatgctgatgatgatgatgccgatgctggagaggacttctcgggtgaagaaggcgaggacgatgacgaggatgatgaccctgaggcgaacggcgatgatgctggcgcggggagcgatgatgatgatggtgacgacgacgatgatgatggtgaagacggcgaggatgacgatgatgat

SEQ ID NO: 3167 - DNA, 357 bp, Triticum aestivum
  Clone ID: LIB103-026-Q1-E1-D10
cgccggccgacgggaaacgcaagtcaggcttccgtgagggcgtgacctacggagccggtattggcccaggcgtctatgacatccactccgccacgataccctccacggatgacattgccgagcgcgtcaataagaggctcgcagtccacgacatcaacatcctgtgggtgatgcctgacatgggtctcaagacgcccacgtacagcgcagtgaagcccgtcctgaccaacatggttgccgcggacaagctcatccgtactcagctcgccagcacactgtgaggagccacgggaatcgagcaacttgatactactgcataatgttttgtggggacagagtgccacatgatccacattt

SEQ ID NO: 3168 - DNA, 121 bp, Triticum aestivum
  Clone ID: LIB103-026-Q1-E1-D12
aattcgcgggccgacgggggaaggaactccatgatgtgtgttctggtcgtcgacctccaggacaatgtcacggatcactcgtgcgtgcatcattcatcaaagagttgtccacatatcttca

SEQ ID NO: 3169 - DNA, 391 bp, Triticum aestivum
  Clone ID: LIB103-026-Q1-E1-D4
gacggcgcaaacgagtggagttgatcccttggtgcttgcccaacacagccaagaggcacaaccagtggaaaggcctgtatgggaggttggactgggagggcaacttccccacatccgtgacagatccccagccaatgggcaaggtcggcatgtgcttccaccctgatcaggacaggatcatcactgttcgtgaatgcgcccgatcccagggcttccctgatggataccatttcgctggcaacatccagagcaagcacaggcagatcgggaacgctgtgccgcctcccctctcctatgcgctagggaggaagctcaagcaagccatcgacgccaagcctcgactggcttaagttcactgcactgcatgatacaagtcccgtcattttttggt

SEQ ID NO: 3170 - DNA, 418 bp, Triticum aestivum
  Clone ID: LIB103-026-Q1-E1-D8
ggtcagggactcccgggccgacggagtctcaagtggagctgccattgccttcctacacttgccggtggggctcgatggtgcgtcctcgacggtagtgcagcactccgaagaggtgcgcttgccggagtgggcatcagagctcttgccggacttggtcttcttcttccccccgggagcttcagcggcaagtgtccttcattctgctacggctgctgcttcccggtaaatcttgtcggcacagataagagcatccttcttgtcgccagggacagagatgacacttattgggcctggcattttcagtacgttgtacgcatagtgagaggctgccatgaacttggcgagtgccggacggccaaggattccattgtaaggtaatggaaagtcggcaacgtcaaacgtgaccctctcagtcctg

SEQ ID NO: 3171 - DNA, 382 bp, Triticum aestivum
  Clone ID: LIB103-026-Q1-E1-E10
ggccgacggggcaactacataggttgcacagcaataggatcagaaaaagcgccctggcaactggccgagctggctcctcctccctccatgtaagacgtggcaggtccgaatcgctgaaagccaaatcccagcttctcttagacagaacaacgggtgacaaaggttgtagcatcactggcctgggtaccgagaatgctacaggagcttgcaagaggttctcaaaagacctcctccaaatcatctccgggggcaaaggaggcccaaaagggatcacaggcagagcaatctcctttgtgacagtaagaggatgatacaccacaattgcccaattgttcgctgtatcttcattgaccacaggctgcataattgtttcagatatatc

SEQ ID NO: 3172 - DNA, 370 bp, Triticum aestivum
  Clone ID: LIB103-026-Q1-E1-E11
attcgcgggccgacggggggagcaaggaagggggagacaaatctttcaggtacaatggtatgacaaccatgttctgaactatcaatgagatttggtgctaagtcagcatcgtgttttatccaatctatcaaacaccataagtttcatgtcgaaaaaaaaaaatcacagaaaaaaaaaaaaaataagtaaaaataaaaaaaaaaaaaaaagagtcaataaaacaataacaaaacaaataaaaaactagtaaatgttataataaatggataataaaaaaacatcgtccacagagaattacatccgttaatggttcctttccctgggaggcaatcccctaaagtgcatgtcaagactgctaaaaggggagtgt

SEQ ID NO: 3173 - DNA, 409 bp, Triticum aestivum
  Clone ID: LIB103-026-Q1-E1-E2
ttcacgggccgacgacgcggctgatccagagatttacgctccccacatagtccttatgagcggcggtgtcatcactctgcaggtccttctcggtctctatggccttgttcagggtctcctcccgggctgtaacctctgaaagcgtgccctccaagccgtctagtttcagcttcaggtctttgatggagtcgctggcctcggatagcatgttggccttgtcagagatagcaacctgcgagcccgccagagtgcggttggctgcgttcttctcctccgtcagctccaataccctcttcttaatcttcttcctcatcttcagttgggtttctcatcatagaggatcttactctggccatggacttgttgaccttttcctttctcttcttgcactcaccagtctcctttgggt

SEQ ID NO: 3174 - DNA, 372 bp, Triticum aestivum
  Clone ID: LIB103-026-Q1-E1-E4
ggtctagaattcacgggccgacggccaggccaaccagcggctcgaggggatggggttcaaccgtgagcttgtgttggaggtcttctttgcatgcaacagggatgaagaactggctgccaactatcttttggatcatggccatgagtttgaggaacaacaatagatgttagattggtcttgctgttgaaagacagaagagtcagtgacggaagcagtacagtttggtgtcgttcttatatcttgctgctgaatatcactactacttgccattagtgcgatgttgctgactttcaatttcttgtatcctggaaatgctttctaagtacataatatcatatgcaaaccttaagaaacaagaacgatggaagaaca

SEQ ID NO: 3175 - DNA, 424 bp, Triticum aestivum
  Clone ID: LIB103-026-Q1-E1-E6
tccgggccgacggagtggagagatggcttggccaacggtggagtagcgcttcacagcgaagcatgctaagcagagctgctagcagcaggaggcaggagcaggtggtcccggcggcgctggaggaagaagacgagagattgaagatggatgtcggtcgttggatgtaaatccaacggctaacgatgttagaatcatttgttgactaagttgacaacgacttgcattggcttcgaactattggcccacattttagcctccaaaaatgtggcacgtattcaacccattttttcagaatttacagtcttttttgcggggtagaatttacagtcaatttgatctttttttttgaattacactccattagttgggctgggtgaacaaataatgtagcgtccatgcgggccaattaagtttttccaaaaat

SEQ ID NO: 3176 - DNA, 427 bp, Triticum aestivum
  unsure at all n locations
  Clone ID: LIB103-026-Q1-E1-F1
attcacgggccgacacctcgacgcaacgagtggcaaataggaaatagccatgaactattctaataaaaatgtgaacaacgactcgaactcgcgtcactatattgcacagatggttcagctaatcactacgccaactgaacgacaacgattgcttccaacgcgaacaatataagaaccatcgtagccgtgctatttactacgcagcatcaccttgattttttttaatgaaaaaagctcgtcaaatttttgaaaaaagttcacgaattgagaaggttcaacggttctgaaaagagtttatcaaatttgaaagaaaagtttactgtttcgaaataaattccatcaattttgaaaaaagttcacccaattttgaaaaaaaaatcatccatttgaaaaaagttaatagattttaacanaaaatcatcagttt

SEQ ID NO: 3177 - DNA, 373 bp, Triticum aestivum; identical to SEQ ID NO: 3106
  Clone ID: LIB103-026-Q1-E1-F11

SEQ ID NO: 3178 - DNA, 387 bp, Triticum aestivum
  Clone ID: LIB103-026-Q1-E1-F12
aattcgcgggccgacgggtgaagaagacgcatcttgtcaaggctgctggctccggcggacaaaggcgggagcggctgctgcgcgagaaccgacgtgagctgtgtgcggtggtgtcataaggagcctgtccatctccactagagttatcccaagtttcacttcacatcgtgatgttgttttacctttttttttcttgtcgtcgtcccgctgcctgctataacggacagcgctccctgttggcgccgccgccggcgggggtggtgccctggcggcggagggtgtatgtcctctgccgccgggtgctcccctgcttgtacctagatggttggttactctttccgtccattgtcaccggctaacattgtgataatatcagtctgggtaatg

SEQ ID NO: 3179 - DNA, 366 bp, Triticum aestivum
  Clone ID: LIB103-026-Q1-E1-F4
gacgggctcccaaagctgaaaacgctgcaaggccattggcgatgaacagcgctcgcggctttcctggcatgcttggctcaatatattgcatgcattggagttggaagaactgtccaaaggcatggcatgggcaatttcatggccaaaaaaggttccactataattcttgaagcggtggccgatcaggagacttggatttggcatgcattctttggaatgcctggatctttgaatgacataaatgttatcaaccggtcaccactgatgaataagattgcaaacggtgagttgccacatgtgcagtttgtagcaaatggccatacgtacaattatggctagtatccagtggatgggatccaaccaaaa

SEQ ID NO: 3180 - DNA, 425 bp, Triticum aestivum
  Clone ID: LIB103-026-Q1-E1-F7
ccgggccgacgggaggcagatgcgttggcagcaactgaggtggcattcatccttcagtctgggcaaggaagaggagtgcatttcaccatagcaccagattctcctgccacgccccagcacgaaccacaaccttgaagatgtcgtgccgatgagcgaccggctggcggctgcggctacattggattgctggcttgcgcgaatcaccaaaggagttatggtctgctgccactgcagagccatgttatttacgtactttacgtcattgcccagagtgtaacgttctgagacgtgtcccagtttgtgcttccggattctgttagggttggcgttggccagggagtctcggtgagtggtgtgtataaagtaagaaagccatttggaccgtgtatgtcggtcccaactgttaactttaaaaaagaaggggg

SEQ ID NO: 3181 - DNA, 426 bp, Triticum aestivum
  Clone ID: LIB103-026-Q1-E1-G10
gacgggtcaagaataaggagcggagtccactccccttgagaataacccgcttaacatggaagatacagacaaccctagttgatacatgagctattcgggcatacaaaacaggatatttatttgaaggtttagattttggcacatacacatttacttggaacggcaggtagataccgtatataggttggtatagtggactcatgtggaataactttaaagggattggatgcacaagcagtattcccgcttagtacaagtgaaggctagcaaaagactgggaagcgaccagctagagtgcgacaacagtcatgaacatgcattaaaattaatcaacaccaaatgcaagcatgagtaggatataatccaccatgaacataaatatcgtgaaggatatgttgatttgtttcacctacatgcgtgaacatg

SEQ ID NO: 3182 - DNA, 410 bp, Triticum aestivum
  Clone ID: LIB103-026-Q1-E1-G11
gtaccgatctacaattcccgggccgactgccacccaaagactgactcgggaaaagtgatagacggaaaggaactttttcccctcatctagatcgccaggcccccgcacagctggatcacctgtgtccgttcatcactcgatttggccttcttgaccgactgagagcggcaagtgaagatgtgcttgaagagtccccaatgggggcggcaacccaagaagttttcacacaagcaaacgaaagcagcgagatacacaatagaattgggagtaaagtgatggagctgcgctccgaagaagttcaagaagctctggaaaaaaggatgaggaggcagagagaatccacggcgatatgggtggtgaggaggattcactcaccatcaagaggctggggttcgacttccttccccgga

SEQ ID NO: 3183 - DNA, 362 bp, Triticum aestivum
  Clone ID: LIB103-026-Q1-E1-G12
ccgacgggtaaggcatttccatagccattccgagatatattgccatgcaactttccaccgttccgtttatcatgacatgttcatcattgtcatattgctttgcatgatcatgtagttgacatcgtatttgtggcaaaaccaccgttcataatttttcatacatgtcactcttgattcattgcctatcccggtataccgccggaggcattcatatagagtcataccttgttctagtatcgagttgtaatcattgagttgtaaataaatagaagtgtgatgatcatcattcatagagcattgtcccaataaaaaaagaagaaaggccaaataaaatcaatgaaaaataggaaggcccaaaacac

SEQ ID NO: 3184 - DNA, 371 bp, Triticum aestivum
  Clone ID: LIB103-026-Q1-E1-G3
attcacgggccgacggcggatccatctcctatgccgcctatctttaactacatgttgccgtgctgtcctgttttggaaacttgtgttgggttgttaagccgtcggtgctttctttgtcgctgttgaactgcatcattagtacttcgtggaacaagtatctcgcttaatttgttcaaaaaaaaaaaaaaaaaaaaaaaaaaaaaaaaaaaaaaaaaaaaaaaagaaaaaaaaaaaaaaaaaaaaaaaaaaaaaaaaaaaaaaaaaaaaaaaaagaaaaaaaaaaaaacgaaaagaaaaaaaaaaaaaaaaaaaaaaagagggccccctaaaaggtccaaagttttttgagggggggcgggaaagagtaaaac

SEQ ID NO: 3185 - DNA, 244 bp, Triticum aestivum
  Clone ID: LIB103-026-Q1-E1-G4
cggcggaacaatagcacccaggagggtccaagggtaggtatgtacaaaattggtactgcacatgtactgctaagtgattcaatacacacattaccaatcgaagaggagaatatggtcgcggcggcctctatgagtcatggtcagcaacgggagtcagttcactgtccacggcggtggtacttctgcgcttggcgtcagcttccgggaagaagatccgagaccattggagacgatgccggcgaat

SEQ ID NO: 3186 - DNA, 392 bp, Triticum aestivum
  Clone ID: LIB103-026-Q1-E1-G6
ggtcagggattcacgggccaacgggagagataggcatcgcatcgcggatcggccattgagagagaaccaatggagagcggcggcttgaggcgagatgcatcacccagtgcctcaggagtcctgatcttttgtcatggcatcatggataatgtcctcagcatcttcttcagtcactcccgtgaccagggatatctaaaatgccttggggacggatacctattgcaaaccaaatttcacaacattggtgcaacccttgtcggagttgatacttttggaatcaactatctatgagaaactacatgacactcagtatggaacgcatatgtgggtaaagtatgctgacaatggtcgctacaatgcatcccaaatgcctgctgaatggcatggatcgc

SEQ ID NO: 3187 - DNA, 422 bp, Triticum aestivum
  Clone ID: LIB103-026-Q1-E1-G8
ggtcagggattcacgggccgacgggtgagtcacggaaggctggaagctatgttgagtagtgaacagatctgcacttctgcagttaggacacatgtaccaggctctgaagctttcctatgcatggaattgattgccgggagctcaactctatctggttattagtttcgtaatccaaactactgctgaaaccattcccctgttctaatcttgtagcatgactagcatctgcaggacttgttctgcttgtatcatttcctgtttcttgtctttaggtgccagtgtgtgtgttacatgtatactgtgttaccagcgttctgcctcaagaacacgcatgcacactagaatacgcatttgttagctgccagcaacttctggtcaagcttagcgataatttcgttcaagtagggatcgacatcgaggaa

SEQ ID NO: 3188 - DNA, 430 bp, Triticum aestivum
  Clone ID: LIB103-026-Q1-E1-H10
gacgggtcacatggtcgttccattccccgacccctcattctctccctcgcggcaggtgaacacgcgtgccgctgcctccgccatctctgcctcccatcctcatcccgatccttgtgtaccaaggagatccggcttccctccccgagctcgcctcccggcgactattccatgcgcggccgcggcaccagccgcctcccggtcgtcggtgccacgaaccatgaacgccatccggctatgagaatttccgcgacacccatctgccagttcgtcagcctgaccctgcccatcttctcgctcgttcgccagttctgaaaaaactaatcactttgtagattgtaccaacttttcgtttttggtctgtttgcacttctgcagtctcaaatgttacctctcagttcgtgcgatctccggatattctctacagcttttt

SEQ ID NO: 3189 - DNA, 383 bp, Triticum aestivum
  unsure at all n locations
  Clone ID: LIB103-026-Q1-E1-H12
cggggtcancaaacctgcggtccgagaaggtcaaggacgacatcgtcctcgacggcaacgacatcgagctcgtctcccgctccgccgccctcatcaaccagaaatgccatgtcaagaacaaggatatcaggaagttcttggacggcatctacgtcagcgacaagggcgccatcaaggaggagtagagagccggaaaccgtcccgcccaccagaagccgtgtttctgcctgccgtgtttgtttcatcgtgtttgtgtctgtctgtcgtcgtcgtcttcgtgattttgaactttctctagactgaattttgtagcggagttaaatttttagggatgtgccgtggaacatgctatctttattgttatcctgcatatcgtcgccgcc

SEQ ID NO: 3190 - DNA, 224 bp, Triticum aestivum
  Clone ID: LIB103-026-Q1-E1-H2
tgctagcaggatatctctaactggtaaatagttacgcattcaaacctagttctgacggcagtcccctgtacaaatcatatatcatgaatagcaactgcatgacttagccggcttgagtcatatcctgtctcatgtctaatgttcgagtatgtatgtcatatgtagactgtgatgtcagctttctgacctcaagaacacgcatgctgatgaaagtgacgcatttg

SEQ ID NO: 3191 - DNA, 434 bp, Triticum aestivum
  Clone ID: LIB103-027-Q1-E1-A10
gggcactcatgaatcggaaattgttagaatactcaatgtgcatcacttataaatttttagttacatagtttttgctctagtgcttcacttacatcatttagaacgggttggtaaatttggtttaaaggaacccatggtccccccaggatccacttagataatttggaaagctcaacaaaccatcatggaaattggcgttaattatgttaggcattcaagattaatatgtaaaattttcttatgagtgtgttgaatactatgagaagtttgaaacttgagaattgttttgagatatggacatggtgatattagagtcgtgcgagttgagtagttgtgcattggagaaatgcatgtgttaacatttgtgattctcgtagcatgcacgtatgagtgaaccgttatgttaagaactcagagcatgatgtagttattga

SEQ ID NO: 3192 - DNA, 418 bp, Triticum aestivum
  unsure at all n locations
  Clone ID: LIB103-027-Q1-E1-A11
acggggctagcctacggatccatccatccgcccctcgctgccgctgcgtctcgtctccaccaccccacttgcccccggactcaggaggatcgtcggagatgtcggacaccgatgagcaccacttcgagtccaaggccgactccggcgcctccaagacctacccgcagcaggccggcgccatccgcaagggtggacacatcgtcatcaaggcccgtccctgcaaggttgttgaggtctccacctccaagactgggaagcatggtcacgcaaagtgtcactttgttgccattgacatctttaatggaaagaagcttgaggatatcgttccttcatcccacaactgtgacgtcncccatgttgaccgccaagattatcagctgattgacataactgatgatggatatgtcagccttctaac

SEQ ID NO: 3193 - DNA, 97 bp, Triticum aestivum
  Clone ID: LIB103-027-Q1-E1-A3
tggatgcgccctgtatcggcgcaatcagcgcggctggtgtggtggagactctcagcatgtcagccatacatgcctcaactacagcgtgtgctcaaca

SEQ ID NO: 3194 - DNA, 399 bp, Triticum aestivum
  Clone ID: LIB103-027-Q1-E1-A7
gggtccacggggctgccaacaagcagaggcggggcgagcttaggtgttgttcttacttgaacaaacctcctacttatgattaaccctcccgcaagcatctgcaactatgagaaaagtattaagaataaattctaaccatagcatcatacatactatcaaaatatcaaacacatatcaagttcacatgattacttgcaacatgatttctcccgtgacctcaagaacaaaagtaactactcacaaatgataaacatgttcatgatcagaggagtattaaatagcataatggatctgaacatataatcttccaccaaataagccatatagtaatcaactacaagatgtaatcaacactactagtccgaaaaaaaaaaagcggtaaaaaaaaaaaagcggccg

SEQ ID NO: 3195 - DNA, 457 bp, Triticum aestivum
  Clone ID: LIB103-027-Q1-E1-A8
taccgagtcgtaaattcccgggtccacattggcgtcgaaacccttgacgagtatttccggacggagggagtacctaggaacacaatgagcacgatggagtttgtaacagaagccaagaccagaaggatgcatttcgggatgcaattgacaaatgtggactgctggacattggatacagagggaaagactggacttttgagcggaaagttgcaggctgaccattcacgagggtgcgtctagataagatgccttgcaacgccggagtgatgcaacattttccctagtgcagcactagtacaccacacggcagcctcttctcatcacgagccgatcccgctagccttcgatgccgacgtgcatgtgcatgcatgcaagggatggcccaggtcatttaaatatgaattgatgagggaacgccaccccgaactggtggaattcgtgggcactggccactggg

SEQ ID NO: 3196 - DNA, 430 bp, Triticum aestivum
  Clone ID: LIB103-027-Q1-E1-A9
ggtccacggggcattgtcagtggcagagtggccttgctgccacgatccactgagatccagccccatgtcgcacggattcgtccctcccccacaactttccttcaccaagtaaggttcgaagatgccatcaaaatctgcaccgcaaaatcatgaggactagaaatggctaagtcccttgtaagatagacccttgtacccaataaggccagtggaaacaacactcaaaactatatgtgccaaatgcaaaagatacttggccgattcatgcggatgccgtcgtcagaggctacactgctaagtcatgctcaaggcaaatggtatagtcccttatatgacatatacaatcactcaataaggccagtggcgagcacactcaaaagtatatgtgccaagtgaacaagatacttgaccgattcattcggatgccttc

SEQ ID NO: 3197 - DNA, 436 bp, Triticum aestivum
  unsure at all n locations
  Clone ID: LIB103-027-Q1-E1-B10
cgggtcttaattatgcaacttgaaacactctgagatgtcatgctcgtctctcttgcaatacctgcaatacttcttgtctttggattgcgaccggcccctgtagccgtttttacttttgcctctgtttccattattggagttcttctcctttgtcctgccacgaacagataatccctcggcttgggatgaacttgaaccatcatgaggcaccattaatttcatcttctccttagagttcaaagcttcataaacttcattaagtgtgagagtatcacgactgtatataatatggtgtctctaacattggtataagaacttggcagtgaacacagtaacattaaagcagtatcttcctcttcatacttaacctccattgcagctagatcagatatgatctctttagattttgaaatatgattcanaacattacctccct

SEQ ID NO: 3198 - DNA, 448 bp, Triticum aestivum
  Clone ID: LIB103-027-Q1-E1-B9
ttcgccggtccacgggttgtatgcatatgtttgcttgtttaatgattctatttgaggataggagtattaaatatgcagagacatttagtattaaatgttgaataataatgttagtgatttgttacagtataatatgataaggttttgcattggtttatactaacctatctcacgagttcttgttgagtttgttgtgaatgaagcttttgataaaaagagaaaccatgatatgagaggaattaaggagacataaaagttcaagcttggggatgcccaaggcaccccaagataatattccaagaagtctcaagcatctaggcttggggatgccccggtaggcatcccacctttcttcttcaacaactatcggttagtatcggttgagcctaagttttggcttcttcacatgagttgtgctaaccttgcaatgtacttttccttagttttg

SEQ ID NO: 3199 - DNA, 445 bp, Triticum aestivum
  Clone ID: LIB103-027-Q1-E1-C10
ttcgcgcggtcacggggattagactatcaatcaaggtccctctactcctcgtgccctcgcgaagctgaacccaatcttgttgggcccttctacaacctagatggtctcatctctcatattatggttcaagggacaaccatggatgaacctgcagacgacgctgattctgacgaagcgcctgcaccaccgaagccaaggaagctgaagaaacctaaagcttcgaagccttcccctacaccaaaggtttcacgggcgaagcctctggccactgcacctcctaaagactgtgcagtctgaagatctttcacgcatctccaagcccgccaaagtgaagatgcccatgcaacccactagccaagcactgacccctgctgttgttctgcgcaatgagaatgacgccattgatctgtccagcgatgacgatcttggcaatgacgctcttgag

SEQ ID NO: 3200 - DNA, 416 bp, Triticum aestivum
  Clone ID: LIB103-027-Q1-E1-C11
ccgggtccacgggagatattaaaccaatatgaatttataatgagttcattacagttaccaaattggaattttaatttcctaaaacaaacggaccttacgagttttgttttgagttttgtgtggttgaagttttcaagttttgggtaacgattcgatggacaatggaataaggagtggaaagagcctaatattggggatgcccaaggcaccccaaggtaatattcaaggacaaccaagcaactaagcttggggatgcccaagaaggcatcccctctttcgtcttcgttcatcggtaactttacttggagctatatttttattcaccacatgatatgtgttttgcttggagcgtcattttctctgtaagtttttgcttgctgttaattagaattgtgttttgcctcttttgtttcaat

SEQ ID NO: 3201 - DNA, 446 bp, Triticum aestivum
  Clone ID: LIB103-027-Q1-E1-C4
ggtccacggcgagaatgatatgcaactccttggagacgacccttgggagtcatttgtcaatagtgtatggtacatcaagatactttcaccagaggatgtgcacaagttgggcaagcaaggaaatgatccacgttacctttcctaagtgcaagatcattgtgctgtttctgggtccagcgaggattcgacagcacatggtagcacccttgctcacggcggcacaacatccccggaacctccgatcgtctcatcttcgtacctgtctcttgcgtgtgctccgtgcacgtctcgagagctccccgtccgttacctatctccgtccggtgcaagccaccgaagccatgaactgatatttctgtaggtccctcttgggaatctgtatcggtttaacttttatcctagatggtttgtacctcgcgcggcgccgcaatatgtctgcacgtctg

SEQ ID NO: 3202 - DNA, 279 bp, Triticum aestivum
  Clone ID: LIB103-027-Q1-E1-C8
cgggtacggctgaggtggaggaggagcggcgccgaggctgatgcccaccattgaagaagaagctccgttttttggctggtcgcgtattatatatatagtttatatattcgcaagactgttatatctgtcgtctcttgtccggagactggaagttgaactgggtttgctgctgctggcagtcgttttgggtcggaaccttgtagttaagttaatcccgtaccgtaccccctggatcttggatgttatcaggtaatagttatgatgaatgtgcttggaact

SEQ ID NO: 3203 - DNA, 417 bp, Triticum aestivum
  Clone ID: LIB103-027-Q1-E1-D4
cgggtccacggggatgactaagcggaggatgggggccaggcggacgcaccagaacgcggagcaaacggccatcctcatcccaagcgcgcctctaacaacgagccgcgtgcgaacgaatcgactgctgccggaggtgatcacaccgatactagccagacggcttctccgatgaccgactctggcgcctcatccgacacgcctaatccgtctgctgcgccataaactgccgctgtatctcttaagttagctgcttcactaatctgctgaaaacttgttaattcacaacattctacccacgggatgtactttgaggctccactcgataattctgccaaaggcctatattatgtagaggttaatatatatctaacctttactgcgcaatgttcctatggcctttttcctttgccgccttca

SEQ ID NO: 3204 - DNA, 440 bp, Triticum aestivum
  Clone ID: LIB103-027-Q1-E1-D7
ggtccacgttcgcacgcaagaaagcaacgagcgcgctttcctatttagggtctacagtggcagtgatggtgaaggtaccaccagtgccatcctccttggcggacaccttcttggtctctagtggagctgccattgtcttcttacacttgccggtggagctcgatggtgcgtcctcgacggtagcgcatcactccgaagaggtgcgcttgccggagtgggcatcagaactcttgccggacttggttttcttcttcgccccgggagcttcaacggcaagtgacttgcgatctgttgcggctgctgcttcacggtagatcttgtctgcgcagataagagcatccttcttgtcgccagtgacagagatgacacttatcgggcctggcatcttcagcatgttgtatgcatagtgagaggctgccaataatttggctagtgctgga

SEQ ID NO: 3205 - DNA, 447 bp, Triticum aestivum
  Clone ID: LIB103-027-Q1-E1-D9
attcgccggtccacgggaaagatttcatacaacacccacggttcaatattgaagtgttcctgaagaggtcgaaggatggacggtcaatcatccataggcactggcctaaacttgcaaagaccttcaacatcaatgaaggcttaatattcgccttccgcttcagcagttttctagatgagatgcatctctctatgtaccgtctatgatgctaatttcgaaaggttctagacgttgcatgtgaaacttgctgctcgtgcagttgtgtaatggggtagctaagtgcagaagctatatcatgttgtgctctgatgtatttcaattatgaaatcctgcttccttaatatggaaatggaatatattatgtgcttaatatgaatgtcaattagattagtaaatggattattaataatagggcaattagcccactaattggccaattaacttgct

SEQ ID NO: 3206 - DNA, 421 bp, Triticum aestivum
  Clone ID: LIB103-027-Q1-E1-E3
tcctggtgttcaatttgtgctccctgattcctatgttgaccctgaacacaaggactatggagccgagctgtttgtgaacggggagatcgtccagagatctcccgagaggcagaggagggtggagcccgtgccgcagagagcgtcggacaggccgaggtacaacgacaggacccggtacgcgcggcggagggagaaccagcagcagcagcgatgatccatcacacgaacgaggccgaggccagagccagaggcaacctgctgtgcctgtttcaccccctcgacataccgagtagttgttattgctttggttttagtaatccgtttcgtgttgccactctgttatccgtatgtatttgaccacttggaacttgagactaagaatcttgatagcataaaagaattttagagccgaaaacaacgg

SEQ ID NO: 3207 - DNA, 446 bp, Triticum aestivum
  Clone ID: LIB103-027-Q1-E1-E5
cgggtgaggtccagcggctgaaacttgcaaccggtgagattacggatgctcgtatgtcgaaggcgggtctacagcagcagatgaactcccagctgattcaaatgcagcagctgcaaatacagcagcagcaacagcagcagtcatcacagacgcagcaggctcagcaacagcaacagcagcagcagcagcagcagcaacagcagtcgcagcaatcagcatagaccaagttacaaagaacctggatctctgtagcagaggagaaacgcgaatctagacaagcatgatgagttgaaggatggtgatcgtatgtgcgagcggagagaaaataatatcttttgattatatcagacaggttgtaggattgatagcagtggttgggcaacggatgctgcccgagttcttttgtttaaggtggtcagcgtggagcatggtcgtcgtcgtaccgt

SEQ ID NO: 3208 - DNA, 298 bp, Triticum aestivum
  Clone ID: LIB103-027-Q1-E1-E6
gtacgtttttaccaaattaaaaggctgcaatgacaatggcaattgccggacggcaaaggattcaattgtaaggtaatggaaattcagcaccatcaattttaacccccccattcttgaatttaaccttgcggcaaattgtaacgttaaccttattcttcccctccggtttgctccttcccgggttaatcccttaaatatgtccgctctcttctatccctctcacagatatcgggtgtctcgagaaccccgcaggagatatcgtgtaaatttgggcccccctgtcatctcatatcataga

SEQ ID NO: 3209 - DNA, 353 bp, Triticum aestivum
  Clone ID: LIB103-027-Q1-E1-E9
ttcgccggtcacggggttaagaaaaagtggggtggtggtgtcatgggctccaagtcgcaagcgaagaccaaggccagggaaaggcttatcgcaaaggaggctgcgcagcggatgaactaagtttagcattgttgaaccatatctattcctcatccttgagtagtgcgcaagcatactgtggcagtttggctccagttttgaaagttatttttgtttgtctgaaacatcttggaaagaacagtgtaagaatgaagtatttctgtttaatgccagttagtattttaaaaaaaaaaaaaaaaaaaaaaaaaaaataaaaaaaaaaaaaagaaaaataaaacaaagtaaatacaaat

SEQ ID NO: 3210 - DNA, 426 bp, Triticum aestivum
  Clone ID: LIB103-027-Q1-E1-F10
gggtccacgggatgtaaaggatgcacaaaatatggaaacttcgggcaagtttgttgatcataggagcattgagacgcagacaaatccaattgatcgttctatagcactcctactttttcatcagccatcagaccaagtggctggagctgttgacaatcctcgccactaaaatctcataacgagaaccacaaggcctatgctaaaaactaggttggttaatgttgcgaaaattactggagatggctcgtggagattcaaggatcgcctattcatatattgtaatcatcatctccgtgaatgcacgagcaatcgtgaatgtttatccgatatggtacggtacgtaccgttttaatcgttagtcggctgcaaggaaaaaaaaagtacaccagttaaccagccagctgtgactgttggtaccatattgtg

SEQ ID NO: 3211 - DNA, 446 bp, Triticum aestivum
  Clone ID: LIB103-027-Q1-E1-F12
taccgatcgtaaattcgcgggtcgactccaccaaatcgatagttatcatctcatcgaaagatcgggacaccctcgcctctatcaagtggtatcagttttcaggttgctcggtgagaatttccagtttcacctagattagatttattttcttacctattgtccaagaaaaagccacaaaaaagttagatctattcatccttttgtccaagccaatctgagcctttgcaattttcttttcattgtttgcattattgaattatcggttgcatcgtcgtgtcgagttgctggtcttagggtctagttcgtttagagtttcgagttctgttcacattagtcacgtcgccgctgcatcgttatcccttccgctgtccaccataccaaccatcaatttccaccacgtgctacccatagttcattgtcacaatcatagttgaggtcgttcacat

SEQ ID NO: 3212 - DNA, 368 bp, Triticum aestivum
  Clone ID: LIB103-027-Q1-E1-F2
ggtccacggcgaagaacccaatgacgataagcggctgccggccgggaagtcagccgccaaagacggcggcgacaagaaaggcaagaagaaagccaataagagcgtggagacgtacaagatctacatcttcaaagtgctgaagcacgtgcaccccgacatcagcatctcccccaatgccatgtccatcatgaactccttcatcaacgacatcttccaaaaactcgcctgcgaggccgccaaactggcgcggtacaacaagaagcccaccatcacgtcccgggagatccagacctccgtccgcctcatcctccccggcgaactcgccaagcacgccgtctccgacggcaccaatgctgtcaccaagttca

SEQ ID NO: 3213 - DNA, 418 bp, Triticum aestivum
  Clone ID: LIB103-027-Q1-E1-F3
ggtccacggcgctagagttattttaacttctcctcgaggggacaagttttgttatgtgttgcgattgatgtttccttgtactaacaacgccgcagaatatgaagccttgatctatggtctttgaatggatgaatagataagcctgagtcaggtctggcaccttggggattcatatttggttgctcaacaggtgtgtcgcaagtgggattccaaggatactctcattgcggcttacaatcgcgatagtcgaccctgtatcagggcattttaacggttatcaagtggaacacattgatcgcataaacaacgaatcggtcgacgcctcaagccggtttggatctcagcgtacgccggtaccatctaaaaccttttcggatgttttacataatgcgtctattaagttgcctacagaggaaaa

SEQ ID NO: 3214 - DNA, 375 bp, Triticum aestivum
  Clone ID: LIB103-027-Q1-E1-G10
attcgccggtccacggggccaaaaaaggcatgttccataagggctaaacttaatgatgacgccgcggtaggatgacttacataggagacgcacgtcattattgcggggtttggttttttaaactgtgggtgtgaataccaatcaccaacatgttggatccaacgactgttaactgtattggcaacgcggaaaatccaaggttgcctgaagttaaagttaaatgagaaccaaccatttactggcacctaaaaaaaaagaacatccaagaactcaacctttccgtcagattctgtggaagtggtgctccaactgctgctacagctgccccagctgccagtggtgcataaaaaaaatggggaccctcaagaagttaaa

SEQ ID NO: 3215 - DNA, 182 bp, Triticum aestivum
  Clone ID: LIB103-027-Q1-E1-G11
cggggaggatgcagatggaaagtaagggaggctaggacagactgaaagaaaagtggaccactagggtgatttgagtgtgcatcggtatcgatgtcattcatgacgacggtctacatgcccgccacaccatcgacaattggcggatactcagcagatcacataagtctggactagtctgcgga

SEQ ID NO: 3216 - DNA, 469 bp, Triticum aestivum
  Clone ID: LIB103-027-Q1-E1-G2
ggtcctaaattatcgggtccacggcgagttcctatggctcatcttgtcaagcgcagagatacaaattttcttcgcaatgatttgggagatgatgaatatatgagagactctggaattacagttcctcttccaaaccgttatggcatgcctccagaccgtcattgtgatggagtggaccgcaacattggatacgagaaggacatgtatacagcgaaggaatgccaatcaggccactgagcgggaagcatacctttggtccgtcgcagatatgtgagcgccgcaactgtcccatgaacatgtccggtggcatgctggctggatccgttgctgaagttgcccaatgtgcctgaattgaaacaaatcgatgcccttgaacatcatttcttcgaccacatgatgaccgtacatgatttgctcgagtacccatgcagttttgttgtgtaattgctggattctgctactgaattct

SEQ ID NO: 3217 - DNA, 453 bp, Triticum aestivum
  Clone ID: LIB103-027-Q1-E1-G3
cggtccgagatcacgggtccacggcatggactcaggcaagtacgtgcggtacacgccggagcaggtggaggcgctggagcgggtgtacgccgagtgccccaaaccgacttccacgcgcaggcagcagctgctccgcaagtgccccagtctgtccaacatcgagcccaggcagatcaaggtctggttccagaaccgaaggtgccgtgataagcagcggaaggagtcttcgaggcttcaggccgtgaacagaaaactgagcgccatgaacaagctgctcatggaagagaatgagcgtctccagaagcaggtctcccagttggttcatgagaatgcatacatgaagcaacagctgcagaatccttcgttggccaatgatacaagttgtgagtcaaatgtgaccactcctccaaaccctctacgggatgcaagttacccagctggactccttgcaat

SEQ ID NO: 3218 - DNA, 438 bp, Triticum aestivum
  Clone ID: LIB103-027-Q1-E1-G4
gggtcgacggcagcttgagagtaagagccgtagttcttggacgagtacttggcatatttgaagtcatcttgcacttgtcgctcggccttggtcgcttgatgaactagatcgagaaggttggagtatggttggaagtcggcaatccgcttgattgggtggttgagaccgttcaagaagcgtgccattgtttgctcgtcgtcttccttgacattggatgtatcatggcaatctccatttcttggtagtattcttccaccgtcttcgtgccttgcttgaggagttgcaacttcttgaagagatcatgggtgcagtgtgtaggcacgaagcgagctctcatgacatccttcatttacgtccaagttgtgattggtggttcgcctcttgtatgccgtcgctagatcacttgttcccaccaaatgagggtgtagtcttgaaact

SEQ ID NO: 3219 - DNA, 409 bp, Triticum aestivum
  Clone ID: LIB103-027-Q1-E1-H10
acgggggatatggaagatgtacatacttagcaagaagatttactagcataaaaaaaggaatccaacaacaaaaatgaactgtacaaaaacacacaagaaaattaaagccatctcgcgaagtaagagccggatgaacggtgtcaccacgtgtgggattatgcacgtgttacgtctcatcgtaaaagggggcgcccaaagggttccagctttaagttcccttacaggccactttcaaccccctctaagggtgcccccaatttccattcccgggccgtcctttttacacttccgtacggggaaaaccccgggctttcccaattttaacccccttggggaaaatccccctttcccaaggtgggttattcccaaaaaggcccccccgttttccccttcccaaaattttgccccc

SEQ ID NO: 3220 - DNA, 444 bp, Triticum aestivum
  Clone ID: LIB103-027-Q1-E1-H11
attcgcgcggtcgacgggcctatggagtgaaatgtgtgtatatgtgacaaaaagctacatgctaaatagggttttcacgaagagattgtgtgtgcgagatagagagcgatgtgcgagccttgaggtgggcaggagccgggtgagggtgtcaaaatgtgtgtgttgatgcatgtgttacatgcaatcgtgcgagggacggacgaattgagagagatggttgttctgttacggattctttcacgcacacacacacacacacacacacacacaagtaaaatagaagaccgttctctaatgtatacacaacatatcggcatctgtctattctcactcatgcatgatcatttgcacattcacacctctctatgtctctatcacacacacaccgtctccacattttccttccgccacaacacacatatggacacatacacacattctctc

SEQ ID NO: 3221 - DNA, 380 bp, Triticum aestivum
  unsure at all n locations
  Clone ID: LIB103-027-Q1-E1-H12
ccgtgcggtggtagcactcaaggcaacaaatggcatcgtcgcagaagccacagaggaggagctcatgaacgcaatgtccctcgctgaccgcaccggcatgtttgcctgcccgcacaccggggtcgctctcgcggcgctcttcaagcttcgggaagagggcaccatcggggcaaacgaccgcacggtggtcgtcagcacggcgcacggcctcaagttctcccagtccangatcgactaccatgattcagagattgaggacatggcctgcaagttagccaacccaacggtcaacgttaaaggcgactttggcgccgtcatggacgtcctcaagaagaggctcaaaggtaagctttgagcatgccctcctgctgctgctgctg

SEQ ID NO: 3222 - DNA, 444 bp, Triticum aestivum
  Clone ID: LIB103-027-Q1-E1-H2
gggtcgacggcacatctgaaagcaagtctttgcacgaatcaatcagggagaggcacgtctctcacccaacaccgaatccaacagcatacaacgaagctgatcactgtgggtggtcaacagaggaagagatacaagccgatctgaaaaaactggacgccatggaacaggatcaacaagttacttctctccctcaacctggagccatgcatgtggaactcgataactcgatccgcacaaattcggtcaaagctcacagtgccaaattaagctcttacaataacttgaaaaacagtgttccttcgtcgacgatatccaagatgcatccgtgggtggacaatgctttaagcatcacatggaagctatgcaaggagattatggatcacaagcagcatattaataagctcgaacaagataatcgcaatctgagagacatcattgccaaaa

SEQ ID NO: 3223 - DNA, 426 bp, Triticum aestivum
  Clone ID: LIB103-027-Q1-E1-H5
gggtccacgggctgaacttgatgctggtgacgagaaaattagagagttgatatcagttttagaccaaaggaaggatgaatcaattgaacgcacatttaaaggagttgcaaggcacttccgcgaagtgttctctgaattagtgcaaggtggtcacggatacctggttatgatgaagaaaaaggatggtgatgctgccgatgacgacatggatgaggacgcgcctcgtgaagcagatcctgaagggaggatagagaagtatattggtgtgaaagtcaaagtttccttcactggcaagggagaaactcaatccatgaagcagttgtctggagggcagaagacagtggtggcattaacactgattttcgctatccaacgatgtgacgcagctccgttctacctgtttgatgagattgatgctgctctgga

SEQ ID NO: 3224 - DNA, 448 bp, Triticum aestivum
  Clone ID: LIB103-027-Q1-E1-H9
gtaccgtatcgacaattcgcgcggtccacggggaagcaggtagcacccggacatcggcatctcctccaaggccatgtccatcatgaactccttcatcaacgacatctttgagaagctcgccggcgagtcggccaagctcgcgaggtacaacaagaagcccaccatcacctctagggagatccagacctccgtccgcctcgtcctccccggcgagctcgccaagcacgctgtctccgagggcaccaaggccgtcaccaagttcacatcctcctagactgacgacgcgccgcttgttgtgacagatgtagttggctgctgttagtcgctgactctgcttatgtatctgcaagtagtggtaggagtggtcgtctgtgtgccaacgcttcgttggctaattggttgtcagaactgaagttgctaatctagctgaatgtaactgtttcaaaag

SEQ ID NO: 3225 - DNA, 290 bp, Triticum aestivum
  Clone ID: LIB103-028-Q1-E1-A2
gggtcgagcggggccagcaccatacccagcaaccacttcattgcgccgttggctgtgtccttcctcacgctgacataacatttgagaccacatgaattagtcaacatcagatacgggcggagcctggattcataaatcgctgaggcgacattacatctatgttcccctagttatgaggctcgataatactgttttttttgtatcccctgtgatttgtggcgatgaggtaattaacacattacaacatttgcaccgccagaatgataccaaggtacctacacgtgcgccta

SEQ ID NO: 3226 - DNA, 352 bp, Triticum aestivum
  Clone ID: LIB103-028-Q1-E1-A3
ggatacacaagcagttggtgtattttaattgagtttacttcaagtcctctacaaccggatattaaccaattcccatatgccacataaccgcaagcacggctctcaaaagtttaaaccctacaggggtatcccaacttagcccatgacaaactcacgatccacgaagacaatcctccatcgcgggaccctccgatcagactcggaatcccggtgcacaagacatttcgacaatggaaaaacaagtccagcaagacctctcgacgtgctaacagcctgatagtacctgcgcgtatctcgtctcaggccactacagatgagctatgcatccaggtgccaaaataccccaattaag

SEQ ID NO: 3227 - DNA, 406 bp, Triticum aestivum
  Clone ID: LIB103-028-Q1-E1-A5
tcccgggccgacgggacactcaatcagcttctgccaacaattggactccttccaacgggggcggccacgcttcaagctactcaaaggaggctgacccaaccacagcttgaaagctgaagcactaaccacaacatcaacatccaaccttttgacatttgcaatcccagttttcacattaccatcctttcccacctctttttgcttgtggtattttcggagtctgtagctatttagtacttcctatgtcgtgggctaccagaggctccttagaggctgcaaattttgtcgctgagtagaagcaagggaaccgacggagggtgctcccagtttctcctgagcctatatgcgtgtattaactgaaagccgtggaaggcataactcgtggggaactctctgagattttgga

SEQ ID NO: 3228 - DNA, 173 bp, Triticum aestivum
  Clone ID: LIB103-028-Q1-E1-A7
tgaactacgactgccagcgactcctttgacgtggcgcacacgagtccacatattcaccacatcaatacaccactatggatccgctcccgtctccctacgagaacgccatccatagcactcacgcttatcttgcgtattttagagtatccactttcacttgtctatgaactgat

SEQ ID NO: 3229 - DNA, 273 bp, Triticum aestivum
  Clone ID: LIB103-028-Q1-E1-D11
gggtcgacgggccatggtgtgggaggggcgagagcccctccgagattggatctgtctctctgtttctccgttcttagatctggcccttcaccgtttcttttataaccggagatccgtaactccgattgggcttaattttggacacgatctctatccggaaattagctttgttgcggcgaaagaatggctccaactgccttacggggtggccaccacggtcagtggcccgccagaaccctggaggtcgcccgctgctcctggccccctcaaggc

SEQ ID NO: 3230 - DNA, 416 bp, Triticum aestivum
  Clone ID: LIB103-028-Q1-E1-D4
gagctggatcgtgtccggcaaggaggagtacaaaggtgtatggaagcacgcgaagagtgatggccatgaagattatggtctccttgttagcgagccagccaggaaatatgccataatcaaagaacttgattacctggttactttgaagggtgagacagttgtcctgcagtttgaagtgaggcttcagaatggccttgagtgtggaggtgcttatatcaagtacatccgtcctcaggctactggatggaacgccaaggactttgacaatgatactccgtacacaattatgtttggtcctgacaagtgtggttcaacgaacaaggttcacttcatcctgaagcacaagaaccctaagactggcaaatatgttgaacatcacattaagtccccaacctctgtcccatatgacaaactct

SEQ ID NO: 3231 - DNA, 345 bp, Triticum aestivum
  Clone ID: LIB103-028-Q1-E1-E1
gggtcgaggcgcactggaagcggaacatcaccgacaagaggctcaagatttgcttcgagaagttctgcttctgggagagcatgctgtggcactggggcgaggcccccaacaacgcgacgaagaaggccccgacgccggcgctgcccgccgcgaccctgtcgagctcgtgagatgctgtgtagatatcctcccccgcgaaattttagcataccagatgatgatacagcagacccccccagtctcctccattccatacaatacacaatagcgacagctttgtaaaggtagccatgcatgctgctcctaggcctttcgttcccaacagctatacattttgtttgctgc

SEQ ID NO: 3232 - DNA, 395 bp, Triticum aestivum
  Clone ID: LIB103-028-Q1-E1-E3
ccaagacatacaaagttggcgaacttgttctacgcttgccggagaagaaaaaggacaaactcaagcccaaatgggagggtcccttcataatcgacgaagttcttaccggcaaagcgtaccgtctttgggatgcatcggacaatcgcctagagccgaacccctggaacgcggccagactccgagggttttatgcctaccgccgaattctttgttcgtccccttctcccctatagtttccattactttttctctcttttccacctttatttttttcgctttaaagctctcatacggctcgaccgaacaccgctgacgtagacatctttacatatgtacgtccattatacccggggacttctttacgagaagcttgttcacactattttttccgagcg

SEQ ID NO: 3233 - DNA, 406 bp, Triticum aestivum
  unsure at all n locations
  Clone ID: LIB103-028-Q1-E1-E4
cgggccgacgggcattgggtcgttcaaggagcagttgatgtggacattggagccaatccctctgctgagggtggtggtgatgatgagggtgtcgatgaccaggccgtgaaggtggttgacattgttgacaccttccgtcttcaggagcaacctgcttttgacaagaagcagtttatctctcacatgaagcgctacatcaagaacctctctgccaagcttgaaggggatgacctagatgttttcaagaagaatgttgagtctgccacaaagtatcttcttagcaagctcaaggaccttcagttctttgttggcgagagcatgcatgatgatggcggcgtggtgttcgcctactacaagganggagctgctgattcaactttcctgtactttgcacatgggctgaaag

SEQ ID NO: 3234 - DNA, 436 bp, Triticum aestivum
  Clone ID: LIB103-028-Q1-E1-E6
cgggccgacgggcaagctcacaccaatgaggttagcaagggcaaaccactagattgggtttcaggacaaccagtcacagatgagcatggacgccttcagattataaagaatgatgacctcgaagagctccaagaactcggttctggaacttttggaactgtatatcatggtaaatggaggggctctgatgttgcaataaaaagaatcaatgacagatgttttgctgggaagccatctgagcaagaaaaaatgcggaatgacttctggaatgaagcatctaaccttgctgatctgcaccaccccaatgttgtggccttttatggtgttgttctagatgggcctggggggtccattgcaacggttacagaatacatggttaatggctcacttaggacggctttgctgaagaattccaagagcctggatcgacgcaaac

SEQ ID NO: 3235 - DNA, 403 bp, Triticum aestivum
  Clone ID: LIB103-028-Q1-E1-F10
gggtcgacgggcgcaggtttgggcagctggagcaacaagaccagaggttgaagacgcggcttggctgttggattaacatccaacggtcagtgcagctagaataatttattgactaagttggcaaagccctgcgtacgcgttaacttagtaggcccacaagccagcctccaaatatggtgggtcccagctagcagggggaatcaatttttttcgcgtaataaggtggcacttccttgcatgcgaagatgttttctggttttttttctttttttctttttcgagttagaataaaaagaaaacaatttaacatctttgatacaatctatattttcatgaaaaggatcataataaagctggcgggtcccagctgtcagggagaggaaactttttatttccgcataat

SEQ ID NO: 3236 - DNA, 405 bp, Triticum aestivum
  Clone ID: LIB103-028-Q1-E1-F3
gggtcgacgggtttgctaatataattggatcttatgatgtttctccccctctaccttcttctaatggattgagttttccctttgaagttatcttatcggattgagtctttaaggatttgagaacactttatgtatgtcttgcatgtgcttatctgtggtgacaatggggtattcatgtgatctacttgatgtatgttttggtgatcaacttgcgggttctgtgaccttgtgaacttatgcataggggttggcacacattttcttcttgactcttcggtagaaactttgggccactctttgaagtactttgtgttggtttgaatagatgaatctgagattgtgtgatgcatatcgcataatcaaacccgcggataattgtggtgacattgaagtatctaagtgaca

SEQ ID NO: 3237 - DNA, 411 bp, Triticum aestivum
  Clone ID: LIB103-028-Q1-E1-F4
gaggataaagaaaacgaagaagatgaagaagaagaagaagaagaagacgacgaagaagaagaagttgaagaagaagaagacgaagaagaatgaagaagaagatgaagaagaagacgaagacgaagaagatgaagaagaagaataagaagaagaagaagaagatgaagcagaagaatctgaagatgatgaagaagatgtagtcgaatacgatgacgagttagctgacgatcaagatgaatccgttgcgcataacttgtcgacggcgatgctgaggacttcgactcaggtttgcaactggacgattacgctgaccaggaccatgacgtttgagacgaatttgatccttcgtacgccgattggcagcccgaccaatacttcgttcataacacctcctctgactcggtccggtct

SEQ ID NO: 3238 - DNA, 382 bp, Triticum aestivum
  Clone ID: LIB103-028-Q1-E1-G12
gggtcgacggggaagaacccaaggcggagaagcgggcgccggcgtccaaggaggccggcggcgaggggaagcagcggggcaggaagaagggcagcaaggccaagaagggcgtggagacgtacaagatctacatcttcaaggtgctcaagcaggtgcaccccgacgtgggcatctcctccaaggccatgtccatcatgaactccttcatcaacgacatcttcgagaagctcgccggcgagtccgccaagctggcgaggtacaacaagaagcccaccatcacgtcccgggagatccagacctccgtccgcctcgtcctccccggcgagctcgccaagcacgccgtctccgagggcaccaaggccgtcaccaagttcacctcatc

SEQ ID NO: 3239 - DNA, 395 bp, Triticum aestivum
  Clone ID: LIB103-028-Q1-E1-G3
gggtcgacgggtctcataactatagtccacgaaaaagccaaaaaaaattagggttagttcatcccatccgaaccaatctgagccttgcataatcttttctgtatttgctttgttgaatttgcggttgcatcgtcgtgtccagttgctggtcttagcgtctagtcttttagagtttcgagttctgttcaaaggttgtcacgtcgccgctgccatatatcaccaccgcatcatcatcgtcgctgttgtcatataccaccaccacatattcaccgccaatccgaatccatatacgccaccacagatccgccgccatcacgccaatccgagttcacctgcaacatatattcgccacctgtccgtgttccaccagatttatctccgccaccagtccgagt

SEQ ID NO: 3240 - DNA, 418 bp, Triticum aestivum
  Clone ID: LIB103-028-Q1-E1-G4
gggccgacggtaagcagaagatcatgttcgcgctgacctccatcaagggtgtgggccgccgcttctccaacatcgtctgcaagaaggccgacatcgacatgaacaagagggctggagagctttccgcggaggagatggaccgcctgatggcggtggtgcacaacccgcgccagttcaaggtgccggactggttcctcaacaggaagaaggattataaggacggcaggttctcccaggtcgtctccaacgccgtggacatgaagctcagggatgaccttgagaggctcaagaagatcaggaaccatcgtggtcttcgtcactactggggcgtgcgcgtccgtggtcagcacacaaagactaccggcaggagaggaaagactgttggtgtctccaagaagcgataagctgcttcacaaag

SEQ ID NO: 3241 - DNA, 445 bp, Triticum aestivum
  Clone ID: LIB103-028-Q1-E1-G8
cccgggccgacggggtgctcaacaaaggtgaaattcatatggatcaaccagggaatgttggtgcgaataatgcatctgggatccaagcattggaaataagatcctgcaaccagtgcgccattttggagtctggcttactaagacgccctatgcgttctcgaggattgcttgctcgcccctacatccattcaatgcttgccatagcagcagtgtgtgtctgtgtctgtgtattcatgcgagctttgctgcggtttaattctggtaggtccttcaagtgggagaggttggatttcggtcccacatagacattggaggatgccttattacttagccgcgtgatgttattaaggaaataccttacaagaaccagagggtgtggaaccagattgcttttaacctttccagtttccatggaactctgcccatggacatggattatgaaatg

SEQ ID NO: 3242 - DNA, 388 bp, Triticum aestivum
  Clone ID: LIB103-028-Q1-E1-H1
gggtcgacggggtaacgcaccaacacatgtccattaacgatgtgtgggtcaatgaacccaacatcatggatgttccttactctgcattccttaatcttcattctgcatgtataatagcggacacaacaatatagttaggacatatatatagtgcaggcaatatgaacgagatggggtagaaattaataaatcacttacagaacgtagcaactgatgatagatttatcgagctcgcgcagattgaaaagctggaacaattcactcagttcaatttatacatagtaatgtttgaagtgatgctcatgtctaacttccgcataaatatattctttggcgtttttattttgtatgtaacccttgtaccatttcagcagacctttcatttgtg

SEQ ID NO: 3243 - DNA, 416 bp, Triticum aestivum
  Clone ID: LIB103-028-Q1-E1-H10
gggtcgacggcaatacggatattgatgaggatataggcctgggggtcacccgccaggagggccgggttactccaaggatcattaccagaagcccggagttaagtttcaggataatgggccagagatgggctgagacccggatatagcttaaagcctgtagttacaatcattgttatagtagacttgtagtgtaaggcaagtattgtttagagtccaagccggacactcttatgagccggccggactctaagggctgctgggcgtcagcctccttatataaagggacgacccggcggcggtttggggacaacaatctctccgagagccgggcatagctgtttagctccctggcgatcgtaaccctaatcaataacacctcgaactggacgtaagcttttaccttcaacctaaggggg

SEQ ID NO: 3244 - DNA, 414 bp, Triticum aestivum
  Clone ID: LIB103-028-Q1-E1-H2
gggtcgaggcacttcgcgaatggaagcagtattcacatctagcagcacggcaacagatcggttttttttctttttcttttcctgcatgtgttcttctttccttttttttattttctgtagtatggatctatctctctgatcaagcaagaagagatcggcagctccagcgacacgacgagccgtttccgggtttttatgaagggaactatttggggtcgcgcggaagcaaaattagctagggtttattagtgctgctctagttccgcttgctattcctttcgcttgttcgtttgtttctttaaggattttattatcaaggttgtaaggctggggatgtgcagctagcttcagattcaagcctgccgtctcgcctgcttgtacattgtaaaacagaaccgctgctctccagtgact

SEQ ID NO: 3245 - DNA, 138 bp, Triticum aestivum
  Clone ID: LIB103-028-Q1-E1-H3
aacgaacagcagggggcggtagaactccacatctggccgggtgatcagcatcatgtaatgcactgtgcctccgtgtcagatctctctcgttcgtcttcatttctgtaggattcattttatccacttattcagtcatgt

SEQ ID NO: 3246 - DNA, 390 bp, Triticum aestivum
  unsure at all n locations
  Clone ID: LIB103-028-Q1-E1-H4
ggcctgagtgcaccatgtgtcttaggacgcacatggcttattatgtaagccgagtgccctctcattgtgtttgccgacacggtggggttcccaactgctaccacatgtccaatataaaatgagtctttagctaccgcactcggcttatatataaaccagcacatgtcatttagttctttggcttctataagacgagtactttttctgggccatatggcttacgattttgtaagtcgagtgcttgaaataggtgaccgagttatacgtataatataagccgagcgcattggctcagagacacagcttatataatatacgtcgagtgcttttacctgngcagcccggcttatagtgggtaagcccattactgcactcggcttatatgccaag

SEQ ID NO: 3247 - DNA, 434 bp, Triticum aestivum
  Clone ID: LIB103-028-Q1-E1-H6
cccgggccgacgggtcaacttatcaacccagggaagtgttccatccttttttccgataattgcatgcagtcggtggcggatgaagtgaaacatattctggagattactcagcaggtttttgagcctaagtatttgggcttaccagtcccggaagggagaatgcacaaagggcagtttgagactactcaagaaagactacggaagaggcttgttgactggagcgagcagtacgtctcgtcaggcaacaaggagatcttgataaaggcagttgcgcaagcaataccaacctatgtcatgagtgttttccgcctccctgcctcggtgtgtgatgatctcacacagatgatgagacaatattggtgggggtggagaaaggcaaaaggaagatggcatggcttagttgggaaaagatgatgctaccaagagtatgggtg

SEQ ID NO: 3248 - DNA, 416 bp, Triticum aestivum
  unsure at all n locations
  Clone ID: LIB103-029-Q1-E1-A12
cggtccgagattcacgggtccacttcttctcccccagctgcggtggctgccgcgctctcaaccccaagattgcgcatttcgctgaccggaatccggacttgcggttcctgcaagtcaactacaaaaagcacaagtccatgtgctacagcctccatgtccatgtcctccctttcttcaggttctacangggagcccagggcagggtcagcagcttcagctgcacaaatgcaaccatcaagaagttcaaggacgccctcgcaaagcactcgccggacaggtgcagcctcggcccggcgcgggggctcgaggaggcggagctcttggctctggcggcaaacaaggacctggaattcacctacaacgagaagccgacgctggtgccgatcgccgaggctatccagatggaagctgcctcc

SEQ ID NO: 3249 - DNA, 415 bp, Triticum aestivum
  Clone ID: LIB103-029-Q1-E1-A2
ggtccagaatatcgggtcgacgacgaggggaaccgctcaagcggacgagaagagctcgaagaagaggggaacgcttcctcgcatggtacagccgcaagggtggaaataagatggcacatgattgggaaacaaaattgaggccattcgttgagcagtggagaacagcaagctcggttcactggcacgaggaggcgctctttgacctagctgcacacgaggcttacctatggtgtggtcacaaatgagattctgctacataccaagagctgaccctgaggacatggagacggctcagacttcagcttcggagacgcactacagttcttccgtgactagcgtcatagatcactcgggaatttgcaagcccagttgacgctggaggctcaagaagagactgccgcgatagttaaccgac

SEQ ID NO: 3250 - DNA, 383 bp, Triticum aestivum
  Clone ID: LIB103-029-Q1-E1-A3
gagggctggtccaatgtttattacatatggaccgtcgattggagcagcactttctgctctcaaagctccaaaagttagttatttttacatatggaccgtctattggagatgctctgagcagtagatatataagattagtcgggtgcacaacacccctttgttatggacacacatcccttttatggcaccaggaatatgcgtctgtatggcttcccaactttttttgttcacatcaatacagacacaagtgctcatatatgcacacatacactaaccctatcaatacacacacgaacaccctacccctatgagaacctccgagatactgaaccgacatatcatcttgagattttatgaagtcaccgtacgtgcctcatatttga

SEQ ID NO: 3251 - DNA, 423 bp, Triticum aestivum
  Clone ID: LIB103-029-Q1-E1-B10
gctcccacagaagactatatcgttggaagggtgcctccaccacatatatctccttttgtggacaacgataaagagggtcatatacctgactatgcagtgaccttggagggatataaatctgctggtcaaaaccaagttatgcctctgccaggtttaggcgatgaagatctgggcaattcgatagtagaggcaatatctgagcataatgaatttgctaaaaagaagaaggagttggagatgcaagagaagaaataccacgaggagctgaagatggaaattgagggaactactttctctaatttgtcaaataagaaggctgatagcgcagccgatgttgctgacgaagatgaggcccaggcagctattgaccaagctgagaaggatgctgatgacattgccaagtctgtcgtttccaggaggaag

SEQ ID NO: 3252 - DNA, 403 bp, Triticum aestivum
  Clone ID: LIB103-029-Q1-E1-B12
ggggctctagtgattcacttatatcctttatagtacggtggtggatttgttttaaagaaactattgatctctaatgcttcactcagattattttgagagtcattaatagcatggtaatttgcttaatgttaatatacttggtattcaagatatgtgaaactttcttttgagtgaattgaatactaagataagtttgatgcttgataattgttttgagatatggaggtgataatatcaaagtcatgctagttgggtgattatgaattcaaagaatgcttgtgttgaagtttgcaagtctcgtggcatgcatgtatggttaaagttgtgtaacaaatttgaaacatgaagtgtacctggcttgtgcatccttatgagtggcggtcggggacgagcgatggtcttt

SEQ ID NO: 3253 - DNA, 421 bp, Triticum aestivum
  Clone ID: LIB103-029-Q1-E1-B4
cgggtcgagggcgaacggcacaacactatacgttgttctctttgtcatcggtatgttacttgcccgagattcgatcgtcggtatccaatacctagttcaatctcgttaccggcaagtctctttactcattccgtaatacatcatctcgtaactaactcattagttatcatgcttgcaaggcttatagtgatgtgtattactgagagggcccagagatacctctccgacaatcggagtgacaaatcgtaatcttgatgtatgccaactcaacaagtaccatcaaaacacctgtagagcacctttatgatcacccagttacgttgtgacgtttggtagcacacaaagtgttcctcctgtattcggaagttgcataatctcatagtcataagaacatgtataagtcatgaagaaagcaacagca

SEQ ID NO: 3254 - DNA, 399 bp, Triticum aestivum
  Clone ID: LIB103-029-Q1-E1-B5
ccgggtcgacggggtgatccaatggctcatcttgtcaagcgcaaagatacagactttcttctcaatgacttgggagatgatgaaaagatgaaggaatctggatttatagttcctcaaaatgtacctgctcacagctggctgaagcgtggggtagatcctcctccaaaccgttatggcataaaaccaggccgtcattgggatggagtggaccgcagcaatggatacgagaaggacatgtacaagctaaagaatgacaagcaggccacggagcaggaggcctacctttggtccgtcgcagatatgtgagcgccgcagctgtcccaagaacatgtccgatggcatgctggctggatcagttgctgaggttgcccactgtgcctgaaaggaaacgaagcgatg

SEQ ID NO: 3255 - DNA, 414 bp, Triticum aestivum
  Clone ID: LIB103-029-Q1-E1-C1
ggggctcaaaacaattatcaagtataaaattgatcatggcatccaattcacttcctatgatagtttttattatacccaatttggatgcccatcattctaggaccaattttataaccatagcaaatagcatgctgttctaaaagactctcaaaataatatatgagagattaacaatttctacaaaatcaagccaccgccgtgctctaaaaagtataagtgaagtactagagcaaaactatctagctcaaaagatataagtgaagcacatagagtattctaataaattccaaacaagtgggtttctcccaaaaagtgcatgcagaaaggatgactgtggtaatctaaaaagcaaagactaatatcatacaatacactccaagccaaacacatatcatgtgacgaaataaaatatag

SEQ ID NO: 3256 - DNA, 405 bp, Triticum aestivum
  unsure at all n locations
  Clone ID: LIB103-029-Q1-E1-C10
gggattcagcttccttcaactgctcagtctaaacctcagattggtgaggtggtttctgttggaaagggaagaaccattggggatagcaaagtagaagtcggcattaaggttggggctcaggttgtatattcgaagtatgctggaatggaggtggagttgaatgattccaaccatctgatcctaaaagaggacgatatcataggtattctggagacagaggatgtgaaagacatgaagcctcttagcgaccgtgttcttatcaaggtagctgtagctgaagataaaactgctgggggcctgctgctgactaacagtgtccaggagaagccatctgttggaacggtggtcgctgtcggcccgggctatctggacgaggaaggcaagangatcccgtttccggtatcc

SEQ ID NO: 3257 - DNA, 383 bp, Triticum aestivum
  Clone ID: LIB103-029-Q1-E1-C11
ggcttcaatttaaatgggtttccttccacctttgattttttaatggccccttaattttgggttttaattgggtttcccaatttgaattggtttttccgttttccattggttcctttttggttcatcacaccttaacgttttttcagtacacagtcatctgaaacatttcttgtatacccggtgaacattttgacatacataattaacgttttctgagaaatgatattttctcagtctacttcttcttatacacactgtatactttgggtatatatctaatacatgtttagcagtgtgaaatacacgattagcattttttaatacattgtcaacaatttttctagacacattgaacattttttaaatgcttgactaacattttc

SEQ ID NO: 3258 - DNA, 426 bp, Triticum aestivum
  Clone ID: LIB103-029-Q1-E1-C12
cgggtccacgggggcccactgaccccgcagaaccctattcagcccccgcccgcatcgacgggacgctactccgccgccggcgatggaggacatcgaggacgtgctgggaccggccgggttttccggcggcggagctcctcccgggctccgcctacccctctccactgtcgccgtcaagcccaagcgcaggtcgtccaagctcgtgcagacgcagccccagcccgatgcccggatcccaggcacccagacgatatacgtcaagacattcgggtgctcacataaccagagtgacagtgagtacatgtcggggcagctctcggcgtttggatatgcaattactgaagagcctgaaggagctgatttgtggctaattaacacatgcactgtgaaaaatccaagtcaatctgccatgtcaactctcatatc

SEQ ID NO: 3259 - DNA, 434 bp, Triticum aestivum
  Clone ID: LIB103-029-Q1-E1-C4
gggtcgacggggagagccaggtgtctcatccggcaccgagatcaacgacaaacaatcatgttgacccctttgggccagcaacagaggaagagatggatgctgatttgatgaggatagatgccatggaagaggatcatgaagtcacttcccgcctccaagatggactcacaatgggagaagtgcagagctcatctattccaaactcggttatcccttccaatgttagatttctttcttatgagattatgaaaaagagtgtcactggttctcccgcggctatgcagcacccttgggtgcagggagctttggctgttacaggaaaactccgcaaggaaataatgaacctcaagcagcaagtcaacaagcttgaggaggaaaatcgtatcttgaagggcatcatcgccaagaacatcacaatcacatccccgaaaaga

SEQ ID NO: 3260 - DNA, 442 bp, Triticum aestivum
  unsure at all n locations
  Clone ID: LIB103-029-Q1-E1-C9
ggtccacggcgacccacgaagggcacacgagggtgggggagcgcctaccccctgggcgcgcctccctgcctcgtggccacctcgtcgcttccttgacgtccactccaagtctgctggattgcgtttgttccaaaaatcactctcccgaaggtttcattccgtttggattccgtttgatattccttttctgcgaaacactgaaataggcaaaaaaacagcaatttgcactgggcctttgggtagtaggttagtcccaaaaataatatagaagtgtataataaagcccattaaacatccaaaacagataatataatagcatggaacaatcaaaaattatagatactgtcgtggaattgtcacgtcagatgtcctcgtgcaaggacttantcgtggagccatcgcaactaagaagcttaaaggggtttaaacggacaaaggaaca

SEQ ID NO: 3261 - DNA, 438 bp, Triticum aestivum
  Clone ID: LIB103-029-Q1-E1-D10
caatttggggagaagcaatccagaaattggaattggaaacaaaacccaaggtgcttaactaaaacctttggaccttgaaagtggctcaaatggcttcactaaaaccttttggaccgtgaaaattttttggcccaattgcttcactaaaatcttttaaagcacggtggtggatttgttttaaagaaacttgatctctcatgcttcacttagattattttgagagtcgttaatagcatggtaatttgcttaatgttaatatacttggtgttcaagatatgtgaaactttattttgagcgtgttgactactaaaataagtttgatgcttgataattgttttgagatatggaggtaataatatcaaagtcatgctagttgagtagttgtgaatttgagacatacctgtgttgaagtttgtaagtcctgtaacaagcacgtat

SEQ ID NO: 3262 - DNA, 397 bp, Triticum aestivum
  Clone ID: LIB103-029-Q1-E1-D11
ggtccacggcgctgtgtgaagcacacccgttgcacgaaagcagcgaacggagcacgatgagcgtgcgcgcggggtgaccacgcgcccagtccttctagcagaggagtaagatgacaaggggggggggcgttggcgggctgggccaccaggtgagtgccagctacgttctcactctctctttctctgtttttctttttcgatttgatttcctctgttctgatttactttagccactaattcgtattaataaattctgtaggttattatatggcttgctaaaacatataaaaagccactcacgaacttccagaattattggagttacatttagtatataataaatattaatacacagcaaataagtattgggttaattcaaatggccaaaataaatgtt

SEQ ID NO: 3263 - DNA, 395 bp, Triticum aestivum
  Clone ID: LIB103-029-Q1-E1-D12
gccaacaaacgggtcgaccacaaggcctgcttcaggtgccaccactgcaagggcaccctcaagctcgcgaattacaactccttcgaaggagtgctctactgcaggcctcactttgaccagctcgtcaagaggaccggcagcctggacaagagcttcgaatgcactccaaaggttgtcaagccagaaaggaatgttgggaatgagaatgctactaaagtctcgagcgcatttgctggcaccagagagaaatgttttggatgcaccaagacggtctatccaattgagagggttactgtgaacaacaccatgtaccacaagagctgcttcaaatgctgccatggagggtgcacgatcagcccttcgaattacatcgcgcacgaaggaaagctcttctg

SEQ ID NO: 3264 - DNA, 432 bp, Triticum aestivum
  Clone ID: LIB103-029-Q1-E1-D2
gggtcgacgggttggaacagtacgtaagtaccgcatatgggaaggtatggtagattcatatggaataactttggggtttatggagtttggatgcacaagcagtagtcttgcttagtacaggtgaaggctagaaagagactgggaagcaaccaactagagagcgacaacagtcaagaacatgcattaaaattaattacaacgagtgcaagcatgagtaggatataatccaccatgaacataaatatcatgaacgatatgttaattttgtttctactgcatgtgtgaacatgtgccaagtcgattggtcgaatcattcaaatgaggataccaccctatcataccatatcacaaccattttaatagcatgttggcacgcaaggtaaaccattataaactcctagctaattaagcatggcataaacaactataatc

SEQ ID NO: 3265 - DNA, 383 bp, Triticum aestivum
  Clone ID: LIB103-029-Q1-E1-D4
tcgccgggattcagttcccggtgggacgtatacacaggcaactcaagcagagggtctcggctaatggccgtgtgggtgccactgctgctgtgtactctgcagcaatccttgagtaccttactgccgaggtccttgagctggccggcaacgctagcaaggatctcaaggtgaagcgtatcacccctcgccacctgcagcttgcgatccgtggagatgaggagctggacaccctcatcaagggcaccatcgctggtggtggtgtcatccctcacatccacaagtcactcatcaacaagacctccaaggagtgaatgaaatgcaataacgggtagttgttgtgtgttgtatcttcgtgatcccttgttatgttgtgctatctgtta

SEQ ID NO: 3266 - DNA, 250 bp, Triticum aestivum
  Clone ID: LIB103-029-Q1-E1-E10
gggtccacggcgatttgagtagggacattgaggatgatgatgatcaggcctgaaaagccattctggtatggtaatgtcaattgtattgtcaacattttttatataccattacttgtgcaagataccatcatgtgaccaataaacattgggttaattgcgctgcttatgtgatggatacgtgtgtaaactcaagtttgatgttataaagtggcatttggtaatgcatcattttgctatagttatatacaag

SEQ ID NO: 3267 - DNA, 407 bp, Triticum aestivum
  unsure at all n locations
  Clone ID: LIB103-029-Q1-E1-E11
ttttgataaagcattacataatttagaatttgttaaaatacccaatgtgcttcacttatatcttttgagctaagtaattttgctctatgtgcttcacttatatcttttgagcgttataattttgctctatgtgcttcacttagattttttagagcacggtggtggatttgttttaaagaaagtattgatctctcatgcttcacttaaattattttgagagtcttaatagcatggtaatttgcttaataataacatgcttggtattcaagatttgtgaaactttcttttgagtgtgttgaatactaagaaaagttggatgcttgataattgttttgagatgtggacgtagtaatatcaaagtcatgttagtanagtaattgtgaatttgagaagtgcttgagttaaaa

SEQ ID NO: 3268 - DNA, 289 bp, Triticum aestivum
  Clone ID: LIB103-029-Q1-E1-E12
aggatcatccggagatcgcgacgagtttagaatctgcttttactgtaacatttgcaaaacgtagaacaggatattgcggaattgaagtctgcaattaaggagcttgattcacaattgatgccaccatcagtgcaaacaagactattatcgcttgttccaacaattcactaggaatttacacgcttaaatactctggctgaagagatttataggcgggatagtccaaactgcatgaaaatgttgctgcagtcaattctactccatccagcattcataggaagatgctaat

SEQ ID NO: 3269 - DNA, 403 bp, Triticum aestivum
  Clone ID: LIB103-029-Q1-E1-E4
cgggtcgagcgcgtctccttgaccgtaaccccttgtgtgtttggaaatagtaaccgacgttcatcattcaccttaatcccaaaaccccctttttgcgtaaaggaatcaatctggtttctccatgccggatcaaaacctttcatacgcaaagcttgttaaaggaaacgccatttgactttatcatatgctttttcaaaatccactttaaaaactacgccatcaagttttttggagtggatttcatggagcgtttcatgcaagacaacaaccccttccaggatgtttctatcaggcatgaaagcagattgggacggctgaacaaccccttccaggatcgaagtttgtgaagtttgattttttttaatctagacgcactatattgtggaacggaggcagtggtact

SEQ ID NO: 3270 - DNA, 463 bp, Triticum aestivum
  unsure at all n locations
  Clone ID: LIB103-029-Q1-E1-E9
gcggtccgtacattcacgggtccacggcggctagcggatggcgctagggttcgtgcgagagtggaagaagagataatgaccgctgtgaagtgtgtatttataggtacaggggcggcactgcgttattacacaggtgcccctggcgattcgcatctgaggaatacgtggccatcatgcagaattttggggtttgttccacgttccacgcacacctggattgtcgggtggtcgttcctacttctccgggtttcatgtggaggaatgagcattgaaaatggacttaaggtttgtctctgtatcttcagctgacaaggacgcagagaagacattcgacagtttcaatataatgcatatgatttggagagatagagtttgagatagaaagcacagagaggttaaggtccgatcacattcacttagttcanaagattcaacaagaagacatagctataagtgaatgctg

SEQ ID NO: 3271 - DNA, 396 bp, Triticum aestivum
  Clone ID: LIB103-029-Q1-E1-F10
aataatttggaaatcccaaaccacaagggaaattgccttgggtaatgaaacaatcccaaatatgatggcatcaagaagggatataataaaaactttcatatagagtgcattgaatactaagagaagtttgatacttgataattgttttgaaatatggagatgttgaaattagagtcatgcaagttgattagttgtgaatttgagaaatacttgtgttcaagtttgtgattcccgcagcatgcacgtatggtcaaccgttatgtgatgaagtcggagcatgatttatttattgattgctttccttatgagtggcggtcggggacgagcgatggtcttttcctaccaatctatcaccctatgagcatgcacatagtactttgtttcgataactaatag

SEQ ID NO: 3272 - DNA, 384 bp, Triticum aestivum
  Clone ID: LIB103-029-Q1-E1-F12
taatcccaatttcaaaccagttttggaatttcaaatttccttaaaaaatacaattgttaagatggtcctccaataaactagttattttaactaaggacaacttaacaaatcgtaattggacaggccctattaggtgtagtttctgtgatcggaatgagacgatcaaacacctttttctagattgcccgctatccaaagttttatggcagacggtccatattacatttaatattactccaccgaattctgtcatcacgttatttgggacgtggcttaacaggatacagcctgacttggcgatacatatacgtgtacgagtttgtgcactgctgttgactgtatcgacctgcatatatgatttggtttttaacaggatatcacata

SEQ ID NO: 3273 - DNA, 359 bp, Triticum aestivum
  Clone ID: LIB103-029-Q1-E1-F3
cggtcgacgggagtcactaattgacgccgcctgcagattccagaagcctgatgaagccccgacttgtttagttcgctatttcctctgtagtttgaactcaatcgtggaacaaagttattcgcatatattgttggaaaaaaaaaaaagataaaaaaaaaaaaaaaaaaaaaaaaaaaaaaaaaaaaaaaaaaaaaaaaaaaaaaaaaaaaaaaaaaaaaaaaaaaaaagaaaaaaaaaaaaaaaaaaaaaaaaaaataaaaaaaaaaaaaaaataaaaaaaaaataaaaaaaaaaaacaaaaaaaaaaaaggggctaaaaaaaagtccaaaattaaattcagggtacgagaaattaaaaa

SEQ ID NO: 3274 - DNA, 383 bp, Triticum aestivum
  Clone ID: LIB103-029-Q1-E1-F4
cgggtcgaggggtcctcccaatctaaacccctaggagcatgcgcgtagtgcttagttttttatgacttatacatttttgcaataagtatatgagttctttatgactaatgttgagtccatggattatacgcactctcacccttccatcattgctagcctcttcggtaccatgcattgccctttctcaacttgacagttggtgcaaacttctccggtgcatccaaaccccgtgatacgatacactcttcacacataaacctccttatatcttcctcataacagccatcatacctatctactatggcatttcgatacccattccaatatatattgccatgcaacttccatcgttctgttcatcatcatgacacacattgtcattg

SEQ ID NO: 3275 - DNA, 345 bp, Triticum aestivum
  Clone ID: LIB103-029-Q1-E1-F9
attaaaaccaatgggttcaaccccggtaaaccttgggccaaaccttaataaaatttaataatctcatatcaagagccaagatatgtaacctgataaggttgtggaccaatgggatgacagtgacactgaaaactcctctggaagtgcatcatatcaagttgttccttacaagaatgcccaaggagaaaacaccttacctgtgctgtctaaaaaaaaggaaattcattattagtacatattctgtgcaatgtagtacttgccagaaatggagagttgtaccatccaaactgaaatatgagcaaatccgagagaatattatacaagttcctttttcttgcaaatatg

SEQ ID NO: 3276 - DNA, 415 bp, Triticum aestivum
  Clone ID: LIB103-029-Q1-E1-G11
atagatgaattggatgctatgatcaatttgttgcttgataattgttttgagatataaaggtagtaatgttagggtcatgctagtggataattatgaaattgataaatacttttgttgaagttggcaagtcccgtagcatgcacgtatggtaaaagttgtgtgacaaatttgttgcacgaggtgctcttttgattgtcttccttatgagtggcagtcggggacgagcgatggaactttttcctaccaatctatccctcttggggcatgtgtagcagtactttgcttcgagggcgaagtacatttttgcaataagtatatgagttctttatgactaatgtgagtccatggatatacgcatactcatccttccactttgctagcttttcttattaccgcgcatctctcgcgggtattg

SEQ ID NO: 3277 - DNA, 452 bp, Triticum aestivum
  Clone ID: LIB103-029-Q1-E1-G12
gtccacgggcatctatcattgcttgttatgcctagctaggggcgttaaacgatagcgcctgttgggaggcaacccaattttatttttattccttgttttttgctcctgcttagtaataaataaattatctagcctctgttttggttgtgtttttttgtgtttaattagtgtttgtgccaagtagaaccgttgggaagacttggggaaagtcttgttgaacttgctgtaaaaaacagaaactttagcgctcacgagaactgctgtcatttttatttggaaagtgatatttagttaattctttttgaagatgattaatagataaattcctcacgtccggaaatttattttataatttttggggttccagatcttgcgctagctacaaattactacactgttctgtttttgacagattctgttttgtgtgtgttgtttgcctattttgatgaatc

SEQ ID NO: 3278 - DNA, 376 bp, Triticum aestivum
  Clone ID: LIB103-029-Q1-E1-G3
gggtcgacgcgacatcaccagcagacaccaccgttcctccgattccacatctgctcgcagctcgaagaggatcgtcagccatgtccgggcgcggcaaatgaagcaagggactgggcaagggcggcgccaagcgccaccggaaggtgctgcgcgacaacatccagggcatcaccaagccggcgatccggcgcctggcgcggaggggcggcgtgaagcgcatctcggggttcatctacgaggagacccgcggcgtgctcaagatcttcctcgagaacgtcatccgcgacgccgtcacctacactgagcacgcccgccgcaagaccgtcaccgccatggacgtcgtctacgcgctcaagcgccagggccgtaccctcta

SEQ ID NO: 3279 - DNA, 385 bp, Triticum aestivum
  Clone ID: LIB103-029-Q1-E1-G4
gaagaacacaaagccgagaagcggctgccggcgggcaagacggcgtccaaggaggccggcggcgaggccaagacccggggcaggaagaagggcagcaaggccaagaagggcgtggagacgtacaagatctacatcttcaaggtgctgaagcaggtgcaccccgacatcggcatctcctccaaggccatgtccatcatgaactccttcatcaacgacatcttcgagaagctcgccggcgagtcggccaagctcgcgaggtacaacaagaagcccaccatcacctccagggagatccagacctccgtccgcctcgtcctccccggggagctcgccaagcacgccgtctccgaaggcaccaaggccgtcaccaagttcacctcctcct

SEQ ID NO: 3280 - DNA, 378 bp, Triticum aestivum
  Clone ID: LIB103-029-Q1-E1-G5
tgacgggatccgggacgttgctcaaaagaagaaggccatcaagaaatcgagggactctgtcaagaacaggaacaaggaggctcgccgtggagaggcggatcgcgtcatccccaccttgaaaccgaagcatctcttctctggaaaacgaggagttggaaagacccagaggcgataaaccagtcaatgtggacgttgctgcttgcaatcactcgatcaggaactattggatcactgccatttttcgtgctgggcatcgggggaggcttcagtgtcaatctggcagctggagatactactatctattgcaattttatttttatctggcatttactctgtgttccgctttgtttgttagactacgttgttgttgaactatat

SEQ ID NO: 3281 - DNA, 402 bp, Triticum aestivum
  Clone ID: LIB103-029-Q1-E1-G8
gacggggaaaagaagaaatccagcgagaacgtcaaggtcatctacgcccgcgccaagcagtacgccgaggagtacgatgcccaggacaaggagttggttcagcttaagcgtgaggcccggatgaagggtgggttctatgtcagtcctgaggctaagctgctgtttgttgtcagaatcagaggtatcaatgccatgcacccaaagaccaagaagattttgcagctgttgcgtttgagacagatattcaatggagtgttcctgaaggttaacaaggccaccatcaacatgctccgcagggtcgagccatatgttgcatatgggtacccgaacctgaagagtgtgagggagttgatctacaaaagaggttatggcaagctcaacaagcaaaggattccctttgac

SEQ ID NO: 3282 - DNA, 386 bp, Triticum aestivum
  Clone ID: LIB103-029-Q1-E1-H1
gggtcgacgggagcaaggtagcggaggtgcagatcacgacgctgatcgagctgctgatgcggcacgcggtgaagctggagagcatacctgccgacgccgacacctcctcgcagaagaacctccaggcgaagcgggtgcagaagtgcgtggaggcgctggacgtgctcaaggtgtcgaacgcgcggctgcagacggtgctggtgaccaccaagtgggagacgttcgacaacagccccccggtcaccaccaagtgggagatcttcgactgatttaagcagcagcagggcagcagcagcagagattttttctttatacagaagagtgtccatttcgttcgtttcgtgccgtcagttttggtgtcttgttccttgcccattattcgtttc

SEQ ID NO: 3283 - DNA, 381 bp, Triticum aestivum
  Clone ID: LIB103-029-Q1-E1-H10
ctgccttctctccggcgccgccgcagccatggtgaattactcaacggttcccgccaatcccaccaattccgccaaggccatgggccgggacctgcgtgttcatttcaagaacactagggaaacagcgcttgccctgaggaagatgtcgctcaacaaggccaagaggtaccttgaggatgtgttggcacacatgcaagccatccccttccggaggtactgccgtggtgttggacgcacagcccaggtgaagaaccgtcagcccaatggtcagggacgctggcctgccaagtctgctaagttcgttctggatcttctaaagaacgctgagagcaatgctgaggtgaaaggtcctgatgttgatgctctctacatttcacacat

SEQ ID NO: 3284 - DNA, 358 bp, Triticum aestivum
  Clone ID: LIB103-029-Q1-E1-H11
tctcccgcgccgccgcagccatggtgaagtactcgacggatcccgcaaatcccaccaagtccgccaaggcgatgggccgggacctgcctgttcatttcaagaacactacggaaacagcgcttgccctgatgaagatgtcgctcatcaatgccaagaggtaccttgaggatgtgttggcacacatgcaagccatccccttccggacgtactgccgtggtgttggacgcacagcccacgtgaagaaccgtcagcctagtggtcacggacactggcctgccaagtctgctaagttcgttctggatcgtctaaggaacgctgacaccactgctgaggtgataggtcctgatgttgcagctct

SEQ ID NO: 3285 - DNA, 430 bp, Triticum aestivum
  Clone ID: LIB103-029-Q1-E1-H12
ttcatctttttaatatctttcatgggctgctgactctgttcatacaaacgacaaacttgtgtaaaatctatttcactgtcctgttgacttgtctgaccctgagtgaaattgtggttctgcggtgtgccataattttcttctggctaagttggcacggagcgcgtccaaggacgagacatctttcactctggggatatattttgtgaactcgtaagataagaaagagagtcgcaaaggtcgataaaatcacacacaaagaacatttttttaaactccaggatatttttggaaacacacgattgcgcgcggagaaggactattacatatcttacacgtgggcataattatacattacatcactcaggatatgcgtacataatcctgacatgttatttaaactagtgcactcctccagatcctacatgatgcg

SEQ ID NO: 3286 - DNA, 361 bp, Triticum aestivum
  Clone ID: LIB103-029-Q1-E1-H2
tcgcgggatgagcttcggcggcgccagctccgttgcggccggtgggaagcggccgttcgagtacgggaggacgcatgtggtgaggcccaagggcgcgcacaaggccaccatcgtctggctccacggcctcggcgacaatggagccagctggtctcaactgttggaaactcttccccttcctaatataaaatggatctgcccaactgcacctacgaggcctgtggcaatttttggtggattcccatctactgcatggtttgatgttgctgatctttcagaagattctcctgatgatgttgaggggctggattcctcagctgcacatgtagcaaatttattgtctaccgaacctgcagacatc

SEQ ID NO: 3287 - DNA, 406 bp, Triticum aestivum
  Clone ID: LIB103-029-Q1-E1-H3
gggtcgacgcgtgagaaaatccaacgtagtcaaccccttgaacttgtcgataacccttagcgacaagtcgagccttatatatggtcacattaccatccgcgtctgtcttcttcttaaagattcaattattttctatggctcgccgatcatcgggcaagtcagtcaaagtccatactttgttttcatacatggatcctatctcggattgcatggcttcaagccatttgttggaatccgggcccgccatcgcttcttcatagttcgaaggttcaccgttgtccaacaacatgatttccaggacagggttgccgtaccactctagtgcggaacgtgtccttgtggacctacgaagttcagcagtaacttgatccgaagcttcatgatcatcatcattaacttcctccct

SEQ ID NO: 3288 - DNA, 391 bp, Triticum aestivum
  Clone ID: LIB103-029-Q1-E1-H4
cgggtcgacagggatattgaacacggccaaaacacgaaatgcgccccgatgcaaatcaacttgcctgaaacctggcatgacacgcaaggtcattacattgaatgtacttgcaagctcacaacagacatacgcacgatggtagacaatatcatgataattaatcaagttaaattaatgcaagaaattactacaaatgcaaagctatgcaaagcaaccaaacagcgcatctagtcacacggactcgcttaccagacggttacctcataaccaaatggtgacctcaccggggtcagacctgaaaccaatcactcatgaacacctcgagtgttcaaggttcaccatgaaacaatgcaccacaacaattactagtttgcaagattaattataaaag

SEQ ID NO: 3289 - DNA, 325 bp, Triticum aestivum
  Clone ID: LIB103-029-Q1-E1-H6
tcggtggggggtgggaaaccaagttcgtcgtcttacgtctctcgttcccgctggatgtacgtcgggcgagagttccccgacaaggagatatatttcaatgagtttaggacatcgcctagaggtgagtgctggaagatgtccacggaactgaactccagaatctgtgcgtaatcaggttcgatggacgccgatgcacgcggtccataacctatggtcgagaccagtccaaggttcacgtagcacaagcctagcttgatgtcgggtctttgagcggctcgagcgttactaagtctgcggcttccgtggctgggttacgtttcctgtc

SEQ ID NO: 3290 - DNA, 425 bp, Triticum aestivum
  Clone ID: LIB103-030-Q1-E1-A10
gggccgaccgggcaagaaggaaaaaatgaaaaggaccccccggtcttatttataaggtgaaaggataagtgacaggcgtgaaaatcgaggagcccaaaagttggatatgtgacaaagcggtcgcctcgattatcggaggctcattaatgaaggtgaggtatattcaatttttaataacaggtgacgtcgtggcggtttattacgaacctggaagatgacgtcatggcgttttacaggatttatgtgaaggtgtggaaggaggaatttttctatgtgttgaagattgacatgaacaagttcaaatcaatctcgggcctaatgttggagatattactattaagtataaaccggccatgaagggccgggttatgctcacaatgagttagtcgagtttgaaacccatgaagacaagaagtatggcactt

SEQ ID NO: 3291 - DNA, 164 bp, Triticum aestivum
  Clone ID: LIB103-030-Q1-E1-A11
cgggccggccgggctctcagggtgaaagtgataacgagatcctaatgttagatttagtaaaattcacttaacccgaataaaagagagatcagagtccgagagtataggcaaggagtaaaagatcctaataccacccaatggcgaagtgggcccgtaagccacac

SEQ ID NO: 3292 - DNA, 202 bp, Triticum aestivum
  Clone ID: LIB103-030-Q1-E1-A12
attctgaatttccttccatgtatgccagcgtacatgtactacgtatgcactcattttctcttggatggcttggctaatggctatggatgaaagaatccattcaaaaatcatccactgggaacgtcctgtcgttacccaaacaaatatgtttgcaacacatctccctttcactagatgcctcatcagccaacaagtgcacacc

SEQ ID NO: 3293 - DNA, 416 bp, Triticum aestivum
  Clone ID: LIB103-030-Q1-E1-A2
gggtcgaggcaccatgtcaaggtaacaaagttcaaaggcgcggacgtcgtcgtcgagccgagcaccctgcacttcagcagcgcaaaccagaagctcgcctacaaggttacactgaggaccaaggccgctcagaagacacccgagtacggtgccctgtcatggagcgacggcgttcacgtagtccggagccccctggtcctcacatggctgccgccaatgtgagcttttctcctagtactgtatcgttgttctgccttagtcgagggcctgggagcagaagcagctgtgccccggcctcttggtaagcgaggttgatgaatcagttgcgtagcagcagccagctgcacaggactagcacttgccggaagaaagatgttgtgaagctccaactcaaaacaagcttttattccacaaat

SEQ ID NO: 3294 - DNA, 352 bp, Triticum aestivum
  unsure at all n locations
  Clone ID: LIB103-030-Q1-E1-A3
gggtcgacggcatggtctctggcaactcttgctctaactcgtgagagcttttgcttgggtcggggtggaacatcatcttcttcatcgtggccttcttcattgttggcgttgtcgttctcttgttgcggtggagaaggacgttgttgatgttcatcttggtgtgcttcctcattttcttcgtcttggtgtgtcacacttgtggatgcttctgtatcaactcttggttcaccttgtcatgaggtanaagcttccacttggatggacgacgtactctccttcaactccgttggacgaatcgtgccatagacaagtcttggattgcttccgagcgatctttatctcctacatcaat

SEQ ID NO: 3295 - DNA, 396 bp, Triticum aestivum
  Clone ID: LIB103-030-Q1-E1-A7
tcgacgggtcatccgcatagccaccaccgacttccgcaacctaacccattttgttcaccatagcattagtggttggttgagtactgatttgagtctcctaaggtgtttcggctacttagggataattgcttcttcatcaaccaccaccgccacttccgcataagcgtgcccaccatacacttccgccaccaccaacttaacccaattttgtttgagcttgtttgagttgtggcttgtgtctcctaaggtgtttcggctacttagggacggcaacttcaactcggagacgtatatagccatcattccacttccgcattgccaagtgcaaaccaccaccgcattcccgctaccaccatttgacatttgacatttgagattttgagttcccgggttttc

SEQ ID NO: 3296 - DNA, 404 bp, Triticum aestivum
  Clone ID: LIB103-030-Q1-E1-A9
gcccaacggggttagtaccattcaaaccaggcaatttagattcaaaaagaagaggaaaacctttaggaaaagtaaatgcgttggaaacttatcaacaaccatggaccgtggtgcttcaactctaccgtgggcatagaccctcctcggccgtgtcgtccgccaccgcgtaccatggggcttcaactggtgcttgggcatagtcgctcctgaaccgtgtcttcggccaccgtggagcatggggcttccactggtgtgtgggtgggagttccctctagggagactccggggcatgtacagccccgcttgtacgcgtggctagcatggcagaaactggagggaggttgtatcctaaggcaattcgttgaacccaagcgcggggacctcacaaagggccttacctccaa

SEQ ID NO: 3297 - DNA, 332 bp, Triticum aestivum
  Clone ID: LIB103-030-Q1-E1-B10
tcacggtctagaatatcccgggccgacgggtacctgtacatctacctcccatcgtacaatactcgatagaccattgctcatccaaccctcgaccatcgactgatcatccagcccgcaatatcacagggtcgtgtccatccacgattcgaccttctaacattcatccaaccctctaacataacactatgtcccgatcatcaagaccacttctacagcgcaccattcatcgaagtactcttcgcctgcattcctgaatattcagcctatctgacgccgtgataggatacagctagtacggatacgccggaaatcgatctatatgccttactttt

SEQ ID NO: 3298 - DNA, 368 bp, Triticum aestivum
  unsure at all n locations
  Clone ID: LIB103-030-Q1-E1-B11
gggccgaccgggttgccaaatcacaaacagttcattcgagtgaaccgtatgttgtatatcgcacaaaccttcatctggctgcncgtttcttttgttcctcctcatcacaaacaattcatcccagtgaaccgtatgctgtgtatcgcacacaccttcatctggctacccgtttcttttgttcctcctcatcgcaaacagttaattgaaatgaactgtatgcccttcatcacacacgcaactaaaaccttaaccgtgtttgatgcatccgtcatcgcaaacattttatacatttttgacggttttcatacaccactgtttgtgattattgcatcgcacacagtttctcgaaaggtctctgattatagtgt

SEQ ID NO: 3299 - DNA, 432 bp, Triticum aestivum
  unsure at all n locations
  Clone ID: LIB103-030-Q1-E1-B12
cgggccgacgggcactatcatttgatgaaaaaagaaagaaaaagaatccatatccaaattgcaagaaaaaggaagcaaaaataactgcttgggaaaacctgcagaaacanaagcagaggcagcaattcggaagttggagatgaagcttgaaaagaaaaggtcactatcgatggatagaattttgggcaaactacgttcctgctcaaaaagaaagcagaaggcatgcgcactacagtttctgtgagcggngatcagtgtgctgtcagtgaagatcagtgtgctgtgagggcaaccaagaaggcatccttgagaaggactagcaagcctttcagctgctgtttcacctaccatgctcgctagttgtgatatggttggtatctacaatgattgtagaaactttttgaacctttgcagctcaagtcagccgaccga

SEQ ID NO: 3300 - DNA, 363 bp, Triticum aestivum
  Clone ID: LIB103-030-Q1-E1-B9
cattttattgatcgctgcactacatgtcaaaaagctgagtcacgactcaatcctcatggtttatatatacctttgcctgtaactaatgttccttgggaggatctatctatggactttactttccgtttacctctaataaacaaggggatggatagcagatttgatgtcttcgatagattctccaaaatggaacactttataccacgacactagagcgatgagcctgtaaaggttgctgatttgtactttcatgaaattatacgcttgcatagtgtgccaaatactagtgtttcagatcataatactaaatttcttagccactttccgagatttcgatggcctacgttggggacaaaacggctt

SEQ ID NO: 3301 - DNA, 168 bp, Triticum aestivum
  Clone ID: LIB103-030-Q1-E1-C1
ccgggtcgacgggttccacacatcgtcctcaaccagacacatgaacggtaccaacccattccgatggaatggagccgtgacatttcattctactttattccccaatcaaacacaccctacatacatagccaacaaccgaaatttccaatggcaccatagtccggcaaa

SEQ ID NO: 3302 - DNA, 390 bp, Triticum aestivum
  unsure at all n locations
  Clone ID: LIB103-030-Q1-E1-C12
gacgggacactctatcatcatctgccaacaattggactccttccaacgggggctgccacgcttcaggcaactcaaaggaggctgaccaaacacagcttgaaagctgaagcactaaccacaacatcaacatccaaccttttgacatttgcaatcccagttttcacattaccatcctttcccacctctttttgcttgtggtattttcggagtctgtagctatttagtacttcctatgtcgtgggctaccagaggctccttanaggctgcaaattttgtcgctgagtagaagcaagggaacggacggagggtgctcccagtttctcctgagcctatatgcgtgtattaactgaaggccgtggaaggcanaactcgtggggagctctctgagat

SEQ ID NO: 3303 - DNA, 394 bp, Triticum aestivum
  Clone ID: LIB103-030-Q1-E1-C6
aatcacaatggaagtgcttgatattctcgtcccgatcacagaaactacacctagtacatcctgtccagttgcgcttaatcaaattatcctttgttaaaattacttgtttatgcacagaccacataaacactttaatcttcaaagggactttgactttccaaacatgtttggaattcggaataacactagagttgatgacattgatatacatctacttgaccgtgaagtctccagacctactaagcttccaacgcaactgatcaggctgatgagttaactgaacctccatcagtctactcactagatgaatccatgtttcccactggtcaccaacaagcaccctccgaaattgaatattaagagggattgagggactcctggattaaggggtttt

SEQ ID NO: 3304 - DNA, 420 bp, Triticum aestivum
  Clone ID: LIB103-030-Q1-E1-C9
ggtcagatatccgggtcgaccggattccattgtatgccatatagagattcgtgaggaagcggaggatccgaggaaggtaggtggaggctgggatacgccagagtggaagatcgtgcagcggcgctcgtcaccggagacggtgaagaaagagcctgtgccggcgattccgggtacttttctgctgatttcttagcaaggggggattggggaccgagggagggacctcatggaaagaatggaggaggtagggacacatcacagaaagagattgatgcctggtggtcgtctttcccgagtccggtcactgcgaagctagtaatcccatacaaaccagagagcccctacctgattcgctcctccacaagtagtttttcttttagaataatacatccagaagaagtaattggggggctgacagca

SEQ ID NO: 3305 - DNA, 443 bp, Triticum aestivum
  Clone ID: LIB103-030-Q1-E1-D10
ggtcagaatatccgggtcgacggggaagaagcccaaggcggagaagcgggcgccggcgaccaaggaagccggcggcgaggggaagacgaggggcatgaagaagggcagcaaggccaagaagggcgtggagacgtacaagatctacatcttcaaggtgctcaagcaggtgcacccggacatcggcatctcctccaaggccatgtccatcatgaactccttcatcaacgacatcttcgagaagctcgccggggagtccgccaagctcgcccgctacaacaagaagcccaccatcacgtcccgggagatccagacctccgtccgcctcgtcctccccggcgagctcgccaagcacgccgtctccgagggcaccaatgccgtcaccaagttcacctcctcgtagagtgctcctgctcctgtgtctcgtagttagctgtccgggtgtg

SEQ ID NO: 3306 - DNA, 171 bp, Triticum aestivum
  Clone ID: LIB103-030-Q1-E1-D11
cgggctcgacgggacggcaacgtagtcgtgaactagtcctgatagatggtacggatttggtcatgacaccgacgtcccaggacatgaatagggcaacactctacaagatgattttgtgagtcctcgattcttcggattcacagtacttcaacaatttctcctgaactcaag

SEQ ID NO: 3307 - DNA, 359 bp, Triticum aestivum
  Clone ID: LIB103-030-Q1-E1-D12
cgggtcgacgggaattgggaccaagagccttgcacgacctagggttagtttgaagctgccttgggacgtccttccacctccttggccgccgtcccttgcgcctatataggtacatccatctactagcgttttccttgggatttctttaattaaaagttagccatcgcagcgtcatgtacttcgtttgtgtccaccgagcagagcaagaccgcatatggatgcatacaatcatcaataattcagatatatttgcgacattcagattgctttatcatagtcttgctcgttcttcgattgcttggacgaatataccatcgtggtcaggctgaccgtgcttgcggcatcgtcagtaacctcag

SEQ ID NO: 3308 - DNA, 143 bp, Triticum aestivum
  Clone ID: LIB103-030-Q1-E1-D2
gggtcgacggggaggctgagctcaccgccagcgatgacggcgacggcgactacgacttcgccgaccacgactccgacgactcccccgagctcctctctcaccggcagcagcaaaattactgcatattgagtgaagcctggtat

SEQ ID NO: 3309 - DNA, 346 bp, Triticum aestivum
  Clone ID: LIB103-030-Q1-E1-D8
gtaaatggtgcacactttgccggtgcatccaaaccccgtgatatgagacgctctatcatacataaacctccttatatcttcctcaaaatagccaccatacctacctattatggcatttccatagcgattccgagatatattgccatgcaactttccaccgttccgttcatcatcatcatgacatacattacttttgacatactcccattgcatgatcatgtagttgacatcgtatttgtggcaaagccaccatgcataatttttcatacatgtcactcttgattcattgcaccatcccggtataccgccggaggtattcagatagagtcatagtttgtgctagttt

SEQ ID NO: 3310 - DNA, 340 bp, Triticum aestivum
  Clone ID: LIB103-030-Q1-E1-D9
tcgaggggataatgggactatttaggtagcccctggtggtgattgcgctcgcccgaattcggggcgcgtatgtgcctggccgggaaacggcccttcgttaatgcggaggaatcctacagattccggagagtcatcgggtggttgaccagtctcacgccatatcatgacagtcggttttcggctttctctactgaggtgctcgcctggccgaatcagggcacaatcgtagtagttctcctggtgccgccttagccgatagagcggaacataatgcgaccgaacacaagagccgggcaaaccaacatttgaccaaaatcatgactcggagctgatgcatata

SEQ ID NO: 3311 - DNA, 410 bp, Triticum aestivum
  Clone ID: LIB103-030-Q1-E1-E1
ggtcagaataccgggtcgacacaagcaatgagaaatacaaaaaggacggtatgatataattcacatatatgacgcttgcctaaacagcatggcattgcataattcacatacataatgccttgcaacaagataacattgcataattcacatatataatgtcttgcaacaagatggcattgcataattcacatatatgataattagacactaaacatgtggcattcacacaaagcatgtctaaactaagcaaatgacatagcaatgcaagataccatacacacaatatgagcaacataaccctgccaagttagggcatgcacctcgggggggggggatatgactggtcatctatctctgaatcctcctctgaggagctatcggtaaccagcaagacatgcgcttcgtcagat

SEQ ID NO: 3312 - DNA, 355 bp, Triticum aestivum
  Clone ID: LIB103-030-Q1-E1-E10
cggtctagaaatccgggtcgaccggtatgtggatcaaagagtaggagacagccctaccaaacacagacacacacagagagagaaagacacagagaaaggaaaaagttaggtctgtcaaaaagatcgtgacatgttatatacttgattccgtatacgtggaaagacaatacacaacatgtttgatgacacagctggagaaacatcgaccataagggaatgatctcatgggttcatggattgacacttttgtgaggtgggagagatggattggtaattttgtgcaccaaacataaggtcgcgggagatgtcaatcagccatcgtcacatcatcctgcgtcaacatgacaccgcattc

SEQ ID NO: 3313 - DNA, 410 bp, Triticum aestivum
  unsure at all n locations
  Clone ID: LIB103-030-Q1-E1-E12
cgggccgacggggatacaaaattgatcggttacagaagaaagatcgggagaggttgagacaaaagaaaaaataaaataggtttttaaacagggttctatctcctatacaacaaccaattctaacangtattactcctatatttcagactttgtgttaaattcgtggtccaatgtttggtgggaaaatcagaaatactatgcactgacgatagtttgcttgctgtgtaacctgtatcatcagtgtcccacagtatatgctgcttgcaacattttgagtgcagcatcaacatgtttcagctgccttttgtgcatcctggtgtcctgattgtcatgtacatcaattatcaacaaaacattccaattgtctttaagcatacattgttatgatcagatatatgcctttgaacttc

SEQ ID NO: 3314 - DNA, 374 bp, Triticum aestivum
  Clone ID: LIB103-030-Q1-E1-F10
ggtctagatatccgggtcgacgggctgaacatgatgctggtgacgacaaaattagagagttgagatcagttttagaccaaaggaaggatgaatcaattgaacgcacatttaaaggaattgcaaggcacttccgcgaagtgttctctgaattagtgcaaggtggtcacagatacatggttatgatgatgataaacgatggtgatgctggcgatgatgacatggatgaggacgtgcctcgtgaagcagatcctgaagggaggatagagaagtatattggtgtgaaagtcaacgtttccttcactggcaagggagaaactcagtccatgaagcagttgtctggaagagacaacacagtggtggcattaatacgaatc

SEQ ID NO: 3315 - DNA, 249 bp, Triticum aestivum
  Clone ID: LIB103-030-Q1-E1-F11
cgggtcgaccggaagctgatcgtaatcggcaaatcgagtctcgtcatctgaggtacggttgagatctagggaattctgtgtccagatggtcgctcctcacatagaatgggccaggaggtccgcgaggtcgttcctcgactattagaagttgctcttagacacatggatatccctctgatgggagaacctgactatggccacgaggatcatgcattgattgttaaacctgcagtcgctctagcctgtaac

SEQ ID NO: 3316 - DNA, 193 bp, Triticum aestivum
  Clone ID: LIB103-030-Q1-E1-F12
taagatgtttggttcgagttgaacgttcatagccttggctcgaaagcttcaagctcttatagaaattagtactgaaggccttttaaaatgagtcctgcataatagtgttgttcaatgggatgcacactgtttggtagtctgatcggctatccttggtgctgatttatgtactgatttcaacatcatatgacta

SEQ ID NO: 3317 - DNA, 242 bp, Triticum aestivum
  Clone ID: LIB103-030-Q1-E1-F4
gggtcgacgcgggccaggaacacatctctcctaagtggtctcaacctgccctatcactccgcgacaaagtaactgttgggggccgtctggaactcatgcccaccacaacctggatggagccacctatcatttctgcccccacatcagtatcacttgtgggtactctacaatccgaccctactttagtcagcacatgtatcacacattatgtatgtaattatctaccggtgctcaactcccta

SEQ ID NO: 3318 - DNA, 406 bp, Triticum aestivum
  Clone ID: LIB103-030-Q1-E1-G11
cgggccgaccgggaggaaaaagggaaaacactcaactagcaaggaatcggtcacacaagcgctagatcaaagaacacaaagagatacatgagatccaaagtcaacaaaggtaaggatacaaaggtaaccgatcttctccatgaggaggtcttgaatccacaaggggatcttcccacgaggggggatgtttcctatgaaatctagtgcaaatgaatcatatggaaaaattcctatggtttacaatcctacgaatcaaacaaccaagataggaaaaattcctaatgattagaatcctccaaaattcctttgagaatcctttgaatcaaagaagcccttaatctatttgatgattcatggaattgtgtgttgtaaagcataaagtaaaaacaaataatggcaatttaac

SEQ ID NO: 3319 - DNA, 375 bp, Triticum aestivum
  Clone ID: LIB103-030-Q1-E1-G12
gagagttcaagaaatttgtgttagttacaaattgctacagattgttctgtttttgacagattctgtttttcgtttttgtttgcttattttcatgcatctatggctagtatgatagtttatatcccatagagaagttggaatgcagtacgtttaataccaaaataagtaagtaatgacttcattatactaccttatgtggtggatttgttttatttcactaacggagcttataagatttcctgttgagttttgtgttgtgaagttttcaagttttgggtaaagcttttatggactatggtataaagggtggcaagagcctaagcttggggatgcctaacgcaccccaagatattcaagggtagccaatagcctaag

SEQ ID NO: 3320 - DNA, 403 bp, Triticum aestivum
  Clone ID: LIB103-030-Q1-E1-G8
gcccgggccgacggggccaattcccaatgatccaaccccggctccaaatggaaatatgcgtcctgcggtcagaaagggagagagcattcgcccaaattaagtatggactaaaccgatgtgccgacggcaaaccggcggttggagccttcccaattgcggtgccaacaaggcgcatttgcagttacacacgcatgtgctcatacgtgtacacctacctgcattgactcggatttcatttgctgcccgtttgtcagaaacgtttagtacatatttctgcagactgcaggtcgatgattattcatggttttgtgaggtgaccaactaaccgttggtggatgaggaacgtttacctgggcaagttcttccactgtgagaacatactgccccacatgtcatcgacact

SEQ ID NO: 3321 - DNA, 330 bp, Triticum aestivum
  Clone ID: LIB103-030-Q1-E1-G9
cgggtcgacgggatgatgcacgacctcatgccgactagtgttcataaatctcggcatatgggcatactggatggaaaacgcacgctaggaggcgaacacatcatatgtatcgacggatattctctcactgaaacacactatacagttctacataaatccgccttggtagctccgtaattggatgaacacaataatttgatacactccatacacccagagcggtctgatcactgcattatacgtgaacaagccaagagtttcgccagctggttgcagacatttaccatgcatgacacctataatgaatatgacatatacttgcagtcccaa

SEQ ID NO: 3322 - DNA, 400 bp, Triticum aestivum
  Clone ID: LIB103-030-Q1-E1-H12
ctcattttccccactcgcgaaccctaacttcgaccagcctctccctccagatcccctcccctcctctcgccaggagcagaacccacccgctcggaccgcgccgcgtaatcgccatggcgaatgaggaacccgttgatcccaagaagtatcttgaggagcggtgcaagccacagtgtgtaaagccactgtatgagtatgagaaatgtatcaagagagttgaggccgatgatactgggcacaagcactgcactgggcaatattttgactattggtcatgcatcgataaatgtgtagcaccaaagctctttgaaaagctgaaatgatattggggcgctactttcagtgagtcagcctggtcattgggcagaaccttgttcaagttgaaatatttgtcgagtct

SEQ ID NO: 3323 - DNA, 361 bp, Triticum aestivum
  Clone ID: LIB103-030-Q1-E1-H2
gaagggtctaggatacctagggtttatgatgtctcgttgtttttgcatgctagcaagtcactccgggataccactttgaagaattcgcttgtgttgaaagatcttattactactgctgctctgtagcctacctgtgataacgtcaaatgtcgctgattatggaatgccttttatcctgcacataaggcatacgtgtatccctaggctgcgagagcgggcgctccatatgatgcaagcttgtcgtagcctgctagcaaagtcctagcccttctacagggtcaccaaaattcaaggcattggccgtgcgttttacaacatcttgactggtaaagccctgtcattatggaacttattccccttg

SEQ ID NO: 3324 - DNA, 323 bp, Triticum aestivum
  Clone ID: LIB103-030-Q1-E1-H4
cagtaagtataacacccatagaaataaggaattagttcattacagtaccttgaagtggtcttttgttttcttttgctaacggagctcacgagttttctactttaagttttgtgttgtgaagttttcaagttttgggtaaagatttgatggattatggaacaaggagtggaaagagcctaaccttggggatgcccctggaacccgcaagataatctaaggacacctataagctaaagcttggggatgccccggaatgaatcccctccttcgtagacatctaccggtaactttacttggagctatagctgtattcaccacacgat

SEQ ID NO: 3325 - DNA, 392 bp, Triticum aestivum
  unsure at all n locations
  Clone ID: LIB103-030-Q1-E1-H9
cgggtcgaccgggacagatcttacgaaccatcctcctcgaagaactccagtgcttatctcctactcgcccctggcctaatccatccaatctctcggttcagaaggcgaggagggcgcggtgcctggtccagatctcgtggccgccatggcggagaagttcgcggagtcagcgaacaatgtaatcatcgaagaggtgaacaagggcctgaaccctggaatgatagtcctgcttgtggttgctaccaccctgctgcttttctttgttgggaactatgcgctgtacctgtatgcgcagaagacgctccctccgaagaagaagaagccagtctccaagaagaagctcaagagggaaaagctgaagcaaggggtttctgcnacaggggagtgaagag

SEQ ID NO: 3326 - DNA, 103 bp, Triticum aestivum
  Clone ID: LIB103-031-Q1-E1-A10
acggggatgaaaccaaggcggagaagcgggcgccggtgtccaaggaggccggcggcgaggggaatacgacgggcaggaagaaggggagctaggccattaagag

SEQ ID NO: 3327 - DNA, 134 bp, Triticum aestivum
  Clone ID: LIB103-031-Q1-E1-A12
ccgggagcacaatcaattctgaatttccttccatgttagccagggtaaatgtagtaagtatgcagtctttttctcttggatggcttggataatggctatggagaaagaactcatacaaaaaatagccaatgaaa

SEQ ID NO: 3328 - DNA, 286 bp, Triticum aestivum
  Clone ID: LIB103-031-Q1-E1-A9
ttagttacattaaaatcatgcaaattatagtccaagagaagaggaaaagcgttaggaaaagtagatgcgttggagacgtatcaaccagcatggagcgtggtgcttccactctatcgtgggcatacacgctcctcggccggtgtcatccgcgagcgcgtagcagggggcttccagtggtgcgtgagcatactcgctcctgagacgtgtcgtccgccagcttggagcatggggcttccactggtgtgtgggtgggagttccctcgagggagactccggggcatgtaga

SEQ ID NO: 3329 - DNA, 187 bp, Triticum aestivum
  Clone ID: LIB103-031-Q1-E1-B9
acgggtaacttaccacccatgtggtgatcctgggcatggatggtcctatgtagatagacaggcattcgagataccttcgttctttctagagtctgtgctcagagctattatctagggatgtgcttgtgtgtctgtaggacttgagtatcggatcgtatggatcctagactttttgaacatgttgtag

SEQ ID NO: 3330 - DNA, 219 bp, Triticum aestivum
  Clone ID: LIB103-031-Q1-E1-C10
acggggaagataccgtcagcacgacggcatggtgatgatcttgatgcactacagcagcacggcttcgcctaaactccgctacagtattatccaggactatggtggcacggggcaccgcacacggttaaggaacacatcacgtggatcaacttgtgtgtttctggggtgactctacctcagtacatgagggacccaccggtgagggggcctcctggcccg

SEQ ID NO: 3331 - DNA, 321 bp, Triticum aestivum
  Clone ID: LIB103-031-Q1-E1-D10
attcccgggcggacgggtatggcagctacattagcatcagagctcatgccctctgatgttgcaaaggcgttatggggcaccaccaagagttcctccaagataaataaagaagtccaggagcttttaggggttacactgagcaaggcccgagtcaagctgactgagaataccattttcagtcggatcgttacggactctaatggttcagatgcattcaatggtctctatgtcggatcgtttagtccatagggccccgaagttgtccagctccgtcgaaagtttggccattgggatgggactgatgacgtggagttgtgtcga

SEQ ID NO: 3332 - DNA, 166 bp, Triticum aestivum
  Clone ID: LIB103-031-Q1-E1-D9
cggggaattcagcgctcactatcatgtcgagcagagcaaggccaatcgctctgaggacaatcattttctcatttacggcggattgtctaacatcgatcatcttgcacacatcggtgcgtgcgccgctcagaactctaccgaggcatcccgatggatgcctcaaact

SEQ ID NO: 3333 - DNA, 290 bp, Triticum aestivum
  Clone ID: LIB103-031-Q1-E1-F10
gacggggtataggaagaagtggggtggtggtgtcatgggctccaagtcgcaagcgaagaccaaggccagggaaaggcttatcgcaaaggaggctgcgcagcggatgaactaagtttagcattgttgaaccatatctattcctcatccttgagtagtgtgcaagcatactgtggcagtttggctccagttttgaaagtcatttttgtttgtctgaaacatcttggaaagaacagtgtaagaatgaagtatttctgtttaatgccagttagtatttttgtcgaaaaaaagag

SEQ ID NO: 3334 - DNA, 419 bp, Triticum aestivum
  Clone ID: LIB103-031-Q1-E1-H10
gacgggcatcatattaatctcctactacttagttatttcctttgctatttactttgcctttattttactttgcatctttatcataaaaataccaaaaatattatcttatcatatctttcagatctcactctcgtaagtggccttatagggattgacaacccctatttgcattggtcgtgaggatttatttgttttgtgcaggtacgagggactcgcgcgtagcctcctactggattgataccttggttctcaaaaactgagggaaatacttacgctacttttctgcatcatcccttcctcttcggggaaaaccaacacagtgctcaagaggtagcaacttccatactactttgctactaaatactttgctgcaaatagtaagtctttcaagtgtggttggattgacaactcagctgcta

SEQ ID NO: 3335 - DNA, 167 bp, Triticum aestivum
  Clone ID: LIB103-031-Q1-E2-A1
agccatgttagactcaccgatcagttcctcagcctgaatagagaacgagatgctcgctgtatcggcacagtaagtgtcacagtttttgtggttacacacaacgttatcactgcacgtttcatcgtttcaactgttgctcctcccacttgcgcctccaccgatcttac

SEQ ID NO: 3336 - DNA, 284 bp, Triticum aestivum
  Clone ID: LIB103-031-Q1-E2-A12
cgggtcatggttgactatccacgtccgagtcgaccttcagatcgtggagctgttgtgctgtttaactgaactttccttgtcaacaaacaacaggtctcttgggactttcccttgtcgtggagtactagtcgaggggtcttactcttccctttcccttttttttccaatccagtcctcaatactcacggataaccatgctggccgtagctttaggtgagatgtagcagacgtactacttggtttagcacagtatatcacacgcgatcccagattgcttcttctcg

SEQ ID NO: 3337 - DNA, 363 bp, Triticum aestivum
  Clone ID: LIB103-031-Q1-E2-A2
gttggtggggctggctctgcctttttggaattctggggaagctcggagttcctttgcgtgatgccaaaggtccattaacgctgccacgtattctcaggtatatagatatgcgcacagtcctgatggcaaagttatagaatcgcactatcacatagggttatagcttgttgggtatgccacacaacacccatgttcaagtcactggtataaacttggattacaatcaagtacgacgtgctggacccattgagaatctacgtctcaaagtgtctggaattgaagacgaggatatcatggcaggtttcgtactttcaagtgttgctaatcctattggtgctttcactgaatttaatgcccagctgc

SEQ ID NO: 3338 - DNA, 375 bp, Triticum aestivum
  Clone ID: LIB103-031-Q1-E2-A5
agtcagtatatctcgatagaaccaattccaatccaggtagtgtgaacagaggatgtggaagttctgtttccttgccttgtcaagcatttcatctgacactctatctgtactatagctagatcaattcctaatcattcttccacgcgactttactccaaagaattttgccttcttagcttgactcgatctcacgatattggattgattggcacaccgcgcatctggcattcgcttctcctatctatctcttccaactaagctgatcactggaaaatatgtcctcctgcatgcaatcattccagagccaactacgacgatacctgatcttccactctgttcactggaggaaagactcgaaagtgaacaattcttcaa

SEQ ID NO: 3339 - DNA, 217 bp, Triticum aestivum
  Clone ID: LIB103-031-Q1-E2-A7
atccatatccatcggatctgggacctatgctatcatgacataaatcgtctccaatctcgcgctggcagccgtcgcaactcatgcttcttgtgcaccgattggatgtactggtggtggcagtcgttctacggcacagtgtctccctgagctctgagttgactggcggtagcatctgtagcatgtgttgaggaatctctcctgcatgaggtctccattc

SEQ ID NO: 3340 - DNA, 246 bp, Triticum aestivum
  Clone ID: LIB103-031-Q1-E2-A9
cagcagcactggtaactcaatgatggttgcgatctctcacaatatatatagtacttttatatgtgtcaactttaaggtttatatgtttgggctgtgcttttgtgatattttgggctgtcagtgctttgactgggttttaccatcccaatgtttggcattcaggtacgttttagcattacttctgcactcgtggtaagttaccttgccatgtcgcaacagtagttttgtctggtcagtggtgtttgt

SEQ ID NO: 3341 - DNA, 339 bp, Triticum aestivum
  Clone ID: LIB103-031-Q1-E2-B1
gaggtatgtacttttggatatgatgatattgtgctttagaaagccttggtttatatcaacgtctgggcagttcggatacatcaactcgagcatgatgtccttcgaccattggtcatcgattacgcgggcaccctctaggacatcctcaatatatcgctctggcttgcggtggtccttgccacctgagtggaccctcaattgcgacgatggcggccttcattttcgcgcagtgcatcttgacacgggcatgggccagacgcgcattttccatacatgacgaacggttgatcatgacaatttgggacagcgcgtcaacgagtcgctgcaccagaccaaaat

SEQ ID NO: 3342 - DNA, 216 bp, Triticum aestivum
  Clone ID: LIB103-031-Q1-E2-B12
ctttcggtttcgtgtcttgttccagttcctgttggcttttgtgttgtcttcttttcatgtttcgggtttagctgttttgggctatgcgcgtttggtctggcccgagcattggcctggctttgcgcatcgcgccgcagtgcatgctcggctagtcacgagcctagtcttggggatgcgccaggcctccgttctttctcctccgttcattggttcctt

SEQ ID NO: 3343 - DNA, 355 bp, Triticum aestivum
  Clone ID: LIB103-031-Q1-E2-B2
cttttggattctcatccgtttgtgcttttgttcgccttggtttattcgtcgtctgggcagttcggcttcatcggctcggtcatgctgtccttcgtgcattggccctctgttgcgcgggcaccctctaggacatcctcaatatagcgctctggattgcggtggtccttgcctccgggtgggccctcaactgccacgatggcggccttcattttcgcccagtgcatcttgatcaccggcttgggccagccgcgcactttctatacatgacgaccgcttgaccatgaccatttggtacacctcttcagcgagtcgctgcaccaggccaaaatatctgcttgcgacgggttcggctggc

SEQ ID NO: 3344 - DNA, 175 bp, Triticum aestivum
  Clone ID: LIB103-031-Q1-E2-B6
acgggaaactgtagtacggtccgtttggtttctcgcttgtcttcgtctttgtcagtcggcatgtgactttgggatgcttgttttcagattctggtttctactgaggttgtaagatattcttgtctactgcttgtggccgaatagtcgatcggatcgttttttgcttatttaggtg

SEQ ID NO: 3345 - DNA, 226 bp, Triticum aestivum
  Clone ID: LIB103-031-Q1-E2-B7
ctgcggttgctgcagcgctctcgattgcatcattgtgcaatgcggtatgtggtttccagccgtggtgttcctgtatgtcgattactaaaggcggaagtcgatgtggtatagactccatgtccatgtggtcgctttcttgatgttctacttaggtagccgagcgtagggtctgaaacttcatctgcacagttgcctacatcaagttcttcggcgatcctttcacaaa

SEQ ID NO: 3346 - DNA, 344 bp, Triticum aestivum
  Clone ID: LIB103-031-Q1-E2-B9
actagcaacccaagtggtgatcctggccatggagggccctatgtagatagacaggcttcgagataccttctttctttctagagtctgtactcagactagttgcttccgcatgtgcttgtatgtttgtatgacttgagtgtcgggtcatgtgacccctatctgtatgaacatgttatgtatggctatctggagcctttaaataagtacttgagttgtagagttttgttgtgatgccatgttgtatgtactcatatcgggcatattgtgtgtatgattgaaatgcttggtatgagtgggatccgacaatctagttgtgtaaccttggcagcttttcttatggggaa

SEQ ID NO: 3347 - DNA, 401 bp, Triticum aestivum
  Clone ID: LIB103-031-Q1-E2-C1
gacgggcacggacaaaggagaacagagcacctctcttcttccaggtcagtgagcagcatcaggaggaggagctcaagcacgaccaccaagaggcaccaccgcagcagcagactcgaaggagaccatatgcaaggcacctcctcttcggttgtgagagtgtccaggggtcatgggtgcggctaatgcctatgtctgtggctgcacttgacactgccctctctttaagggcacatatcattttttataactctgctatattttcccaagtctttattatcttgcctagccttgtcttgatatgtattgcttgatgctaattacccaagttagtgcatgatgttaaggataacctgagaacacttgcctaagtttataagatatgacatgtcacagttcaaaaa

SEQ ID NO: 3348 - DNA, 272 bp, Triticum aestivum
  unsure at all n locations
  Clone ID: LIB103-031-Q1-E2-C10
cggcgaagagtaacgtcagcacgacggcatggtgatgatcttgatgcactacagcagcagggcttcgcctaaactccgctacagtattatcgaggactatggtggcagggggcaccgcacacggctaaggaacagatcacgtggatcaacttgtgtgtttctggggtgcctctacctcagtacataaaggagccaagggggagggggcctccggtcaggaggagggcccangaggagtcctacncctcccgggagtncgactcccccccccc

SEQ ID NO: 3349 - DNA, 345 bp, Triticum aestivum
  Clone ID: LIB103-031-Q1-E2-C11
cggcgactgagtattacatctcaggaggttggtaccgtgctagctatctcaggttttggtgttttggtatatcaacttctgatcaacccgtcccttgcaaattaggctgggctagtcaagcaattcgtttcggcaccggtattatctaaacttctccttgcaacatatccattcatggctaacctatatggtgtggagctcaaagtactcatcaacatagcctcgcttcttaagaatatgtttgcggctacgattactattgcctgcaacattctgcagaacacagcggtggcacaagaacaaaggggtgtcgcaaatggtatatctgtgactctgatgtcaatc

SEQ ID NO: 3350 - DNA, 132 bp, Triticum aestivum
  Clone ID: LIB103-031-Q1-E2-C6
gtgggtttgtttttcctgatgtgccttttcatgatgattttgtttttgttcttctttaggttgtccccggttccttgtatcctgtgcctcggcttgctgtcggggctgtgttgttgtttcgattttgtgggg

SEQ ID NO: 3351 - DNA, 250 bp, Triticum aestivum
  Clone ID: LIB103-031-Q1-E2-C7
gatggcatcagtgactatatctaattctgaggacgatgagatctatatgtatcatggttgttcctcgctcctttcgctcgatgcatgttgtgtactattctgttctaatagcgtccgtgtctgtctgtgtctgtcggtgggctgtagtatataagctggatttagtgtggagaaaacgtcgtgatttgacgagattgtcgactagtctgaattcactggtcgttgttttaaatagtctttgctgggagac

SEQ ID NO: 3352 - DNA, 316 bp, Triticum aestivum
  Clone ID: LIB103-031-Q1-E2-C8
acgggatggcctagttcatcgtcgccgacaagaccatcctatccatggccaggaagcactccttcgacgacgcgccggaccacctcaagaacacctccttcaactaattagactacaatagtagatccattagtagtgctcagcgacggcctgaaagatagtataatgtccagcacttatctgatatcaggccaagttcgcagacagtgagtggtgtagtactgcgcttctctgccgctctgcgtgcaagcacttgtctgatgatgtatccagccagtaatcttgaattaataataacctgcatctgtacaactca

SEQ ID NO: 3353 - DNA, 361 bp, Triticum aestivum
  Clone ID: LIB103-031-Q1-E2-C9
accatgaatattatgctagtttacatgttgctgtttgaaaacagaaagtttaccgctgttgcaaaaattgcctagaaaagtcagagaatggtataatgttgaaactttttgcatattgagctgtgataaatcttctacagcgtagtatttttctcataatttttggagttgtggaagtattgatactcttgcattctttacagactatactgttttggcagattgctgttgtggttgcattgtttgcatatgtttgcctgtttaatgattctatttgaggataggagtattgaatatgcagaggcatttagtatgcaatgttgaataataattttagtgatttgttacagtagaaaatgat

SEQ ID NO: 3354 - DNA, 362 bp, Triticum aestivum
  Clone ID: LIB103-031-Q1-E2-D1
caaggaggagaagcgggcgccggcgaccaatgaggccggcggcgaggggaagacgaggggcaggaagaagggcagcaaggccaacaagggcgttgagacgtacaagatctacatcttcaaggtgctcaagcaggtgtacccggacatctgcatctcctccaaggccatgtccatcatgaactccttcatcaactacatcttctataagctcgcctgggagtccgccaatctcgctcgctacaacatgaggctcactatcacgtcccgagagatcctgacctccgtccggctcgtcctccccggtgagctcgctaagcaccccgtctctcatggcaccatcgccgtcaccattttcacctcat

SEQ ID NO: 3355 - DNA, 307 bp, Triticum aestivum
  Clone ID: LIB103-031-Q1-E2-D11
agcatcagagctcatgccctctgatgttgcagaggccttatggggcaccaccaagagttcctccaagatggataaagaagtccaggagcttttaaagcttacactgagcaaagccctagtcaagctgactgagaataccattttcaatcggatcgttacggactctaatggctcagatccattcaatggtctctatgtaggagcgtttagtccatatgggcccgaagttgtacagctccgtcgaaagtttggcaattggaatagtactgatgacgtggaatttttcgagtatgtccaagcggttaag

SEQ ID NO: 3356 - DNA, 355 bp, Triticum aestivum
  Clone ID: LIB103-031-Q1-E2-D5
acctgctcatccatacgacctcaaaagacttgtcaactccaacctatagctatcaaagtcatctttccacactaatatgtatcatcactgacatttctagcataaaatgttcctcagattcgtaattcagatagttgaatgatcaaccttctttttctcaagggccatctacgactgatcatggctcttctgcccgttactgtaagacactgcacatgtacaacatgtatgtttatttggcaagcagtttcagtctgttccacccatctttcagcgcacatatatatacattggaaatagttttccttccacacttaaccttatcacacgccatcaaggtagcagcgactcaaga

SEQ ID NO: 3357 - DNA, 263 bp, Triticum aestivum
  Clone ID: LIB103-031-Q1-E2-D6
ctgctgcaaccctgaaggacctggatatacttgttaattccaccttttacatctcaaagtcagctttccacatgtcgaggtactggcactggtatttatgcgctgagacgttgcatacattcgtatttcagatcttcgaaatatgctcctcgtgttctcaagggtcatctctcactgattatagctcttatgctcgcaatcgttatatattgtacgtgtatgacacgtatgtttgtttggcaagcagttaaagtctgttccac

SEQ ID NO: 3358 - DNA, 305 bp, Triticum aestivum
  Clone ID: LIB103-031-Q1-E2-D7
ctgcaaccctaaacgtcgggattctactggacagttcctcctctttcacctctatggaatgtttgcattgctcgttgcattatcactattctctacgtgctccgtcgttgatttgggtcgttactgtggtcttcgactctttcacatcgattttctacgggtcatcactctgtcatttcagttctcctaaaatcattcgtaataaattgctcctggacaacactggattctatacgtaaatcagatcaagctctgcggctccctgtcctaatggctcactggatccctttctagcctggatgctt

SEQ ID NO: 3359 - DNA, 139 bp, Triticum aestivum
  Clone ID: LIB103-031-Q1-E2-D9
aatgtaagagcctcgtgtggtccttcctgcttgcgatgatggaggatagcctcgaggacatcctggactcgagcatcgtgcgttcacggacggcgacgctgctgggggagttggtcgagctggggacgatgtgcttggg

SEQ ID NO: 3360 - DNA, 381 bp, Triticum aestivum
  Clone ID: LIB103-031-Q1-E2-E1
cgaaactccagattgaatgcaagatccagatcgatgttgagagttttgtgaactccttccgccccgacgtgatggaggccgtgtactcgtgggccagagggtccaagttccaccagatcatggagatgacacaggtgttcgagggcagcctgatcagggccatcaggcggctggaggaggtcctgcagcagctgatcctggcatcccagtcgatcggtgagacccagctcgaatccaagctcgaggaggcggtcagcaagattaagagggacatcgtgttcgccgcgtccctgtacttgtgacacctcctgcgtggtttggttccatgacaggagctcatgcgcggggatagagacgttacattgtctgccgttcttgtcc

SEQ ID NO: 3361 - DNA, 385 bp, Triticum aestivum
  Clone ID: LIB103-031-Q1-E2-E10
cgggacggtcaaatactagtaatgatcaagaagtgatcctgaactcctacttacgtcaaacataactcacaagccgtgttctcttcacggactccgtcgaaaagagaccatcacggctacacacgcggttgatgtattttaattaagtcaagtgtcaagttctctacagccggacattaacaaattcccatctgccacataaccgcgggcacggctctcgaaagtttataccctgcaggggtgtcccaacttagcccattataagctctcatggtcaacgaacgatattccttctcccgggaagacccgatcagtttcggaatcccggttacaagacatttcgagaatggtaaaacaagtccagcaagccaccccctgtgccgac

SEQ ID NO: 3362 - DNA, 239 bp, Triticum aestivum
  Clone ID: LIB103-031-Q1-E2-E12
aacgccgatgatggacagctgcagtggtgtcattgcatctgtaacgagactcggaatgttgttgccctgtgtaaacctgtaacacgaagcgcgggtttaggattgttgtgtcttatgtatcgatttcactgggcaggcagaggcagccatgtacctgtaacacaactccgaatgatttgaactaatgatgagtatcagccgagctacgcttgctggccgctgtgatcacaacaatcccg

SEQ ID NO: 3363 - DNA, 254 bp, Triticum aestivum
  Clone ID: LIB103-031-Q1-E2-E2
gacgggctgatggactctgcagcggcagacgccgaaaaaggcaaggaggaggcttaagaacccaacaaagccgtagcgacggaatccgttggctcaacttggtttccgcggttgtttaaaccttcagaaccagtgcatgagacatggcgtgtgtccctgtttaacttgtattttcttagtgtcagtgtttgtgaagtctttggcagatgatgaatctgttccgcgtgcaaaatatacttttggattcgtacata

SEQ ID NO: 3364 - DNA, 387 bp, Triticum aestivum
  Clone ID: LIB103-031-Q1-E2-E5
acggaattccccacgcatgtgcggacggtgaacatgatatatgcagcccagatccccataagggagcggaaacatgctctcaaggacgtctatgtgttggagccagtcgccccagtgttcaggccatggtcctcctgcccgatcacttttgatcgaagggaccacgccactagcatccgtcatgatggattcgccgcattggtcctatacccagttatcgacggatttcagctcagcagagtcctaagggacggcggcagcagcctgaacctgctttatcacgatacagtgcaataaatgggtatcgatcctcaaggattaaacccacagagacatacctttaaaggcgtcataccaggtgtagaaactagctgtacatgctcggtt

SEQ ID NO: 3365 - DNA, 315 bp, Triticum aestivum
  Clone ID: LIB103-031-Q1-E2-E7
cgggattcgccagtaatgtcatcatcgagaatatgctatttgtggcgaaaagtttttcacaggttcagggacttgatctacgagtgagatcttctcattggtagtcgtcgcttaagtctgtcgggtacaggttaccagtagcttcatttatgagctctggcatatggatgtcaacatgagttaccatagatgtcttcgtcaggacaggttgtctgtgatcgactgattgaggttcagtcaatcctaaggttgctgaggggtatgctagatctagccatagctcgatggactggagtaagtagctatcagttggca

SEQ ID NO: 3366 - DNA, 372 bp, Triticum aestivum
  Clone ID: LIB103-031-Q1-E2-E9
cggggctgaggaataaaaagaatcctactctccgatatatataatcctaagactcaaaacatttttgttctagactcaacaacgccagcgattcgatcaagcagggggctcctaagtcggggatggctctgataccaacttgtaacgcccacgatgcggctatatctcccacgtgtcgaggcatgacttagaggcataaccgcatagtggttttgtcgcaagaagggtcatcttcacacaatcccatgtaatgaacaagaatgggataaagagttggcttacaatcgccacttcacacaaaacatagatataattcatacatcatccaaaattcagacacataaaccgactacggtcaaaaaccagatgaaa

SEQ ID NO: 3367 - DNA, 267 bp, Triticum aestivum
  Clone ID: LIB103-031-Q1-E2-F11
cctgttttcgtgtgccctcgcctgtgtggtgcgcggtgcccaggccgtagcgtcgtagcgtgtctaattgtagtttgctcgtgcggtgagtgcagccctctccaggctccaggccacacgctcgctcagatggtcggagtgacccattacattcagctcggtagatcagctcaggtgcgcagctagggctggcgccctcccatgctttgctccccagtcatcagcagcgtgcaacttatgaagaccatcatctacgtgctaggcgag

SEQ ID NO: 3368 - DNA, 312 bp, Triticum aestivum
  Clone ID: LIB103-031-Q1-E2-F7
ttcatcatgtgggtgtcatggagagcatcagcgtgatgatggttgaggacggtgctttgcacgagcctgaccactatctctccgacgtgtcgatgagcagggttttctcatagctgatcatagccgatgggaggtgaaaactcgccggatgatgtgtagggtactggtagaggtgtgagcatgtcttggatttttcttttcttgttgacgtttagctgatatgtgtcaggtgtaattggttgtttcatcgcttgttgttgtaatgagctacggtttggatttctgatcgccttagtttatccacttctgggg

SEQ ID NO: 3369 - DNA, 379 bp, Triticum aestivum
  Clone ID: LIB103-031-Q1-E2-F9
cggggtccacgaaggcgttgtgccgatcttttaatcgccccctattactgtgcatatggttgtgcaaaaggtctgctttgatgatggcacaatcgattgcacactttacaagctcatgatttgttattacccctgttcctctttctatgcggctgaaaagctagacctggactagtgtatcattatttgtttttgtagtaaaataaaaggcgcagttgtacggtaaactaaataaatgatgtttattttcgtagtgggtggcactatttgtgcagtttgttggcaatgtaaaatgtacacccaagatatcacatgggtttgttgccaaaaaaaaaaaaaaaaaagaacgacgccaactaaaaaaaaaggggcggcccaa

SEQ ID NO: 3370 - DNA, 409 bp, Triticum aestivum
  Clone ID: LIB103-031-Q1-E2-G1
cgggcacgcgcacttcagatccacgaccaacacgcctcgctcgctcactcctccggctgccgccaacgccgccgttctgcaccagcgaagacgatggcgagcggggagaaggtggactatgtatttaaagtggtgctgatcggggactcggccgtcggcaagtcgcagatcctggcgcggttcgcgcgcaacgagttcagcctcgactccaaggccaccatcggtgtcgagttccagacgcgcacgctcgtcatcgaccacaagtccgtcaaggcccagatctgggacaccgccggccaggagaggtacagagctgtcacgagtgcatattacagaggcgctttgggagctctgctagtctatgacatcaccaagcgccagagctttgaccacatacctcgctggctgg

SEQ ID NO: 3371 - DNA, 205 bp, Triticum aestivum
  Clone ID: LIB103-031-Q1-E2-G11
ggtggtgtctgggccttcttgctatggtgctgcggtgtgctgggatggcctggcccgcttttcctttttcatttcgtctcgtctcgtcttcctgtcctggtcagttcattcgggattgtcttgtatggggactttacgttatactctcatgtcaggtctttctcttatcttatcagattggattagacatgactgttagcttgat

SEQ ID NO: 3372 - DNA, 282 bp, Triticum aestivum
  unsure at all n locations
  Clone ID: LIB103-031-Q1-E2-G2
ctaccatatatcacaacantatcctccagccggttaggcgtcatgttctaaggatccaagagtcattgtggatcccctgtgaacggagtctgtaaaggtttggaaatctacctttaagacttactagactgattgggcgaagactgggtgtccttacctaaccgggatataggtgaagacgtggtcttctaaattcactctcagtctccctaaccagatatgaagttgtcaaaacaactggaactggtctaccaaatccttgtcttcaccaaactactggtt

SEQ ID NO: 3373 - DNA, 282 bp, Triticum aestivum
  Clone ID: LIB103-031-Q1-E2-G3
acggtctcgggccatggtaatgctacacccgtgggaataccgtgtctcaggccacacagtgatatgatgtgttacccgctggatcgatgtgacttggaattggggtctgtgacacctttggtatcagagcctgactgcctgtatgattaccaagccaatctggtccatcttgagtctagaaatgctttacttatgtctcggaatttattctggaacggaacctttggctctttttactccttatacctcatggctttcggataggagttagcctcttctctt

SEQ ID NO: 3374 - DNA, 346 bp, Triticum aestivum
  Clone ID: LIB103-031-Q1-E2-G5
cgggaacttcgatcccctatgcgtgccgactgctcattggatttgctgtcgtccatgattacgtgttcatctgctgcttcaacagcttcatggtgttcactcagttgcatctggacatttggatctcctctaatgccatgtctatcacgaagtcctgcatcagctcttgcgacgagaacctcgctagagatgtcgttatgctggtgcgtcacagattgaagggtgccatcacgtcgtgtgacattcaatattccgtactcctcgagatccccgtcgagctcaacatgcacgctctcttcgaagtcaccatggctatcaccatgttcatatcctcataagctgttca

SEQ ID NO: 3375 - DNA, 387 bp, Triticum aestivum
  Clone ID: LIB103-031-Q1-E2-G6
gacggaataatcaagaaggcgattgctgcccggcgaacctcgataaagacgatcatatttccaccatcacacataagggatttcgatgatcttgctgataacgtaaaggagggtctcgaggttcactttgttcacacatatactgaaatatacaacttagctttccacaatgagacatacacgagttatcacgcaagcaattcaaacaggactattcagattgcgcaaggtctttggggcaagactgaatactgaactaattttgcagctacgccattcttttcaacatcaggattaactttttgttatcatgattttttttcctactgccccatgtgactgtttaaggaaattttgactagaatgtccctagatagctgacgatcc

SEQ ID NO: 3376 - DNA, 418 bp, Triticum aestivum
  Clone ID: LIB103-031-Q1-E2-G8
gacggaaaaagtggctgtgaaattctcccaccatgatgttacgggtccttctaactgatgtgcggcaaacttcacctactccgcatctgtgcatcctgctgtggtcagctccctagctgtcttgcggagccaatcatctgctactatcggctcggtgctactggaaaacatcggcggattcagcctaagaaaacgggctaagtggtcaacaggtggtggtggtgggttgttgttgttgttcccctgattctggttctggactagcaactgcatcaatgtgttctgctgctggatcaactgggtgagctccggtggaaaggtatatccggggtcacgtctcggaggcatctgagggtttagaaaagatgagatataagaatagagggggtctaaagagaagacactacccatatgcaca

SEQ ID NO: 3377 - DNA, 392 bp, Triticum aestivum
  Clone ID: LIB103-031-Q1-E2-H1
catctacctcgatagagaactttcctcgttgcctgatccttgatcaaaaagaaaaaaggatgaaactcgagaaaaacatgattgtcaatggcaattctatgaacggagagaagatttttgtgggcactaggaacatgcaagattcttttgagatgaattttacgactaggggtattaaaaattgaatggccaatgtgacgtatacccataccttcaccactggccgtatgaatttgatccttgccacgatatttctccttcatggtgactttctcgagctcgttggtgatgtggttggtggcgccgctgtcaacgtaccagtttgtgtcaactccataggagccatcggccgccgcggaaattttctcttcatcttgcgaggagtcaccatc

SEQ ID NO: 3378 - DNA, 388 bp, Triticum aestivum
  Clone ID: LIB103-031-Q1-E2-H2
agtgttgagctacttttccttaatccctagattacaatggctgttcatgaacaaggaaatagcttcagatttgcgttatcatagtggtctatttctattgacgtagcaaatctaatttccctatcttcctaatataaacaatctgggtattgttccattcttttaattctatggcagatgggacctggacgaacagtccggccaccaagaaatgccccgcaatctcaaggtcaacattctgggagtacctcagcatcaaaatccaggaaggtacgtgggataaataagggaaatggcttggagcgtttgatcaaaagggcaggtcatccactaaacttgaccatcttcgaagagagaagacctattggagaaaatactgaactacttt

SEQ ID NO: 3379 - DNA, 366 bp, Triticum aestivum
  Clone ID: LIB103-031-Q1-E2-H3
agcgccggcaagcatttaagtgactgacgcacatgctactctacattgctatgaagtttgagcagcacctcgaagcaaccagaaatagtttccggtgagctttggtcaatgtgtcctgaacaacatgcttctgtgcttactaaatcaggcaccttttgtttcgtatcgatcagacaaggatctttcgcattttggcgtactccaagcaagatatgtgtacactttagtcttaacttgctgcctctatgctgaaaagtagtgtatgatatagtctatgatctttaaactttgttgttatcgctgtgctcagaatcgggttatcatcgcttactccatatatgttaaagccttttccccctctaatcc

SEQ ID NO: 3380 - DNA, 423 bp, Triticum aestivum
  Clone ID: LIB103-031-Q1-E2-H5
acggggatcgccactgtctagatctccagcccagccaaacttttctcaccttcgaagaagaagcagcagcatccatggcccccaaggctgctgagaagaagccagtggagaagacccccgcgggcaagaagcccaaggcggagaagaaggtgccggcgtccaaggagggcggcgacaagaaggggaagaagaaggccaagaaaagcgtggagacgtacaagatctacatcttcaaggtgctcaagcaggtgcaccccgacatcggcatctcctccaaggccatgtccatcatgaactccttcatcaacgacatctttgagaagctcgccggtgagtccgccaagctcgcgcgctacaacaagaagcccaccatcacgtcccgcgagatccagacctccgtccgcctcgtcctccctggcgaac

SEQ ID NO: 3381 - DNA, 389 bp, Triticum aestivum
  Clone ID: LIB103-031-Q1-E2-H6
ctacctgaaggcgtgcttgatagcctctcaccagagcaagtcctgaactgcaacacggaggaacaatgtgtggagctggtgagccatattcctgtaacacatgctgcacttctcagctgggttgtagagctcatggctgatgttgtcgaagaagaggagtcgaacaagatgaatgcccggaatatcgctatggttttcgcacccaatatgacacagatgtcagatcctcttactgctctgatgcacgctgttcaagtcatgaacttgctcaagaccctggttctcaaaacactcagagaacgtgaggatgatgaaggatcatattcgaccttttcgtcatcgccaactttatccgatggacttgatgaggtggaccgggagcacgacca

SEQ ID NO: 3382 - DNA, 328 bp, Triticum aestivum
  Clone ID: LIB103-031-Q1-E2-H9
gaccctggtccacttgaaatgcacgcagaactccaagggagagtccccccggtcgtcacgccgcagtaataatgacgaatgagccatcaaatcacaggcccaacctttcccactgtgaagttgctcggacgaaggaaccatcatgacttcgttgaattcagcttcttgaagaaaactactgtaccaactgtcctgctagctacagtagtactgtactccaccagaggcctcctttggttcataggataggaattttataggaatatgaaaatcataggaagtgagatgacaggcatctcaattcctatagagaaagagatgccatttg

SEQ ID NO: 3383 - DNA, 371 bp, Triticum aestivum
  Clone ID: LIB103-032-Q1-E1-A10
gctcgctgcagtccccgtggacgcagagaatccaacgtgatgttcttgggagaaaatccctgaaagattcatttttctcgagagaagaggtatacttggcttcggacgatctagaggagccaatgtgagattaagcattgtctcagtggcgttgtattcgatccagactcttactggtttcccactcgcaagcctcaagcttatgttcttggcctctcggtcatcacaatgtgcagtcggtgcagaagcagtggagatcactcgatttaggtcgatgcctacgtggttatcgtcaatatcattcatctcaaccgcttgcacggtgtcagtttcaattgcaagagttcgatttcaggagtttccattgttgg

SEQ ID NO: 3384 - DNA, 392 bp, Triticum aestivum
  Clone ID: LIB103-032-Q1-E1-A11
agagatgacgtcgaggatggcgtccaaggacatcatcacgctcaagggctccgccgccatcgtcagcgagttcttcggttacgcggccaacagcatcctgtacaaccgcggggtgtacccggaggagagcttcggcaaggtgaagaagtacggcctccccatgctgctcacgcaggacgaggccgtcaagaccttcctcaccaacctcacctcccagctctcagagtggctggagggtgggaagctgcagaggattgtgctggtcatcatgagcaaggccaccggcgaggtgctcgagcgctggaacttcaacatcatcactgacggggaggtcgtcgagaaaggggcggtgaaggagaagagcgacggggagatcatgagggagaatcagg

SEQ ID NO: 3385 - DNA, 118 bp, Triticum aestivum
  Clone ID: LIB103-032-Q1-E1-A6
aggcattcaaataaggtttctttctcttctttcgtaagagcctagctggcaggaccttcactctgcttcggtggcagtgtcttccttttcggggcaaacgcttgcaggtcgtcccgtg

SEQ ID NO: 3386 - DNA, 204 bp, Triticum aestivum
  Clone ID: LIB103-032-Q1-E1-B3
gtgggaactgatgggtacgaccagagcgtgtcggacgacacgagtaccagtgagacctctatcatcttcctctgtcacatcctgaacaggaggcaggcagtcttgagttaatgcggtgatacagctgctagcaacatattctcaggaaggaggaataagtttgccttcactgggctttcaattttcctggctaagcaggcgtaa

SEQ ID NO: 3387 - DNA, 350 bp, Triticum aestivum
  Clone ID: LIB103-032-Q1-E1-B7
cccatcccttggtcatttgacttcgactacgcatcatagaaagagggaatttgttcgtgtacagtcacaaattgatcaaatatgtcgtgagattgctggcaccacagaggtcggtgcccacgtggctacgccacacgtcatcgcggattatttgatacctgagaggcctgatgattttccgtcccacctccaggagcttcagactagatacaccaataggttggctaaggttcctgagtatgtctccatggtacattatctatgtgccgtcttgggcatggatgttctcagtaccgtgactgaagttcaccgcactccagatgactccagttgctgattcctgcaagagc

SEQ ID NO: 3388 - DNA, 202 bp, Triticum aestivum
  Clone ID: LIB103-032-Q1-E1-B9
gggtgggtcggtgcatctgctccattcagccacatgctaggagactttagggccatttgacccccaactacgccacgctaactcagggctcacggatacaaacatggcctatcgacaagggtcgcgtgtaccagtaaccggcgctctctcgggtgtagcccctcgtcaaagccgatcccagtgagaggtcgccgccgcgctg

SEQ ID NO: 3389 - DNA, 402 bp, Triticum aestivum
  Clone ID: LIB103-032-Q1-E1-C11
gacggcatgccccagaaggcaccctctttcgtcttcattcattggtaactttacttggagctatatttttattcaccacatgatatgtgttttgcttggagcatcatttttttgcttgatgtttgaataaaataccaatatctgaaattattaaatgttagagagtcttcacatagttgcataattattcgactactcattgatcctcacttatatcttttggagtagtttgtcatttgctctagtgcttcacttatatctttttagagcacgatggtagttttattttgaagaaatatatgaactctcatgcttcacttagattattttgagagtcctaaacagcatgttaatttgctttgggtatgaattcagtcctaatatgatgggcatccaagaggg

SEQ ID NO: 3390 - DNA, 274 bp, Triticum aestivum
  Clone ID: LIB103-032-Q1-E1-C5
gctgctctaactcctacgcttgagcagttcaatacgaagacgaatcagagaatgagggaatttgttactgtacagtcacaacttgatcaaatatgtggtgagattgctggcaccatagaggtcggtgagcaggtggctacgccacacgtcaacgaggatgatttgacacttgacaggcatgaagatttgcggtctcatctccatgagcttgagagagagaacagcaatatgttggcgaaggctcctcagtatgtttgcatggtacatgatctct

SEQ ID NO: 3391 - DNA, 182 bp, Triticum aestivum
  Clone ID: LIB103-032-Q1-E1-C6
ctctggtatgtcccttcttctcttctcctttgtccttgccgttgggtcgtccttggcggtgtgcttggccttctccggttgcttgcctggggccttttttcccgtgcccgttcctgtttcgtgcgcttcctttggggggcttgtccggtttcttttctccttcttctgtcttggcgctttgg

SEQ ID NO: 3392 - DNA, 323 bp, Triticum aestivum
  Clone ID: LIB103-032-Q1-E1-D11
tgcacgctgttctgggttctccctgactgattacaacgtgccgggaggatcatgtgacggtggtgcggatgaacggggcgcggatgatgatgcggcggattgcgcggacccgcgggtgctcgacctgtttgggcgcggccaccctgcccctgctgcgctgcatgccgtcgtcgctgctcccctgtggatgtgatggtgatgctcagctgcgtgcgttctagtatctgacaattggttttccgttggttgaaggcagacaccatctgtaatctctcacctaagctactcttaaatcctactctacttgacattcaaaaccaaca

SEQ ID NO: 3393 - DNA, 215 bp, Triticum aestivum
  Clone ID: LIB103-032-Q1-E1-D12
ccggacctcaaatcagtaaaaatgaatttcagagatcctccagtaaaagtggaacctcaatagctcctgctcctaaagtgacgaatacgagagttcaaaggcccaagctaactcctgaattgttgggctcggaggatggtctcggcggtgttcctcacggtttccctaaatccgctcaagtcgcgtggccgacgcgatacacagaagtctttttt

SEQ ID NO: 3394 - DNA, 216 bp, Triticum aestivum
  Clone ID: LIB103-032-Q1-E1-D8
gggcatgcggcagctttgttcccatggacccttctggtgttttgcatccacacgggcgttttccttcgccccgtgcccgtcgtggcgttttggctttctgtctgcgggggggccgtggttggtttcgtcggggccctggggcgccgtctgctgtgggggttcgggtcggggggcctccgtgtgtcgcggcgctgcgtgcctcgcggtctgtcgctc

SEQ ID NO: 3395 - DNA, 272 bp, Triticum aestivum
  Clone ID: LIB103-032-Q1-E1-D9
tcaggtagctcaccgcaagcccggcctaagtggtccatggctgagaatgatttgcttgaaaaacggatcaaaccagagacaatgagatggccagaccgttgccggacttggttcttcgggtctggcggaaccttggaccctgttacagggttttgccagtggacggaccagcatctggcaataccagtcatgaaccttgtttgggaacctagttatttcaaaaatttcctacgttcacgcaagctcatggtgatggcatatccacgagggga

SEQ ID NO: 3396 - DNA, 124 bp, Triticum aestivum
  Clone ID: LIB103-032-Q1-E1-E1
gaggagggggaagaggacgtcgatgtgggctaagcggctgggcccgacttggcccccgcttcgtttcacgactactacgtgtcttctctggccctgcaagatgcggatgtttccgatgtcgccc

SEQ ID NO: 3397 - DNA, 426 bp, Triticum aestivum
  Clone ID: LIB103-032-Q1-E1-E10
cccggccttaaccaaaaaaaaaaaatcaattttgtggttttcttggttaagactggttcaaaccggtttacatgcatgtgttggacgtgtgaaaaaattcaacgtgccgttacgtgcgtccgttgggaaacatgcaaatgttattttggatgacacaaaaaacgttttgctccaacacatgtgagcaataccggatgcgtaaatggtgatttagtccaatacagttgaccggtatcgagccaaatgatattagctttgtccggaatgtggttgtagctacaaatattatccaaaatttacctacaactggtttatcaagtgtatatagaaaaacaatttaaaaagaaaattaataaataatagttttaaaatgttgaagatcataataattctgaataattcttattagaacaaagaaaccaaata

SEQ ID NO: 3398 - DNA, 236 bp, Triticum aestivum
  Clone ID: LIB103-032-Q1-E1-E11
gtactagaacagagtatgactctatatgaatgcctccggcggtgtaccgggatatgcaacgaaccaagagtaacatgtatgaaagaattatgaacggtggctttgccacaaatactatgtcaactacatgatcatgcaaagcaatatgacaatgatgaacgtgtcatgataaacggaacggtggaaagttgcatggcaatatatcccggaatggttgtggagccccaaaaggaggt

SEQ ID NO: 3399 - DNA, 318 bp, Triticum aestivum
  Clone ID: LIB103-032-Q1-E1-E12
gaggccgacaagatcgcccgctacaacaagaagcccaccatcacctcccgggagatccagacctccgtccgcctcgtcctccccggggagctcgccaagcacgccgtctccgagggcaccaaggccgtcaccaagttcacctcctcttagattcagtctctggcagctgtagttgggtgctgtttacctagaattagcattgctcaatggaaattggtggagtattgtttagttcgtagttggtttggtgatgttaccgtgtcatcatgggactgatcgatctgaaatactagcaatgatctggtgcatcttttgggc

SEQ ID NO: 3400 - DNA, 384 bp, Triticum aestivum
  Clone ID: LIB103-032-Q1-E1-E2
cctgtgcgataaaagaccagtggccatgaattaggattggccggctccatttaaactcgatatactcaatattttttaggctatcacgataaccgtcatacttttgcatcttaattttctagagcaacttattgtactgtccaagatgtgacgatatgcataaacatctagacttaacctatgcaaagatgcatcttaggtactattgtttttatctcggcctctttgagagttatctcatcttagtcattttagaaacatatatcgagttgttacctctaagtatcccttttatccaatccgaacttcgacgtagaaagtatgaaatcactaacatgacagctgggtaaattggcatactctagcagtcgttgcccctctcat

SEQ ID NO: 3401 - DNA, 337 bp, Triticum aestivum
  Clone ID: LIB103-032-Q1-E1-E8
tccgaagccacggattcagttacggtgggacgtctacacaggcagctcaagcagagggtctcggctaatggccgtgtgggtgccactgctgctgtgtactctgcagcaatccttgagtaccttactgccgaggtccttgagctggccgggaacgctagcagggatctcaacgtgaagcgtatcaccccgcgccacctgcagcttgcgatccgtggagatgaggagctggacaccctcatcaagggcaccatcgctggtggtggtgtcatccctcacatccacaggtcagtcatcaagaggacctccaaggagtgaatgaaatgcaataacgggtagt

SEQ ID NO: 3402 - DNA, 397 bp, Triticum aestivum
  Clone ID: LIB103-032-Q1-E1-F11
gacgggatccgctagggaaaatgatgatgaggaggatgctctggagaaggaagaggaggatgacagcagcctgaatgaggaagagaatgatgatggtgctgagaacaaggctggagaagaggatgctgtcgtcacaatcgtggttgaggccaaggatgagctgaagaagcctctgaagcgcaagggagctgaggaggaggccaaagatgagaagaagatcaagaccactgctgctgctcctgatgtggaaaatgcagctgaagaagacgccgagatggttgaaaaggaggaagaagaaggtgcccagaaggctcagaagaagcgcaaggggcgtgctggggctgcaggtactgcagctggcggcggtaagaggaagaaggccagccctgctgctgct

SEQ ID NO: 3403 - DNA, 247 bp, Triticum aestivum
  Clone ID: LIB103-032-Q1-E1-F7
tcccgaagcctccgggtggctacaagcgtccggactcgttccagtgacgatgtgattcttcttggctgtctgcctccttcttttcctagggcatcaattttcaacctcgttacttggtatttggtgccctgtttgagcttaaacactgtgtctcgatcgcgctttcggcacgatggctaagcatttaaatcgctagcatcattgttgctctccatctgttgtcagatctttaatggtgtcatggacc

SEQ ID NO: 3404 - DNA, 387 bp, Triticum aestivum
  Clone ID: LIB103-032-Q1-E1-G10
cccacttccacaatgaataacctttcattcacttctcacgttcgatgaagttgcagtgttgaaattttatctggtgaagcaccagaagagtatgactcgtgaaaactttcgggttcacagggtttagagaaggcatatgttcaacccataggggcttcttagaaacatataccacaagtttcaagagtaaataacacaagcccgaaagcagagcatggttggccaagcagaggatacaacttaacaaaggcattatgtatcaggggaagaactcacaaggtgatcaaatgtgaaggacactgtcggataacaatccaacaaacgacttgatggtccacaaaggatctgatacgagtatcggtactcaactagaggaagaagaatgca

SEQ ID NO: 3405 - DNA, 219 bp, Triticum aestivum
  Clone ID: LIB103-032-Q1-E1-G11
tcacactcgagtggatttctcacttccactccttatgttgatagcatgaacattagcatactccttgggattctgaattgacttccttggaagtcacgtaactttgggaccagacgaagatgcggattgtccttctaagtatctgactttggaattcaacgcctccacttttgcattaaggtcattgtagttgcaggccagcttgtggtgcaattcaga

SEQ ID NO: 3406 - DNA, 413 bp, Triticum aestivum
  Clone ID: LIB103-032-Q1-E1-G12
gacggcggacccgagacctaaatcgccgccaccgttcctcgccactgcggcgaccgccgttctcctccccctcccaccccgcatcggagaggaagatcgccgcgccagcgccaccatacccgaccctcgactccaccactctcggcggtgtgtgctagtctagtctgtctccaccccgacgaatttgcttcgcctgatagcgattaggctgcaatgggtagatgattaatttttgaagcccagctcatcgttaataacaggccgaaagcccagaaacccagcagcagtgtgcaacgagacgatcagattgttctcttttaccatcgtctcggacaaggcaacagagagcaggcagaaggatggatgagcaagatgataaaagtacaaaggctgagctgaaactatgtggggac

SEQ ID NO: 3407 - DNA, 364 bp, Triticum aestivum
  Clone ID: LIB103-032-Q1-E1-G4
cacaaaaccctagccgtcgcctcacagctcgccgccgacgcagcgagctcttcctccaccgccgcaaccatggcgacccagatcagcaagaggaagaagtttgtgagcgatggcgttttctacgccgagctgaacgagatgctgacccgggagcttgccgaggacggctactccggcgtggaggtacgcgtgacgccgatgcgcacggagatcatcatcagggccacgcggacgcagaacgtgcttggtgagaagggccgcaggatcagggagctcacctccgtcgtccagaagcgcttcaacttcgcggagaacggcgttgagctttacgccgagaaggtcgtcaaccgtggcctctgcgcca

SEQ ID NO: 3408 - DNA, 375 bp, Triticum aestivum
  Clone ID: LIB103-032-Q1-E1-G5
ttcccggagtcacgggatactcttagaaatatttttcataccccaaatcaagtacttgtagtgcaaacctcaactcagggggttttggaaaactaaattttgaaaatactatttggccaaattatttttgtaggaaaatactatactgtactatacacatggcatgatcattgggcagaagtttggggcaaggagatgaagtacagaaggtggattagttgactttaaagagcacttgaaaaaaatcactcagagaaaaccaactccaaaataaaagccaaatactgcaaaagtttttgttggtccaatttttttcattttttaataatgaaaatgacatgttacaaaattcacggtgtgactacaccatttccc

SEQ ID NO: 3409 - DNA, 407 bp, Triticum aestivum
  Clone ID: LIB103-032-Q1-E1-G6
cagatcaactacaatagctcggaaagttttccgactgtttaagtttgttaatgatctccaagctctgattagcccccctgccaaaggaactccacttccgctgatcttacgtggaaagtcgaagaacgcgatgctgtcaaggttcctctttctggggcaaattgtttgggctgggagaacaggagtatacaagaacagggagcgagcagagtttcttggcaggatagcattttattgctttctcggatccaatacctgtactacgatcatcgagctagccgagcttcagcggctttccaaatcgattaagacgttagagaaggacctcaagcaccaagagctgtacaagaacgagcagtatcggatgaaggctaagaagtccagggagaggctggttggctcatcaa

SEQ ID NO: 3410 - DNA, 444 bp, Triticum aestivum
  Clone ID: LIB103-032-Q1-E1-G7
ttcccggagtccacctcaggtatataatcgtaatggtaggcctgcaccaccacctcaggtacgagatgatgtccatattcctaaactgaaattgaatattccaccatttgagggtagatatgttcctgatatatatcttacttgggagttagaaactgaacaacgatttacatgtttacaatatcctgaggagagacgagttgctgctgctgtttgtgctttcactagttttgcatgtgtatggtggtctgaacattgtagattatatcctattccaactacttgggctgctttgaaaactgctatgcgtacgcgttgggttccaccatattatcaacgtgaattgcttcaaaaattgcagcgtttaagacaaggaaaaaattctgtagaagaatattatcaggaattacaaactggcatgattagatgtggtattgttgagga

SEQ ID NO: 3411 - DNA, 455 bp, Triticum aestivum
  Clone ID: LIB103-032-Q1-E1-G8
ttcccgagtccacgggagcgatggaccggagacagccaaggacgagatcgcgctctggttccagcccagggagctggtctcttacaccagcaacgaggagaagtggatctacggtgtgaactaaccgccgcatcgtcttcagaagagccaaagaagctccagtccctttccgtaatcgcctctagaccatggcagagtgcaataacaccgcgacccgggcgacctttcagtcggtgtcgcccttgcccttgtctcatcgtgatgcaataaggcccgaagaaatttaaagagtttgtttgtacctttgaatattatagagcgtgcacggagcaatcgtgatgttcaaatcaaaccgtcgccttcaggcgcttgattttgatggatgctgtttgttttcatgtgttgcccaaattcaggcctacattctctgcacttttcactgtcactgtagctga

SEQ ID NO: 3412 - DNA, 397 bp, Triticum aestivum
  Clone ID: LIB103-032-Q1-E1-G9
ggcatgaggatagtaccaccaagatgtccaagcccgatgagctccaagacgatgctcccaagttcgacttcaccgccatccctctttgtggcattgatgatgccgagtcctccacgattctttttcaagatggtgcggcgacgagtacgactacggagaccttcaaggaccacgctttggaggcaagcgacttggtgacgatcaaggatgatgtttccatgttaggaggcgagagcgatgatgtgccatcttcggccttcatccatggcgacgatgacaagatgatcgagcatgggatttccccttcggtcatggaggagagtgatgatgtgccatcttcggccttcatccatggttgagtatttcacctcgaccactgtgacctatgatgacctga

SEQ ID NO: 3413 - DNA, 354 bp, Triticum aestivum
  Clone ID: LIB103-032-Q1-E1-H10
gagggctgaagaaaacgcatcttgtcaaggctgctccggcggacaagtcgggagctgctgtgcgagaacggacctgagctgtgtgcggtggtgtcataaggagcctatccatctccactagaattatcccaagtttcacttcacatcgtgatgttgttttacctttttcctgtcattgtcctgctataacggatagcgctccctgttggcgccgccgccggcggggatgccctagtggtggagggtgtatgtcctcttccgcggggtgcccctgcttgtacctagatggttactctttccgtccattgtcaccggctaacattgtgataatatcagtctgggtaatgttagatt

SEQ ID NO: 3414 - DNA, 264 bp, Triticum aestivum
  Clone ID: LIB103-032-Q1-E1-H11
aacgaatctgttagtttcaactcattttgttgaggttaatgaaatgagaaatcaaaggattaacgaaagttaatatacttagccgcaattaatgatgaacggacggtggatggatatcgaccactaattctccaagtgacccctacaacctcctctacttgtccccctataccacatcctatctggtaaagattaagtcaagacttcccaccaaaacttcacttttaattttgataaaccaaacgtttttaaaaaacaaaatgt

SEQ ID NO: 3415 - DNA, 175 bp, Triticum aestivum
  Clone ID: LIB103-032-Q1-E1-H2
tggcggagaccgcgtgtgggtcttaggctgtggctgggagctggggctcacgtctttgtggcggtcgagtggcggtcgtccgcggctgtcgggtggctggttggttctggggttggttcgttgggcgtgtgtgcttctgctgccttggtgtcttcgctgccggtgtgttgtgttc

SEQ ID NO: 3416 - DNA, 423 bp, Triticum aestivum
  Clone ID: LIB103-032-Q1-E1-H3
atgcacagcccactagtcgtgggactctggtgcacgcacttgctaggctggtcgagtatttaaccaaaaactaccacaattgtcggaaacgtgacgaaaaactaccactttacgtttttgtgcgaaaaactaccaaatttagactaaaccgtggcaaaaaactaccaactcgggaaatcgctcgcttcgcccgcgctaaccccgattctgaccggttgggcccgcgaatcagtcgccacgctggcgaacagacggccgccgcgcgttgacggccgttaacggcccgtccattgtcggaacggcgcctgtcggtgggccaataagtgagagcgagctcaggcactcgctcagtctcctcctcggcgctcgctctcactcgtcctcactccatcctctccctctccctcgcccgggtgctctgac

SEQ ID NO: 3417 - DNA, 380 bp, Triticum aestivum
  Clone ID: LIB103-032-Q1-E1-H4
gaggcgacgatacacggcaggcctctttccgttgacgtgatggcgtccgcgactcctgttcacgtgagcgcttggtcaaaacgtgcagctcgacggagtagaccaagtttggtgtggcttggcattggcgcagaactgcgtccttgttgcggcatgcgttgcacatctcctattcctagcgggttggtttcagctcatgtggagtggtggcgtcaggccagtgattcagttagtttacgtacgtacagtggtcgtacccgatcggatctgagcagcccaggatcacgcagtcgagactctaatgttcgctggcacgttggtgccagtatgcccagttggccgcgatcaagtctggccactcgtcacagtcggttcatcgg

SEQ ID NO: 3418 - DNA, 432 bp, Triticum aestivum
  Clone ID: LIB103-032-Q1-E1-H7
attcccggggtcacgggtggctataaatttctagtagtgaaatctgaggtacctgaccagaagatcggtacaattatggagtctaaggatgctacattctttgaggatatttttcctatgagagatatgcaaagcacttctagacaggaatctgaggagactcctgaacctgccatccctatggaatattatgaacaaacacatgatgaaaatcccgaggaggatgacgaggaaacccttggtaggggcaagagacaaaggaccgcaaagacctttggtgatgatttcttcgtgcacctcgtggatgatactcccacttctatttcagaagcgtatgcctctccagaagctgactactggaaggatgcggtccgtagcgagatggattccatcatggctaacgggacatgggagatcactgactgtccctat

SEQ ID NO: 3419 - DNA, 396 bp, Triticum aestivum
  Clone ID: LIB103-033-Q1-E1-A3
ggtcgacggcgcgctgagcaagcatctgttccactggaagcagcatgagctggagcccctctcgtggaagaagaggctcaacatcgcattagatgttgctcgcggaatggagtatcttcacaccctcgcacagcagtgctacattcacagggatcttaagtcggcaaacattctacttggcgatgatttccgagcaaaggtgtcggatttcgggctccttaaatctgcgccggacgggaacttctctgtggcaaccagaccagctggaacttttggatacttggcgcctgaatatgctgtgaccggaaaaatcaccacaaaagcggacgttttcagcttcggggtggtgctgatggagctgataaccggaatgaccgccatcgacgagagacgtat

SEQ ID NO: 3420 - DNA, 384 bp, Triticum aestivum
  unsure at all n locations
  Clone ID: LIB103-033-Q1-E1-A9
cggaacactagagaaccaacgtgctcattgggacgatttcgtgaaattcaaggattcggaattagctaaggaatggtcgagaataaacaagaagaatgctgaaaaaaaggataagttccataagctggggccaggtggctatgcggtggcaatgcctaagtgggataagtctgagaaagagatggaggatgcaggtgccactccggttactaagagatggccccccagggtcaggacttggttctatgcgcatggggggagttggacccgaagacaggcaatgtttcgacgagggcaagtctgaagggagccgacgatgcgatacttcttgcaatagaagaggcacgatcggnggtgttccagcccaacagagagaacgacaag

SEQ ID NO: 3421 - DNA, 423 bp, Triticum aestivum
  Clone ID: LIB103-033-Q1-E1-B1
ggtcgacggcatgaaccccttccaggcggaggccaactacgtgtcagcgcgtaagacgaaacagaattcctacaaatccaagccttgggacaagcccgccagaccgagtcgctagactttgctgaaagagatggcgccccgaggctccgtagaaagagaagagaagtgttgttgtatcgccaatttttcgaaatataccgtctgctgttcctttttttcccgccttgttgctcctttttttcaccttgttgtttgactagacggctcgaaatagacagaactcttgatcggggcctgtatttaattgtgagattctttgtagcgcagccggagtagtagaacatgttgccgtttttcgcagcatttttcgcagcaaaaaaaaagaaagaaaagaaaaaaaaagagggagaaaaaaaaaagaaa

SEQ ID NO: 3422 - DNA, 397 bp, Triticum aestivum
  Clone ID: LIB103-033-Q1-E1-B3
cgggtcgacgggccaactggttgcgcagctcttccaaatgcgcgcgcagatgaagaaattgatgggtatgatgcaagggcaagaagcaattgcaggaatgggagatctcatggactcgcttaatgctgacgagaaggcacctcctggcactgcacggcggaggagacggcggagcgagccgccacggcagagggggctggatgcagtgggtggcgccagtaagccttgagttgatgtgcactggagctggaatttttcactgaaagagttgtggattggcatgtagatacgggtcctgctgcatgatgtaatatttcctgtacattttggcataccgactttacaattcgtgggaaatgtgtttagtggacggaacatggagtttgagggtggaggc

SEQ ID NO: 3423 - DNA, 390 bp, Triticum aestivum
  Clone ID: LIB103-033-Q1-E1-C1
gggtcgacggcctcggcatgcgccaggtggggttcgtcttcacacaggcggtcgggaggaaggccagcgagacgggcgagtacaccctgtccaacagcgaggtggtccaggccgcccagctgcaggcggagggcgggatcccggagtgggtcaccgccgtggtgaagctggaggtgggggaggacggctcggcggacgtgtccttcgaggcgttccagatgagcgaggtctgcgtcaagctgttcaaggacggcgtgctggagacggagatccaggactccgacgacccccgcctctccaagatgcgcaaggaggtgattgcaggagggaaggacaccatggaggtggacaacgacttcttcctggtgccggtgaagatctccgatcacc

SEQ ID NO: 3424 - DNA, 349 bp, Triticum aestivum
  Clone ID: LIB103-033-Q1-E1-C10
tcggcgggcaagacggcgtccaaggaggccggcggcgaggcgaagacgaggggccggaagaagggcagcaaggcgaagaagagcgtggagacgtacaagatctacatcttcaaggtgctgaagcaggtgcaccccgacatcggcatctcctccaaggccatgtccatcatgaactccttcatcaacgacatcttcgagaagctcgccgccgaggccgccaagctcgcccgctacaacaagaagcccaccatcacctcccgggagatccagacctccgtccgcctcgtcctccccggggagctcgccaagcacgccgtctccgagggcaccaagggccgtcacaagttca

SEQ ID NO: 3425 - DNA, 387 bp, Triticum aestivum
  unsure at all n locations
  Clone ID: LIB103-033-Q1-E1-D2
acgggggagtaggctgctgcaaacgtagggctgtgtgatttgacaacgagttactgctgcacaggtggggccccgtgatttgacttgccattatcattttaactacaacgctacgaccggcgtgagtctcccgattcctgaccacctccatacaggtgcctctcccaatgctccaccatgtagtagaggctggctcttgcatgagagcccacttctctaatttttccttgcctctctttcctccacatatgcaaaaatgccatgtaaagcgcactattgtacttacttttacttgctcctacaggtgttaagcttgccacatangcataaagtctgatgtggcaagttaatcaagaagagagagactagtttgggtgaccaagaaag

SEQ ID NO: 3426 - DNA, 395 bp, Triticum aestivum
  Clone ID: LIB103-033-Q1-E1-D3
aatggacagattcatccaggtgtttctaccgtgaggtgcacctgaaagtaggtttcctggaagacaggcgatgcgaggcgaaacggggaacaaacctggtctctgtttgctttgagaactgtaagcgtgtttaacctgacatcgcctgtaattgtaagccctttccgcatacctcacagcttgttgtcttatgaggtgctgcaaggcatcaggctggcttgtgccgcctcagtcattattatcatttgtaacttgttagagtgcacattaatctcacgaggacatacacaatacttatgctgctgttgttgtaacctgacgacctttatgcctttgccttgtgttgttattcacagtcttaggtcaaaaggtcacttaaaaaaagcgggcgctct

SEQ ID NO: 3427 - DNA, 322 bp, Triticum aestivum
  unsure at all n locations
  Clone ID: LIB103-033-Q1-E1-E1
gggtcgagncgcaagggttgggatattggggcgctggtgggcatcgggcgctggagtgcatcggtgggcatggggtggccgattatgaagactcccaggcggaatcgcgcgcaggtacagcccggagtcagtttgacattttgggtggtaataattccaacatggataaccagagtgaaaataaatactacacggactccaaaaatcccgaagtacattttcaccgtcctctaaaaataggccggacaaagtggaaatttatttggcccgaaaatgcaattttgaaaaaacagattattcctaaatcacataaaatagcgat

SEQ ID NO: 3428 - DNA, 384 bp, Triticum aestivum
  Clone ID: LIB103-033-Q1-E1-E2
gggtcgagttcttctcccccggctacggtggctgccgcgctctccaccccaagattgcgcagttcgctgagcggaatccggacgtgctgttcctgcaagtcaactacgagaagcacaagtccatgtgctacagcctccatgtccatgtcctccctttcttcaggttctacaggggagcccagggcagggtcagcagcttcagctgcacaaatgcaaccatcaagaagttcaaggacgccctcgcaaagcactcgccggacaggtgcagcctcggcccggcgcgggggctcgaggaggcggagctcttggctctggcggcaaacaaggacctggaattcacctacaacgagaagccgacgctggtgccgatcgccgaggctatcc

SEQ ID NO: 3429 - DNA, 375 bp, Triticum aestivum
  Clone ID: LIB103-033-Q1-E1-F2
gggccgaggcggcactttattgacaggttaaattgtcacctggtttctgggtcccacctgacagttggcagagcaaagaaatcagttaaacaaaactttacgcaggcgcgacacgagtccaacccttgcgcgcgaaccgccctggctgtgtatgtgagtgcatgcacgtgtcctccctcggtcttccaacaaagagtgtacatcggctataaaacacagagtgtagtacatgatgtacatctacacttccaatgatttagcctttaatctaaatcgatattgattgactaatgcaccaacttgtgctgtagatataggcgacatgtccaacccttaattacagcaatcaacggccttcaattaatcctcctaacc

SEQ ID NO: 3430 - DNA, 332 bp, Triticum aestivum
  Clone ID: LIB103-033-Q1-E1-F9
ccgggtcgacggggatcttcatccggagatgatggataacgaaacacctccccatgcctccacgccacatgaggcgggcgaacccgtggtgtcggcacacaagatttctcctgatgggctaatgccatagggtaatcctacggcctcgctaagtccgaagtattcggctcctaaatggagcatcagtcgtgctctgtagctgtctagtcagctatgggaagtatagatgagtcctctgaaacatgaggctaactcataatctcatcgtacgcttctaggtatagcggcttacatgatttcagatcgtgaacaccgataggatcaggcatata

SEQ ID NO: 3431 - DNA, 386 bp, Triticum aestivum
  Clone ID: LIB103-033-Q1-E1-G4
gggtcgacgacctcttgcagcttaatgaggctagcgagaatgtcgtcgtcgctaaccaaggacttcagcaatgccagctcgtcgcgatcgccgatgcggcgagtgcacttgtgagagccgatgcgtgcccgtgagagctcgttcgagggctccgcggcgccaggacatctctgctgaggctgccgcttcgcggcgggacctctctagagcttccgcagccttggtctttgcttcttggttatatgtccactcgaaactcctcctaccggtcatggaggaatgagttgacaagaaagaccagttttgtgggtgatgaggagaggaactgtgaagtaattttcaagtgggtagtttttatagcctggtgctaagtgtgaacacatatt

SEQ ID NO: 3432 - DNA, 368 bp, Triticum aestivum
  Clone ID: LIB103-033-Q1-E1-H10
cgggaagaagcacaaggccgagaagcggctgccggcggggaagtcggccccaaagaaggccgcgacaagaacggcaagaagaaggccaagaagagcgtggagacgtacaagatctacatcttcaaggtgctgaagcaggtgcaccccgacatcggcatctcctccaaggccatgtccatcatgaactccttcatcaacgacatcttcgagaagctcgccggcgacgccgccaagctggcgcggtacaacaagaagccaagcatcacgtcccgggagatccagacctccgtccgcctcgtcctccccggcgagctcgccaagcacgccgtctccgagggcaccaatgctgtcaccaagttcacctcctc

SEQ ID NO: 3433 - DNA, 374 bp, Triticum aestivum
  Clone ID: LIB103-033-Q1-E1-H12
cgggaatagggatactttatgatatccgaaccagtctgagcctttgcatagtcttttcagtattttgctttgttgaatttgtggttgcatcgtcgtgtctagttgctggtcttagagtctagtcttttagagtttcgagttctagtcataagttgtcacgccaccgccgcaccatcatcatcgcctctgccatctaccatcaccacttatacgcgaccgattcgtcgccatataccaccagcaatctatatccatataccaccaccgctgccatatcctaccaccatatatccacgagcaatccgagttcctttcatattgggtttgtttttgagatccatctaatttccgattcgtgtttccttgcctgagta

SEQ ID NO: 3434 - DNA, 439 bp, Triticum aestivum
  unsure at all n locations
  Clone ID: LIB103-033-Q1-E1-H2
ggtccacggcgataatggagcatacatcaatagattcctgtcaccagtcatgtggtttgtacatccactatcgaggacccactcaatggctttgggttgatcatcctgcagatgaattaatgcaacttaaaaactcatttacctcaacaatgaaaaatatgacaacaattcaacaaattaatttcaacaagttaaagaactgattaaagcaatataaggacgtgaaaaaatgaaattcaatttcttcaggattagccctgcgtcctatcaaggatgctcaggtctccagcanattcttcagacgattatgtgcgtctggagacctgaccctgcagaagagattagttctttttattcactacccacatctgaaggggtggcaaagagttcatcattctgcgagctccatacaagaaggatggcatagaagccaatccat

SEQ ID NO: 3435 - DNA, 51 bp, Triticum aestivum
  Clone ID: LIB103-034-Q1-E1-A10
acggggtcagagactattttgcgactgtgtgcgtggtttgtgtacagtttg

SEQ ID NO: 3436 - DNA, 420 bp, Triticum aestivum
  Clone ID: LIB103-034-Q1-E1-A2
gggtcgacgggccccaagcagttcattttttttctgcaactatatgtgcacaagtgttgctttggcattccacacagttattagtcttcgaggggcggcacttgaatcttggacggatgacgagattaggatgaatttttttttgcgggtaaagggagttttattgcaaattcatagagttacagtcgagacgccacacatctcaatacaaggaggaactgagcgtagccagacagttgtggctcgctccgtacggctaaagtttgccagacaatcaccaactctattttgagaacgactaagtttctgaggaacaaactccctactaccagctaagtacttgatctccaatactaagtggtcataagctgaacgctggagagcatccatacacaggcgtgacaacgcttcagaagaatc

SEQ ID NO: 3437 - DNA, 414 bp, Triticum aestivum
  Clone ID: LIB103-034-Q1-E1-A3
gggtcgagcggctgctacaggctaagcaagaaccgttcttacctacgcaacaaaaccacaacgatagttcgtcaacttagtgatgttttaaccttctcaaggaccggcgtagccacactcggttcaaataaagttggagaaactgacacccgccagccacctatgtgcaaagcacatcggtagaaccagtctcgcgtaagtgtacgcgtaatgttggtccgggccgcttcatccaacaataccgccgaaccaaagtatgacatgctggtaagcagtatgacttgtatcgcccacaactcacttgtgttctactcgtgcatataacatctacagcttcgaatcgaagatcatcaagacccataggctctgaacttctctcttctcttgttcctgttctctgagtatatgcactgt

SEQ ID NO: 3438 - DNA, 401 bp, Triticum aestivum
  Clone ID: LIB103-034-Q1-E1-A4
ccggcacgagctaggaccactgggaagtggcccgccacgcggaccatgagacccatgccaatgcagtgatcactactttctgggtgagttctcttcagaagaacaagtccattctagtttcatgaaaatgatttaactcatggcttcttccattcttgttttcatgcatgattgtagaaattctatcgagttcttcgggagcatagggctggagcggaccagatcgtgctgcgccaatgcaagaagaaggcccgccagatgcagtacgaggtgcgctatgtggccatatccacatactaccacgacgttcttggtgtgaagatgaccaaggaagaagcgcggaggatgggcattaccttggagaggcccgagttcttggcggtaagtataaaagatttttc

SEQ ID NO: 3439 - DNA, 354 bp, Triticum aestivum
  Clone ID: LIB103-034-Q1-E1-A7
acggggaagaagcacaaggcggagaatgcgggcgccggcgtccaatgaggccggcggcgatgggaagcagcggggcacgaagaagggcatcaatgccaagtagggcgtggagacgtacaagatctacatcttcaatgtgctcaagcaggtgcaccacgacgttggcatctcctccaaggccatgtccatcatgaactccttcatcatcgatatcgtctataagctcgctcgctaatctttcaattcgtcaaagtacactttcacacccattatcacttcacgggagatccaaatcatcatcggcctcttcaacgtcggagagctcacaatgtatccattcttccaaggtctctc

SEQ ID NO: 3440 - DNA, 421 bp, Triticum aestivum
  unsure at all n locations
  Clone ID: LIB103-034-Q1-E1-B1
cgggtcgacgggtacaataaactgcagaaacttctgtgtgatgaccgtgttccctgtcattgagtggcgattttgctaggaaaatatcatagccaaatttcgctgttggatcntggattttgctaggaaaattaagttgatgcttgtgacaactctgctttcctactcaattgaatactgctgtgcgatgaccatcataggcaaatcttgttgttggatcctgtgtgtgcggcgcctctctcaactttggcttcctgagaatgacctttctcaaagttgcccagtcatggaagcgcataatgatcactggccggtttaacgtgggaactaacaaaatgttgccaagcctccaaaaacctctcgcaacatctaatgttatcatgacagaaaaaaataacttttttgaatccaggtggtttga

SEQ ID NO: 3441 - DNA, 430 bp, Triticum aestivum
  Clone ID: LIB103-034-Q1-E1-B10
aattcgccggtcgacgggataattgaataacgatagctggaatatgaggatgaagaattcttctggaatgatggctttcggtgaaataaaatagaaaacaagttctgaagtagtctagatgggcaaggaaagaatactgacaaacggaataattcgagaggataagaagaagctggaaccatgaatcttcgagagaacggacaagatttagagaaactcttcttcgatcttcaaatgacgacgagaaacaccaccaaaattgttgagatactccgggagaatgaaaagaggaaaggttgaacaaacaatgaaaagaatttgaaagcgatcttggagaaggcatgtgactgatggaatccattcttatgtcacacttgaaaagaatttgagaatcactctagaaaattagaaaagtcaggtaagattctgg

SEQ ID NO: 3442 - DNA, 375 bp, Triticum aestivum
  Clone ID: LIB103-034-Q1-E1-B12
tcgccggtcgacggggaggcgctagtatgagtcatatgaagacctggagcaggagtaagatcggtgacaaattcatctctccgtttatgtggtattgtggttttcgtacaactggagcttgttactagtagagactagagagtaccatggctacaactctgctgcttgtttgcgtgtcttggcatgtattggatttgtactgcgttcgtatgtaggcatgttcactcgatgctatgtttctttgcttgaattatttattctatgtgaggtttcaagcaagtggatttgaaatacagtactactccctccgttccaaaaaaaaaaaaaaaaaataaaaaaaaaaaaaaaagaaaaaacaaaaaagaaaacaaaaag

SEQ ID NO: 3443 - DNA, 438 bp, Triticum aestivum
  Clone ID: LIB103-034-Q1-E1-B4
gggtcgaccggggcaagaaactatatttgggactatacgcgggtgaatgggggtttcagtgaaggagatgaacggagacgatgaagctgatgggagtatacacgggtgtctctttggtttgggcccacttgttaggtgtaacaatgaaatattaggataaaaatgcagcatacattttttaatcaagggataaggaaaatatatgtaaaataacagaaaatgtgcaaaacaccttattttgttggaagttttgcaattaaaatagaatcacaacgtagcagacttgtgggacgtttccatcaatgccatgcatcgagaataaataaagtaactaaattacattcccaaatttcaaaacaaggacttagaaattattctaatgatgtgacagggcattaacaaaatgtttatatatgactctaacacatcgattaaatc

SEQ ID NO: 3444 - DNA, 288 bp, Triticum aestivum
  Clone ID: LIB103-034-Q1-E1-B5
acgggatcactgagaggattcatcgataaattccgccatcagaatatttatctacctgtcacttctcaagagacagctgatcaccatacacagtgtacatctgagctcaagcaagatgtaccaagtgaaggtctgcatgccatcgtcatgactgatcgaccagttgatgatgcccgtgagtacacagatactttacatattgccagatcctgtgtgatcagcacctcacgcaggctggtcatctagcaattggacttgctgagcgtttctcagtcgcagatgcgcatg

SEQ ID NO: 3445 - DNA, 435 bp, Triticum aestivum
  Clone ID: LIB103-034-Q1-E1-B6
cgccggtcgacggggacgacgaagtggatgtggacgagtcggatagagagctcttagatgatgaaaagaaacccgatatcacgaaacgaccacacactcctattggagatgaggtggaatgcaagaagccaaagatagcagaaggctcaaggtgccaaggagaagaacctgaggctggagggataaagaattccgcctgggtctgatgacaggggaatgcagtacacaccagaagcatcaaaactatgatctggaacagtatcctgaataaactattttctggattatgaatgaattctgaagcatggggctataagtgaattatgtatcatggatttgtaactatggtggatgttaagtgaacgttctatcagtgcatcgtgatgacaaggcattaacaaaatgtttatagatgactccaccacatcgattaaa

SEQ ID NO: 3446 - DNA, 429 bp, Triticum aestivum
  unsure at all n locations
  Clone ID: LIB103-034-Q1-E1-C1
cgggtcgactctccaccaaagcgaaatccaccatctcatcgaaagacgggacacctttgcctctatcaagtggtatcagatttccaagttgctcggtgagattttacagtttttcgtagtttagatcgagtctgttcttcatacctacagtccacgaaaaagccacanaaaaaaaattagggttagttcatcatatccgaaccaatctgagcctttgcataatctttttagggttttgctttgttgagtttgcggttgcatcatcggtctagttgctggtcttagcgtctagtcttttagagtttcgagttctggtcataagttgtcacgccgccgccgcaccatcatcatcgcccctgccatctaccaccaccgttccgaatccgtatccatatnacaccaccaatccgtgccgaaatacaacaccga

SEQ ID NO: 3447 - DNA, 435 bp, Triticum aestivum
  Clone ID: LIB103-034-Q1-E1-C12
actcgcgggtcgactcaccacgtcaagacgcgttctacgtaccacgtgcacggtagcaacggtcactgttatcgagaggcaacccaacaccagctcgatcggcttcagtaagcagcagcagtgatcgatcgctcgggttcagttagcagctgcagcgaaggaattgctcgggttcagtcagcagcgaattaatcgctcgggttcagttaacacccaagggatcgatcgctctgattcagtaacgtgtgatcgctctgggttcagttagccaatgcctcgcacacacgcatgtacacaagagaaacacacaaaccacactgcatcgctcagccccgaccacccatcgtaaccgggaactccgcgatattttcctcgccctcgcttcaaccacgatttattctatcatggaccgcccaaagaatgtcatgcagctgt

SEQ ID NO: 3448 - DNA, 394 bp, Triticum aestivum
  Clone ID: LIB103-034-Q1-E1-C2
gggtcgaccgggcagctcattggaggtggaggacggggtggctgagccggcgggacgatgagatcgacgacggatcctcatctggtacggtggatgagggacgtcgaggtgttgctgtggacgacgtcgtcggggaagaggctccggctgggtggcggacggagcagggtgtggggtttcgtcgcgggttttcgcggcctcggtgtacgaatgggtgggcggatgggatagcagtggggaaccatggcttagagacgcgcttgtccgaaatgtggggtaagttacgaaagtacccccaccgattttaggcggttctttcggttcaggggtaccacgggcatttcgcgtgtcgggatttcacaggaggtgggagttttcgcgcgcgttgtaattt

SEQ ID NO: 3449 - DNA, 412 bp, Triticum aestivum
  Clone ID: LIB103-034-Q1-E1-C4
ccggggggccaaagacaatgcggctcgatgcggcgagcgaggccgtggccgtcgggacggaggagaccgggttgtggtcgtcgccgtttttttgggtcgtccgggtcaaatttcccccttttttactattacttagatgcgactcgtcacattagcacgtgataatttgatatgagctagctgactagctcggtttccacgcgggcagtgtgatgattctgatggatttgatgtatgcgctgcggcaacattacctctgattgtctagtagttattaccatccaacttgtttacaatcatcatatgtgatttccttggaagccgcaaacgacaacttcgacggacggctggtgcctggacatatccgaactcctgttgaactcggcgtccttgcgtcggtgtacagacacgc

SEQ ID NO: 3450 - DNA, 341 bp, Triticum aestivum
  Clone ID: LIB103-034-Q1-E1-D1
gggtcgaccgggacactacactcaggatacatccatccgtacgtcggtgacggcgcgtctcgtcacaatgacactacttgcttgcggactcacgacgatcatctgagatatagtacaacgcataagagcagttcgagtacacgggcaactctgtcaactctatcactgatccgcattatgctcgggcaatacgcaagggtggtcacatcgtcatcaaggaacgtcactgacaagttgttgaagtacacagctctataactgtgaagattagtcacacacactcatgattagtagatactgagatcgttaatgaaaaggagcttgaggatcacgttcattca

SEQ ID NO: 3451 - DNA, 257 bp, Triticum aestivum
  Clone ID: LIB103-034-Q1-E1-D12
gacgggggcaacaaggacaggggaagatagcccaaaaccctagtcctcgtcgccggcggcgagatggccgtcaacgaggacacatctgtctacgtcggcggcctgccctacgacgccgacgaggatatgctccgcagctactttgggctctgcggcaccatcctctccgtccaggtgataaatgatgagagaatcaggggcaagtgttaggggtttgtttcttctcgtccgcaaagggctgcccttcctgctctctt

SEQ ID NO: 3452 - DNA, 418 bp, Triticum aestivum
  Clone ID: LIB103-034-Q1-E1-D2
cgggtcgaccgggaagaagcaccaaggcggataagcgggcgccggcgaccaatgatgccggcggcgatgggaagacgatgggcatgaagaagggcagcaaggccaagaagggcgtggagacgtacaagatctacatcttcaaggtgctcaagcaggtgcacccggacatcggcatctcctccaaggccatgtccatcatgaactccttcatcaacgacatcttcgagaagctcgccggggagtccgccaagctcgcccgctacaacaagaagcccaccatcacgtcccgggagatccagacctccgtccgcctcgtcctccccggcgagctcgccaagcacgccgtctctgagggcaccaaggccgtcaccaagttcacctcatcctacgctagtctgccgtgtccgtgaactgatgg

SEQ ID NO: 3453 - DNA, 428 bp, Triticum aestivum
  Clone ID: LIB103-034-Q1-E1-D3
gggtcgaccggttggttgacagctcatgctgatgctgaggatttagtcaaaaggtgtgacgactgtcaaaaatttgcacgtcgcgctcatgttctggctcgggagttgagattattccaatcacttggccgtttgcaacttgggggcttgatatggttggaccctttaagagatccaaggacaaaaagactcacctgttagtggcagttgacaagtttaccaaatgggtagaagtagagccagtcagtaagtgtggtgcggccacgacggttcagttcaccaaaaaggtgatattacggtttggctttccacacagtattataactgataatggtactaatctgtcaaagggtgagatggagtaattttgccaacatgagcacatccggcttgatgtagcatcagtggctcacccccaatctaatggt

SEQ ID NO: 3454 - DNA, 419 bp, Triticum aestivum
  Clone ID: LIB103-034-Q1-E1-D4
gggtcgaccggtgattgaaatgtacattaggaactgactcctgtctgcaaatgttcagtggtggtaaatatggtaaatgtgaagttatcaaagacaccactgttggcataaaatcctatgcaggtattgctgcggagggtatcggaaacagagcgctcttgatggcaatgaattaccatgtcaatacatccaatagcgctttgtgggatcacatgccaatggttttccacacctgacctaagccgaaatttttgcaccgtacttccggcatgttaggccgcgtttcatcttttgcttattctgatagtatttcaaccctttttgtgggaaaagctgatattggttagatgttgggtatagaagagccatagagggaacctgacaaagacattttcggcagcacgacccattctttgcat

SEQ ID NO: 3455 - DNA, 321 bp, Triticum aestivum
  Clone ID: LIB103-034-Q1-E1-D7
gacggggaaggagcacaagtcgcccaagaaggccgccaagtcccccaagaaggcttagtcgattactgtccagtgcttcgtagtagaattagtgatcgctgtttaggtaatggtgtcgatgtagtaatgttctgttctgctttaagaaaaatgtcagaaatctctctgacttgcagtaaagaaaaaaaaaaaaaaaaaaaaaaaagaagcatcaaaataagtaagacaaacaaaaagaaataaccatacaaaaaaaaaaaaaaaaatttacacacacacataaggttaatgtcatttgtctgaaagatgaatggggcacaa

SEQ ID NO: 3456 - DNA, 382 bp, Triticum aestivum
  unsure at all n locations
  Clone ID: LIB103-034-Q1-E1-E1
cgggtcgaccggatggcgaaagggaggcctgagacggtgaagcacgagctgcacgagcacgagctcgtgctgatccgccgccccaagccatacngctgcgacgggtgcgaagagatgggcacctcctggtcctacaactgcgcggagtgcgacttcgatctgcacgccaagtgcgcgctgggtgaggagaagaagggagaggaggtgaatgggcaggagcatgccgctgccccagctgggtacgtgtgcgagggagacgtctgcaggaaggcctaggtagcgttagcgttgtgtgtgttccttgccagctgaagcgtgtctgaatcatgtcctgtgtggtgtgatgataaataaatcttgcatccgatgatttggcttggga

SEQ ID NO: 3457 - DNA, 397 bp, Triticum aestivum
  Clone ID: LIB103-034-Q1-E1-E12
taattagtcgtattattttgactaatattgagtccatggattatacacactcccaactttccgcgtttgcgcaacccctccgttagtgtacatggctttctcacactttgagattgggtacacttctccggggcatctaaaccccgtgttacgatacgctctatcacacataaacctccttatatcttcctcaaaacagccaccatacctacctattatggcatttccacagccattccgagatataatgccatgcaacttccatcatcatcatcatgacatacattacttttgtcatattgccatcgcatgatcatgtaattgacatcgtatttgtggcaaagccaccatgcattatttttcatacatgtcactcatgattcactgcaccatcccg

SEQ ID NO: 3458 - DNA, 409 bp, Triticum aestivum
  unsure at all n locations
  Clone ID: LIB103-034-Q1-E1-E3
gggtcgaccgggttgaataaatcaattgtgagaagagcccttgtgatcatgcaccaganggacgaagtggagtacaagagggagcgccatgtgattgtccgcaaggcttgagctgaactgaaccgatggaactaccatggaaccctctggccatctgatgtgtgtgtataagtagtgctgacactgcagcctgtttcctgaggaaatttgttgcttcgttgaaattgagttgtagttgtactacttaaagctgtagctgtagccctgaattatcttgtcgaactgaagatgtaccacagtaagttcattcatgaatcatttgggcgttctgcagctgagcagagtatgcctaggaaactgaaaaaaaaaaaaaaaaaaaaaaaaagagaaagaaaggaaaaaaggaaag

SEQ ID NO: 3459 - DNA, 404 bp, Triticum aestivum
  unsure at all n locations
  Clone ID: LIB103-034-Q1-E1-E4
ctcagtaaacaaagtgtgtgtcggtgggacagcttgggaggcgcggtattcctccgggtgggtangggcatgtccagaaacaggaggccgcgatcagcatcagcatcgatcaatcaactcacgcattcttgtttcttcatcaagacgcaccgtccgttgcattgcattgcatgcacggacgaccctgcgtgcataactaccattcaaaccgcccgctccgtccgtcggcctcctccgatccgtgtttcttctctccagtaatggtgctacctagaggctatagggcattggttttgttccgtggtggccatgtaactagcaagacttatctaatgaagtcatatcaattcaagatttttgccatcaatggcttaaaacagatgaagtctatcgattgacttcca

SEQ ID NO: 3460 - DNA, 392 bp, Triticum aestivum
  Clone ID: LIB103-034-Q1-E1-F1
gggtcgacgcgaaagtggcaaagactcatgaggccatacaatggagctggcagcacggcgcagcaagcatgagctgcttgagagtgcggatgacaaggcaagaaaggaaaaaggcttttatggtgatcgggatcaataccgcgttcagtagcaagaagcgccgtgattctgtcagggagagatggatgcctcaagatgagaaactcaagaaactggaagaggaaaagggagtcgtcattcgatttatgattgggcatagggtttaaaatgtgagtatgatgtgtgtggagagattgtcatccatgctcagcaccggcctgcaagcaccgtcgtcttgatggatgatgatgatttaatagtcaaggggcttccacagctctctgccatttgtg

SEQ ID NO: 3461 - DNA, 395 bp, Triticum aestivum
  Clone ID: LIB103-034-Q1-E1-F3
ggtcgacgggtgcgaacgataaagaagctagccgagcctatgaggattcgcttacgtagctggaacgtacggtctcctcctatgaagagcttctcaccattcggtacactcctaagcatgtcttccacgccttcccagaactccctcttggtgttctcattgtggcctacttgcggggcatacgcgctgataacattgagacccaagtcctcatctaccagcttgaccaacataatccgatcgccacgtctcttgacgtctacgactctatacttgaggctcttgttgagtaaaatgcctacgccatttttgtttgcagccgtccccgtgtaccacatcttgaaaccggtatcctccacctccatcgccttctgtattctccatttggtttcttg

SEQ ID NO: 3462 - DNA, 229 bp, Triticum aestivum
  Clone ID: LIB103-034-Q1-E1-F4
gatcctcacaagcatggacccaacagcaccagcgtgtactcgggttgctgctccaacagttgatcatctcgaacatcgcgcactactaataagggataaattcactgctgatggttggccttgtccgcgttgctatcaagtgaacaacctcatatacaatctactctacacggttccagctttcgagtgtactacacccgagatgtgcactgctaagtgccctgcgata

SEQ ID NO: 3463 - DNA, 72 bp, Triticum aestivum
  Clone ID: LIB103-034-Q1-E1-G11
ctgcttgccacattggacaagggcgggagcggatgctgctcgagaatcgacgtgtgctgtgtgcggtggtgt

SEQ ID NO: 3464 - DNA, 382 bp, Triticum aestivum
  unsure at all n locations
  Clone ID: LIB103-034-Q1-E1-G12
cgggccgacgggaaaaccgattagtcatccgcgcatcgtcgtggccgtccgcccgtcccttccacggcacatgatagcctgacggttgccaactttctttggacgtgagaatttgatcgtcctgtgctcagcaattcggcataatgcatgatactggtgttgtcgtcgagctacgtccacctcttcactctgggagttctggaccaccacgcccacatgcacaacacgccagttcagcgagcaatcttgcgaggattggagcttggaaagacttggctcacgtacgtgcgtgcttggccgacttggactcgatggcgtgtgtggctggcggcaaaacaggcagaagacgtgcctgacctggaaggangatgccgtcgtctcg

SEQ ID NO: 3465 - DNA, 328 bp, Triticum aestivum
  Clone ID: LIB103-034-Q1-E1-G2
cgggtcgaccgggatggcctggcgggtaatgttcactatccgaattcgctgtacggtcttgtcggtcaagagcttcatgaccgtgtcttgtgcagtgctgggttcttgtgtcgaggacgagtaccagccgcggggatccgttgtacttcaaataacactacccgttgtaaattgactcctggcgaatgtatggatcaatatccagtgggttgtctgtcatgacaacaatagagcaatccttgaagtacaaacaaagtcttcggaggtttccatcttgatcacactggggttcacctatctgataatccttccttatacttatatgtga

SEQ ID NO: 3466 - DNA, 436 bp, Triticum aestivum
  Clone ID: LIB103-034-Q1-E1-G4
gggtcgaccactttgctgcatgcatggtctttgtatatctgagtgagtcgtatggtcaagtggtgaactgtcatccgagtggatggtatgctgcttggtcgagtggatagtatgctgcttgtccgagtggatagtatatctctatgaaatttacctagaccgacatgttgtgtggaccccatgcttcatgatatttcgacccttcgtgggcctacctgttatgtgtaatgccaacattatctggccagcatattccatgtgctgacccatttcgggctgcaacatatcatgttgcagacttttcagacgaagagtaaggtgcgctaggttgttgtcatgcactcagctatgccgttggagttgatggactcgctttatcttccaagtcttccgttgttatcttgtttagatggccttaagccatatttactgtaat

SEQ ID NO: 3467 - DNA, 298 bp, Triticum aestivum
  Clone ID: LIB103-034-Q1-E1-H1
acgggcgtaggtagaggcgcccacatcagcctcaatgtcaaggggcaggatggcaatgaggttttcttccgcatcaagagatccacacagctgaagaatctgatgaacgcttagtgcgacggtcagtctgtggatctcaactccagtgcgttcctttttgatggtcgtacgctccgtggtaagcagacccctgatgagcttgagatggaggaaggcgacgagatcgacgccatgcttcacgagaccggagggtgctttcctggcccttagagagagcttgctgcagcctgactgttct

SEQ ID NO: 3468 - DNA, 396 bp, Triticum aestivum
  Clone ID: LIB103-034-Q1-E1-H10
ggccgacgggttattccaccttttgccgacacatgggacatccagcatccaggtcgtgtcatgcaagaaaatagagtggtagttgaagccatgatatgtgcatcttgggttaaactgtaaatagaatcttactactcttgagcaactccaaaagcggccaccgaagatctttattggatttgtttttcatcaccagcacgtcaaggtgaaagatgtgcaggttccgtgggtcctctttgttttcactgacatgtgggaccgcatgtgagcaaacagacgatgggctccgcgcatccgctggctggctgagaagagagatagaggagggctgagcacggactccaggaaatttgttctgcgtaaccaacaccttgatattcgcgtgtggttgtttcg

SEQ ID NO: 3469 - DNA, 415 bp, Triticum aestivum
  Clone ID: LIB103-034-Q1-E1-H11
attcgccggtcgacgggggcagttactcagttgccccttagaggttagtgctaattgagttcatcattttacttcagttaatgccaccgctcatcaagaatactatttaacattggcagggatatgaagcttgtgcctttgttaactggctggatgaagaatggcatggcatggctcggagtgttatcaccaagctcacagaagataacgtaaagctaaagaagaaacctgctgatttgaaatgtacaatcagtacgatgaagcaagaaataatcaatcataggcaaccgatgaaagcagagataagaaggaactagcatgtgtagttgtggttgtcgcattagccatgttctatgcgctgtttgcaatgatgattaggggttttgtttgacagtattgctgaagcacatctaga

SEQ ID NO: 3470 - DNA, 370 bp, Triticum aestivum
  Clone ID: LIB103-034-Q1-E1-H12
cgacgggacaaatgagctcgtgtgcggccagaaagtcctcaacaccggatcccccatcactgtgcctgttgggagggccacccttggacgtatcattaacgttattggtgagccaattgaccacaagggtgacataaagacacacgacttccttcctattcatcgtgaggcccctgcttttgttgagcaagccacagagcagcaaattcttgttactggaattaaggttgtggatttgcttgcaccttaccaaaggggtggcaaaattggtctcttcggtggtgcaggagtgggtaaaactgttcttatgatggagttgatcaacaatgttgccaaggcccatggtggtttctctgttttcgctggtgtc

SEQ ID NO: 3471 - DNA, 409 bp, Triticum aestivum
  Clone ID: LIB103-034-Q1-E1-H3
cgggtcgggcggcaagaagaacgtagagacctacaagatctacatcttcaaggtgctgaagcaggtgcaccccgacatcggcatctcctccaaggccatgtccatcatgaactccttcatcaacgacatcttcgagaagctcgccggcgaggccgccaagctcgcccgctacaacaagaagcccacgatcacctcccgggagatccagacctctgtcagcctcgtcctccccggggagctcgccaagcacgccgtctccgagggcaccaaggccgtcaccaagttcacctcctcttagattccgttgcctgtatctagtaccagatgtggttgttcactctggttatgcccaagtagacgtagtgctagtgctggatgggagttgctgaatgcttaccgatgcttcgtt

SEQ ID NO: 3472 - DNA, 406 bp, Triticum aestivum
  Clone ID: LIB103-034-Q1-E1-H4
aattccgggtcgacggatgaaaaaaaccaccaaaaacatcaaggtcaccaagccccgcgcaaaccattaccccaaggattacaatcccaagaacaaggatttggttaaccttaaccttaaggcccggataaaggttggttttatgtcagtcccgaggcaactgccgtttgtgtcaaaatcagaggtaacaatgccatgcacccaaagaccaagaagatcttgcagctgttgcgtttgaggcagatattcaatggagtgttcctgaaggttaacaaagccaccatcaacatgctccgcaaggtcgagccatatgttgcatatgggtacccgaacctgaagagtgtgagggagttgatctacaagagaagttatggcaagctcaacaagcaaaggattcctctgacca

SEQ ID NO: 3473 - DNA, 374 bp, Triticum aestivum
  Clone ID: LIB103-034-Q1-E1-H6
gacggggggtgtcattgggtatggtatcctagataggtccatgaccctaccttaggtacataacctcatcattagcccccgaatggatcgaggttcgagtgaggaaggagttgttggttttctccgacctatttcccgtgctttgattatgtcgtatcctggatcagcgatttttctttttggcgttggcatcaacttttctttcagtcgccttgatccattcctttcttctgtcgagtgaacttttgaactttagtgaacttccgagtgacggatcgtaggaaagatatcgtctgacagattgatctgccgttagcggattttgtgggatccgaattttgggaagcgcatgaaacggggcggaccgcggtact

SEQ ID NO: 3474 - DNA, 269 bp, Triticum aestivum
  Clone ID: LIB103-034-Q1-E1-H9
acgggttgaaagagtcgccgagggtgatggacgagctgctcgccatctccctccggtgcattcgtcttgtaaatgagaggcctaacatgaagactgtctgcgacgatttgtgcgccagaagagcgtgagcttccccgcgttttttctttctttcatcagttcaccagtgtacatgtatccgatttctctcgtcgtcgtcgtcgtggtgcatcccaaatcttttttctgtgggttttccagagccttgtaggtagggtttgttcgactgg

SEQ ID NO: 3475 - DNA, 175 bp, Triticum aestivum
  Clone ID: LIB103-035-Q1-E1-A10
ataagaagtactatgattaaaccggtaaccatcgttgaaaagggttggattaaggttagcaccaataatccggggttggatgcaatggttctaaccaatgtgcagcggggccccttcaaagacataacgaccaacacacgagttacctcatgtgccaccggtttggaatgatggc

SEQ ID NO: 3476 - DNA, 381 bp, Triticum aestivum
  Clone ID: LIB103-035-Q1-E1-A11
aaagtgactctaattagaatcttgttatcgatgcacggagtcgagcttctgcgagcacatcaacgacaagatcagcggctactgtcacggtcactgcaagaatgacggcgagcacaatgagaagaatgccatggagacgctcagggacaactaatcatggctgatgggccatagtgacgacaatggatactgtatcatcagtagatttatcgactgctactgagccagttctggtcgcgttcacttcaggcgatatctgtacccttggtatatcgtgtcttgtgctaacatatttatgtaatgcttgcaatgtcgcatggatcatgtagtctttcagcaccctgccatgcatggtgcctgtgataccaacgttaaagaatt

SEQ ID NO: 3477 - DNA, 420 bp, Triticum aestivum
  Clone ID: LIB103-035-Q1-E1-A4
attccaggtcgacgggacccggtcagcatctgaaacagctaggtccgcagatgatcatgctgatcaatatgctcatgtgcaatggctttggagttgagctttctagtttcaattgatcagatgcgacgatagatcacgcgtgttgacagtgtcctaggaagcgtttgtccgcagttgtcgatcgatctcacattcggaactcgaggctgaaactctttggcttcggtccggtccgaagatgcgctcgtgcctcaaattatgggcacactccatgttgcagttgcagctgttgctattgttgacaacatcaacactaacacgtacgtgtatacccttagagcatgttaaggaccgcacacaaggaaatgcctccttattacgcacaaaataatgattcctccaactgaaaatctgggaacc

SEQ ID NO: 3478 - DNA, 281 bp, Triticum aestivum
  Clone ID: LIB103-035-Q1-E1-A7
tcgacgggggccactaggtctacaacgccatttgtcggctgtgtcctaaaattgtcaacgctcttataaaagtttacagagggagtgtcagacgtcttggcagttcacattgtactgccatgacctcaaatatttatgagcagactgagtattatttagctctaccttgggttgccgatcaggtccggaatttctactcacttgtttagacactatgttacagtaggttctactacaaggttctgcccatacatatctggttgcaaacagattggaaattt

SEQ ID NO: 3479 - DNA, 393 bp, Triticum aestivum
  Clone ID: LIB103-035-Q1-E1-A9
aattggtcggagcaacaagaccaaacaaaactccaaaacaaccaattaaaaaaccaacattttgaacaatacccaattaggttgaaaaaaacatgcaaaaagaccttgcaaagatggagcagatagggtgggaaagattgtatgtatgtggatgagagagtaagagacaaacctaacgagacagggggggggagatatagagagaggaagagagagtaagaagttaggtctgtgagaaagatggagacatgtaatatacttgagatgcgtgtgcatccagattttgtatacgtggaacgagaagagacaacatgtttgatgagagagctggaaaaacatggacgagacgggaaggatctcgcgggttgagggattgataattttgtgtggggg

SEQ ID NO: 3480 - DNA, 194 bp, Triticum aestivum
  Clone ID: LIB103-035-Q1-E1-B10
ccataagggtttcccttaaagtcggctatatcattctcacaaaaaattgtggaagggggcaccgcaaatggcgaaggacacattcacctggatcaccttgttgcatctttggtgcaatccctgcccaactatttatatgttgatccccggggtcgaaacttggtgcagaagcctcctcaaagtcggtttttccc

SEQ ID NO: 3481 - DNA, 402 bp, Triticum aestivum
  Clone ID: LIB103-035-Q1-E1-B11
tcgcggaccggaaaattgtgctcaagtggtagaagaagaattacatagaatgcttggaatcaaatatgtgaacgatgaacatgattgcaatgttgttagtatgaattccttgaatatcaatgatgctaatgatatgcaaagccacaagcttggggaagttatgtttgatgaatatgatatttttagtcccccaagttttgatgagaaaatttactatgatgaaagcatgcctcctatctatgatgattattgtgatgacacgtatgctttaaagaataatgataaccatgaaacatgtcatcttgaccttaaatttcaatcacatgatagttattttgttgagtttgctgccactactattcatgagaagaattttgctcatgttgagagtagtaaattttc

SEQ ID NO: 3482 - DNA, 174 bp, Triticum aestivum
  Clone ID: LIB103-035-Q1-E1-B12
tggggtcaaaccgtaacctggtgtcgaaggcctcctttgaagccaaaaggaataaagaccgggttgccactaacctttgggttaatggcaatgattttaaggacaaccatggcagttaacatgggcctggcggttaacggacaaaaaagccattgacgcacccattccattttg

SEQ ID NO: 3483 - DNA, 142 bp, Triticum aestivum
  Clone ID: LIB103-035-Q1-E1-B4
cataagatggatcaatgcgcggctgcaggtacactcggagacggatctgacacgccagtggcagacattctattgccgtagacaacggtctgtgacggatacttcataagctgtcatttcctatcaaccctctgaaccagta

SEQ ID NO: 3484 - DNA, 349 bp, Triticum aestivum
  Clone ID: LIB103-035-Q1-E1-B5
taaagacagagatggaggacggcgatacatggacaatacaacggctaaggtgatctgggagaggatatgagatgcagatggcacacaatgtactgcgggacatacaggtttgtgatgggtacttggtaagctgacatttgcgtatactccccggcaacagtgccagaaatccttcttgctacctcatgagcactgcattggttttcccttcaagatgaaacggtgatgcaccaaaatagcgtaagtatttccctcaatttttgagaaccaatgtatcaatccactaggaggccacgcacaagtccctcgcacctacacatacaaataaaatcctcgcaatcaatgcaat

SEQ ID NO: 3485 - DNA, 401 bp, Triticum aestivum
  Clone ID: LIB103-035-Q1-E1-B7
ccgggtcgacgggtagctggaacatcaaatagttctgattctttttgcactgtcttcctatacaaattgtttattttgcctaattttggtagaatttttaaagtatcataagtatggtgaatgttcaaattattacagactgttctgttttagacagattctgtttttgatgcatagtttgcttgttttgatgaaactgtcaatttatatcagtggattaagccatgaaaaggttatactacagtagaaacaatgcaaaaacaaaatatgaattggtttgcaacagtacttagagtagtgatttgcttcattacactaacggatcttaccgagttttctgttgaagttttgtgtggatgaagtgttggatgattgagaaggtttcgatgtgagaagaagga

SEQ ID NO: 3486 - DNA, 461 bp, Triticum aestivum
  Clone ID: LIB103-035-Q1-E1-B8
ggtcttaggactcccgggtcgacggagtgtgaaaagttactttagaatcaacaatataagatctgaacttatcacaagcaaatacaactgctaaaagctctttttcagtagtggcataatttctttgagcattgtctacagtcttactagcataatgaataacatttaatttcttatcaactctttgacctagaacaacacctacagcataatcactagcatcacacataatttcaaaaggtaaattccaatcgggtggctgaacaataggtgcagagactaatgctttcttaagtatttcaaatgcttctacacaatcatcatcaaagacaaatggtatatatttttgcaataaattagtcaaaggccgagagatttttgagaagtccttaatgaacctcctgtaaaattcggcgcttgacaaaggaaaattcttatacctttgatgtccttgggacatg

SEQ ID NO: 3487 - DNA, 336 bp, Triticum aestivum
  Clone ID: LIB103-035-Q1-E1-C11
ttcgcgggcccacaaacatagccataggcccccggatcccgatgccccgtgaactgtggaaaaaaaaagggaaccagttaaattgaaggcaacaaccagagtggcaaacctgtgtaatgcccagagctcgtctctctcgggtcaaagatccacagttcgctcgcgacggcgagctagctcagctcagctcgcgctctagctccatgcatgcttggatcgatgcgctggtgtttactgcattttggttcgcatttcgcttatgtttgtactatgatgagatgatgttcgtgagattaaactctgtttggtgctcccgtcgtgagctgtatgatgatg

SEQ ID NO: 3488 - DNA, 121 bp, Triticum aestivum
  Clone ID: LIB103-035-Q1-E1-C2
gtctggtgacatcttctcactacctgacaattgctcagctgatgtcttacatgcacaacgacctggtgataccccatcccatgagcgttttacaagtttatttaacctcttggcttgctaa

SEQ ID NO: 3489 - DNA, 394 bp, Triticum aestivum
  Clone ID: LIB103-035-Q1-E1-D1
ttccaggtcgacgggggcgcgtggggtttcaaggattttggtggcctcggtgtacgaatggggggtgacgaaggggaaggtagggggagccatggcttagggacgcgcttgtctgaaatgtagggtaagttaccagcgtacccccaccggttttgacaccgcgacgtcgagccggcatttctggctgaggggtcgaaggggaatttcgcgtgtctgggctgcgggaccaatttcggatgaggagggagttttcgtgcgcgtcgaaatttcggggtaacaaggcgcggcgcgggttgaagaggcgggagtttcaaagcagatgagacaaaagatactcgagcttgaaaattttgggataacaaggcgcggattccttgttcggcagaacaaactt

SEQ ID NO: 3490 - DNA, 305 bp, Triticum aestivum
  Clone ID: LIB103-035-Q1-E1-D11
acggggggccggagcgtttttttagcgcaatatagaggcccttctggtgggtcccagctgtcaaatggaggaatcattattttgcgcgtaaagtcaacggccgatggatgtcgttcgttggccacgttgacaaggccgcgccgatagcaccatggaggtggacgacggcgaggcctaagaatggaactacacggagccggggaagactcggcactggttgcccatgcggtggggagtacgaaggtttacaggtccagctgccgtcgcccgaaaataacatgaggtgtgggtgagtagatgaatgg

SEQ ID NO: 3491 - DNA, 298 bp, Triticum aestivum
  Clone ID: LIB103-035-Q1-E1-D12
ccggcgggcataacggcttcaaaggaggctggcgtcaagggaaaaacccggggccccaaaaagggcaccatggcgaaaaagggcttggaaacttacaaaatctacatcttcatggtgctgaagcaggtgcaccctgacatcggcatctcctccaaggccatgtccatcatgaactccttcatcaacgacatcttcgagaagctcgcccgggattccgccaagctggcccgctacaacatgaagcccaccatcacctctcgggagatccagacctccttccgcctcgtcctccccgggg

SEQ ID NO: 3492 - DNA, 133 bp, Triticum aestivum
  Clone ID: LIB103-035-Q1-E1-D2
gatgtggtccaaaaacacaatggtgggaaagggttcccctttggaaaccaattttgccaaattaacaacttccttaattttcaatccaaggaagttaagaaattccaaaccctccaaattccggcccaagctt

SEQ ID NO: 3493 - DNA, 397 bp, Triticum aestivum
  Clone ID: LIB103-035-Q1-E1-D3
attccaggtcgacatgcgcccgcaggaaagcaacgagcgcgctttcctatttggggtcaagagtggcgctgatggtgaaggtaccaccagcgctatcctccttgatggacaccttcttggtctcaggtggagctgccattgccttctttcgcttgccggtggagctcgacggtgcgtcctcgacggtagcgcagcactccgaagaggtgcgcttgccggagtgggcatcagagctcttgtcggacttggtcttcttcttccccccgggagcttcagcggcaagtatcttgcgttctgctgcggctgctgcttcccggtagatcttgtcggcacagataagagcatccttcttgtcgccagggacagagatgacacttattgggcctggcattttcag

SEQ ID NO: 3494 - DNA, 291 bp, Triticum aestivum
  Clone ID: LIB103-035-Q1-E1-D4
gggaccggaaatgacggaacgctaaacctagacaaatcttgaggaaaatggagcttggaggtcgagtttggagaggagaaagcttaagtaatgtggctcgggcatttcatcgaacacctcatgtgcataggaggtgagctagagcaccacaaagccctcccccgccaaccagaaaaaaacagagcagtggaatgctttgctcgcgggcgaggggtatatatagccacctcattggtcccggttcgtagctggaaccgggaccaaatggtcccggtttcagctacgaaccgg

SEQ ID NO: 3495 - DNA, 334 bp, Triticum aestivum
  unsure at all n locations
  Clone ID: LIB103-035-Q1-E1-D9
ccccttctcccctccggaaaaggccttccggcgtttcccctttaatttctccggaaccaacttgcccggcgggaatggtggtcccctcggccgccttctcaactccggtggggcgcataccagtgcatttggctgcaagccaaagaagttgatctcaaacagaaattacttgcagctagcagctccctcaaattcccaaaatgcagatctttatgggaagttgaccgtctgcagagcagaaagtgaagattctaaaggcgggggaggattcttgactggatttctcatanggggagcagtctttggaacgctgggttatgtctttgctcctcag

SEQ ID NO: 3496 - DNA, 393 bp, Triticum aestivum
  Clone ID: LIB103-035-Q1-E1-E12
cgggagacctgatacactgctgatcatcaaccaacttaagggcccaatggaaaatttaagccaaccaaaccccttccggcggaaggatttaaaaaacaatggaaacccaacaattcataagccaaagttggggttgaacaatttaactacccgccttggccaccgtgttgggaggatgatacaatctcttttccctcaagacccaaatttccgtggccgccgagttgtgaccttccacaatcagcgagactatatatttttccgtcatcacaggtacatctttgaggagaaagaaaagaagatcgtttcaaaggacaagaaatcgaagggtgaaacgaaaactgagaagcaaataaactgccgccttcaagaatgccgccctcggttcaccct

SEQ ID NO: 3497 - DNA, 405 bp, Triticum aestivum
  Clone ID: LIB103-035-Q1-E1-E2
attccaggtcgactggcccgacgaaaagcctaagcagcttttaggcacaacgttcgagacgagtggctagccagacacctcggccaagaaaagccaagaacaatggccgcattaacaagcctcatgacccgcttttgcgcaggagaggacagctggttggcaagatgtagcaccagcgacctgagtacatccgaaactagggatggaaacggaaaactgcgacgcaacaaggatcgtcgccggactaaggaaaacagtccgaagagcacgacagtcaacgccggattcaaaagctcacgacagaatcagaaaaagctgcccctccagcataacagggacgagctatccaacctaaacaaaatcttggacaggatatgtcaaatacacagtaatcccgggaaacct

SEQ ID NO: 3498 - DNA, 398 bp, Triticum aestivum
  Clone ID: LIB103-035-Q1-E1-E4
ttccaggtcgacgggacagtcgcacttcgttaacgcgccgtgatgctcgtgtggatgtgcccgcttattatcaggccggcagctttgtgtgtcgcgggggcgccacctactgaaataaatggattgcgataaatgatgaaataaatttggttggataattttgcggagtgtcttatcatacctcgcgtgctctcgcctattatgctttggttaaattttttccttttcacgataatacgtttctcatttatatcataagcgtcgtagtacaagtcacgtatacatccacctaataaaactgaaaaaactgcagaacactagtttttaggtaaaggaagaccagccaattacaatcaagactgaaaaaaacatctaagcttgacaccaatgctggggcc

SEQ ID NO: 3499 - DNA, 340 bp, Triticum aestivum
  Clone ID: LIB103-035-Q1-E1-E6
ggtcatagactcccgggtcgacggagaacacgaccacggctgataagcgggcgccggcgaccaaggaggccggcggcgaggggaacacgacgggcacgaagaagggcagcaaggccaagaagggcgtggagacgtacaagatctacatcttcaatgtgctcaagcaagtgcacccggacatcggcatctcctccaaggccatgtccatcattaactccttcatcaacgacatcttcgagaagctcgccggggagtccgccaagctcgcccgctacaacaagaatccgaaccactcacgtcccgggaatatccagacctccagttcgccctcctcttcccc

SEQ ID NO: 3500 - DNA, 375 bp, Triticum aestivum
  unsure at all n locations
  Clone ID: LIB103-035-Q1-E1-F1
ttccaggtcgacggggcagaagacaaggcggagaagcgggcggcggcgaccaaggaggccggcggcgaggggaagacgaggggccggaagaagggcagcaaggccaagaagggcgtggagacgtacaagatctacatcttcaaggtgctcaagcaggtgcacccggacgtcggcatctcctccaaggccatgtccatcatgaactccttcatcaacgacatcttcgagaagctcgccggcgagtccgccaagctggcgcgatacaacaagaagcccaccatcacgtcccgggagatccagacctccgtccgcctcgtcctcnccggcgagctcgccaagcacgccgtctccgagggcaccaaagccgtcaccaag

SEQ ID NO: 3501 - DNA, 224 bp, Triticum aestivum
  Clone ID: LIB103-035-Q1-E1-F10
tccaagtccactccttacaggcgggtttgggtccaaaagatcggtaatagtcccaatcaacgtttacctcaggatatcaatgggattaactaggataagttttaggagcggccacctcatgaggtaaaccggcctttcaagtcaaacgattactttcttcagaacaaggaacttttttacaagacctcctttcggtgtgccattgaaaattattacccgtagga

SEQ ID NO: 3502 - DNA, 336 bp, Triticum aestivum
  Clone ID: LIB103-035-Q1-E1-F11
acccgtccctcaaccggcagatagcaacaattaagccgccaattaatccccttccggggtccattcacgaacggacttgaaggcattgggtgtgcccccctggccggacattggcaagaatcattccggctgcacttgcaacggaaggttcacaccagtttggggctccaggataggggacggttcaggaacaataggatgataaatcccacccctgaatgatacagttgccctgctgaatggccggtaaaactgcagtaatacttctgttacacatgtcattaacactgcttataattcctactacttgggatgtaacgataggacatcatgggg

SEQ ID NO: 3503 - DNA, 342 bp, Triticum aestivum
  Clone ID: LIB103-035-Q1-E1-F12
tctggacaggaaacaaaggcataatgggaattggcggaggcattgggatcctcatccactcctccaccgtcgagaggctctacgcctgggataagaagctgtttctcgaggtcaagaactacgacggacataagcaggagcatgacaggaacgtggggctgctgaggaagcaggaggtgaggggcgtggactacctcaagatggagaagaacaggatggagatggagagcctcgagtccaatatgctggtggccacccagtccatcgacaccaccacctccgagattatcacgctcagagaatccgagctgttccctcagctacttgagctggttgctggct

SEQ ID NO: 3504 - DNA, 406 bp, Triticum aestivum
  unsure at all n locations
  Clone ID: LIB103-035-Q1-E1-F2
cgcctgtggtacggctcgtagaattccaggtcgacttggtaccctgctcaacatgccaaagaggagcaaagatgggccgaaagcaagggcagacttgaaatcaatgggcattangcaggagcttcatgctaatgatgatgataatgatgatgatgatgatgatgaggcgaagcaggacacagaaactcctcgcaaaggcaaaaaggctaagaataccggaaatgactaccctcccgcgtccttcactctaagtcatgaggagatcgagcagtttttcacctgctatcggggaaaccgatccacgaacacctatgggaccagcggaccgagcccctttcggttcggcgggagcggagatcgcatgaagagcggatcgaggcgaagcacacgagcagtttacccagct

SEQ ID NO: 3505 - DNA, 446 bp, Triticum aestivum
  Clone ID: LIB103-035-Q1-E1-F3
aattccaggtcgacgggaaccacaaacaagcagagcgaagtaagctccgagattgtggaaatggaggacgatcaacctgaactgaaatctgaaaccaaggcactggaggacatacatgaagaagaagaagaaggtgcagagttattgaaatgataaagagtcttgtgttcttgggcaggtagatcttgtggttttactctctggtggattgagtttgtcaacatctggttgaaatgtattgcttgtagtgcctgaacttaactctgctggtgctgtgatatggccatgtgggtcattcatatctgtcctgccgtaggacaccaccaggattcactgctgtatggtcaaacagtgttgtatggaaatgactgcattagtgtgcactcgatgttaaaaaaaaaaaaaagaaggaagggagaggggagagaggaggggggggaggagag

SEQ ID NO: 3506 - DNA, 386 bp, Triticum aestivum
  Clone ID: LIB103-035-Q1-E1-F4
attccaggtcgacgggacattctgacaaaattgagaaaaatggctggttttttgcaagatgatgatgtcgaactttacgaggaaattaagttcgagccaaatgtgatgtgtgaatacattgataataggattatatttcgcacttgccagctggaagatggtgatatcgtttgttttcaaatatcgccaaagccagatactgctgaccactttagataccctgatgtcacatcgtttctggtgtatatacgtaacagacaggttgtcgacttccggtcgttggataatcccaaggaggatgatttttgcctatagatgtcaaagattttcacgtacgatgaagttgtacaaaaagtcgctcaacagcttggtgttgatgacccatc

SEQ ID NO: 3507 - DNA, 395 bp, Triticum aestivum
  Clone ID: LIB103-035-Q1-E1-G1
tcgacgggtaccaccataacacaaagaaaaaagattataccttgctggtcaaattaacctcactgccggctgttcgtcaaagtgatggacaacgacctcgcgggcccacagaaagcgtcacacgcgagtatcaagtgtcgtgtaggacaaccaccgactgcatgtggccaaaacatttatgtatgaaagggttgtgtaatgttttaaataacgatttcacgactctgatgtggcatcaaccggcctaacaaaacggccaaccacacggtggctcacaactcgtagtgtactgcgagccacccgccacccccagacgcacacacccacacacacaccgcgaatccaccgcaactacgatgtatgttaatttaattatcccgcggtgaacatacatg

SEQ ID NO: 3508 - DNA, 261 bp, Triticum aestivum
  Clone ID: LIB103-035-Q1-E1-G11
gatattactacggcattgcaaccttatgatatgagaaagaagaacgcggtggaagtctctcatggtgaaggtttgctagtcaagggtgggcagtggcagaagggatatgaggcagggaagaacaagatcaagaaaaagaatatacagtgtcacaagtgtaagcagtggggacatatgagaaaggactgtccagaactcaatggtggggcaagtgctaataaggcaactcatggtgatgactcagatagcagtagtgatgtt

SEQ ID NO: 3509 - DNA, 386 bp, Triticum aestivum
  Clone ID: LIB103-035-Q1-E1-G3
gtcgacggggctcgtcaacggggtatactactacaccatgtgggcggtgggcagcaccgacgagctgcaggtcaccatcgacaagtttgaggacctgaagaagaaggaggaggccgcctccgcaagctcctccaccccaggatcatcataaacaagcacgcccttaactttgaaactagctactgcctgcctctcccaggaccatgggttcggtttgtatttgataataatgggtgctgttagttagatggagcattttcattcatggcatggatggagcttggagttgatgatgctttttgtttgtgtgaatcgtaactgcggtgtctggaaattatgatatgatattgcctccgcttcagaatataaggcgtactgtttttgcc

SEQ ID NO: 3510 - DNA, 397 bp, Triticum aestivum
  Clone ID: LIB103-035-Q1-E1-G8
ctggctatattaaagcaaacgtgtggtgtttcggccgtcaggactttcagagacttcagagagtttcgccggctgaagcaagctgcagctctgctcatctgctttcctttcttgctttgtactgctccttgctactccctccgtcccaaagtaaatgtctcgactttgtattagcattagtctaaaattgtactaagcttgagacacttattttgtgacggagggagtaattaacagctgttaacactgagagcaggaatgaatggatggtgcttgcattagttacctggcacatcaaggagggaagcttggaacttggcctggcactaacatgtatggtcatgccacactagacttgtcagttcttctcactggtttctctttccctccgctgttg

SEQ ID NO: 3511 - DNA, 312 bp, Triticum aestivum
  unsure at all n locations
  Clone ID: LIB103-035-Q1-E1-H11
gcatcgtcctgggcgacagcggggtccggaagacgtcgctgatgaaccaatatgttcacaacaagtttagtcagcagtacaaagctaccaatggcgccgatttcgtcaacaagggagtcctcaatggagacaaggttggcaaaatggagatttgggaaaaccgcgggcaaggagagatccaagagtcctgggtgtcgcattctacagaaggggcagattgttgtgtgcnttgttatgatgtcaatgttaacaggtcaattgatacgctcaacacatggcatgatgagttcctcaatcaggctagcccctcag

SEQ ID NO: 3512 - DNA, 376 bp, Triticum aestivum
  Clone ID: LIB103-035-Q1-E1-H2
tcccgggacgacggtgatggcaaagcctatcagggggctaacggcggggctgggcttcccaaccctcaacctgcccggtcccttccccttaaagttcaacggcggccccccctggaatcccaagcatccaagccaagaaaaggaaaaggaaaaaattgaagattgagaaggaaggacggcaagttagtgtcggggattattaccaaccaaaaggacctacaaaaaatctcgacttgtggttatgttttctgggactgatttccaggcggttcctttgatgtaatatacattcaggatttggatgatcatatctctttaagtgctctcagtttttacaggaagtcatcgatttcaaaaaaaaaaaaaaaagcggccg

SEQ ID NO: 3513 - DNA, 402 bp, Triticum aestivum
  Clone ID: LIB103-035-Q1-E1-H4
attccgaggtctcccgggtcgagtgagaggcgccagcatcaacctcaaggtcaaggggcatgatggcactgaggttttcttccgcatcaagagatccacacagctgaagaagctgatgaacgcttactgcgaccgtcagtctgtggatctcaactccattgctttcctttttgatggtcgtaggctccgtggtgagcagacccctgatgagcttgagatggaggaaggcgacgagatcgacgccatgcttcaccagaccggagggtgctttcctggcccttagaaggagcttgctgcagcctggctgttctatgtcgtatgctacctttagaactagagtaaaatgtaagaagtgaaagaacttgtgaggctatggttctgtgccatagcctgaaggggggt

SEQ ID NO: 3514 - DNA, 257 bp, Triticum aestivum
  Clone ID: LIB103-035-Q1-E1-H5
acggaactcacgataatgagtcgcattatcatcgtgctgtgcgagacagtagtcgggaatacgtcgctgatgaacgtataagttcagatcaagtttaatcagcatgtacagttcgaccattgcatgcggagtttcgtcaccaacgaagtcctcattgaagagaggcttgtcacattgcaaatctgggacaccgccgggcatgagagattccagagtcttggtgtcgcattcaacagaatggcagattattgtgtgct

SEQ ID NO: 3515 - DNA, 420 bp, Triticum aestivum
  unsure at all n locations
  Clone ID: LIB103-035-Q1-E1-H8
gaatggtcaaggtggatttatcacactcacgttttcttcangagtttggcaataaaaaattaggcgcaacccctagtatctgaactagtgtgctgtaaacacctgatggatacgaacctattcattgcataatgcggaaaaaatcgctaaagatttgaaacctccgaacagctgaccgattcacgccgcatcatgatagtcagttttcggctttctctactaaggtgctcatccggataaactaggtcacaatcgtagtagttctccctttactaccctagccgatattgcggaatgtatggtagtaagcacaggagccgggcaacccaactattgaccaaagacatgattcggagccaatgcatataatgccaaattcgtggtgggcaactatactgtaaaaagtgttcggactttttg

SEQ ID NO: 3516 - DNA, 372 bp, Triticum aestivum
  Clone ID: LIB103-036-Q1-E1-A11
cccgggtcgacagggttgaataaatccattgtgagaagagcccttgtgatcatgcaccagagggacgaagtggagtacaagagggagcgccatgtgattgtccgcaaggcttgagctgaaccgaaatgatggaactaccatggaaaccctctggccatctgatgtgtgtgtataagtagtgctgacactgcagcctgtttcctgaggaaatttgttgcgtcgttgaaattgagttgtagttgtactactttaagctgtagctgtagccctaaattatcttgtgtcgaactgaagatgtaccacagtaagttcattcatgattgcaacatttgggcgttctgcagctgagcagagttaatgcctaggaaaccg

SEQ ID NO: 3517 - DNA, 397 bp, Triticum aestivum
  unsure at all n locations
  Clone ID: LIB103-036-Q1-E1-A12
aggtctagaactcacgggtcgacgggatccatgatgtcttcacttcctcgcgtggatccaccaagacccttggcaacttcgtcaaggctacctttgactgcctgatgaagacctatggattcctcactcctgacttctggagggagacaaccttcaccaaggcgccgtaccaggagttcaccgacatcttggcgaagccgaccaaggccctgatgcttgatgcaccagctgagaagatagaagcttaggatgaagggtttttactagctgggagctgtctgttgcactttgctttattatagtcgagaaccaggtgtctttgaattgtgctacttgtggaagtctctgtttgctgtcaaagttttggattatggtgcaatgctactctngtattgtc

SEQ ID NO: 3518 - DNA, 403 bp, Triticum aestivum
  Clone ID: LIB103-036-Q1-E1-B4
attccgtggtcgacgggggcgcaaaggcgccgtgacagaatggttccaagggcccaaagattggcggtggcggcgggaagcgttgaaagtcgattacgccatagacatagaattgtgctgcctatccttgtttcctatcctactatcatagacctttgtcaagttattaccccgccctcttgaatttgcaccttatctgtgaggctgaatggtgttaacgttttggattgtctcgatgagttgaattataatgaatggtacttatgttggttccaagcacatgaatacatggtccactgagtaatataaagtccacgcgacatcgcataaattccatatatacattatagaacaatgatggctactttatgtctatacaagtttatgcatgtcccatgcaatc

SEQ ID NO: 3519 - DNA, 376 bp, Triticum aestivum
  unsure at all n locations
  Clone ID: LIB103-036-Q1-E1-B5
tccgggtcgacggggacaaggagttggttcagcttaagcgtgaggcccggatgaagggtgggttttatgtcagtcctgaggccaagctgctgtttgttgtcagaatcagaggtatcaatgccatgcacccaaagaccaagaagatcttgcagctgttgcgtttgaggcagatattcaatggagtgttcctgaaggttaacaaggccaccatcaacatgctccgcaaggtcgagccatatgttgcatctgggtacccgaacctgaagagtgtgagggagttgatctacaagagaggttatggcaagctcaacaagcaaaggattccttctgacaacaacaaagtcattgacgaaggtcntggaaagcacaacatcat

SEQ ID NO: 3520 - DNA, 418 bp, Triticum aestivum
  Clone ID: LIB103-036-Q1-E1-C1
attctcgagtcgacggggcacggcgactccgccgaccagaagcctctccggcccttcttcgacgagtggccgcacgagaagaccgggagcaaggggtcgtggatggggctcgagggggagacgcagctctccatctccatcgccaacgaactccccatcaccaccacctcccgctaccaccatggtgaatgatcccaagtcccaacgagaagaccgagaacgaagctgcaacgagagaccatctccacgaagaacacgcacgtacggagcgaatccattggccctttcccggcgtgctactccagctgcatgccgccgagacctggaccagctagctatcttgactctcgaggcatgcatgcacagttcgagtgctgaagatcttgaaaggccggaacctactacgaccatcattttc

SEQ ID NO: 3521 - DNA, 410 bp, Triticum aestivum
  Clone ID: LIB103-036-Q1-E1-C4
tcgacgggtgctgcacacttgttacaccaaggtgtctccctcggcgcccgtggagaaccctaagctcgtggcgtggtccgaatccgtggctgacctcctcgatctggatcacaaagagtttgaaaggcctgattttcctcggttcttctcaggagaaactccgttggtgggaagtgtgccttatgcccagtgttacggtggacaccagtttggttcatgggctggtcagttgggggatggacgagcaataactctcggagaggttctcaattctcgaagtgagaagtgggagttgcagctcaagggtgctggaaagactccttacagccgatttgcagatggcctcgctgtcctgcgcagcagcatccgtgaattcttatgcagtgaagctatgcatggtctaggcattc

SEQ ID NO: 3522 - DNA, 427 bp, Triticum aestivum
  unsure at all n locations
  Clone ID: LIB103-036-Q1-E1-C5
gggtcgacggggaatttgactctggcagagaggccggaatgccagaaggcgatgaggctcattctgagcctgtgcttgcctgagggatttgataccttcccgacattgctatgtgctgatggttgctgcatgatagatcgtaggatgggtgtgtatggctaccccattgaaattcaatcccttttcttcatggcactaaggtgtgctcttctaatgcttaaacatgacgctgaagggaaagattttgtggagcggattgcaactcgtcttcatgctttaagttatcacatgcggagttatttttggctagatttccagcagctaaatgatatttatcgttacaagacggaagaatattctcatacagctgtcaacanatttaatgttattccagattctattccggactggctatttgatttcatgc

SEQ ID NO: 3523 - DNA, 445 bp, Triticum aestivum
  unsure at all n locations
  Clone ID: LIB103-036-Q1-E1-D11
ttcgcgggtcgacaggttgctagaatactgtatgtgcttcacttatatcttttcagattgatagtttttgctctagtgcttcacttatattttttagagcacggcggtggcttgattttatagaaattattagtctctcatgcttcacttatattattttgagagtctcatagaacagcatggtattttctatggttaataatttggtcctagaatgatgagcatccaagttgggtataataaaaactatcataggaattgaataggatgttatgatcagtttgttgcttgataattgttttgagatataaaggtagtaatgttagggtcatgctagtggataattatgaaattgagaaatacttttgttgaagttggtaagtcccgtagcatgcacgtatggtanaagttgtgttaaaaaattgttcatgaggtgctcttttga

SEQ ID NO: 3524 - DNA, 136 bp, Triticum aestivum
  Clone ID: LIB103-036-Q1-E1-D8
gggtcgacggggtacgctataacaagtcatatcatcatattttcgtatcagcaagtcgtcgagacacggattaacaacctgtcaatgaccacttccatgcacgtaggaaatcgcccttaagtgtgaatgagaattt

SEQ ID NO: 3525 - DNA, 277 bp, Triticum aestivum
  Clone ID: LIB103-036-Q1-E1-E10
cgggtcgacaaggttagaaatagtaaatatgcatagttgtatcgcgacctgaatgaatgaaataaacgaaataacgctcatgttcaaaaaaaaaagaggaaaacaaaaaaacagaaaatcaaaaaagacaaaaaagacaaaaaaagaaaaaaaaaaaacaaagataaaaaaaaaaaggggcggcccaaaaggatcaaacctaagtaacccgtgaagggaatgtcaaaccccctccaaaagggccaccaaaatcaattcaacggccggccgtttaaaa

SEQ ID NO: 3526 - DNA, 445 bp, Triticum aestivum
  unsure at all n locations
  Clone ID: LIB103-036-Q1-E1-E12
cgggtcgacagggctaacaaaaaactgctctaaaagtcttgttgcccccgttcgatgtgactccttcgatcttgatgatatactcagctccttccccgccaaccgcacctccttcccaatgaaatatcttgggctgccgttgtcaaccaagaggctcaaaacaatccattttcagcctctcgaagataagattgctgctcaacttaccccttggatgggcaagcatgttgcgcagccgggacgggctgtgttggtcaagtcggtcatcacggcaattgccatttactacttgacggcgctagacctacggctcaggttatgaagaagatcgactcccttaggcgtgcctatctttgggcaagttgtgacaaggtcacangtgtcaaatgcaagatcaattgggaccaggtgtgcaaatcaaaagtgcatggtgggttgggcattc

SEQ ID NO: 3527 - DNA, 357 bp, Triticum aestivum
  unsure at all n locations
  Clone ID: LIB103-036-Q1-E1-E2
cttatgatgtcaacaaaaggtcggagctttgtggatggtggcatgaaggagatagaagctggaggtagangatacagaagaggggcaaatgatgatttcatggtttatggacangacaactcaatggacaggaggagctccttggacccccttgccgaggcgcattacaagagacccactcctctagaggaaaagaagaatgtgcacagtatgggcgatgagtccttcatgatacctgttnactcnaactcacatgataaccttggagcagccggccgtactgccattgacattgatgccgagcttggctcaagtgttcagaaaacatcagatgctaaggctggcgctgaacttttc

SEQ ID NO: 3528 - DNA, 367 bp, Triticum aestivum
  unsure at all n locations
  Clone ID: LIB103-036-Q1-E1-E4
cgggaacctcaacaagctcatctggatcagtgggatcagaagcgtgccccgtacggttcgcgtgatgattgcccgcaggaggaacgatcaagaggaccccaaggaggagctctactcacttgtcaccgttgccgaagtgcctgctgacggtttgaacgtgctgggaaccaacgtcgtcgatgacactgagtacactcatttctttatctacatcgttagaatgagctgttatttggaattgcaccagcatgcattttgtatcccgcagacattttagagtatggaatatccggagctatctattttccttcanaaataatgtacaaaattgatgcagaggacaagtgtctataacctttactcgatt

SEQ ID NO: 3529 - DNA, 430 bp, Triticum aestivum
  unsure at all n locations
  Clone ID: LIB103-036-Q1-E1-F12
gcgcaggaagtggcacgtacaaccaccatggagtcatcttgaaggtgtaactggagtctgatggacgacttcagtctgtgctgttggagggggtacggagagtcgaagcttatttcagcgggatagcgagaaacacacagatcggactagggcccaatggtctgatggaggcgtgatactcggcatcggtcggtgatgttcggtggttctctgcagtaggggtttgagtggtgtggttcgcgatccaggagactcgaccgggacagcagaggctcgacgcggctatagcggcgaggcgtgcggtaagcacaggacacagcgacaggccaggacactggtggtcagacatgtggtcggacaaattgtgcanggggtgctgaagcagtgttgacgagtaacggattcaagttggtgaacgggtccaaccggt

SEQ ID NO: 3530 - DNA, 383 bp, Triticum aestivum
  Clone ID: LIB103-036-Q1-E1-F2
acggggacgaggaggccgaggacgagctaggagctgaatatctagtgcagccgcgtggtcgtgctgaagatgaacagcattccagtgactttgatccggaacattctggtgatggtgctgaggatgaggatattgatgatgatgatgctgaggatagtgaggattctgtcaatccggattcctcagctactatgaagacgtctgctgcagaggataagaataattctgacggtgatgatgatggtgatgatgatgataatcctccatcagatcgatagtcaatttgttcatgctgatctggtaccatttctgcttgcgcctagaatgacaatactcctctgggagaggattgttggtaaatgctgtaacattaggacatctgt

SEQ ID NO: 3531 - DNA, 431 bp, Triticum aestivum
  unsure at all n locations
  Clone ID: LIB103-036-Q1-E1-F3
cgggtccgccaacggccagccaaatcgacggagaaggaatggcttcaaccaggggagacgtangatgggagttcggccccggcgaactgatanggaggatagtgtacggcgaactgtctatgtctcagacattgatcaacatgtcactgaacagaaacttgctgaggttttctcaaactgtggtcaagtggtagattgccgtatctgtggtgatccaaactcagtgatgcgttttgcttttatcgagttcgctgatgatgtcggtgcaagagcagctttaacgcttggtggaaccattcttggtttttatcctgtcagagttctgccatctaagactgctattttgcctgtgaaccccaaatttcttcctcgaacggaggatgagaaagaaatggtatcaaggactgtgtactgtactaacatttgacaaa

SEQ ID NO: 3532 - DNA, 391 bp, Triticum aestivum
  Clone ID: LIB103-036-Q1-E1-F4
acagtgttctgagaccttcacatcaaacaatgcaaggaaacgaacgctccgcaaccttgccgaagtctaccaagtagcaacaataaacccatggagtgacacggctataacctttaatgccagtgacgaacctaaattccggacagcccgagcaccagccgcattggtcctcagtccgatagtggacggcttccgacttacaaaggtactcatggatggcggcagcggactcaacctcatctacgaggaaaccctgcgaaaaatggaaattgactggagccgcattgagtgaagcaacacaacctttaggggaataatcccaagccgggaagcgtggtgttcaggaaaaatcacactagatgtggtgttcggcacgccggataattacaga

SEQ ID NO: 3533 - DNA, 372 bp, Triticum aestivum
  Clone ID: LIB103-036-Q1-E1-F5
cggaacacactatactgtttctgacaaattctgttttacgtgtgttgtttgcttattttgatgaatctatggctagtaaaatagtttagaatccatagagaagttggaatacagtaggtttgacaccaatataaataaagaatgagttcattacagtaccttgaagtagtcttttgttttctttctctaacggagctcacgagatttctgttgagttttgtgttgtgaagttttcaagttttgggtgaattcttttgatggattatggaacaaggagtggcaagagcctaagcttggggatgcccatggcaccccgaagataatccagggacacgaaaaagtcaatgcttggggaatccccggaaggcatct

SEQ ID NO: 3534 - DNA, 414 bp, Triticum aestivum
  Clone ID: LIB103-036-Q1-E1-G11
tcgcgggtcgacagggaacacccccgcgggccataagcccaaggccgagaagcggctgccggcgggcaagacggcgtccaaggaggccggcggcgagggcaagacccggggccgcaagaagggcagcaaggcgaagaagggcgtggagacgtacaagatctacatcttcaaggtgctgaagcaggtgcaccctgacatcggcatctcctccaaggccatgtccatcatgaactccttcatcaacgacatcttcgagaagctcgccggggagtccgccaagctggcccgctacaacaagaagcccaccatcacctcccgggagatccagacctccgtccgcctcgtcctccccggggagctcgccaagcacgccgtctccgaaggcaccaaagccgtcaccaagttcaactcctc

SEQ ID NO: 3535 - DNA, 388 bp, Triticum aestivum
  unsure at all n locations
  Clone ID: LIB103-036-Q1-E1-G4
tgcgatcataccagcactaaagcaccggatcccatcagaactccgaagttaagcgtgcttgggcgagagtagcactaggatgggtgacctcctgngaagtcctcgtgttgcattccttttataattattttttgcgccttgtgagaaacatgtcgcacgtgcgcgatatatatcaatcccgttatattatgtttgacgtttgcgatatgtttaagctcgatgctcattgctcgcgcgtcttggggcggctttgtggcgcgaagagcgcgttctgaaaggggtggaaaaaactcgtgttgttgcggtatggagggaggggtggaaaccgtggaaaactcgtctccgtgattgagcgggagagtaagtagtataggacattatccattgt

SEQ ID NO: 3536 - DNA, 421 bp, Triticum aestivum
  Clone ID: LIB103-036-Q1-E1-G6
gacagatatgacgctcatcgggcctggcatcttcagcatgttgtatgcgtagtgagaggctgccatgaacttggcgagtgctggacggccgagtatcccattataaggcaatggaaaatcggcaacgtcaaaagtgactctctcagtcctgaagttcacctcgctgccaaatgttactggcaacgtgaccttccccttcggcttgctccttcccgggttgattccttggaatgtgccggtctcttcaagctcgctgtcaaggatctggagtttctggagtacagcggaggagatcaggttcaagccggccccgccatcaactagcatcttagtgaccttgaggttgcggatagttggtgaaaccaacatcggcaagcacccgaccgcagttgtgcgatcagggtggtcctcaatatcaaag

SEQ ID NO: 3537 - DNA, 395 bp, Triticum aestivum
  Clone ID: LIB103-036-Q1-E1-G7
tcaaccaatttagttcagaattttttgagttatataagtaatctaaagtttcagattactacacactgttctgtttttgacagattcgattttctatgtgttgtttgcttattttgatgaatctatgagtagtatcgaagggtatgaaccatggagaagttgtaatacagtagatattacaccaatatgaatttagaatgagttcataacagtaccaaaagtggtgatttattttcttatactaatgaagcttacgagttttctgttgagttttgtgtgtaagtttcatgtttggggtaaagattcgattgactatggaataagaagtggcaagagcctaagcttggggatgcccaaggtaccccaaggtaatattagaggacaaccaagagact

SEQ ID NO: 3538 - DNA, 416 bp, Triticum aestivum
  unsure at all n locations
  Clone ID: LIB103-036-Q1-E1-G8
tggagaagaccgggagaangtgtccacggagtggaccgcgggccgcggcactacgacccgaaggagcgactgttggggaacgtagcatgcaattttaaaaaaattcctatgctcgcgcaagatttatctaggagatgcatatcaactataggaggagagtgtgtctacgtaccctcgtagaccgaaagcggaagcgtttgacaatgcgtttgacttagtcgaacttcttctcgttccgaccgatcaagcaccgaacgtacgactccttcgagttctgcacatgttcagctcgatgacgtccctcaaactcttgatccagcagagtgtcgaggaagtagatgagtttcgtcagcacgacggcgtggcgacggtgatggtgcaatgatccccgcaaggcttcgcctaagcactacgag

SEQ ID NO: 3539 - DNA, 370 bp, Triticum aestivum
  Clone ID: LIB103-036-Q1-E1-H1
caggtcaaccagtttagttcagagtttgttgagttacataagtaatctaaagtttcagattactatatactgttctgtttttgacatattcgactttctatgtgttgtttgcttagattgatgaatcgatgagtagtatcgacgggtaggaaccatggagaagttgtaatacagtagatattacaccaatatgaatttagattgagttcataacagtatgaacagtggtgattgatattcggatactaatgatgcttaggaattttctgttgagttttgtgttgtgaagttttcagtttttgggtaaagattcaattgactatggaataataagtgtcaagagcctaagcttggggatgccaagtggtac

SEQ ID NO: 3540 - DNA, 357 bp, Triticum aestivum
  Clone ID: LIB103-036-Q1-E1-H10
ctctaaactgagtcgtatgaaatttcatttgagattatcatacatgtctattactattccgctcgggcacatctcatgagggtgttccttactctcatgctgtgtcttgtacacttttgctattctggtgcagaggtcgtgatatttgattgtttactgaagatgttttctgcgtggacatcgcgagtgaatatgtctctacggttacgtctttaggtcattagttaagccggtgttttgttgcatgtcttggttttactgatcctagctcgtctgtagactagttaagttcagtcttctgagtttcggtattagacgtgtgtctatcaaattcttttaatctgccatcaccttttt

SEQ ID NO: 3541 - DNA, 419 bp, Triticum aestivum
  unsure at all n locations
  Clone ID: LIB103-036-Q1-E1-H11
tcgcgggtcgacacaatgcacaagacattatctcactacaggatggtactaactattataccttgcatttttaattcctttgccccatttccaatatagggaagatatttatgcacatccttattttcaggcctttccaaaccagttcactgacgattacctctcaaaccacctgtatggtcaggaggcgaggaaggtattcatacaacacccatggttcaatattgaagtgttcctaaagaggacgaaggatggacggtcaatcatccacatgttgtcagcgtcctgngaacgggggtcnccagacttgcctgcctgtggcccacaacgtggattctccagcggccctgtacgaaccatcttcnacagcaaacactcaagaacctcgcgaagggccaagcctcgcgaggcggacgacg

SEQ ID NO: 3542 - DNA, 389 bp, Triticum aestivum
  Clone ID: LIB103-036-Q1-E1-H12
catgggagaaggagaatgtgtccagtggggctcttgaggctgcccgtattgcttgcaataagtacatgaccaagcatgcaggaaaggatgccttccacctcagggtcagggttcacccgttccatgtgctccgtatcaacaagatgctttcgtgtgccggggctgataggctccagactggtatgaggggtgcttttgggaagccgcagggagtctgtgcccgtgttgccattgggcaggtcctcctttctgtgcggtgcaagcccaacaatgccatccatgccactgaggcccttcgtcgtgccaagttcaagttccctggccgccaaaagatcattgagagcaagaagtggggcttcaccaagttcaaccgcaacgactacctcaag

SEQ ID NO: 3543 - DNA, 404 bp, Triticum aestivum
  Clone ID: LIB103-036-Q1-E1-H2
gaatgccaagaccggtgatacagtgtcctccgacgccaacttgggttcctccccgaagcaagaactggaccaaaccaagcaaaaactgcaaacgctgaaagatcctcaaaaaaagggccaagattcctcaaacaacctcctccaaattaagaagatgacttccgaaataaaacaactcaaggatgctgcaaatgcctccaaatccgaaaccaagaagttaaccggccaaaattaacaaaacaaaggcaacatccggaactggctaaatgagatgtcttggcagcaaagaggatggaagaagctgcaagagcagctgaagctcttgcactagctgagatcaaggccctgctctgcagtgaagcctcagctcaagatctccaggacacagatggagtgagcctttc

SEQ ID NO: 3544 - DNA, 378 bp, Triticum aestivum
  Clone ID: LIB103-036-Q1-E1-H4
ttttgcaatctgaactaataaaaccagcaaggtaactaaagataaaattgaccgtaaacaatattgcaatgataggaaacaaggcatatggttcatactttcactagtgcaagttctctcaacaataataacatagatagatcatataacaatccctcaacatgcaacaaagagtcactccaaagccactaatagcggaaaacaaatgaagagatcatggtagggtacgaaaccacctcaaagttgctctttttgatctatctattcaagagttcgtagtaaaataacatagagctattctttccactcgatctatcatagagttcatactagaataacaccttaagacacaaatcaatcaaaaccctaatgccacct

SEQ ID NO: 3545 - DNA, 392 bp, Triticum aestivum
  Clone ID: LIB103-036-Q1-E1-H6
aatgccaggacgggtggtacctacagtggaaccttgccagatggatgcaaattagcaattaagagattgaagagatccagcctacagaggaaaaaggatttcgactctgagatcagtagagttgcaaagctctatcatcctaatttagtggctgtcaaaggatgttgttatgatcatggcgaccgctttattgtctacgagtttgttgccaatgggccgttagatgtgtggctgcatcagattcccagaggagggcggagccttgagtgggcaacgagaatgagagttgccacaactcttgcacaggggattgcatttctgcatgacaaggtgaagccccaggtactccaccgtgatatccgtgcgagcaacgtccttctcgacgaggaatt

SEQ ID NO: 3546 - DNA, 399 bp, Triticum aestivum
  Clone ID: LIB103-036-Q1-E1-H8
gatctaagcaccctaaaagtctttgacaactaaactgctggctatatgatgttggccatatatattgtacgtatataatgtgaagaaacgagtggtagtactataccaactaaaagatgaaatgtaagaaatactagtatgtacgtactgaagagttaaagtaacgagaagaaacataacatagttctgctgggggctcagcacaacacacccctcaaattaaattaagcacacctgaaattaaactttgcaactattccggtagacactgcattagaaccaccatgagcaacgacactgccaccttactcagagtcctcgtccacgtcctcgacttcgtccttgtccctcttcctctaggccgatacttctttgcttgaaccgcacacttggctgttg

SEQ ID NO: 3547 - DNA, 126 bp, Triticum aestivum
  unsure at all n locations
  Clone ID: LIB103-036-Q1-E1-H9
taccggtcaaancattcgcgggtcgacagggaanggttattcttattcctactgataattatcttttcgagattatcctactcggaagttacatattcccgtctgtcacatagatatagaacgtgt

SEQ ID NO: 3548 - DNA, 407 bp, Triticum aestivum
  Clone ID: LIB103-037-Q1-E1-A10
gccaaccggcatcccaaaatacattctggcaacctggcacaaaaaggtcaattaccaaaattactgggcaaggaggaacggttttcccaaggcccggaacaattttttgacggtaaaaaaccaatgataacaccaatatcagaaaaccaagcaaattccaaggaaaaggttgtattgatccgaggaaaaggaccaaaaggaggtcccgggatgcctgaaatgttgactccaacaagtgcaataatgggggctggtcttgggaaggagtgtgccctgctgacagatggtagattttctggggggtcgcatggatttgttgtgggccacatatgtcctgaagcacaggaaggaggcccaattggtcttgttgagaatggcgatacaatcacgatcgacgtcgggaagaa

SEQ ID NO: 3549 - DNA, 179 bp, Triticum aestivum
  unsure at all n locations
  Clone ID: LIB103-037-Q1-E1-A11
gaacctgaggctggagggataaagaattcctcctgggtctgatgacaggggaatgcagtaaacaccagaagcatcanaactatgatctggaacagtatcctgaataaactattttctggattatgaatgaattctgaagcatggggctataagtgaattatgtaacatggattttgtac

SEQ ID NO: 3550 - DNA, 401 bp, Triticum aestivum
  Clone ID: LIB103-037-Q1-E1-A6
cgggtcgacgggccacacgatctactgacgctattatggctgaagcagaacttaccttaaatgctcctgctgatgttgacgcagatctactgaaggatgatgatgatgctcagctactacagcaagcactcgctatgtcaatggatgagggtgcttcaggagctgcagccgtggctgatgctgctatggcagaagctgctgcagatgaccaggatttggcattggctcttcaaatgtctgtccaggatgcagaggcggctggtcaatctgatatgagcaaagtgtttgaagacagatcatttgtgacatccatccttaattcgcttcctggtgttgaccccaatgacccatctgtgaaagatctactggcatctttgcatggccaacgagagcaagaagag

SEQ ID NO: 3551 - DNA, 141 bp, Triticum aestivum
  Clone ID: LIB103-037-Q1-E1-A9
tccctccaaatccccaacgaagaataactccggaacggcaaaaattgccggattcttgaaaacaaacgcctggaaaccagtttaaaaggcaagccttcaatcctccgttccaaaggatcgtccatggccggtcccaaggat

SEQ ID NO: 3552 - DNA, 402 bp, Triticum aestivum
  unsure at all n locations
  Clone ID: LIB103-037-Q1-E1-B1
ggtcgacggcgagtcggaaaagcacgcccgctacaacaagaagcccaccatcacctcccgggagatccagacctccgtccgcctcgtcctccccggggagctcgtcaagcacgccgtctccgagggcaccaaggccgtcaccaagttcacctcctcctagactgaagatgcgccgcttgttgtgccagatgtggctgtctgatgtatctctgctgttgactctgcttacctgcaagtagaagtagtggtagtagttcgtgtggtagaagattgccaacgctttgttggcttcttggttgtgagaactgaacgtgttgcttttgcaaaatgaaatctatctagaaaatgttgcggttgtggtattaanaaaaaagaanaanaaaaaaaaaaaaaaagcggccg

SEQ ID NO: 3553 - DNA, 401 bp, Triticum aestivum
  Clone ID: LIB103-037-Q1-E1-B2
cgggacacttcattccgatccattctatatatacaactcactagtactattgaaaaaaaaaaaaaaaaaaaaaaaaaaaaaaaaaaaaaaaaaaaaaaaaaaaaaaaaagaaacactaaaagaataaaacaataaaataaacatacataaaaaatcaaaaaaacttaaaaaatatcaacaaaaaacggggccccccaaaggggtttaaccttatcttgcctgggaaggaattttaaatccccttcaataggccccctaaattacatcccccggccgccattttaaatatttttgacggggaaaaccccggttttccccaccttaactcccttgacataaaatcccctttgccaagtgggtgttaatgccaaaaggcccccaccgtttttccttgccaaaat

SEQ ID NO: 3554 - DNA, 414 bp, Triticum aestivum
  Clone ID: LIB103-037-Q1-E1-B3
ggtcgacggcgcactataaacatatactcaaaacatgttcaatgtgtcttcgacaaatgttcaacttgtatttcagaaaaatgttcaaggtgtatatgaaaaatgttcaacctgtatgcgaaaatatggtccacatgtattgaaaaataaaaaaaaagggggaaatgtattagataaaataaaaagataaaccaatacataacacgtgaaaaagaagaaaaaaaccacatgaaagattctagaaccagttcatacaactttccccaatccgttcctagaagcgaaacgaacgcatttatgggtcaaccattaatgggagcgccggaggcaagacaagcttatgtctcgtgatcataaccgagctttcttccctatagacaggtctactcaatcagccccataccaatgttcgta

SEQ ID NO: 3555 - DNA, 407 bp, Triticum aestivum
  Clone ID: LIB103-037-Q1-E1-B4
gggtcgacgggacatgatcacgacagtgatgctatacacagtcatcatgtagaagataccgtacatgatgatgaggaagatcaaggcgaagggcatgatcatgaagatgaagatgccggagcagacgacgatggaggctgggtgcaggacccccatattcaagagctgcttctcaagcagacggataacgcaagagctgccgcccgagagaaagccaagctggatcaactggagatagacgcggttactccattgtatgaaggatgcaggcccgaggatacccgcctggaagtaacgctcatggatctgaagatgaaggtaaaacacaaaatgaccgacgcatgctttgacgagaacatgtcattctggcacgaacgtcttcccaaggggaacaagtgcccgaccag

SEQ ID NO: 3556 - DNA, 281 bp, Triticum aestivum
  unsure at all n locations
  Clone ID: LIB103-037-Q1-E1-B9
tatcgctacgataagtcgacagctaggaatagccatctcaatttgtgctgttgtactaaaactgagctgtgtacatttgaatgcgcacaatgaaattatatggagatagacatccctgtttgcgcaaatatgacatacgggtatctaaatagtgacagatatttgtaatggcatatgantaacatcaacatccaatgtgttaaatttgcaacaaaatgacagtatgaaagtgcccttaagtaagtagcatcacatcacatcaacactgccactagattaag

SEQ ID NO: 3557 - DNA, 404 bp, Triticum aestivum
  Clone ID: LIB103-037-Q1-E1-C10
ccggacaccataaactaaatcctgcaacttgtcatgaaaaccggcaattaaaccctcggctacaaaaccgtcctcaggaccctcaggaactccaaggcaaagcttgtaattccttgctaacaactgccctccgctccgcaagtctgagattgagtactatgctatgttggcgaagatcactgtccaccactaccatggaaacaatgttgatttgggaactgcgtgtggtaaatacttccgagtctgctgcctgagtatcatcgaccctggcgattccgacatcatcaacgcaacaccagctggccagtaaacctgtgtatgccattttcagtgtctcgtctgatgcgtcatctaaggtggttctagagtgtagttcttgctggacttgatttggtcatgtgtac

SEQ ID NO: 3558 - DNA, 402 bp, Triticum aestivum
  unsure at all n locations
  Clone ID: LIB103-037-Q1-E1-C11
aattcgtactacattgagctagaggagatggtgcaggtggcgctgctgtgcacccagtatctccccggtcacaggccaaagatgtcggaggtggtcaggatgctcgaaggtgacgggctcgcagagcggtgggaggcgtcgcagcgtactgactcgcacaagttcaaggtgcctgacttcaccttcgggcgttgctactccgacctgacagacgactcgtcgttgctggtgcaagcagttgagctctctggaccgagatgataacacgacagagagttgaagaaggaaacgtcatcagttgtttccagcaggacctgtacagcaaaacctgcttaaaatggcanacaacataatgtagccaacatctaatgatgcattctgtcacgaagtgtagcacatctc

SEQ ID NO: 3559 - DNA, 211 bp, Triticum aestivum
  Clone ID: LIB103-037-Q1-E1-C4
tgagtcgtattacgcagcggacagaatcctcgaagagtcgagccctgcttaccgcatcggagaggtgatccagggcgagggggttcagtacgtctgagagcctacacaagcgtcgcaaaacttcgaatggttgacaactgcttagctgatgacgggcaacgctacccacgttttttcgtaaccacgtgatctagcgtaccgggccaagtag

SEQ ID NO: 3560 - DNA, 423 bp, Triticum aestivum
  Clone ID: LIB103-037-Q1-E1-C7
tcccgggtcgatgggcaaccctatagtgtgtcatttgacgtcggagggcatccagggggcccatgaggtaggggggcgcgtcctagggggtgcgccccccaccctcatgagaagggtgtgggccccctggtcttcatctttggcgaggattttttattattttttctaagatgttccgtggagtttcaggtcattctgagaatatttgttttctgcacataaaacaacaccatggcaattctgctgaaaacagtgtcagtccgggttagttccattcaaatcatacaagttagagtccaaaataagggcaaaagtgtttggaaaagtagatacgatggagacgtatcaactcccccaagcttaaacccttgcttgtcctcaagcaattcagttgacaaactgaaagaaagaaagaaaaacttt

SEQ ID NO: 3561 - DNA, 344 bp, Triticum aestivum
  Clone ID: LIB103-037-Q1-E1-C8
gtcgataggacacactagagtgagtcgaattatattctttggctcaccttgtgtaaaatcaataaatttacgtgaaatactacgctcgaagactgatgcggtccctatatttgtgtgtcatccggcaacaagaggttgaagaaaactgatggctcaagcctcccatcaatccactggattagatgacaaagaggaataaattgttgtggagaatggacgagccaccatggcactgaataactgggcaatgatctgaaacaagtgggagaaggggagcaccgcccgtgacgtcacggcaagtacaatgtccatcacatggactagaatttttcacgagggtggat

SEQ ID NO: 3562 - DNA, 159 bp, Triticum aestivum
  Clone ID: LIB103-037-Q1-E1-C9
atccctatactaagtcgtattatgtcggcaattttcagttttatggtaagcatcagtgctagtctgagatactccttgggttacttatatgaatgctctatgcacctcagttacatcgggtgtgtttgggtttatataaagcatcatgtgtttcactta

SEQ ID NO: 3563 - DNA, 385 bp, Triticum aestivum
  Clone ID: LIB103-037-Q1-E1-D1
ggtcgacgggtcagcttaaacccattcaagtaaacccgtggcgatggctccacgactaagtcctttcactaggacatctgccgtgacaaatccacgacagttggcgcccatcgtggggctatcgcacgatggtttgacgatcttggagggcaagctcaagggactcgaaggctatgttgtgggccggatgaccaagagtcgtcggggcaggatctacatcgacgacgcaggatggggtcccgaggccgattcgatcgagtacgggtaccgggtcccctttggtggcatacacgttttcattggcaaaattggtgagcctgggcctaagccggacatctgcaccgacctcatcgagacggctcagcgtgcgagatctacctgggct

SEQ ID NO: 3564 - DNA, 430 bp, Triticum aestivum
  Clone ID: LIB103-037-Q1-E1-D10
cgggtcgaccggcatccctcaaatacggttccatgccctgtagtgggtttttgcttttttgtaattgagtcgggtgactaatgagagtgcacccttttagttcagactggggattttgtcagagccagattgtcccaaaattgtgtttgggtttttcaggcgctttccatcgcacagtatttccatactatggctgccaagtcagcgaagtgtgctatgtcacggcgacttatggctttagggattcccttatccattccattgttgcaaaagaacgaaattgcgtcttcctcgcgacaatccttgaccttgttcattacaaggaggaatctgaccccgtcttcctcgcgaaattctgtttttcgtgtgttgtttgcttattttgatgaatctatggccagtaatagagtttatgaaccatagaaaagtt

SEQ ID NO: 3565 - DNA, 404 bp, Triticum aestivum
  Clone ID: LIB103-037-Q1-E1-D12
cgggtcgacagggctctctatctcgcatcgtatgaccggaaggagcggagccgccgagccgggaagagccaccaccccatcttcctcgcctccgcttccgaagggtcagagatggcggaccgtgctaaccacccgtctgtcatgcagaagtttggtggacagttccaccttgcctccagcttctctgagggtgttcgtgctcgcaacatctgcccttctgtgccatcctatgagaggcgcttcaccacaagctgctacatgactcagaaccttggcatcagtgtccccatgatgtcatcttctccattgtttgccaatgcaccacctgagaagaaaggtgtcaagaactttgcaattgacttcctcatgggaggagtgtccgctgcagtttccaagactgctgc

SEQ ID NO: 3566 - DNA, 389 bp, Triticum aestivum
  Clone ID: LIB103-037-Q1-E1-D6
agggaaccctaaaatgagtcgtaataaagctcaaaagatataagtgaagcacgtggagtattcttagcaaactctaatcatgtaggcttatcccaaaaggtgtgtacagaaagtatgattgtggtaaactaaaaatcaaagactaatataatacactacgctccaagcaaaacacatatcatgtggcgaataaaaatatagctccaagtaaagttaccaatgaacgaagacgaaagaggggatgccttcccggggcatccccaagcttaggcttttcgctattcttgaatatcttggggttccatgggcatccccaagcttaggctctttccactccttattccatagtccatcaaagctttacccaaaacttgaaagcttcacaaggg

SEQ ID NO: 3567 - DNA, 409 bp, Triticum aestivum
  Clone ID: LIB103-037-Q1-E1-D8
acgggtcactgtaaaatgagtcctatgatatataatgaaaaattcgcactagtagatgaaagtgatatcataggagactctctatcatgaagatgatggtgctactttgaagcacaagtgtggaaaaaggatagtggcattgtcccttctctcttttctctcatcatttttttctcttttatttcttttgggccttttctcctttttttatggcctctttttttatttagtccggagtctcatcacgacctgtgggggaatcatagtctccatcatcctttcatcacatgggacaatgctctaataatgatgatcatcacacttttatttacgttagtactcaagaattacaactcaatacttagtacaatatatgactctatgtgaatgcctccggtggtgtaacggg

SEQ ID NO: 3568 - DNA, 343 bp, Triticum aestivum
  Clone ID: LIB103-037-Q1-E1-D9
gtcacatgctgatgatgcagatacttccagttgcaatccgtgggatcatggatgcgcacgttcgtgaaacgctatttggcctacgcaactttttcgaggtcatctctcggaagtcggttggcgtgaggcaactcagaaggctacaggaagagatcgtggtgatactatgtgagcttgatatgtactttccgcccgcattctttgactttatggtgcatctactggtccatatcctggaggatatcatccaactcgggccgacgttccttcacaacaggatgccgtttgagaggatgaatggtgtcatcaaaggatacattcgcagcatgtcagatccagaggg

SEQ ID NO: 3569 - DNA, 400 bp, Triticum aestivum
  Clone ID: LIB103-037-Q1-E1-E11
ccggggtccctaaaatgagtcatagtagctcgggtgaagttggatctcgtccaggagggctgtggaggtcaaattgaagcctgggttagatcactgggtgctctgggagactactgacaaggtttgggtggcggggatggcctcaccggagtggatcgagctggtggctgaggcggatcggggcggccggagttgggggaggagacctcctcggggtcctcctggtggcttggcagggttctggtgaggagtagaggtggtgcgtgcttgagaacaagctcgggacccctttttagaggtgatccgaagcggtggccgtgaacggggatctccggcgatggttacggcggtgcagtgcttggtcaggagattatgggacatccgagaatttcgatcgctt

SEQ ID NO: 3570 - DNA, 403 bp, Triticum aestivum
  unsure at all n locations
  Clone ID: LIB103-037-Q1-E1-E12
atggcaaacatagcgacctcatccaagcatgcgggcgtgatttgcttctctgctgccaaatgctccttaagatcatggttatactgcgcaccatggcttagggcggcgcttaattggtggaggggtcggtgatttgggtggaaggtgttgcgccggcggtcggggcatgtgggatgtggaaggaggaggaggatgggggtcgggtgtggattacctgcctggatagacgaggccgagcagcatgaangagggtcaccggcgaggaggctgcgctgcaagcaaggagtgaaggtttcaacttggaaaggaaggcagaaatacgggaaatgtggcttttgataagggggggggcacggatgtagatatttctgcggaagccgaaacatttggaatcccttcagcg

SEQ ID NO: 3571 - DNA, 449 bp, Triticum aestivum
  Clone ID: LIB103-037-Q1-E1-E2
ggtcctagaatagcgggtcgacggcaagtctcaacatgcttagacagcggattacattgagcgaagactaatgatcaacatttaacttagtaatgcagatgtccaggtgaacctccttgaagtccccatgcacattgttgggggtcaaataataccatgcgtcttccatttccacatcggcgggaaggtcccagctcggcagagtccaagtcagcttgacgtagccagtgtcgccgcccacgtacctccgaggggtagtaacagtgagcacgcacccgtacatcggcctcgtgtcagtgtcagcgtcagcggcgtcgcccctgacgcacactacatagatgacgcagtggcctgcacgggcctcgccggtgggcacgatcaagacgaagacgctgccgtcctcctccgagactagcatggggcgctaatcctccagtgactccgggacg

SEQ ID NO: 3572 - DNA, 134 bp, Triticum aestivum
  Clone ID: LIB103-037-Q1-E1-E4
tctcaaaagcaaatctctgttctacaagaccgattgcatcagccagtactattgcacccccttcatcacatcgtccatcgctctcacgcagcactataggagctggtatctgcgtgggcggggtggtggtctcc

SEQ ID NO: 3573 - DNA, 327 bp, Triticum aestivum
  Clone ID: LIB103-037-Q1-E1-F10
gaccggcatggctaaacagtcttggacaaactgacttgatcatgggtcaataactgattgccacatgttcaaattattcgtgaagtcatcgctgaaccacaatcggtagtccagcagtgtccttatcatgcatcgctcgaccgtacacgaaggggtcgtgacacatgttatagcatcttcacgtccctgaatatctacagatagcaccagcttacgatagactactgtccctgacctcaggactgtctcggacccgtgtagaagcaatataggcggatggaccagcatacttacagcagatcacacaatcattcgtacatcatgaga

SEQ ID NO: 3574 - DNA, 406 bp, Triticum aestivum
  Clone ID: LIB103-037-Q1-E1-F11
ccggaatcccaaaagtgagtcatagtaggtgttggcaagggcttgtatccccaataacccctccggaaattaagcaacaacaatcaaatgaaatcattctcggcctttcaatcatatctacagctattctggcctttttggaattcttgcaacaaccagcccagattttgcctcgaatgctgtggatttggcagctggggaacttcttgaatttgccactcctggaaatgttacacaaggacagcttgattaagctaaacatgcagcaaagtgtaaagttttgatggacttggaatcaagagctgttgcatgtgaagacattgggaggcaggttatgacttatagtgaaaggaaacccatcgagaaattcttgaacgatgtcgaagcaattaccctgaatgacatt

SEQ ID NO: 3575 - DNA, 349 bp, Triticum aestivum
  Clone ID: LIB103-037-Q1-E1-F12
gcgccggcaaccaaggaggccgccggcgaggggaaaaccaggggcacgaaaacgggcaccaaggccaagaagggcgtggagacgtacaagatcgacatcttcaaggtgctcaagcaggtgcacccggacatcggcatctcctccaaggccatgtccatcatgaactccttcatcaactacatcttcgagaagctcgccggggagtccgccaagctcgcccgctacagcaagaagcccaccatcacgtcccgggagatccagacctccgtccgcctcgtcctccccggcgagctcgccaagcacaccgtctctgatggcaccaatgccgtcaccaagttcacctcatcct

SEQ ID NO: 3576 - DNA, 162 bp, Triticum aestivum
  Clone ID: LIB103-037-Q1-E1-F4
gggtcgacgacaaccccgaacactaatgaggttcctacgagtacgtgtcgaccgctgcccattaccgggagtggtctaagacgatcccactcatgagggacggtcaccattcgctcaggaccccatgttgtacccaccttctggacgtcacatctgacgtca

SEQ ID NO: 3577 - DNA, 377 bp, Triticum aestivum
  Clone ID: LIB103-037-Q1-E1-F9
attggctcaagtttcttcaaaatttattactaaattaatataacgttgagtgacttgttttgaaatgaagggattagatgaacaatgtaaaatttaaaataaacacattgtattagtattgtttggcccctgttatcaaacaaaattaagtcatttggccccccttgatctttaattcctggtaccaccacaggtcccggtatacgatgccccgagggaccgagccaaggcgatgcatctacataggggacctcctatacggcgatgtgtgcgttgggaaagagagaagcgtgttgcgcctcgctcgccacacatgaccttgggccggcgcaggtgcgggggctcccctgttttaatcatcattactttttagtttt

SEQ ID NO: 3578 - DNA, 271 bp, Triticum aestivum
  Clone ID: LIB103-037-Q1-E1-G1
cggtcgacggcggtcacacagccaatctacacgggtgcggactagcacatgaatgggggggaaagagacaaacacagtgcacgcgcactgtgccgttggccggaccgtgctcatgctcgctgcggcgagctccggcatcggcgagccgcagggtggagttattgacgtggagacgaggattgttgcgaggggtgactgccgctggccgtccgtgcagcgagcagaggctcaacagatgtgctggggagcgtcgcagatcatacggttcggc

SEQ ID NO: 3579 - DNA, 418 bp, Triticum aestivum
  unsure at all n locations
  Clone ID: LIB103-037-Q1-E1-G10
cgggtcgagcccatgatttaagtcaatagggctcttcttgacctgnggcgccttgctttccgtagcgcttttgggctggcagaatctgctgcctggcgtgagttgcttgattgtgtcgcgttgcacgagccattggtggatggcaggtcggaccgtgtccagtggcggctggagccgtcgggcctgttctccaccaagtcgctttactcggccattgccccttcctccgcccccctccccttatcgatggtttggtccgtccgcgtaccattgaagattcgcatcttcatgtggcagtggattcacggtcgggtcncgtctggagtggaggtctgcaagcgcaatggcccgggcaccggtatctgcccgctctgtggagtccctgaggactcgaaccacatcttgttctcctgcgttt

SEQ ID NO: 3580 - DNA, 385 bp, Triticum aestivum
  Clone ID: LIB103-037-Q1-E1-G11
ctccctcacgtgagtcgtactagcggcgcacggtgctgcagatgctgggagaccgcgggtactcggtgaaggacgaggaaatcaagctgtccctgcacgagttcgtcgagcgctacggagaccccgtccgccgggacgagatcgtcatccattgcgagaagcacggcgaccccaacgacaaggtcaacgtcttcttcctcgacgagtccaataccggcctggccgtggtcaggagctgcgtcgagaagatgaagctggggaacgccaccaatggcatcttcgtcctgcagaaggcgctgaccggcccggccaggaccgaggtcgcacagagcaagaagtaccacctcgaggttttccaggtcgcactcctccgcacccctgtctg

SEQ ID NO: 3581 - DNA, 277 bp, Triticum aestivum
  Clone ID: LIB103-037-Q1-E1-G3
agagcaaggtggaatttttatattgaagaaatacatgaattctcatgcttcacttagattattttgagagtcctaaatagcattgtaatttgccaaaagtcctattaggcaaggtattcacgaacaataaaattctcgctatgagtgtgttgaatactactagaagttggtatttgataattgttttgagatatggagatggtgatattagagtcatgctagttcagtagttgtgaatttgataattacttgtgttgaattttgtgactcccgtggc

SEQ ID NO: 3582 - DNA, 142 bp, Triticum aestivum
  Clone ID: LIB103-037-Q1-E1-G8
tatgttctcgcctctttttgcttgtttctcgagtcgccggtgattggcttgggtgttgctgcttttcgtttctgtctctcgtgtgtatgttttgcttgttttgcgggtctgctgtcttgttttggtttgggtttgtggtctg

SEQ ID NO: 3583 - DNA, 409 bp, Triticum aestivum
  Clone ID: LIB103-037-Q1-E1-G9
ccgggtcgaccgggctcgtgaaagagtgtcgtatcacgaaacagacaacgggaaaaaggaccggatgcaatttttgaaaacatgatgatgcacagcatatgatgacatggaaaaatgcaacacacaagcacatgacatggcaatgactacgaataaacggaaggcacctcgcgcatcggatccggggcgttgcaatttttctgagttgcagaagtttgtgttagatccaaattactacagactgttctgtttttgacagattctgttttcgtgtgttgtttgcttattttgatgaatctatggctagtatcggaggttatgaaccatatagaagctggaatacactaggtttaacaccaatataaataaagaatgagttcattacagtacctttaactggtggtttgtt

SEQ ID NO: 3584 - DNA, 407 bp, Triticum aestivum
  Clone ID: LIB103-037-Q1-E1-H10
actccttagactgagtcgtactcagaactactagtactactacttctcacatgctggccagacgccgtcgttctccttccccgctttgtcggcgacctctccgcagcagcgcgtacttggatctccaccgacctctccgtagcagcgcgtgcgtccttttctttcttgcggcggcgggcctctcttttcttgagtgctttctaacttttcctctccctctgtgcggctttggccgcctcttgctctaccgcccattcggccttggcatcttcaaattcctcccacatagttgtgaggtcgcgagcggcgatgaactcggcacatcaggatgccattgcttccctaccattttgtgtgcagtcgtgggcagcgaggaactcggcgcggcgggatgccatcgctgcctt

SEQ ID NO: 3585 - DNA, 373 bp, Triticum aestivum
  Clone ID: LIB103-037-Q1-E1-H12
ggctactgataatgagtcgtatgaaggaacatatgcttgtaggaattgcaataatatcaagtttcctctctatgtgcttaaagttttgaagttatgcttgtttttccctcctatgctagttgattattgttcccagaagttgttttctcagaaaatccatatgcatacgaagtgggttagacttaaatgtgctagtcatattcttcatgatgctctctttatgttacaattcttatcttttatgtgagcatcgttgagatcatcatgcctagctaggggcgttaaacgatatcgcttgttgggaggcaacccaattttagttttgttacgttagttttgttcctgtttagtattaaataactcatatatcctc

SEQ ID NO: 3586 - DNA, 422 bp, Triticum aestivum
  Clone ID: LIB103-037-Q1-E1-H2
ggtcgagggcaagaagaaggccaagaagagcgtggagacgtacaagatctacatcttcaaggtgctgaagcaggtgcaccccgacatcggcatctcctccaaggccatgtccatcatgaactccttcatcaacgacatcttcgagaagctcgccggcgaggcggccaagcttgcccgctacaacaagaagcccaccatcacgtcccgggagatccagacctccgtccgcctcgtcctccccggcgagctcgccaagcacgccgtctccgagggcaccaaggccgtcaccaagttcacctcctcttaggctctttgccaaatctcttctggcgtgtgatggatccatgttgacctgtagttagatcatgttccgtctgtcatcttgtaagaaaacgtgctctcggtactgttattcagacccg

SEQ ID NO: 3587 - DNA, 433 bp, Triticum aestivum
  Clone ID: LIB103-037-Q1-E1-H3
gggtcgacggcacgtacgatcatggtctcagctgggtgtcctacctttgatgggacggactacccctactggaaaaacaagatgcgaatgcatctcgaggcaattgacaacgatctctggtatgttgtggaaaatggtgttccctctgtctcaccttcactgaacgctaccgatgtgaagagattcaagcaactcgattctcaagcgaagaatatcatatgtggccatctgagtaaaggacagtatggaagagtgagtgctttggaaactactaagcttatctgggataggctgtccaaagtgaatgaacgagtctcaattcagcgtgactctcgagttgatgttcttcggaatctcttcaaccacttcataagactcgacaatgaaaatgtccaacaaacctttgatcgcctcactgacatctcaaatgagc

SEQ ID NO: 3588 - DNA, 465 bp, Triticum aestivum
  Clone ID: LIB103-037-Q1-E1-H4
ggtcgacgacacagcggagctctaaatgaaagcatcaatgtcggtgtcaaaaccggcagatctcgggtaggggccctaagctatatgtctgaggaccgaaggtaactatgaacaaaggacaccgtgttttacccaggtttgggccttcttaatggaggtaagaccctactcctgcttgattatattcaagggtataggggttacaagagttgatctacctcgagatcgattcggctaaccctagatcagctagcctagcaatgttgtgatcctgcctccgatataccctccggtttatatagacaccagaggggcttaaggttgtaacaaagacggttttaccaaaaggaataacatatccgaacacctatacttgccatccacgcatacaggagtccttccagacatgagaagtgatctactatcttgtatcccgaatggccatcaaatctggcccgcatccaa

SEQ ID NO: 3589 - DNA, 244 bp, Triticum aestivum
  Clone ID: LIB103-038-Q1-E1-A10
gagagactataatcgttggctggaatatgcaagatgtctagtgtgcatcctacgtagccatggatgatagacgcagcctctctgtttgggacgtggcgattttgtatatcagtgccgggtgacactgtgacttccatgttcggtttatttgaaaccatgcttgctctcttgtgacacgcagcttgggatggggttgtcgtacatgacttgtcgctggtgacgcaccattttcacgttgatgaaa

SEQ ID NO: 3590 - DNA, 420 bp, Triticum aestivum
  Clone ID: LIB103-038-Q1-E1-A11
gggtccttcttcattctttctcttcttcttcttctttcctttcttcttcttcttctttcatcttttttctacttcttttacttcttttcgtttcttcttttcttcttcttctacttcttttcttcttcttctacttcttttcttctttttttacttcttttcttttcttcctttcttcttcttctacttcttttcttcttcttcttttttcattttttttctacttcttttcttttcttcttttcttcttcttctacttcttctacttcttttcttcttcttcttcttttcttctacatattctttttttcttctacttcttttcttcttttcttctaacactaacactatataacacatatctagcactaaatctatcactaacaattaaacagtagaaagtagcaataggagtgtgat

SEQ ID NO: 3591 - DNA, 446 bp, Triticum aestivum
  Clone ID: LIB103-038-Q1-E1-A12
cgggtttccaaatattctatcataaaatgttgtttttgatgtaaattattttgcagtcttgcatggtgcatggattgaatcaataatcagtcgtagtttggttacttacatatgaaagttcactatgcgtatgaacaagataaaaaccctaaatttattagcatcagttgaaaattcactatgctcaagactcctattttatgtctccaactattcatttcaaaattcttatttccgatgtatattttgcagtcttgcatggtgcatgtatcgaatcaataatcggttgtagcttggttgcatatatgcaattatgcccgtgaagtagatacaaattctaaatatctcagcattagttgacaatttaacatgcttaagaatcctttattagaaattggtgtttccaatgtatattttcgaggctttctatgcatgttggttactta

SEQ ID NO: 3592 - DNA, 458 bp, Triticum aestivum
  Clone ID: LIB103-038-Q1-E1-A3
gggtagtatttgatatgatcataaagttggtcctggaatgatgagcatccaagttgggtataataaaaactatcgtagaaagtgaattggatgctatgatcaatttgatgcttgataattgttttgagatatggaggtagtgatattaaagtcatgatagttgggtgattatgaatttaaagaatgcttgtgttgaagcttgtgattcccgtagcatgcacgtatggtgaaccgctttgtgatgaagttggagcagaattttatttattgattgtcttccttatgagtggcggtcggggacgagcgatggtattttcctaccaatctatccccctaggagcatgcgcatagtgctttggtttttgatgacttctaaatttttgcaacaagtatatgagttcttttgactaatattgagtccatggattatacgcactctttcacccttccaccattgc

SEQ ID NO: 3593 - DNA, 333 bp, Triticum aestivum
  Clone ID: LIB103-038-Q1-E1-A4
gccacgggtacggatgcaagacgggacttcaacgacgttttgaacgtcatggagcatatgagatgttccaggagttgaagttaatatttcaagcaaatgcccggattgagagatatgaagtctccaataagttctacagctgcaagatggaggagaatagttctgtcagtgagcatatactcaaaatgtctgggtataacaatcacttgattcaactgggagttaatcttcctgatgatagtgtcattgacagaattcttcaatcactgccaccaagctacaagagcttcgtgatgaactataacatgcaaaggaatggatagacattcccga

SEQ ID NO: 3594 - DNA, 465 bp, Triticum aestivum
  Clone ID: LIB103-038-Q1-E1-A5
gaataagtgaacgttcccaaaagagcaaaggttttgcgcgaagagatgcgatgagatgggacgcccaaaaatgaaaagacagcggcccaattccagagctattggcaggcaccgactgtactagctcgattttgtttgttcaaaacaagtatttgattaaaaacattaatcaaaaaaaaaaaaaaaataaaaaaaaacataaaaaaaaaaaaaacaaaaaaaaaaaaaaaacaaaaaaagaaaacaaatagaaaaaaaagataaaaaaatttaaagcaaataccaaaaaaaaaaaaaaaaaagggggccccccaaaatgttaaaccattttaccccggtaagagcatttaaaacccctcaaaagggtcccccaaatttaaatacaggggccgcttttttaaaaattcttgtggggaaaaacccggggtttccaaaattaaccccccttgaaaaaaaacccctctt

SEQ ID NO: 3595 - DNA, 405 bp, Triticum aestivum
  unsure at all n locations
  Clone ID: LIB103-038-Q1-E1-A6
cgggggacaggaagatatcggaggcagctgccccaaccctaggctctcacagtaaaagtgtaccaaatggaccatgggagttccccaacgaagatatgtaagtctgttgtggatgaagatatcatcagcaatctacccgaagctctcagagacaaaatcctttgttgtctgccaataaaagaagctgttggaacatgcctcttgtcaaggacttggaggtacacatgggcttcaatgaccgaactgatgttcaggacagctgatttcgcttcaggaaatgatagtgcagacgatgaccgcagacttcttaagttcactgatatgtttctcttcctccacaacggcccaattctgaagttttgcctgaataccgtancgaatgaaatggtatccactggaggacac

SEQ ID NO: 3596 - DNA, 438 bp, Triticum aestivum
  unsure at all n locations
  Clone ID: LIB103-038-Q1-E1-A8
agctcgacatggacatggacctcgacatcggcgacgacttcctggagatgcccggctgcgacttcggccgaggcatggatgatttcctgcnatacgtcgatttctgcgtgtgaatcaagagaggtttaaggtttatctttaagtagtaaaatgctggtgtgatgggcctcctgtgagtgtaatcaatccgtgtgcgttgggagggaggagatcatcttgggtttttccccgggcagctcaaccagctcgtgcccaaggtggtgtccgttttccctagtctcccgagcacattancgttatggtggtgagagtgagtgagtgagagtatttttgatagcaggttacatttgtgataagttatagtagctgctggttatgttatgttcctccttccatgttatctgtcaatgttggtccagacattgtagctagctcaag

SEQ ID NO: 3597 - DNA, 460 bp, Triticum aestivum
  Clone ID: LIB103-038-Q1-E1-B1
ccactgtccggacgccaaagccttagcagctttcaggcataatgtccgagacgaatggctcgccagacacctcggccaagagaagccaagaacaatggccgcactaacaagcctcatgacccgcttttgtgcaggggaggacagctggttggcaaggtgcagccccagcaatccaagtacatccgaaactagggatggaaacggaaaaccgcgacgcaataaggaccgtcgctggactaaggacaaaaatccgaagagcacaacagtcaatgccggattcaaaggctcacgacaaaatcaggaaaaatcgcccccccccaggacaacagggacgatccatccaacctaaataaaatcctggataggatatgtcagatacacagtactccccggaagcctgctaaccatacccacagggactcttgggttttcaaacaatccggcagactcaatgccgaac

SEQ ID NO: 3598 - DNA, 448 bp, Triticum aestivum
  Clone ID: LIB103-038-Q1-E1-B11
acgggccacaaaggacagaagttaacacttcggctgcctgaagtttggactattcggctcccaaggagaacgatataaagagtctggggatgtccggcatagacccggacacactgatgggtctgctagggcgagcggctatctcaatgacacattgtaatttaatgggtacggtaattgataggatttcatccgccataagtggattgactgaagcctttacaagtctgcatgagcggctttgaggtacccaacataatatatgtatttctgactgtaccgcacatgctacgtgtgctctgtatatatactagcccctgagactctggttgccactcggaagtggcaaacagaggatcgtaatcccaggtcataatcgtgctgctacgtatgtgcatgcggttgattgtccagccgctgaccagactgctgattttgccgaactgaa

SEQ ID NO: 3599 - DNA, 472 bp, Triticum aestivum
  unsure at all n locations
  Clone ID: LIB103-038-Q1-E1-B2
ttccgggtccacgggcgctctgcaaaacttagtagaaaggccacacacacaccacacggactttcttcagatgacaagcgcgcgcagaacccacctagaaagagacgatggaatttacaatgggatggggctagctagattattcaggcgattcggaaaaattattaagtcgtgcaatgtactagtactagtacactaagcagtctagcactatgtaagctgctctctgatgtgagaaaaataagagtgtgtaagcgatcccgcgtgagctcttaaatttcctcgagagaacgttgtcgcagcagactagcagaggagtcccgcgtaatcgattgtcagttaaagaagtaactggacagagttcgcggcggggtacttacatgcggcgtatccagccaggcattccgtcgagcaggtantgagccgagtcctgcacaaggagttgggcatggtctgacgagagtatacccga

SEQ ID NO: 3600 - DNA, 458 bp, Triticum aestivum
  Clone ID: LIB103-038-Q1-E1-B3
ccacgggcgacgagcggaggcgcccacatcaacctcaaggtcaaggggcaggatggcaatgaggttttcttccgcatcaagagatccacacagctgaagaagctgatgaacgcctactgcgaccgtcagtctgtggacctcaactccattgctttcctttttgatggtcgtaggctccgtggtgagcagacccctgatgagcttgagatggaggaaggcgacgagattgacgccatgcttcaccagaccggagggggctttcctcgcccttagaaggagcttgctgcagcctggctgttctatgtcgtatgctacctttagaactagagtaaaatgtaagaagtgaaagaacttgcgaggctatgattctgtgccataacctgagggggggtctggaggtgaaagaacatcggagtactgttgatgtcgtgactgaactatcatccattgcctaatat

SEQ ID NO: 3601 - DNA, 387 bp, Triticum aestivum
  Clone ID: LIB103-038-Q1-E1-B5
acctatggattgaatgcgaccactgtcagaggtggttccacagcaagtgtgtcggcgtgactgctgagatggcgagcggaatcgaggactacatgtgccctggatgcagctacaaagccacgacgaaagcttctgactcgatatagcggtgacgatgaaagcttccgactcgtgatggtggtgactggtgatgcttgaaccatgggaaatctctcatttcccaacgatgcatgctgtttgctccgctgttgcgttagcctggtgacatgttaagattttggctggtgatggggacatgaggtggatttgtacacctgcaaggaaacgaatatggtgctccatttttgaattacgacaccgtttcaaaacaaaatcatctgagcggac

SEQ ID NO: 3602 - DNA, 349 bp, Triticum aestivum
  unsure at all n locations
  Clone ID: LIB103-038-Q1-E1-B6
ggagcggcactgctgatgctggttcttgtttcgctgacgctgggcccggcgtttgcctgagcaaccttangatggagggtggggtcacttgtcangctgtccaccgtccgctgttactaccgctgccactgttattaccactgttaccgtcggcgccactgttccaactactaggctactccactaatttttgcttggaccctgtgaactgcatctgatccgctgcacaccgttgctacttccttcccacgattattattatcttgtcaccatgctctctaaatcgtcactangttgatactgttgctttgcaatggatacttttgatgtgtgttatatagttgtgcgc

SEQ ID NO: 3603 - DNA, 406 bp, Triticum aestivum
  Clone ID: LIB103-038-Q1-E1-B8
gaaaggatacggccgcggcagcgcggcctaccgcgagaaatgcggccccggccgggccgtggacgtgggatatggaggatgagaaagacgatcccttcgccgcggctgtgcttgatgtgggggtcgaggggatcgcggatgagggtgcccagatcgaggagctcgttgatgggaaagaagaagaagatgcggagcgtcagcggcaggaggacaaggcgagggagcagcatctgatggagactctcaaaggtcctgatcgtgcatttggggatctcatttctgcctctgggattacggaggagatgattgacagtttgatcctcttgaaggatgccaggggaataccaggattgcctcctctaagtgaaatacaagatagagctatccagataatgaatgcaacatc

SEQ ID NO: 3604 - DNA, 445 bp, Triticum aestivum
  Clone ID: LIB103-038-Q1-E1-B9
gggcacctatggattggctgcgaccactgtcagaggtggttccacggcaggtgtgtcggcgtgactgctgatatggcgagaggaatcgaggactacctgtgccctggttgcagctacaaagccacgactaaagcttctgactcgatatatcggtgatgatgaaagcttccgactcgtgatggtggtgactggtgatgcttgaaccatgggaaatctctcatttcccaacaattcatgctgtatgctccgctgttgcgtaagcttggtgacatgtaaagattttggctggtgatggggacatgaggtggatttgtacatctgcacgcaaacgaatatggtgctccatttttgaattacgataccgtttcaaaacatttctcatctgagcggacatactgtaagtactacgtaatctatatgttggcagtattagcacgccatctgc

SEQ ID NO: 3605 - DNA, 441 bp, Triticum aestivum
  unsure at all n locations
  Clone ID: LIB103-038-Q1-E1-C1
gtccacgggacaacatcaacaacaagctgcagcttgtcatgaagagcggcaagtacacgctcggctacaagaccgtcctcaggaccctcaggaactccaaggcaaagcttgtgatccttgctaacaactgccctccgctccgcaagtctgagattgagtactatgctatgttggcgaagatcactgtccaccactaccatggaaacaatgttgatttgggaactgcgtgtggtaaatacttccgagtctgctgcctgagtatcatcgaccctggcgattccgacatcatcaacgcaacaccagctggccagtaaacctgtgtatgccattttcagtgtctcgtctgatgtgtcatctgaggtgttctagagtgtagttcttgctggacttgatttggtcttgtgtacatcatttatcagtcaatcaagtttgatggaacnt

SEQ ID NO: 3606 - DNA, 459 bp, Triticum aestivum
  unsure at all n locations
  Clone ID: LIB103-038-Q1-E1-C12
ttccggcgtccacgggaaaataaagaacacatttatcttcaatacatttgtattttgccagatcttcaatgagttcaatgcgcgtaagcctgaggaaaggaatgtcttcgaaggagtaacaaagaaccacctcttcatgggaatagtttgtgtaactaccgtgtttcagatactaatagttgaattcctgggaaagttctttaaaattgtgagacttaactggagtctatggttagtttcagttgccattggcgtcgtaagctggcctttggcttatctagggaaattcattcctgttcctgtaagacctctccaggcctatttcaagccttgttggaaatcatcacgccgagacgaagaggaaggcaggcagggctaaaaaggctgcagatcacctagtgtaaatagacatgggtcangcgaagaacaggaacccgtaccgcctctcccagtggaaca

SEQ ID NO: 3607 - DNA, 357 bp, Triticum aestivum
  Clone ID: LIB103-038-Q1-E1-C4
cgggcatcaacgaagtgcctgtctgcaattatagtagctcgtcctctaatgttgtctaagatgtatcacgaggcttgtccaaagttaattgacggctttatggaaagagaggacattgtaaagatggtcatcttcaacacatttattgagttgttacactaaactggcactatgacaaatcgacagggcgacattgatgagtccagccctacatggttgctgaatcacgaagtacaccacgttgtcaactcgatcaataggcacttgcctgaacaatcaatcaagactaaagttgaagcattcccagtatggacggaacttgtttttgtcttactagattgacttgctgatcatttt

SEQ ID NO: 3608 - DNA, 368 bp, Triticum aestivum
  Clone ID: LIB103-038-Q1-E1-C5
ggggccagtcaatcgcgctaaccagaccgtttatttgtacgggatccaacgcctggcagcggaccggccgaaacttcggccggtgcgccggcgcctagcagcatgcatacatcgtattcgactaaagaggcggcgtggtgcattataccgttcgcgagctgatcctagcaaatgaggtgatcgagtgtgttgcagtttgtcaactaaaaaaaaaaaaaaaaaaaaaaaaaaaaaaaaaaaaaaaaaaaaaaaaaacaaaaaaaaaaaaaaaaaaaaaaaaaaaaattacaaaaaaaaaaaaggatttgaaaaaaagcataaataaaaaaaaaaaaaagggggccccccaagggtttcaacctttattt

SEQ ID NO: 3609 - DNA, 454 bp, Triticum aestivum
  unsure at all n locations
  Clone ID: LIB103-038-Q1-E1-C6
ggtccgagatancggggccacggggaagaagaaagccaagaagagcgtggagacgtacaagatctacatcttcaaggtgctcaagcaggcgcaccccgacatcggcatctcctccaaggccatgtccatcatgaactccttcatcaacgacatcttcgagaagctcgccggcgagtccgccaagctggcccgctacaacaagaagcccaccatcacctcccgggagatccagacctccgtccgcctcgtcctccccggcgagctcgccaagcacgccgtctccgagggcaccaaggccgtcaccaagttcacctcagcctaggcttcatcggacgaatggatggtcgcattctgtatgtagttagctgccagtttgtgttctgaagatgttatcttgtgagaatcagattgtatcgcctgtcggtctgaagaaatagtaatgctcttttcagtg

SEQ ID NO: 3610 - DNA, 462 bp, Triticum aestivum
  Clone ID: LIB103-038-Q1-E1-C8
cttctacatgagtgccaatatcttgggcagcgctggggaccggcaagtcgcgagttcttacctcgaaggcgtcattctggcaaaccaagataaggacaacttcctcgtgccttactttcccgagtaagtcctcccctcaaccgccccgtaacatatgaattcttagatttcgatcgtttttcttttaacattccgtgttttctgcagtgacacacattgcacgctcatcctcctaagccccaaatattccatggccacgtatttcgacccggaccgtcagtcgaacgtagactacacaaatgtcaagaaggttcttgatgatgttctccccggctacgtcaaatctggaggcaccttcaccaggcctattcgtaagtacggcaagcacgtgttctcccacaacacgatgttctgctgcgtcaagcagccgcctggcggtcagaagggtgcctactacgccat

SEQ ID NO: 3611 - DNA, 468 bp, Triticum aestivum
  Clone ID: LIB103-038-Q1-E1-C9
taccggatcgacacttcccggggtcacgggatgacgttgcgggattctcgggagatgaactacgatagcaagttccaaaacatgagctggttctgctactaacatgtgaacacgttgtcccagacaagcatgaccacatagtagtcttataataaaacactaccgagttcaggagggggaaccatcaacgagggtatcgaagtccttacataagtccggattagctcttacgaaggaactccttctccttgaacaaatcaaccagtggcttggtgtgctagggatacatatagattgaaggttgcaagtcttcaaaccacagcattcttcgcacgtgtgcatgactgatttggaatgattccaaagaaagcaacattgactttctcgaatccacggcggcaacttgcatcagatgcacatgaattaaaggaagtcactaccttcatccgaacatatgcttcatgaact

SEQ ID NO: 3612 - DNA, 441 bp, Triticum aestivum
  Clone ID: LIB103-038-Q1-E1-D1
attcgggggtccacgggcctggctctatctctggaggaccggcgccatggcggcggcggcgctggcgcagggaactcctcgggcgattcgccgctgctcctgctgccgatgctggacgacgacatctcccgtgaggtccagcgcctagatgctgatatggaccgattcatcagggcccagagtgagcgcatgaggcagtctatattggagaaagttcaggcaaagcagtttgaagcgctggcctctgttgaagacaagatcctccgaaaaatacgcgataaagagtcagaagtgcagaacatcaacaaaaggaacctggaactcgaggaccagattaaacaaatggcaggggaagttggtgcgtggcagcaacgagctaagtacaacgagagcatgatcagcgcactcaagtacaacctggagcaggtatgtgcccatcag

SEQ ID NO: 3613 - DNA, 457 bp, Triticum aestivum
  Clone ID: LIB103-038-Q1-E1-D10
ttcccggcggtcacgggttccatccaaatccacgcctttgttgttatctaacatacttgtgtctctccatcttattaaaaatctagtttgcattcattcttttactggtgaaaatcctgtcatcgttgagtttgacatgtgtgttttttccgttaaggacgcccgtacccggatggtgctccacggatgtgatagccctgacagctttacctgatccacccacccgcctccaccaacacctctctggtcgccctttccatcgatgtagacctctggcatgctcgcttgggacatcccaaccacgccaccctttgtcatattcttccgagtttttttcacgtgtaataagaccgatggtcacacttgtcatgtgtgtcatcctggaaaacatactcgtcttccttttagtgcatcctcctcgattgcatcgtatccatttgaactacttcatagtgat

SEQ ID NO: 3614 - DNA, 453 bp, Triticum aestivum
  Clone ID: LIB103-038-Q1-E1-D11
taccggacgtacctcccgggtgcacggggagtggcaagagcctaagcttggggatgcccatggcacccccaagataatccaaggacaccaaaaagtcaaagcttggggatgccccggaaggcatcccctctttcgtccacttccatcggtaatttacttggagctatatttttattcaccacatgatatgtgttttacttggagcgtcttgtattatttgtgtcgttgcatgttagtctaccacaatcatccttgttgtacacaccttttgagagagccatacatgatttggaacttgttagaatactctatgtgcttcacttatatcttttgagcttgatagttttgctcatagtgcttcacttatatcttttgagcttgataagttttgctctaatgcttctcgtatatcttttagagcatggtcgtggatttgttctaaagaaactattg

SEQ ID NO: 3615 - DNA, 432 bp, Triticum aestivum
  Clone ID: LIB103-038-Q1-E1-D2
ttcgcgcggccacggggtacaatttaggtgcagcagtatgggcatgaagcttgattatgcgtccgtcgatcatccgcatgcgaatggtcaagttgagctatcaactggtcttatcatgagcggcattaaagccggagtagtgcgatccttgagcgaatccgatacgcattgggtagaggagctcgactccgtacaatgggggctgctgaccatgcctaatcacactaacggatacacaccatttttagggtgtacggctcataggcggtgcagccctgcgacataattcacgactcacctaaagtgcacatgtgagtaaagaaataagccgaacttgatcggcatgacagtttggacgccctgaacgacgatcgtgacgtgcgaaaagcccgttctgcattctatcagcaccaggctcgattgtatcaaatc

SEQ ID NO: 3616 - DNA, 430 bp, Triticum aestivum
  Clone ID: LIB103-038-Q1-E1-D3
gggccacgggaaagagaaaagaaatgacccttcggtcctatttataaagaaagggatatgtcagacgcgagaatcaaggagccgtgagtttggaaatgaagctgcggccttaattgtcacaggcttgttaacaggataaggttctttataaccagtgacgtcacaccggtccaccgcgagcagagaagatgacatcacggcggttcaacaaaatacaagaagatgttgaagatgaagatttttgctaaggattgatatgaacctgttcaaatcaatttggggcctaatgttggggatattactacggggcgtaaaccggccaggacaggccgggttaacttcatcagtagttgagtatgataaaagcccatgagggcagatgagggctaaaggcccataatcggtttaaggcctatagctataaaccggc

SEQ ID NO: 3617 - DNA, 459 bp, Triticum aestivum
  Clone ID: LIB103-038-Q1-E1-D4
cgggttcttaaatagttttctttagttttgtttcactcctgtaagaaactcttgtattgtaagttgtaagaaagagccattataccaattcagaatttctactagaaatgacgaatggttaaaaaaagttctagacataagaaaattagactttcttccacggaactattcacggcatatcacacattttccatttccttttactttttactatagtctattcttactagtatttttctttccttccatggattctttggtcaagaattgtcgtagttttttttattttgacctgattgagattaagtggatgcaatgaagaaagaaattgaattagactacttaactatttcaatctactaatctagtctattctatgtagattcaaagatcatataatagagagaatctaaagtgtcgtatacaaaactatatgtagttctttctaccacactttaa

SEQ ID NO: 3618 - DNA, 353 bp, Triticum aestivum
  Clone ID: LIB103-038-Q1-E1-D5
gagccgacaccacttgacaataaaacgacaataccgcagaccaaggagtagaatgtctgaagaggctttcttctgttgaagttgttcagttgggctggtttgtgaatgtgtacatgaaggttttcttttatcttagagagacaccttgcttcagctgtaaacttaagagcgtgcatatttacctgaatgtagatgtggcgctgctatttgcaaatcttccatgtgccagaattgttgcttggaaaaaaaaaaaaagaaaaaaaaaaaaaagaaaaaaaaaaaaaaagaaaaaaaaaaagagagaaaaaagaaaaaaaaaaagatagatataagaaaaaaaataattgagtaag

SEQ ID NO: 3619 - DNA, 461 bp, Triticum aestivum
  Clone ID: LIB103-038-Q1-E1-D6
tgcatgggattgaaccccagacaattgaatccctgaatctcttgaaaagtcgagatgcagtatttatcgttgctttgaacaaggttgatcgtctttatggttggaagacctgccccaatgctcctatcgggaaagccttgagacaacaaaatgatgatgtcaagttggagttcaatacaaggcttactgatattgtgacacaattcaagatgcaaggtgtgaatactgctttgtactacaagaacaaagagatggaagatacatttaacattgtgcctaccagtgcagtaagtggtgaaggcattcctgatctgcttctactattggtgcaatgggcgcaaaagacgatggaagaaaagcttacttttgttgatgaagtccagtgtactgtcctggaagtcaaggttatcgaaggtcatggcactacagttgatgttgtgctggtcaatggtatgctccat

SEQ ID NO: 3620 - DNA, 266 bp, Triticum aestivum
  Clone ID: LIB103-038-Q1-E1-E11
cggggagctattcatggtctcatgttaggagcatcactacaatatcataatgttccaaagtacagagtttgtcgaccatcctagatgtgcacatacatatctacaagtctacgctgtaaataccacatatttctacgatgtctcagctatcattcaaagacacgatcttgaatctcgtcggcagtcgtatagtaggtgcttttttatatgtctatcttatattataatacttacttgacttaggttgcgagccatatattatttct

SEQ ID NO: 3621 - DNA, 433 bp, Triticum aestivum
  Clone ID: LIB103-038-Q1-E1-E5
gccttctacatgagtgcaaagatcttgggcagcgctggggaccgcaagtcgcgagttcttacctcgaaggcgtcattctggcaaaccaagataaggataacttcctcgtgccttactttcccgagtaagtcctcccctcaaccggcccgtaacatatgaattcttacatttcgatcgtttttcttttaacattccgtgttttctgcagtgacacatgttgcacgctcatcctcctaagccccaaatattccatggccacgtatttcgacccggaccgtcagtcgaacgtagactacacaaatgtcaagaaggttcttgatgatgttctccccggctacgccaaatctggaggcaccttcaccaggcctattcgtaagtacggcaagcacgtgttctcccacaatacgacgttctgctgcgtcaagcagccgcc

SEQ ID NO: 3622 - DNA, 427 bp, Triticum aestivum
  Clone ID: LIB103-038-Q1-E1-E7
gggtccacgggggtaaagattgatatataggactatgatattcagacaccgaaagagattctgagtgcaccggtaatgaggacattacctatgtaaataccagcaaagatattaggtgcacgtacattacttaggattattgaaggcatttgcaaaataaatatcatgatgaaagattatgcacttgaagtttacacgagctatacaagtgcaccatgcacatgtagccaaggaaatgctcctctacatgcatgcgacagaaagatggaaggaggagccacccttgcatgctacgatgctcatgtacatcacgttggggccacacatcttgtcaaccgaaggaaacatcaattccgactgaggcgtgcagaagttggactccatacgacctgcgttccataaacaaggacccaacgcggccgccaat

SEQ ID NO: 3623 - DNA, 460 bp, Triticum aestivum
  Clone ID: LIB103-038-Q1-E1-E9
taccggtacgacattcgcggggccacgggatgctgtggaaagtgacacttttgagccttcacgatcacgcacgactgatgcaagccctggtgcattccgtagaacctcaggtgctcagagaagcccaccggttgattctgcagaaccacagcgttcctcttcggctcggcattcatctaacccgaagaactacgagtctgccctcaaaggtattgaaggtcttaatttcgatggcgatgagagggctcagtactagtagcactgagaaaacgattcctcttctacgtgtgctgtgtataaattataatctgaagataagcacagcatttcctgttgagttttggattacaggagatgttacgaggaggatgtgaagtgctattgccagatgatggtggtggtcttctggacacggtaaataagtggtcagcccgaggcacaaggaatgtagctctcataa

SEQ ID NO: 3624 - DNA, 453 bp, Triticum aestivum
  Clone ID: LIB103-038-Q1-E1-F10
ccacgccagctacgacactcagttggaccagatgatcgttgccaccaccaacaagttcgccgtcgtctagaagctcatggatgacattgctgtactcctcccgcttgcccgggctcctcattgcctgccaccctaattggcctccatggtcggaacctcttttaagcattggtggccctgcgactgcccgccgatgccacgaagaatgtccacctggaggtcgcgctcgccacgaggtgcctcgccctgcaagaattcatcgacctacacatcaacgtgtacgagcaaatcgtgtacataggtatctacaaggacaacgaggacgctatgatgtttgccctcttcaactggttggatgccttggatgcctttgctgagaagcaccttgactttgccacaaaagccgacaatccttagccgctggtcggtggcctggcacactgagttgaggag

SEQ ID NO: 3625 - DNA, 434 bp, Triticum aestivum
  Clone ID: LIB103-038-Q1-E1-F3
gccacgggaggcaccctaaaggcaacaattcagtcaattcttgaaatgggtggtggaacatgggacagagacactgtgctgcgtgccctacgtgctgcattcaacaacccggagcgggctgttgagtatttatattctggtattcctgagccgatggagattcctgcaccaccaccaagtgcccagccagctgatcctgccctggcttcacaagcagctcaacctgcagttgcctcttccggtcctaacgctagccccttggacctcttccctcaagccctgccaaatgcttcagcaaatgctgctggtgaaggaaatctggatgttttgcgtaacaatgcacaattccgaagcttactttctttagtgcaggccaaccctcaaatcttacagccattgcttcaagagctgggaaagcaaaaccctcagatttt

SEQ ID NO: 3626 - DNA, 467 bp, Triticum aestivum
  unsure at all n locations
  Clone ID: LIB103-038-Q1-E1-F4
ggccacgggagattacctgcccccgcggcgtttgtcagaccaaaggcccccgatggcacgcctgagatcaggcctcttgacatggcaaagcgccctcgtcgcaaccgcaggtcgccagctcttagggctgcattccaggagacaaccatctcgcccgctaatttggtgctcccattgttcatccacgaaggggaagaggatgctccaattggcgccatgcccgggtgctttaggcttggatggcagcatgggcttcttgatgaggtgtataaggcacgcgatgttggtgttaacagctttgtgctctttccaaaggttccggatgcattgaagtctccaacaggagttgaagcatacaatgacaatggtttggttccacgaacaattcgcctgctcaaggataagttccctgatattattgtttacacngatgttgcttntggaccgttatcatctgatggacatga

SEQ ID NO: 3627 - DNA, 412 bp, Triticum aestivum
  Clone ID: LIB103-038-Q1-E1-F5
ggtccgtaataccgggtccacggggggtatatgagccttattgggccatacgggaatagaggagagaggccaaaaggaaggaggcctgcgccccccttctggtctgaattggacaaggggcgcagcccccttttccttcttcctctccccctctttccccttctcctactccaacaaggaaggaaggggtcctactcccggtgggagtaggactccccttggcgcgccacctcctaggacggcctccccctcccccttgctcctttatatacgggggcaggggggcacctctagacacacaagttgatcttcgtgatcgttccttagccgtgtgcggtgcccccctccaccatattccacctcagtcatattgtagcggtgcttaagcgaaaccctgccacggtagaacatc

SEQ ID NO: 3628 - DNA, 432 bp, Triticum aestivum
  Clone ID: LIB103-038-Q1-E1-F6
ggggccacctcggcgacacggcgccaggggcaaccgcactgaagctctggtacatgagcaggccacctcccggaagctcctgctcgacgacatcctcgagcacgtaggaggagccagcctccgcaccgcccgcccatgatttggcgaagccgtggccaccgaagatggtgacggcgacggagaagtctgacgggcggaagcacgacagcaccctctcgatcaggtcactgtagaccagggagccagggttgaagttcatcgcttcatagctcgcgtagctgaagccctcctcaggagtgacgtggatcgtggaggctgcggggccgcagacgccgttcatcgagtagccgcacgggtcgaagtcgaagtcgcagatctccatctccgggatgatggcagagatccccgagaccttggtcatctccttggccg

SEQ ID NO: 3629 - DNA, 437 bp, Triticum aestivum
  Clone ID: LIB103-038-Q1-E1-F7
ggtccgagaaaccggggccacgggacatgggaaataactgaacgcccctatggctatataccattgggatgtaaatagtgatgtctaccacacaaccttcttcttgtagacgttgttgggcctccaagtgcagaggtttgtaggacagtagaaaatttccctcaagtggatgacctaaggtttatcaatccgtgggaggcgtaggatgaagatggtctctctcaaacaaccctgcaaccaaataacaaagagtctcttgtgtccccaacacacccaatacaatggcaaattgtgtaggtgcactactttggcgaagagatggtgatacatgtgcaatatggatggtagatataggtttttgtaatctgaaaaatataaaaacagcaaggtaacaagtggtaaaagtgagcgtaaacggtattgcaatgctaggaaac

SEQ ID NO: 3630 - DNA, 293 bp, Triticum aestivum
  Clone ID: LIB103-038-Q1-E1-F8
gcgggcaagggagccgtgcagaagggttccaagggcccaaagattggcggtggcggcgggaagcgttgaaagttgattacgccatagacatagagttgtgctgcctagccttgtttcctatcctactatcacagacctttgtcaagttattaccccgccctcttgaatttgcaccttatctctgaggctgaatggtgttaacgttttggattgtctcgatgagtttatttataatgaatggtacttatgttggttctaaaagtaaaaagaaagaaaagatgacgttaagaaaa

SEQ ID NO: 3631 - DNA, 436 bp, Triticum aestivum
  Clone ID: LIB103-038-Q1-E1-F9
gggggatacacaagcgtctaagcttggggatgccacggaaggcatcccatctttcttcaacaagtatcggtatgttttcggattcgtttcgttcatgcgatatgtgcaatcttggagcgtctttttcatttagttttcacttttcttttatgcaccatgctggtatgatatagtcgatggttgctttatagaatgctctttgcacttcacttatatcttttgagtatggctttatagaatgcttcatgtgcttcacttatatcatttgaagtttggattgcctgtttctcttcacatagaaaaccgcgatttgtagaatgctctattgcttaacttatacttgttagagcgtgggcatatcttttgtagaaagaattaaactctcttgcttcacttatatctatttagagagatgacaggaactggtcattcacat

SEQ ID NO: 3632 - DNA, 447 bp, Triticum aestivum
  Clone ID: LIB103-038-Q1-E1-G1
gggtccacgggtactgctggatctgtgactgatgcttcccgcactgagcgatcaccctctacacagtcaggtacaccctcatgggttctggactctggagcttcttttcatatgtcttctcattcttccattttgtcctctcttagatcacccgattctcctattcatgtcctcactgctgatggtactcccctttctgttgctagtagaggcaatcttattactccttattctgttcctgatgttgctcatgttcctcgacttaccatgaatttgttttctgctggtcaacttacggattctggttgtcgcgttatccttgacgttgactcttgttctgtccaggaccgtcatacgcacactctggttggggctggccctcgccgccgtgattctcaaggtctttgggagttggactggcttcatgttccctctgctgcaacaaca

SEQ ID NO: 3633 - DNA, 441 bp, Triticum aestivum
  Clone ID: LIB103-038-Q1-E1-G11
gcggggtcacttcgatggcaggatcaacgctgctccaacggccccctctccggcgggatgtactacttggatttcatcccctacgtcaactcatacacagagatctacatttctctttctcttctaaagaaatcccctctgcctcgccgctgagctgagtgtatgttgaaacttttcgtccatcaagcgccgcctcgccgcctccggccgccccgatgacgccctctccttcgccaatccccactcctccatgaggtaatttgtctcttggaatttggaagaggaagatgatgtagcgtggttgttatctatcaatatgccttgtgttctggttgttcttcatagctagttacattgtattctgtactggtctggttgtatgaacactatgaaaatgtgagaaatacaaagctgatgagttggacctaaaaaaaaggagga

SEQ ID NO: 3634 - DNA, 458 bp, Triticum aestivum
  Clone ID: LIB103-038-Q1-E1-G12
ttcccgcgtccacgggttcacatatatctttttgagagtcttttagaacagcatggtatttgctatggttataaaattggtcctagaatggtaggcatccaagttgggtataataaaaactatcataggaagtgaattggatgctatgatcaatttgatacttgataattgttttgagatatggaggtagtgatattaaagtcatgctagttgggtgattatgaatttaaagaatgcttgtgttgaatttagcaagtcctgtagcatgcacgtatggttaaagttgtgtaacaaatttgaaacatgaagtgtacctggcttgtgcatccttatgagtggcggtcggggatgagcgatggtcttttcctaccaatatatacccctaggagcatatgcgtagtacttgatttttgatgacttctaaatttttgcaataagtatatgagttcttttgacta

SEQ ID NO: 3635 - DNA, 467 bp, Triticum aestivum
  Clone ID: LIB103-038-Q1-E1-G2
tccacggggtgatgctcaaacacatatccattaacgatgtgtgggtcaatgaacccaacatcatggatgttccttactctgcattccttaatcttcattctgcatgtataatagcggacacaacaatatagttaggacatatatatagtgcaggcaatatgaacgagatggggtagaaataaatcacttacagaacgtagcaactgatgatagatttgtcgagctcgcgcagattgaaaagctggaacaattcactcagatgaatttgtacatagtaatgtttgaagtgatgctcatatctaacttccgcataaatatattctttggcgtctttattttttatgtaacccttgtaccatttcagcagacctttcatttgtggaggtagatcctcttcctgcgcaggctcgacgagaggcgcattcttcacatatggtaattactacctccttcactggcgcctcatc

SEQ ID NO: 3636 - DNA, 451 bp, Triticum aestivum
  Clone ID: LIB103-038-Q1-E1-G3
ttcccgggtgcacgggattggcaagagcctaagcttggggatgcccaaggcaccccaaggaaaaattcaaggcaaccaaaagcttggggatgccccggaaggcatcccctctttcgtcttcgtctatcggtaactttacttggagctatatttttattcaccacatgatatgtgttttgcttggagcgtcttgtatgatttgagtctttgctttttagttgtcacaatcatcctcgctgtacacaccttttgagagagacacacatgattcagaatttattagaatactctatgtgcttcacttatatcttttgagctatatagtttctgctctagtgcttcacttataccttttagagcacggtggtggttttattttatagaaattattgatctctcatgcttcacttatattattttgagagtcttaaacagcatggtaattttcttt

SEQ ID NO: 3637 - DNA, 467 bp, Triticum aestivum
  Clone ID: LIB103-038-Q1-E1-G4
gggctattttcaaaattagaaaggaagggcaagattgaagatgcaaacaaaaatatagttggacacttccattctcaactcactcaagacatggatatcttgcatagaaacatctcaacttcagtctctcaacaggagagccaactgaaagtacttgaagaggagatgcaatcttttatcaccacaaagggcaaggttgctggaggacttcaaaatcaagtaagagaaatgaaagagagcttcagttcaaggattacagaattgcatggctttgctagtgagctcaacctcaaatcccaactaagctctgagaagctgaatgcccaagttagcgcacacacatctgatttggaggattgtctgaagggcctcttagctgatgctgaccaattactcattgggctacaaaatgggctctctcagcaagaagagagcttaactacattagttgagcagcaacatgaagg

SEQ ID NO: 3638 - DNA, 388 bp, Triticum aestivum
  Clone ID: LIB103-038-Q1-E1-G6
gggtccacggctggttatacatcgtaaccttgttgaaggcattgctcggatatgctcggacaatttcttcaggatgaaaacttagattccggtgttgactgctggatccagtgacgacgacgtttcaacgttgctcctttcctgaagacgttgctgttgacgaatcacgatgttcatatggtgtcgtgagacggttggtgcggatatattctttcctatagtttgccgatcactgaactgatcactttagttttatttctttcgattgctcgctcaggcataactttggtcttatatgactttgccaattgctggcatggtttttgtgtgggttggtgcttgctgtgtgcatcctaactgtgcagatgccgggtatgtgctcatcatg

SEQ ID NO: 3639 - DNA, 457 bp, Triticum aestivum
  Clone ID: LIB103-038-Q1-E1-G9
ttcccgcgtccaccatttacaacgaaatcaaaacctacaccatagcttttttgttactttcaggtacgaattgatgtgtgcggcacggtaggcagtccaagttcatcctcctgcaccaacagacaaaagtaagcagagcaaattagtatactggttgacaagtgttgacattacaatcagggggggaatccatgaataaatcatgagcgtgacatggacatcattgataacacactaattacgatctaacagagcatgtactacgcacatagtagaaacatctacgcatatcgctagtactgctacaacagaaagaaacatgagaggaataagcgatgtataccgcggcggcggtgacgcagcagccgcgtcatcctcggcggcggcacggtcggtgtcggtcaacatggtgatgacgaaggtagatgaacagacgcgtgtggagagacgtggcgag

SEQ ID NO: 3640 - DNA, 391 bp, Triticum aestivum
  Clone ID: LIB103-038-Q1-E1-H1
ttcgcggggccacgggaagtgggggacgcctgctccagtggaaaatggggtggccaacggaagggcgccagcatcatccgctacaagcaatctagccacagatcaaaaccaaagatagatgcatgttgagttaattgtaaaatcttgtcatccgcatgttggtgtcagcaaggttattgttgcgtttcttgggaatgtaagattagctgtgtgtttatgttgtagttgtgagatgattacccttgctcctatgagtgatgatcttgtgatagggataaagttcataagagggttcgccttaggttttgggcagtttaaacggaatagccggaccctgtaggtatcttgatgcataatgatggtaatcagttcatgggtttgcatccaaaaa

SEQ ID NO: 3641 - DNA, 450 bp, Triticum aestivum
  unsure at all n locations
  Clone ID: LIB103-038-Q1-E1-H12
cgggtctcaagaaaatgagacatagagagagagattaaacacttagctactggtacaaaccctcagccctgagggtggattactccctcctcatcgtggtggccgtcgggatgatgaggatggccaccggtgatgattcccccctccggcagggtgccggaacggggtcgagattggatctcgtggatacagaggccttgcggcggtggaacttctgatctagggctaccccgaagggttttggaatatttggaattttatagggtgaagaaggggtgcgggaggtcaccgaggtgggcacaacccacatgggcacgcctgggggcccaggcgcgccctggtgggtgctgctctagcccatcctgggtgttctggtcnaaaaaaattgtcctangagttacgcggtgtttggtctccgtttgatattgatttcctgcgatgtaaaaaaca

SEQ ID NO: 3642 - DNA, 398 bp, Triticum aestivum
  Clone ID: LIB103-038-Q1-E1-H2
cgggggtgaggaaagtgacgagggcgatgagtactagagcctgcctcctggtgctttcccaaggcatgctgctgcaatcctatgacctgcccgagtggctttatctgttatctgtctgtttgaacatttgctttgtggtgtttgttttacaacctgttgtgttgtaagaaccttgtatgtttgaacctgttatgcaccttggttaatatgcatgctatctggttatctaaaaaaaaaaaaatggaaactaataaaaaaagaaaaaagttcacaagaaatgaaaaaaataagtaatgaaaaaataaaaatgaaaaatccggccacaaaaaagtaaagtaacgcataaaaaaatgcggcccctcaaagggtttagccttcaattccccgtaaaagcaaat

SEQ ID NO: 3643 - DNA, 462 bp, Triticum aestivum
  Clone ID: LIB103-038-Q1-E1-H4
ggggctagcctcaggatccatccatccgcccctcgctgccgctgcgtctcgtctccaccaccccacttgcccccggactcaggaggatcgtcggagatgtcggacaccgatgagcaccacttcgagtccaaggccgactccggcgcctccaagacctacccgcagcaggccggcgccatccgcaagggtggacacatcgtcatcaaggcccgtccctgcaaggttgttgaggtctccacctccaagactgggaagcatggtcacgcaaagtgtcactttgttgccattgacatctttaatggaaagaagcttgaggatatcgttccttcatcccacaactgtgacgtcccccatgctgaccgccaagattatcagctgattgacataactgatgatggatatgtcagccttctaactgagagtggcaacacgaaagatgacctgaagcttcccactgatgat

SEQ ID NO: 3644 - DNA, 374 bp, Triticum aestivum
  Clone ID: LIB103-038-Q1-E1-H5
tcgagggcatccagaaggagtccaccctccacttggtgctcaggctccgtggtggcatgcagatatttgtgaagaccctcactggcaagaccatcaccctggaggtggagtcgtctgacaccattgacaacgtgaaggcgaagatccaggacaaggagggcatccccccggatcagcagcgtctcatctttgccggtaagcagcttgaggatggccgcaccttggcggactacaacatccagaaggagtccacccttcacttggtgctccgtctccgtggtggccagtaaagctcctggcgatggagctctgcttcggtctctgggttcgcaaatcccgtctttgtttctgtactgtacattgatgcagtgtta

SEQ ID NO: 3645 - DNA, 447 bp, Triticum aestivum
  unsure at all n locations
  Clone ID: LIB103-038-Q1-E1-H6
gataaaattatgtgtagaacgcactctctatttcgagcctgtaaagtgccttctccctcagccttcgaccaccggcatgtcaaatagcccgggttgtggcgttattatctgtaagatggcaattgacatataaatcaggttccagtgaacataatccgtattcagtgtttgctttttctaaagaactgaattttgcttcttcggttgtttcacacacgcacctcggcacaaattgccaggggctcgatacggcaacaaatgagttgccgacaagtccgaacagctttatagcacacttcgacgtcacgagtttggccttatatgcaccagctccgaatcatgtctttggtcaatagttgggttgcccggctcttgtgcttactatcttacgttccgctatatcggctaaggtagtaaanggagaactactgtgattgtgtcctggtt

SEQ ID NO: 3646 - DNA, 421 bp, Triticum aestivum
  Clone ID: LIB103-038-Q1-E1-H7
gggtgccagggaagagggcgacagctcagaccaaaggcatgaggcagaaagtgatggaagaaatattcaagcctactgatgacagcaccctcagtgctccttctcctgagaagaaggtgcgaaggatcagagactcccccttcaacaagaagagcggctcggttctgcacagaatggcgagcgcttcaacagggacagaagatggtgaggctcctccctccggcagctctgccgagccagttgcaccgagaaggacaacaagggagaggaaggcggcagtagtctacgtcgcttccgagagtgaagacgatgagactgaggatgaagatgtgtcggaaccaagcgatgatgacttctccgaagatgactagactccttggctcaaccgcccaaacattgcgtggagtaaagtgactagtgt

SEQ ID NO: 3647 - DNA, 322 bp, Triticum aestivum
  Clone ID: LIB103-039-Q1-E1-A1
gggtcgccgggatctgattcaagtgtcagtttcacggcgacattcgttaccacgtaacggtcaaaatgtggactccgccctacgcgggcccactacacagagtgatcgggcaagccactgacccgacggcaacatcggcgaagacgagttcagacggttcccggcaggggacgagggaaaatgttcagagttgagaccgaggcgagccaatgctcgatccaacgatccaatggcacatgcataacggtcacttgaatgccattagacccggactaacgccgttttcagcaggtctaccatagagctggttttgtgcaagaat

SEQ ID NO: 3648 - DNA, 445 bp, Triticum aestivum
  Clone ID: LIB103-039-Q1-E1-A10
caggtaaataaaaatgagaatgctctggttgatgagcccgagatgcataagaatgccgcttcccttcagacatgggcagagaagctgagtgggcagggtgcagagatcacatcatcgcaactaaagaattggctgaacaacagaaaagctaagctcgctcgtatcgcgaaagaaagaggagtgccatacgagggcgagggtgctgacaagtcatctacaccagctaattctcagttgggtgactcctcagagagtgccggcgaggagagctatttgccgccttcaagggtgctgaatgctctaggcttatccaactccaagggcagcagcaggctcgttaccccagactccagcgagccaagtacacaagacatgatgacgagccgcccgttcacaagatcattgtcattcgagcctggccgccccgttctgctgattgacaacg

SEQ ID NO: 3649 - DNA, 404 bp, Triticum aestivum
  Clone ID: LIB103-039-Q1-E1-A11
tgaggccggggcgtctcagccggctccaggcgatgacttggcatccgctctgccaggcacgctgccaggaattcgacctccgtctgcgatcacgcagcaagagactctaacttcgccggctgcggcgccagaatatgatttgcctctgcctccacgccctcgactgatgcagcatgaggaggatggaacgcgataagatgatctgtctctgcctccacctccaccactgccccatcatgaggctggagcgccacgttcagcgccagatgcaggaaccgtcgatgacaagtgtgcaagatgtggcgatgacaattgggtcaggaggcccggatgacaagtgggtcaagtggttgcatacggcgtggaatcgaactgaactgaactggctgtacatagatgctcgt

SEQ ID NO: 3650 - DNA, 417 bp, Triticum aestivum
  unsure at all n locations
  Clone ID: LIB103-039-Q1-E1-A2
cgatgaagaggtcagaggcgctggatcggcagccaatatgtctgcaacgacggcaagacggcggagatcgggcacgaccggtgctaaaggaattggcatcgtcagttgataattaagtttgcctcgttatttaatctgctgggcatattgactctgtggctaaggggcgtgtttagacggcctcggggaatgtatttttgtgcagaggatcatggtgaaatgatgttcatggtgtacaactggccagctgattagctatgcattggttcttgtccattcattgatttggtattctgtagttcaactcttccagtgtgtcttaaagggcgtcgttcttgccttcgagctgtctgtcacgccgtcgccatcacctattcnctcgccacgcgggacacagagatgggtgaggacgccaat

SEQ ID NO: 3651 - DNA, 220 bp, Triticum aestivum
  Clone ID: LIB103-039-Q1-E1-A3
gatgaaaattaacacgtggactctcgttatgcggtacgccacaccccaccgccccgttgcgaccgtcgggctctaacagagatccgtttcgtcgaattagcggtacacaacacccctcccgatcaacatggacactgtttcgagcgtaagacgtcggtagcgaccgtactgcagcaggccatacacgtccctaatatcacgaaacaggtgtcagctgtac

SEQ ID NO: 3652 - DNA, 363 bp, Triticum aestivum
  Clone ID: LIB103-039-Q1-E1-A4
caaccccgagttcaagatcgtcgtcaccatcatcggcgacgggctcaaaaccgaggcccacaattaccgcatgatgaaggaaaggctcgtcggtgtctccgaggagaccaccaccggcgtcaagagactctaccagatgcaggagtccggcaccctcctcttccccgccatcaacgtcaacgactccgtcaccaagagcaagtttgacaacctttacggttgccgtcactcgctccctgacggtcttatgagggccactgatgttatgatcgccggcaaggttgccgtggtctgtggttatggtgatgttggcaagggctgtgccgccgcacttaagcaggctggtgcccgtgtgatcgtgac

SEQ ID NO: 3653 - DNA, 336 bp, Triticum aestivum
  Clone ID: LIB103-039-Q1-E1-A5
caccgatttcacgatactcctcaacatcacccactacagcctcagtatcgacggacagtatcaccgtttgttagagagaggcgctccggagtcaactccgataccacaactggcatcatgcgatcctattaagtgcacgacgtaggcactctcgtcttcgatgcaattaactttatgactccgtcagttgatcgagtttgacaagctttacggttgccgtcacgcgctcgatgactgtcttaagacggccactgatgttatgatcgacagcagggttgctgtagtctgtagttaggctgcatttcgccatggccggttcgcttaacctagacacgc

SEQ ID NO: 3654 - DNA, 424 bp, Triticum aestivum
  Clone ID: LIB103-039-Q1-E1-A6
gggataccaagatactgaaattattaaatgttagagagtcttcacatagttgcataattattcgactactcattgatcttcacttatatctttcggagtagtttctcattttctctagtgcttcacttatatctctttagagcacggtggtggtcttattttgaagaaatagatgaactctcatgcttcacttacattattttgagagtcttaaatagcatgataatttgcttaaataatcctaatatgctaggtattcaagattagtaaaaaaaatcttatgagtgttttgaatactaagggaagtttgatgcttgatgattgttttgagatatggaggtaataatatcaaagtcgtgctagttgagtagttgtgaatttgagaaatggttgtgttgaagtttgcaagtcctgtagcatgcac

SEQ ID NO: 3655 - DNA, 395 bp, Triticum aestivum
  Clone ID: LIB103-039-Q1-E1-A7
ggcgaaagccgagcagtgggctctcgtcagccagtgacgtgtcttggtaatataaccacgtcagattccagtcctttgggtgactcggtggctcgacgtaagggaaaagacagtctctccgtctctgaatggagatgccgcctacttccaaacttggcccgttggcgcactcgttctgggggttcaggtagaaaatctctctgaagagcaacaggctgggctcttcgccaagataaacctcgcagaacacttggaaattgcatatgttggacaccgagttgggtcctatatcttgtggccgcacgtcaaagaagttcagcacgtctctaaagaactttgagccgggcggtgcgaagccccggctcaagtgatccgcaaaaatgaccacctccccg

SEQ ID NO: 3656 - DNA, 350 bp, Triticum aestivum
  Clone ID: LIB103-039-Q1-E1-B1
aactcagaaacagacaccaccctgtcccctcgtcttcctcggccctcgcttcgttctccgcgggagccggcgagccgccgccccactcactctctctccccccgtctaccgcacgcctccgccaggccattcccatatgctcttctccggcgagggcaacagagcatgattctgtggcagggttgaatggcggtgagttcgggatatacgagactgtgcggagcaggggttattaataaattgtgcaagaggcgatccttggccgagatggatgccgttgttgatgttgccgatgctatgggcgctgtgactatatagaacggggcgaagctggagttgcctgacagtgt

SEQ ID NO: 3657 - DNA, 332 bp, Triticum aestivum
  Clone ID: LIB103-039-Q1-E1-B11
gttcactacagtgagtctgattagatcgcttgtaatcatgcgtcatacggacgaagtgcagtacacgagggagcgccatgtgattgtccgcaatgcttcagctgaactgaaccgatggagctaccgtggagctctcaggcctgctgatgtgtgtgtataggtattgctaagagtgcatcccgtttcatgaagaagtttgttgcttcgatgaaacatgagttgtagttgtatcagctagagctgtagctgtagccctgagttatcttgtcgaactgacaatgtaacaccgtatatgcattcatgaatcaattgggcgttctgcatctgagcag

SEQ ID NO: 3658 - DNA, 470 bp, Triticum aestivum
  Clone ID: LIB103-039-Q1-E1-B12
ggtccgagataacggggccacgggtgatagtaaaaagacccggttcatcttgaaaagataaaccggtccttaagggctacacagggaaaattgaagtattttctacaaagccccggttcatatcaatactataaaccggcccttggggactactggaattagtagcactaaaccggttataaggaagagtagttatacagaaatcagcagtgtttacctcatatcgctccttcatcatgttcaataacccggcttcataatcacagctggtgtacaaccagtttaaaaacccagagtggatatcttgggcgctgagatgggcataactttctggatccaccttccacttgcccttgtctatagcagaaaattcttctttggcgctatgttttgacagagcagtggggttgctgggggccgtatagccgacgccggtaatgacaacatcatccgttttatcatcagcagct

SEQ ID NO: 3659 - DNA, 358 bp, Triticum aestivum
  unsure at all n locations
  Clone ID: LIB103-039-Q1-E1-B2
cggcggtgaaggaggagcggcgccgaggctgatgcccaccattgaagaagaactccgttttttgctggtccccgtatatatatatagtttatatattcgcaagactgttatatctgtcgtctcttgtccggagactggaagttgaactgngtttgctgctgctggcagtcgttttgggtcggaaccttgtagttaagttaatcccgtaccgtaccccctggatcttggatgttatcaggtaatagttatgatgattgtgcttggaactaaaaaaaaaaaaaaaaagaataaaaaaaaaaaagaaaaacagacgctcaataagatcaaaacttaagataatcgtgcaagctaaatcata

SEQ ID NO: 3660 - DNA, 362 bp, Triticum aestivum
  Clone ID: LIB103-039-Q1-E1-B3
gacgccgaaactcaatatttatttttcttgcgttccggtccccaggcttggagttatttcctagtctggtgctcgctcgtctcgcgaggcggcggcggagggtttgcgtcggcgctcttgcgagctagggtttcgggtcgaggaagagcgagatggaggaggtgacagagggggtcaagaacctggccgtgacggagccgcacaagaagatccggatccaggtctccaacacgaagaagccgctcttcttctatgtcaacctcgccaagaggtacatgcagatgcataacgaggtggaactctccgacctcggcatggctatcgccactgtggtgacagttgccgaaattctgaaaaataat

SEQ ID NO: 3661 - DNA, 276 bp, Triticum aestivum
  Clone ID: LIB103-039-Q1-E1-B4
gtccctaccgaaaccatgaggcctgttgtgagaagctctggtttgtgaaaagcttatataccccaacttgccccaaatgggacattattttaacaacggcatgtggatgccttccaaggcaaccaggtcaggttccataatttccaaacgcgttttggattaactaaattataaaacccatgtataccagtgtcaggggccgagagacggtggcagggtttttgacacacactcacatctcgtgcatgagacatacccatgtacacaacgaaacac

SEQ ID NO: 3662 - DNA, 413 bp, Triticum aestivum
  Clone ID: LIB103-039-Q1-E1-B5
aggatggtgtacatgtacccgggccgcggcggcgacagcggcggcatcgacgtggagctggcgctgcagccggagcccatgcaaaggctcgagaaggacgacgagttcctgcaggtcgcggctgcctgatcacctgcacgccgctgcctgcaatatttagtgagcttaattaatcaaaggtttgtgatttagccactttcgttgattcgatcttcactagtgcgtgtgtgtttgcttgttactgctgcggatctgttccggctaaataaggatcgatcgattagtttgtgtaagatcaccatcctatttgtcgtgtcatgtcacacaaatagccatgtaatgccatgtagtagcatgtaatccacctacaggatttgcatatttgtttacacgtactcggctcatcccttctg

SEQ ID NO: 3663 - DNA, 408 bp, Triticum aestivum
  unsure at all n locations
  Clone ID: LIB103-039-Q1-E1-B6
gggccagagaggcatctcaccaagatggatcgtaaaacggaccaagaataatccaccttggtcgtacaacctctctcttgttgtgggtcaaagtgatggctgtccatgcgaccccggagatgggctagctcgccaataatcacgcaagtagctagtccccgaagacaaccactacatgcgtgtggccaaaacatatgtatggagaggtgtgtttttgagtagacaatggaacaactttgatgtggcaccatgatttcgaactagaaatccccacaccgagtgagggttaggttgacgatgcatatgtatgttacaccacacttcaagccgacgatagggattcatgcatgcatgcatccatantatatgtgctcaaacttaattacgtctgaatctcaacatcaccta

SEQ ID NO: 3664 - DNA, 266 bp, Triticum aestivum
  unsure at all n locations
  Clone ID: LIB103-039-Q1-E1-B8
ccgggccgacgggggatcctagcaatggtcgactatgagtagtgtgcgtttggttagcagatgacatgggttgtctgtcatctgctgcagtatcactgttggactgtanggtttttagcctgtgatgatacaattgtgtaacaactccctgtgtttggaactcgtctgactgaggtgcccgtttcttctatgcaatgtcaaactaatatattggtgtgtgtttttccgaaactagcaatattgttttggattaataagtggtgtcc

SEQ ID NO: 3665 - DNA, 470 bp, Triticum aestivum
  Clone ID: LIB103-039-Q1-E1-C1
ggggcgccgggattacctctataagcattgttattaaaattatttcgcgagacaaaattcacatctacggaatcactattttgctcaatcaaagtagacaaaggcacatcattaagatcaataggagaattttaattagcaaccaatttcataagagcatcaactttttcactcaaagaatttatttcttcaaccaaattaacctttttactagtaggtgctctttcggtatgctattgtgaataatttgccataatattatcaagcaatttagtagcttcacccaaagtaatttccataaaagtaccacccgcggcggaatctaaaagatttttagaaacaaaattcaatcccgcataatttttttgtataatcatccaaagatttaaaccatgtgtaggacaatttcttagcatcagtttcattctttcccaagattgtgcaacatgttcaagcctgaaattgcctaa

SEQ ID NO: 3666 - DNA, 468 bp, Triticum aestivum
  Clone ID: LIB103-039-Q1-E1-C10
ggtcggaataccggggccacgggtagtacgcaattcaatttgcttgttagaaactgactaaaaaaacatccaatcaagtaaaaaaggatgtacaacgttatttttctaacagaaaagaaaaaagaaaaatgagagagatgtgaaacccctctgtcaaaaatttataatcgcagtatcaaattaccttttattttttagttttttgcaggaaaatttaccttttattgaattagagcataggtgaattattgtgtgagatagaaatggaagttaaggtagtaagtgactgatcaagttacctgcggtcttgcaggtactgattaatgttgcaaaccagctcctgctcatcctggtcctcgccatcttctgacatggtgatttcggatgtccccgtagatattgacgctggtgctatagctgcttgtttgtcgatctggcaaagaatgtgtctcagaagcaccttgatgc

SEQ ID NO: 3667 - DNA, 450 bp, Triticum aestivum
  Clone ID: LIB103-039-Q1-E1-C11
ggggccacggggctgataggatccagactggtatgaggggtgcttttgggaagccgcagggagtctgtgcccgtgttgccattgggcaggtcctcctttctgtgcggtgcaagcccaacaatgccatccatgccactgaggcccttcgtcgtgccaagttcaagttccctggccgccaaaagatcattgagagcaggaagtggggcttcaccaagttcaaccgcaatgactacctcaagttcaagagtgagggcaggatcttgcctgatggagtcaacgcgaagctgctcggatgccatggccgcctggcgaaccgtgcccctggacaagctttcctgtctgccgcataatctagcagaagtctatccgttctatcgcaacttattttaccgtgtggaacttagattccaagtgcctgtggtgctatgttattttgtctgaatgttgtgt

SEQ ID NO: 3668 - DNA, 400 bp, Triticum aestivum
  Clone ID: LIB103-039-Q1-E1-C12
gttgaatgaatccattgtgagaagagcccttgtgatcatgcaccagagggacgaagtggagtacaagagggagcgccatgtgattgtccgcaaggcttgagctgaactgaaccgatggaactaccatggaaccctctggccatctgatgtgtgtgtataagtagtgctgacactgcagcctgtttcctgaggaaatttgttgcttcgttgaaattgagttgtagttgtactacttaaagctgtagctgtagccctgaattatcttgtcgaactgaagatgtaccacagtaagttcattcatgaatcatttgggcgttctgcagctgagcagagtatgcctaggaaactgaaaaaagtacgaggcccatttagaggatctagcttgaagtaaacgatgcat

SEQ ID NO: 3669 - DNA, 336 bp, Triticum aestivum
  unsure at all n locations
  Clone ID: LIB103-039-Q1-E1-C2
gaaagagaaagagagagaaaaccaggaagaaccaggaagcaagaaaatggggcaggcgctgcccaggctccttcgactccttcttctcaacaaaggaaatgagggttgtgatgcttggtttggattcagctggcaaaacaacaatcttgtataggctgcacctgngggaggttcttcaaactgtgcctacagtaggttttaacgtcgagaaagttcagtacaagaatgtggcatttaccgtgtgggatgttggtggacaagaaaagctcagacaattatggaggatgtacctcagcaattctgatgcactgatctatgttgttgattctttggaca

SEQ ID NO: 3670 - DNA, 416 bp, Triticum aestivum
  Clone ID: LIB103-039-Q1-E1-C3
cacagaaacaatccatcgccacccacccacgaccccctcaccctggctagggttcctagcccctcctcctcagccgccgctgcatgttcctcgctggcctcgcccgagcgccttccggacctcgccgggagaagtcagccagcgccattccgatctcgctgggagaagccagcaggaccccgccgccatgcctccctctcccccttctcctcttttccgctacctatctctttcctctgaacctgattggggcactgcgactggcctccactccagatccgtccgcctttgatcccgtatcctccttcccgacggggtctgtcctccgacactgcgcacgggtgctacgggattcaccactctagcgagcaggagtagcacggtggctgtggtctgctcagacccccgaccaacga

SEQ ID NO: 3671 - DNA, 303 bp, Triticum aestivum
  unsure at all n locations
  Clone ID: LIB103-039-Q1-E1-C4
gatgctcttgaaagtanggcttcagcttcttggcggtcaagtacacgccgtaacacatcttttggtantgcgggtagttctgctttgaagcggacatcacctcgctcaagtaatacatcggcctctagaccggctgggctcggccttcttctgggcgttggactacgatgacggtgctgaccacccgactggttgtggcaatgtaagggagcatgggctctttctcagtcggtgccgctangacgggcggcgtggctagcatcttcttcagctcgtgaaaagcttgatcggcctggtcgttgg

SEQ ID NO: 3672 - DNA, 195 bp, Triticum aestivum
  Clone ID: LIB103-039-Q1-E1-C6
tccggcgcgccggggtcatcatcatgcggtccgagaaggtcaaggacgagatcgtcctcgacggcatctatatctagctcgtctcccgctccgttgctctcatcaaccagaaatgcatgtcaataacaaggatatcaagaagttcgtggagcgcatccacctcagcgacaatggcgccatcagagaggactatac

SEQ ID NO: 3673 - DNA, 367 bp, Triticum aestivum
  Clone ID: LIB103-039-Q1-E1-C7
tcgacggggggacaagtggcttagtctgatgatgataaaacgctggtcaaacagcgtgaggaaataaagcgcatgactgctgagtttgatgcgagcatgctggagatccgcaagaatttggatgctatggatgaaattgagaggcggagtgcggaggactatgagaagttccgtaagaagctaaacaatattgagaaagcatgcaatgttgctttgatcgtgctggtgcctagcactgttctgctttttatgtcactgtagtatcatctctattagttggttataagaaacccttatttaactagtgggttaagaaaccctaccttcagaactctatgtgttgtagtgatccagctttggactttgc

SEQ ID NO: 3674 - DNA, 409 bp, Triticum aestivum
  Clone ID: LIB103-039-Q1-E1-C8
gggcttgggatgacccgggaaggcatcccctctttcgtcttcgttcattggtaactttacttggagctatatttttattgccacatgatatgtgttttgcttggagcatcgggtatgatattagtctttgctttttagtttaccacaatcatccttgctgtacacaccttttgggagaagcccacttgattagaattttctagaacactctatgtgcttcacttatatcttttgagcttaatagtttttgctctagtgcttcacttatatcttttagagcacggcggtggcttaatttttacgaaattgctagtctctcatgcttcacttatattattttgagagtcttttagaacagcatggtatttgctatggttataaatttggttctagaatgatgagcatccaa

SEQ ID NO: 3675 - DNA, 457 bp, Triticum aestivum
  Clone ID: LIB103-039-Q1-E1-C9
ggtccgtaattaccggggccacgcgggaaccagggaaaatcttctcctacccacaagaacgctcattcgcatcgccaccttcctccctcccctcctcgccatctccgacccgacttgcggccaatggcggaccagctcaccgacgaccagatcgccgagttcaaggaggctttcagcctcttcgacaaggatggggacggttgcattaccaccaaggagctgggaactgtcatgcgttccctggggcagaatcccactgaggcagagcttcaagacatgatcaatgaggtggatgctgacggcaatggaacaattgatttccccgaattcctcaaccttatggcccgcaagatgaaggacactgattctgaggaagagctcaaggaggcattccgtgtgtttgacaaggatcaaaatgggtttatctctgctgctgaactgcgccatgtcatgacca

SEQ ID NO: 3676 - DNA, 396 bp, Triticum aestivum
  Clone ID: LIB103-039-Q1-E1-D1
tgggcatgcattgaccagccacttcacgagtctaaaatagctgctgggtacaggcttggcgggcaaaagtcggactatgacgtccttcatggccaacccaaccaccctatgcagcacggtcagctacttcagctgatcactcaggggtgccgaatgctctagcggaaggtactgcgaccaaaacagctcctccattgagctcccctcttcggctcagaagaactctgcggtgtcagcaacactcctcggcagatccgcaaacgcgcctgaagaactccaaactcgggtcagcatgatatatctcttactggcaaatttactctgcagaagaaaatccttaccagccgctatctgcttcgcctgctggatctcctggccggcgctctgggactcaac

SEQ ID NO: 3677 - DNA, 455 bp, Triticum aestivum
  unsure at all n locations
  Clone ID: LIB103-039-Q1-E1-D10
ggtccgtaatatccggggccacgcgaggcccaccaacgggagccgtctgggtgatgcgggcggcgagagcagcccgacgctcagcacgaacttagcgagtgtcagccatggatgcgatgatcgatcgaacgcggaacagcanaagaaagattccggcgcacccctacctggcgcgccaaatgtcagatatcgggttccgtctaaacccttaaggttcgaactctggggtgcgcgcggagatctcctcctaccaatccatgcccgaactcctcgctacgaatctagactacccgatgaacaacacaagggacacgaggtttatactagctcaggccaccgttgtggtgtaataccctactctagtttgtggtgtggtggattgcctctgggactgatgatgaatagtacaagggaagaacagcctcgcgagggatgtgttggtgttctgcttgggg

SEQ ID NO: 3678 - DNA, 442 bp, Triticum aestivum
  unsure at all n locations
  Clone ID: LIB103-039-Q1-E1-D11
tcaccatcatgcagtccgagaaggtcaaggatgagatcgtcctcgacggcaacgacatcgagctcgtctcncgctccgccgccctcatcaaccagaaatgccacgtcaagaacaaggatatcaggaagttcttggacggtatctacgtcagcgacaagggcgccatcaaggaggagtagagtgcgaaaaccgtcccagaagccgtgtttctgcctgccgtgtttcatcgtctttgtgtcgtggttgtgattttgaactttctctagactgaattttgtagtggagttaattagggatgcgctatgcaacatgttatctttattatcctacatattgtcaccgtgagaattggtacgatgcttatcttcccctaaaggttgatgacttcaggtatttgaagttaaaacaggacatgaatgcgctgcgtgtgctgtactgttaa

SEQ ID NO: 3679 - DNA, 80 bp, Triticum aestivum
  Clone ID: LIB103-039-Q1-E1-D2
ctgtttgtgcgtcgacattggatctgttatgaccactgatctctgtttggtcgcgtcgcttttaaaagtattgtggttgt

SEQ ID NO: 3680 - DNA, 374 bp, Triticum aestivum
  unsure at all n locations
  Clone ID: LIB103-039-Q1-E1-D3
ggcttgtcgtcatggacccgccccaagaaaacggggcaaaccccaatgtcacccgcaataaaataaccaacgggtaaatcaaaaccctcgccaagttcttcggaattgaaaacaaaccaaggatgaaaatcaaccctgtgtcaactaggcattattttgcttttggtgccctagtatctgaggaactctcctacaaactcaaagatttgcctaaagtccgttgggttcttcctgattcatacctggatgtcagaaataaggactatggaggagaaccatttatagatggacaagctgttccttacgaacccaaataccatgaggagtgngtgagaaacaatgcccgtgccaatgatagattccggcgcaatgac

SEQ ID NO: 3681 - DNA, 390 bp, Triticum aestivum
  Clone ID: LIB103-039-Q1-E1-D4
aagtatgttgccattttgcgtaagcagatccagaacattgaggtgtctcagcactcaaggtacttcagtgaattcggcgggaattttccggtgaagaggaaagctgtgggaatttggggatgcatcgactgtgtcaaggtcaaggctggcggcgcctatacatgaacactgctaactgcagtcaccgtcacgagcacgatccgtcgcttgtgggagcataccgaagcatgattgccctactgttgtcttgacgaatccaggggttctgtagtggagtgaacacttaacaatctctgtactttggctatctagctatggatatctgttagtaattttggttctgattttaggatccttgaaacttgacagtatatccctaaagctgccctg

SEQ ID NO: 3682 - DNA, 448 bp, Triticum aestivum
  Clone ID: LIB103-039-Q1-E1-D5
ggccctaattaaagtgaatgcggcagtctctaaagcatagccccaaaaagaaagcggtaaatcggtaagagacatcatagatcgcaccatatctaacagagtgcgattacgacgttcggacacaccattacgctgaggtgttccaggcggcgtgagttgtgaaacgattccacattttcttaagtgtgccccaaactcgtgactcaagtattctcctccacgatctgatcgtagaaacttgattttcctgtcacgttgattttcaacctcactctgaaattccttgaacttttcaaaggtttcagacttgtgtttcactaagtagatatacccatacctacttaaatcatcagtgagggtgagaacataacgatagccaccgcgagcctcagcactcatcggatcgcacacatcagtatgtatgatttccaagaagtccgttgcgcgc

SEQ ID NO: 3683 - DNA, 181 bp, Triticum aestivum
  Clone ID: LIB103-039-Q1-E1-D6
gggcgatgaacaaaaatgaggcctccacagcttcaagcgcctcttctaagtctctgtttgccgtcgcaatggattgttatgactactgtcttgtttggtcggtcgttttaagatatttggttgtcttgtaatcggatatattatgtgctccagaacatctgggatgagctaaactgagcct

SEQ ID NO: 3684 - DNA, 325 bp, Triticum aestivum
  Clone ID: LIB103-039-Q1-E1-D7
gggaactcaagtatcataaaagcaaaggatagtcgattgtttacaccttcgttgtgtcaatgcaacccttctttgtactgtttagtagacattttgatgtgcccagtgttgctcgcatacataggatagttgattgaacatgctcattctaagtttctagtgcattgtttcttgagaatagttgcttttgtttcagtgtatttgacagcatttcagtacacacccctttggttattgtcgcaactttctgttaataagaagatagagccaagagaatatagggtgctttgttcttagaggaaactttaatcctatattgttcact

SEQ ID NO: 3685 - DNA, 342 bp, Triticum aestivum
  Clone ID: LIB103-039-Q1-E1-D8
gtctggaatcagcattgcacgagatgtcatctgaatccagagaggcgcacgatatatacctcatcaatcaggaagagatagatcatgctcgggcacatgtagacgatctcaacaatagtctgcataatgacaaggtgagctatgaggtgatgctcaatgaagtaaactacgagatagtttgcctcaagaagtccgttgagagaatggatgcagacgctaataacgtgtctgatgaatgtcagtcgccagagctaggttttgtcaactcaattatgaagtcgtaagatgagatcgtcacgatcagagtgcataggttgaactacttgggcgtggtgtatgaaa

SEQ ID NO: 3686 - DNA, 451 bp, Triticum aestivum
  Clone ID: LIB103-039-Q1-E1-E10
ggggccacgggggcaagagaagaaagaaattgcagacaacgatctgggtcgctactgtctctactcgtcgatggatcaccgggcgacgatatcctccagctccttcttcaattcctccggacttatcttaaaagcagccacggattcctccacctcctgctcgcgcttgattcggagcttcctcaagtcacccatcagttcctccacgaccgctgttagcgtcatccccaaggcactgctctgctcatgcagcatcttcccagccggcggcctcctcctccttctcggcgagctccttgaggatcttcgcattgtcacccatgagttgctcgacgaggccggtcgccttgtcaaccaggcatcgctgatcttgagcagcttcatcaagccatcgaccagctcctgctgcttagtgacgccagcgagaatgtcgtcgtcgccgaccaaagac

SEQ ID NO: 3687 - DNA, 443 bp, Triticum aestivum
  unsure at all n locations
  Clone ID: LIB103-039-Q1-E1-E11
ggtttaatgatgaactcttgtgttgatactcactcccatagttcatttcccaagaatcttacaatgtcatctcgacagtttgtgttgcacctttcttctcaagcattctgagtctgagttatcctgacaccaatcagatctgaatctcggtcagatatgatgattggaacatattcccaagagttataacaatggtttttatgtgacccggtaaggtgttttcatgcctagcacacttggctggaggacctattgttatagcttacttctagcaaggttatctattcttccacgaggaaatggtaagacttattctataagttcttcctgatgaatcctttgtgtatccaaagtccgacctttgcttgaagaccatgttaatgctatctcgaaacatgtcaaaggtactccgattttcaacaaganaatttaaagcccaatgc

SEQ ID NO: 3688 - DNA, 440 bp, Triticum aestivum
  Clone ID: LIB103-039-Q1-E1-E3
cgggtgcacggcgcaagaattgaaggaacgggaaaagggaaagggcggtgacggaccaaggaactggctaaagacggaaaaaggaattaacctgcggttcaaaatgtaaagaaagagaaagagaaagatgggaaaaccgggattggatggaaaaaccaattggactgcggaaacaattggtggtggacaaggatagttttgcaaaatgattttgtgacagaatttgcactaaaaaagctaaaacgacatatatttaggtacaaagggagtattaccgaaaaaggctttcgccccgcttaatattataaagccaaccgcacattaagcatccaacaaatccaacacacaacagacacacacacggaggtccacaggagccaaaatagtacaacaaagggtcacaactgagggcacatcacaacaagccctaaacccaaaaa

SEQ ID NO: 3689 - DNA, 235 bp, Triticum aestivum
  Clone ID: LIB103-039-Q1-E1-E4
actttcccgagtaagtcatcccttaactgccccgtaacatatgatttcttagatttcgatcgttcttttttttcctaacatttcgtgttctgtgtagtgacacacattgcacactcatcctcttaagcccgaaatattccatggccacgtatttcgacccgaaccgtaactccaagatagactacacaaatgtcaagaaagttcttgatgatgttctccccggctatgccaaatc

SEQ ID NO: 3690 - DNA, 223 bp, Triticum aestivum
  Clone ID: LIB103-039-Q1-E1-E5
gacacacccttcaatggctagctctagctttgcaagcgcgaaaaaatgtatgcgtgccccatccatgcatgcgcatgaataagtttttagtaattgatgaataaatgctggcatgtcgagcatcagcatggcatggatttgtgtaaaaaaaaaataaacaaaagccaagtaaatcaacccaaatacgtaacaccaacatagactacacaaatgtcaagaaaag

SEQ ID NO: 3691 - DNA, 413 bp, Triticum aestivum
  Clone ID: LIB103-039-Q1-E1-E7
gggaagtagaaaggaaggagcagcagcaggagcaggagacccagcagcaaggccaaggactcaccgccagacccccgctcgccaacggcaggtctggaatgttgccaatgtcgagccctccagcaaatccaggacagcttaccattttttatggtgggtcagtatgtgtgtatgactcagtgccaccagagaaggctcaagcaatcatgctcattgcagcagcagcagctgcggcctcaaaaagcaatggcaccgctgctgttaagcctccatcgatgtctgcgaccaatgctatccaagccatgcttacgcggtcgctctcacttcagagcacttctgtagcaaatggagaacctcaggctgtcgcggattctggctcgatttgcaagcttcaggctgatcttcccatcccc

SEQ ID NO: 3692 - DNA, 326 bp, Triticum aestivum
  Clone ID: LIB103-039-Q1-E1-E8
ggggacgacaataaggaggatgaggaagatgaggaccagccgccggccaagaagaagaaatgatctgctttcctgctgtcgtgtttcagtcccttagtttatctgctgtctagatgatgattgagcgggtctggtacacaccgacctatgtagcttctgtgtcgtggtggtttgatgtctcatacggtagaacattgaacttctaatgttgtttcctgcgttgtgcaagtagtcttaacatttcggtgttgatgtccgtgtttattggactgtgatacattacagaagcaaaggttcccaaaaaataaaaaattggccgccctaaa

SEQ ID NO: 3693 - DNA, 421 bp, Triticum aestivum
  unsure at all n locations
  Clone ID: LIB103-039-Q1-E1-F1
tttttgggaaacaaatcatgaaaaatagaagtctttgtaacagtttgcattgggagagaataagcgaaaatttttttaacattaatagcaagacgggaccggatatccacatcaaccgcatcaaaatgttcttgcatanataatcactctctcttatctgatanacatcttttttagacacctgattcttttgcgcttgattctgttatttcttttacaggctggaggaaacactaattaacatgtatttatcaggatactctaatatagaggtcaacactganaatttactaagagaatcacagataagtgaggaaagcanaagtgatgcagttgagaacaaactcagtaacgtggcttcagataatgcatcagactctctgaatgatgctacattacagcaaataaaagataaaatgca

SEQ ID NO: 3694 - DNA, 435 bp, Triticum aestivum
  Clone ID: LIB103-039-Q1-E1-F10
gcggtggaactcagaggctggcgacgcgaggaagatgaagaaggcacgaaaggagaaaagaaatgacccttcggtcctatttataaggcgaaagaacatgagtcaggtgcgacaatcaaggggccataaaacggagctgtcgcctcgatttccgctgatctattaaacaaagaagcataacggatagcttcgttatgacaggtgacatcactccggtttacaacaatcagagaagatgacatcatggcggtttaccaatttataagaagatgttgaagatgaagcttttattaaaggattgacatgaacccgttcaaatcaatctagggcctaatcttggggatattactactgggcgtaaaccggcttatctgggccgggttaacttcatcagtagttaagtaagttaaagcccaagaagacagaagagggctc

SEQ ID NO: 3695 - DNA, 344 bp, Triticum aestivum
  Clone ID: LIB103-039-Q1-E1-F12
gatctggacgaaatcatcttctattcacgcatgctgtaatgtgatacgcaaacagtgcacatagctcctcttgaaatgtatgaggagaccataccaagtgctctgggacatgaacttcgtgatagaacgactgcttcattcacaacatcatgtctgatcgggtttcactgcattcagtattctctcaatcacggcaccgatgttgaaaacctcagcatctgtcgtgtaaattgcacttcttattctaccacaacacatgcgtataatgtttctaacgcagaccgctatcctgaacttcaagtgtagtgtggctcatgaatggagattcagatttgagctgatcc

SEQ ID NO: 3696 - DNA, 430 bp, Triticum aestivum
  unsure at all n locations
  Clone ID: LIB103-039-Q1-E1-F3
gagacaaataaaattacaaccacaaaggcaactgataattgaattacaaaaggacatgctcctggcaaaggcaaaacaatttaaatccaagaatcctttccggcctcaaaatatgaaaggatcctaagtaaaagttggatttttcctgaatccaacctgtgaaattgttaaggagtgtcttcccccgtgccacaagaagttaaagctctggaatccacaaagaaagtcttgggatgttaactatgtctactacagcgaacgctgtggtggcggtttgagtggttgctggggcaagttttctctagacaataatctggagaagttcgacgtgtgcgtcttcgagctcttctcgaaggacaacataaaagtacacatctacagagtcgtcncagaaataacccattcctccctggtcctggcaagaaataac

SEQ ID NO: 3697 - DNA, 196 bp, Triticum aestivum
  Clone ID: LIB103-039-Q1-E1-F4
tcccaacccattacaaaccgtaaaggtaccaaaggctgacggggatccgatcgcattcaagggggctaatgctctcaaccctatgatcgtaatccggcttgacaccccatttctgacaatcaggcggcatcaccaagcaaggagctagcttaaacagatccggcctgaggtctttgagtaaacggtacagccccga

SEQ ID NO: 3698 - DNA, 435 bp, Triticum aestivum
  Clone ID: LIB103-039-Q1-E1-F5
ccgggtcgccgtatcataagcgccttctgtccaatgagtggatgacatttgtcccagcgatgagcggacacgtgtttcctccagccaatgatgattttacacgtggaaaatccccattggtcggggctgttaacgggttatcggatccaaaacccgacccgatagcttaacggcgttccgttacggtggatgccatgtgtcggtcacccttgacgaaagcacttctgtgacgcgcgatttatcgtcatggaagtggacacttccgtgatgataattttgttaatgtcatggaacacttctacgacagcacaggtatgactatcttgattctgtcataaatttttcatggatgtacatgcatgacagaaaacatgacctactgtgacaaacatgtatcatcacggaagtgtcattttttgtactgtatgcggactg

SEQ ID NO: 3699 - DNA, 422 bp, Triticum aestivum
  Clone ID: LIB103-039-Q1-E1-F7
ttccggggcgccgggcgcgggagacacttttatggaaatcactttaggagaagctactaaactccatgataacattatggctaattattctcaatggcacaccgaaagatctactagtaaaaaagtgcatgctatagaagaaattaatgttttgagtggaaagatggatgaacttatgaaattgtttgctactaagagtgctcctattgatcccaatgatatacctttgtctacttttattgagaataataattaatctatggatatgaattttgttggtacgaataattttggtaacaatgcttatagaggaaactttaatcctagactgttccctagtaattcctctaataattatggaaattcctacaataattattatggtaattttaataatatgccctctgatttgagaatagtgt

SEQ ID NO: 3700 - DNA, 277 bp, Triticum aestivum
  Clone ID: LIB103-039-Q1-E1-F8
ccggggcgccgggagacggaggagtctaaggtggagtagaaggatgcggctgctggagcttttctccctccgtgcacccaacaagcctttgtgcaaaatttgaaccagacattgcttttgtagaattatcgttgcttagtattacgattctctagcagttctgctcgctttatatatcccctacttctacatgtactcattgtacatagctcgcccccatttgtactcgtatactatcttaaagaatattcgtcaaagctaattggtgatcatcgtg

SEQ ID NO: 3701 - DNA, 403 bp, Triticum aestivum
  unsure at all n locations
  Clone ID: LIB103-039-Q1-E1-G1
gcggacatgactgagagtggagtggagaggggagagtgagggacggccggttggagaagataagatggctttagaattagcgcgcgttaggataaagcgctactactaaatgccataatagtagcacattttactccagacgcgctactgctatacctatagcagtagcgccttcttcgaaagagcgctactactaaggctaagcatgtaaaaataaacataaaatacatttctcatcaatgatctctttgtgtagaatctgagttgtcaatatgagtcctgcccggtttaagaaccggtgtagacttatattgagtccacaaatcctacacatagagttcaatgaagaacaagtggctgtgatagtttgagaagtaacatatttaaggtggtanacaccctg

SEQ ID NO: 3702 - DNA, 408 bp, Triticum aestivum
  Clone ID: LIB103-039-Q1-E1-G10
gataagtaaccaaaggatgacgtatcgaagatggtgtggcattataacgttcatggtgtttatgataataacacggtctcaaagaaattaaatgaatggaggagtaatgatgaagctgtcaatggggacacacaactattgttggataagtagtcctagattccatatcatttgtagagataatgatgggtgatagatcgattgcacacaagcagatatcctgttttgaacaaaacacagttttggacaaatagacctaattgtgtgtgcagaatactaatggttgatgtatcaacgacctaccagctaaagaccaagaaatgtatcattgggcaaatatttggatgttcaagagtacatgtttgaacatgtactacaatactacacctgatctcaaggtaaactatg

SEQ ID NO: 3703 - DNA, 417 bp, Triticum aestivum
  Clone ID: LIB103-039-Q1-E1-G11
tgacgggaatgttcattatgtatttatcaaattttcattatgtatttccaaacaaaatgttcacaccatcccaagaaatgttcttcatgcatttaaaaaattatcctgtgtttattaaatgtcgtcctgtgtatctgattttttatattaaaaaacgtttttccaatttgtgaactttttgcaaattcatgaacatttttttaagttctcaatcatttttcaaattcataaatattttttatatcaaaaatatttttcaaattcgtgaccagttttagaatttttcgagttgatgaacattttttaaattttggagctctcttttgcaatttctcgaaatttttaaatttgtgatgttttttaaaattcattaacattttcatgtttgcatttaaaaaaagagtcaggaacacattt

SEQ ID NO: 3704 - DNA, 443 bp, Triticum aestivum
  Clone ID: LIB103-039-Q1-E1-G12
ggtccaggcgtgaagcagacagtcatctggaatgaagggctctccgagggaagtagttgcaaaaacctagaattagagtcagtaaaatcctataacctgaatagaagagatatcagaatcccagagtaaggacgaggaataaatgatcctaataccacccaatggcgacatgggcccataagacacacatccatgttagtaaaactgttttggatgactagactcaacttcggccaatgagttggaaatggggctacctacaggcagtcggctctaataccaacttgtgacgccctcgattcaatcgcacactaatcatacacgcaaatatgtacaatcaagatcaagaactcacgggaagatacacaacacaactctagacacaaattaaaataatacaagccacgggcctccaaggctcgaatacataagctcgaatacac

SEQ ID NO: 3705 - DNA, 369 bp, Triticum aestivum
  Clone ID: LIB103-039-Q1-E1-G2
gtactctttgttttgtttaattaagagcgccggtctttaatttgttagagtaatgtttaggtcagctagctctgtttaattgctgaacttgctcgattaagaagtgtgggtgtgatgtagtccccttcatgtacccaaattatgcaatgacgtggatggccactgtaaccatggatattcgaaccagaatttgtgacgttcaaactcatcacacacgggttaagctatctgaattgtttgtgatgttcacatatcgtacacagttctgaataagggaccgtgtttgatgacaccttgagcgccagttttttggctgaagcgattccagattttcggctttcacggaaatatctacctcgccgccccctc

SEQ ID NO: 3706 - DNA, 315 bp, Triticum aestivum
  Clone ID: LIB103-039-Q1-E1-G3
aggaggacaatgccaacttcaagaactagagataaaccgattaccgcgtatgattattggttttctaaggtaaatttgatgattgcttaaggcttgtgtattgctgtttctgtctttcttggtgggtgctgttgttgaggagtagaaaactcatggaagggtggttgctggtgagatagcttggtataacctctggcacaattgctgtgtgcaagcaacgccctgttgcgttctactggtagtggtgtgtgttgtctggtgtccagtgtctaactatcatgttcaaatctaatgtaatttgaagttgcttgcgtc

SEQ ID NO: 3707 - DNA, 76 bp, Triticum aestivum
  Clone ID: LIB103-039-Q1-E1-G4
caacctccgccagaatgtggccagcgcgacttccctcgcgatgcacttctttcctaatgcggagcgtgccaactga

SEQ ID NO: 3708 - DNA, 417 bp, Triticum aestivum
  Clone ID: LIB103-039-Q1-E1-G5
ggggcgccacgtggcacgacacaatggtggcccattcctgtgaaaaggccggcccgtttgacttggtcaaaagctggcgggccggcccatggaaagcctgttaacggcctgttcgcatatagcccatttacagcccgctaacccaaggcccgttacgccctatccgaattaggcccagtagcgtcatttgggccatccaatatgattccagcccgttttcacttctggcccatgtatagcccatgacgtctttcggcccatatgaggccctttgtaactcttggcccattagcggcccgtgctgaaactggcccgtaatgaacagtgtattactttacacccattaacggcctgtggtgaaactggcccgtaatgaacagtgtatcactttatacccattaacggcccgttattccg

SEQ ID NO: 3709 - DNA, 441 bp, Triticum aestivum
  Clone ID: LIB103-039-Q1-E1-G7
tacggtacgaaattccgggtgcccggggcggattcgagacggtgagccatgagcgcgattgcatgcgccggtccggtcgtggtctctcgtggtgccttgacaatgccgagtcggagaggtactgccttggctgcaccgttggaaaccatcgcctggtcttcgtcgtccacggctccaggccatgacgagcttgcacattgatatttcgtagcgtcgctccgtcagctcatggacagggatgtggtattacggagtgacgtgaacacgatgtcatgcatacatcgtggagggatatcactgcaggcacaaggggattgtctcaagagaatgtccaaagtcatctttcgtctagacaagtgcgcactcgatcgactctgcacggagattgtctcaaggtccccgccgttaatggttcagccttcttggggagtgggatgtttt

SEQ ID NO: 3710 - DNA, 304 bp, Triticum aestivum
  unsure at all n locations
  Clone ID: LIB103-039-Q1-E1-H1
ggacggggcgtgacggaccgctaaatctagacanatctcgttgaaaatggagcttggaggtcnagtttcgagaggagaaagcttaactagtgttgctcgggcatttcgtcgaacacctcatgtgcatangaggtgaactatagcaaccaaatgccctcccctcaccggcttgacaaaaagagagaaccgtggagtgctctgcccagcggtgggtatatgtaggcaagttatttgtcccggttcgtggcatgaacagggactaaagccaacccttctatcccggttcaagccacgaactgggacc

SEQ ID NO: 3711 - DNA, 428 bp, Triticum aestivum
  Clone ID: LIB103-039-Q1-E1-H10
gcataccaatcaagtatagagctgatgaaacttctggtgatgaacagaaaaaagttgttgaagttctcatgataaactcccaaagcggaccaggtttattattccccaagggaggatgggagaacgatgaaacggttgaacaagcagctgctcgagaagctatagaagaagctggagttcgaggagatatagtgcaatttctaggtttctacgatttcaagagcaagacgcatcaggacgcgtgctgccccgagggcatgtgcagagcggcagtgtttgcgctgcacgtgaaggaggagctggcctcatggcccgagcagagcacccgccggaggacctggctgacggtccccgaagccacgtcacaatgtcggtaccagtggatgcaagaggccttgctgacgggcttctctgagtggcatgacaac

SEQ ID NO: 3712 - DNA, 391 bp, Triticum aestivum
  Clone ID: LIB103-039-Q1-E1-H11
ggggccacggggaggcagcgacggcggcagaaccagcggatggcaagccaaagattcccctcgcacggcttggtgccggcaaggcccggcccccggcagagtctgatgccaccaaggcagtgcccgcgcagtcgagtgaggtggtgcagaagaagaagatgatgtagcacccggtttactttgtcagctccctcttgcagggggctaggtcgaggtattcgggtgtgcaaaagttgctcttcggcctccttatggcctcgaggaagctgcgtcataaattccaagccgaccagatcactgtcgtcacccgccacctgttgcaacggacgctgcataacctagatgcaaccggaacgattgtggactgggccttggagataacaagtttcgg

SEQ ID NO: 3713 - DNA, 382 bp, Triticum aestivum
  Clone ID: LIB103-039-Q1-E1-H12
atgcgcgtagtacttcattttgataactaataaatttttgcaataagtatgagagttctttatgactaaggttgagtccatggattatacgcactctcactcttccaccattgctagcctctctaataccgcgcacctttcgccggtatcatacacccaccatataccttcctcaaaacagccaccatatctacctatcatggcatttccatagccattccgagatatattgccatgcaactttccaccgttccgtttattatgacatgctccatcattgtcatattgctttgcatgatcatgtagttgacattgtatttgtggcaaagctacggttcataattctttcataaatgtcactcttaattcatagcacatcccg

SEQ ID NO: 3714 - DNA, 131 bp, Triticum aestivum
  Clone ID: LIB103-039-Q1-E1-H2
acgaagtgtaacggttggcaacatctgcactgctcgcatttaacgagtatcatgctagtcgactctagcctggagacgacctgtggaatgtcgctcagacaatgcgtgcaactctccaagtagctgtcaag

SEQ ID NO: 3715 - DNA, 263 bp, Triticum aestivum
  unsure at all n locations
  Clone ID: LIB103-039-Q1-E1-H4
aaacgccctcaatgcctcgacaacttcacgggcgtcggaattgtaaactgacatcatacttataactattcattttaccgataaaccctacattttagttttttgctaggtgtcctatatgcacttttaattttttataggtgtggataacttcttgaaagctaaatcagcccatattgtatgtgattttccgtgaggcagactaaattggcatcttgaggattcaaaanaacaacaaagtacaacatcaggaaaaggcaaaa

SEQ ID NO: 3716 - DNA, 325 bp, Triticum aestivum
  Clone ID: LIB103-039-Q1-E1-H5
gggaaatcatggagcgtcttttgtgtttagttttcatttctcttttatgcaccatgatggtatgagatagtccatggttgatttatagaatgctcattgcacttcacttatatcttttgagtatggatttgtagtttcacttatatcatttgaagtttggattgcttgttcctcttcacatagaaaactgttgtttgtaaaatgctcttttgcttcacttatatttattagagcttgctcttttgtagaaagaattaaactctctttcttcacttatatctatttagagagtcaacaggaattggtcatctgcagggttagtcat

SEQ ID NO: 3717 - DNA, 162 bp, Triticum aestivum
  Clone ID: LIB103-039-Q1-E1-H6
gggttggaatctattctgtacgctggctactttggcgacgtctcttgtcttgtctggtctcgaatctcagcccgactttcgggggaatcataatccccttcatcctttcatcactgaggcaatgctctcgctatgtggattatcagacttttatgtacttac

SEQ ID NO: 3718 - DNA, 283 bp, Triticum aestivum
  Clone ID: LIB103-039-Q1-E1-H7
gggtctgtcacgaggtagcagatttccaggttgctcggtgacatttgacagttcttcgtagtttatattgagtctgttcttcatagttagagtcgaagagaaagccatgcaccgtatgagggttagttcagctcatccgaagcaatctgagccttgcataatcatttcggtaattgctatgtcgaagttgcggttgcatcgtcgtgtcaagttgatggtcttagcgtcaagtcttttagagttacgagttctgtacacaggttgtgacgtcgccgctgcgata

SEQ ID NO: 3719 - DNA, 380 bp, Triticum aestivum
  Clone ID: LIB103-039-Q1-E1-H8
agtacactccggtttcgcggggaaagaagggaaatgagaaggagaaaagcatttccaatagcaaggtgaaggcttctaaagtaaagaaagaagaaaccggttctgatgatgaatgcaagccaaaatctcagaagagaagtccagctgcgggcaaacccaagatttccaagattaagaaaccaaaagatgaatatgatacaaaggaggaaaagaaaataaagaaggaagttggtatcaagaaagatgaaaagaaggctgctggggtggagggggctattgtggtgaagaaggagagaaagttgtatgaattgccagggcagaaacatgatcctcctcctgaaagggatccattgaggatattttatgaatcgctctatgag

SEQ ID NO: 3720 - DNA, 266 bp, Triticum aestivum
  Clone ID: LIB103-039-Q1-E1-H9
ggcatagtgatgtattacaaggatgcactgttgaggataagctttgttggttgggagcacctgttaaatggtgttgttgtggaaaagcatgggatggttgctgctggagcccttgtaagacagaacacgaggatgccttgtggagaggtatggggtggaaaccctgcaagatttctgaggaagctcacagacgaggagatcacttttattgcggaatcagctgccaactattccaacggaaccaaggcacatgctgtttagaatgc

SEQ ID NO: 3721 - DNA, 418 bp, Triticum aestivum
  unsure at all n locations
  Clone ID: LIB103-040-Q1-E1-A10
ggtccaanattaccgggtccacgggatggtccttataatgagcaaagacgcagcggacagaatcctcgaagagtcgagccctgcttaccgcatcggagaggtgatccagggcganggggttcagtacgtctgagagcctacacaagcgtctcaaaacttctaatggttgagaactgcttagctgatgatgggcaacgctgcccaggttttttcgtaaccccgtgatctatcttacggggccaagtatcggagtagaagtagtttactccagtgagatttgacaaaaaaaaaacgggaataacgtttctcggttcgcgacaactcgctgcaaacagcttgtgttgctatcctgaacatcacttggcaattgatgtgaatgcctctagtgtgctgaattttcttgagaaatcatatctat

SEQ ID NO: 3722 - DNA, 396 bp, Triticum aestivum
  unsure at all n locations
  Clone ID: LIB103-040-Q1-E1-A11
gccatgggcttgttcttgctggcggatggggtgcactctaagttggataccccgcggtcccgtttcttttgggaaggagcgggaccaaaacagaaataccatatggttaaatggcaagccatttgccgtcctaaagcccaagggggccttgggatcatcaactccaagctgatgaacatcgcactaatgtgcaagtggatctggaaaatgtctcaaggagagactggcctttggatcgacctcctccgtgcgaaatatttcccgcagggggatttctttgacacggcttctcgagggtcacctttttggaactccattcaatcncttaaacccttctttgccaggggtgcgaagtttggggttaacaatgggcgctccacgcgtttctggcttgat

SEQ ID NO: 3723 - DNA, 431 bp, Triticum aestivum
  unsure at all n locations
  Clone ID: LIB103-040-Q1-E1-A12
ggtcgaaataccgggtcgacggggagatcgaccgcgctcgccctctccactttcctgctgctggtgctgttaaccggactccccgacgccgccgtcgctgccaacatgaccgaggtctgcgtcaaggccgccgtcngccaacccgacacgccccgcgactgtcccctctcccaanaggtgctgctcaagctggaagagaagaaggtgcctaccagatgaagctcatcgacgtcagcaacaagcccgactggttcctgaagatcaatccagagggcaaggtgcctgtgtataacggtggtgatggcaaatggattgctgattctgatgtgatcactcaagtcattgaggagaagtaccaactccatcacttgtgacccctgctgaatatgcatcagtgggatcaaagatcctctccacctttgtcacgttcc

SEQ ID NO: 3724 - DNA, 401 bp, Triticum aestivum
  Clone ID: LIB103-040-Q1-E1-A2
gggtcgagttcttctcccccggctgcggtggctgccgcgctctccaccccaagattgcgcagttcgctgagcggaatccggacgtgctgttcctgcaagtcaactacgagaagcacaagtccatgtgctacagcctccatgtccatgtcctccctttcttcaggttctacaggggagctcagggcagggtcagcagcttcagctgcaccaatgcaaccatcaagaagttcaaggacgccctcgcaaagcactcgccggacaggtgcagcctcggcccggcacgggggctcgaggaggcggagctcttggctctggctgcaaacagggacctggaattcacctacaacgagaagccgacgctggtgccgatcgccgaggccatccaaatggaagctgcctcc

SEQ ID NO: 3725 - DNA, 374 bp, Triticum aestivum
  Clone ID: LIB103-040-Q1-E1-A4
tcgaggggcacgaagaagggcagcaaggccaagaagagcgtggagacgtacaagatctacatcttcaaggtgctgaagcatgtgcacccggacgtgggcatctcctccaaggccatgtccatcatgaactccttcatcaacgacatcttcgagaagctcgccggggagtcggccaagctggcccgctacaacaagaagcccaccatcacgtcccgggagatccagacctccgtccgcctcgtcctccccggggagctcgccaagcacgccgtctccgagggcaccaaggccgtcaccaagttcacctcctcctacgcagctaggattgatcgccgcttcatgaactgatggccgcatcagtacgatgttacaac

SEQ ID NO: 3726 - DNA, 438 bp, Triticum aestivum
  Clone ID: LIB103-040-Q1-E1-A5
cgggtccaaataatgaggccacatttgatgaaccgccccctcaagatcataatgctgatgaacaagcagaaattgatactgctgtgccaggtgataaaccggcaagtccaatccgggttgatgacggaccttctaatctagtgaagactactgacactccatcaactccagaaaaggctgctggagataatgaagatgagcctatcattaccggtattggccacacctctgctggccatcctgttgtattgccaaaacatagtgccaaagaagagcgtgctgccatggagaaagacaagtggagcaccgatttatcaagctatgcccacttcagtgctcaagaactccactctggctttctaaaccgtctgcacacaacccgtgaccatgaatccagtttggtgaacctgatgaaggagcgctatgaggtaatgacat

SEQ ID NO: 3727 - DNA, 56 bp, Triticum aestivum
  Clone ID: LIB103-040-Q1-E1-A6
gccacatttgatgcaccgcccccacaacatcatagtgctgatgaacattcagacat

SEQ ID NO: 3728 - DNA, 419 bp, Triticum aestivum
  Clone ID: LIB103-040-Q1-E1-B1
gtacagtctagcgggtcgacggctcattccttctctctcatatggggaataatttgaggtgtcttttccccgcagcaacgggcgcgccgtccttatcgttctttacccgcaagtctcccacgccgtgtattttgacccttccagagactacgagaaaaaagactacacccacataatgaatattctagatgatgctctccaaggcttcagctttagaggtggccatgtgcagatcaagaaacaaaggaacaagaagatgggtttcgcgcataaaactaacttctcctgcatccatgtcccaaaaccaagcacgaaggatggattctacatcgtccatctcatgattcagttcaacacggatcaccaaaagcttcgcattaacagcagaaatgatgatcgtaaccacaagtggctagaat

SEQ ID NO: 3729 - DNA, 439 bp, Triticum aestivum
  unsure at all n locations
  Clone ID: LIB103-040-Q1-E1-B10
gggtccacggggagggccactagagctcagctggaaaacggctggaggaggttaaggtaccaagagagcgaccccctcccggcaccgtctctaagagaccggcgatgattgtgcttgggagggaggggaagagcggaaagatgaggcagctggctggcagtacgagatgaaggtgtcggtgccatcgtactccgacctgacgacctgccacccaccttctccatcctccctcgtttttccccatcaccactgctccaaggagatgccggacccccagcccgtcaccttccctggataggcagctggcgactatgacgtccaaggcgcacgaagagcaccgttccccaacttggcaggcangaaggtgccgctgtcttcagcaccaaccctagctccgctggaaggagcagtgctgggattcgccatgatcccgaacact

SEQ ID NO: 3730 - DNA, 450 bp, Triticum aestivum
  Clone ID: LIB103-040-Q1-E1-B11
gggtcgacggggagactgcgtcccagcttcctgacgctgtccgcaaacaaaaagagaaggtcacacaaccttcgacaagcgaatctgcacagagaactgctgtagcggaatccgttgacgacgacgacgatgatctagagaagataagagaaaggctcgccaaagtgaggtcgtaaaagagaatcgatgtgctgacatgtgtataatagtccatttggtaatgtacgatacacaacttggcagatgtcgcccttctcactcacaaactgcccagagtcaccaacgtacaagtcgttcgatctctgttgtaatctgtatgtgaggatcgtcacgtgtgatcaaggtgtcctgtattttgtttatttctacctgttgcgaacacataaatattctggttacatacagatatcatgtcagtaaagctggatgcacacagctagctatctatgc

SEQ ID NO: 3731 - DNA, 439 bp, Triticum aestivum
  Clone ID: LIB103-040-Q1-E1-B12
gggtccacgggaagttcaccacgcatcatgtagtggacacccacgtgagggggaaggccctctcggtggtgtacacgaacgatccggtctcggtggagagctccatccaaactatggggcagttccttgccgatgacaagtaccgagtggtcggcttcgacctcgagtacaccatcggtcgtgcctggcacgatcagaaggttgtcgtcgcccagttgtgcgtgcgacatgacgtccacgtctaccacttccaccttgccacaaggccttgcgagcgtttctccaggtttatcaacagctccgactacagtttcgctacggtggacaccaccaacgatctaaaagcgctcaaggtttcggacttgaaatgcccgaatcttgtcaacatcccagcacactacaaggtctggggcagtgacaaaagcaaactgaactccct

SEQ ID NO: 3732 - DNA, 380 bp, Triticum aestivum
  Clone ID: LIB103-040-Q1-E1-B3
cgggtccacgtctaccagacacatgcgctacaagtaaatgggtctacctcttcgcccatgaccctacccatgggcataggagcagacccatgcgcatacccattgggtaaccctacacaatgggttacccatcgggcatgcactagtaatatttttattaggccactgtgtcctacatcttgctaactttgctaaagcacttccgaacgaatgcttacaacatcaacatcaagttcttttacacgcagagctctacctccagtgtgcttcgcttggctacgtggtactaactaagctgcctctagccgtgcacacagtgcacccatgcatgacaaaagctatattggcttatatggctttatacgcccaacgggctagcg

SEQ ID NO: 3733 - DNA, 419 bp, Triticum aestivum
  Clone ID: LIB103-040-Q1-E1-B5
ggggccacggggtccatataagaaggagcgtcttgatgcagaactgaagctggttggtgagtatggattgaggtgcaagcgtgagctctggagggttcagtatgcattgagcaggatccgtaatgctgcaagacacttgctcacactggatgagaagaatccccgccgtatctttgagggtgcggctcttctccgtcgcatgaaccgctatggtctccttgctgagggccaggataagcttgattacgtccttgccctgactgctgagaacttccttgcaaggcgccttcagactcttgtcttcaaggctggcatggcaaaatccatccaccatgcccgtgtcttgatcaggcaacgccacatcaaggttggcaagcagatcgtcaatgtcccgtcgttcatggtgagggttgaatctg

SEQ ID NO: 3734 - DNA, 409 bp, Triticum aestivum
  Clone ID: LIB103-040-Q1-E1-C10
ggtccgaatatccgggtccacggggacatgttcgagagcatcgtgtgcccggccaacggcagcgtgaagctcccggcgacgagcgaggtgtttgcgtgcaccgtggggaagaagccgagcatggccaagtactacctggacgacacggtggacgtgatcaagatgctgcaggggctcgcgagcgcgccgtcgcagcagcggccgtggcccgtgcagctccgggtcaccttcgaggaaggaaacggggtatgagcaaaccgacgtgatgatgtcaataaccgatgaaaaaagaaggacgacgacgatgatgtcaataaccgatgaaaaaaggaggacgacgacgatgatgatgatgattcaggaagtcagttggtgtggttttaggattagctgcagttacaggataaac

SEQ ID NO: 3735 - DNA, 295 bp, Triticum aestivum
  Clone ID: LIB103-040-Q1-E1-C3
gggtccaggcgaagcagaaatggaactggtggaactcacccttttcagcagtataagtgattatcatcagcaagatgtagatcacgcatatgtataatatgaacattaataagaatcacctcaatacgaggaactctagagaaacgtcgtagatgaagaagattaccaagcttacgttcaagatgttcactaagatgaagttacgaactagagtacgcagaccgagaatgacaatgggatgatgatgatgaagaagctgaagctgaagcagacgaatatgaataataagtttaat

SEQ ID NO: 3736 - DNA, 459 bp, Triticum aestivum
  unsure at all n locations
  Clone ID: LIB103-040-Q1-E1-C4
taccggtccaacattaacgggtccacgggtggtgcgaatattgatatgaaggaagggaacattagattccaatttcctttaaagaaaggcacggagcactttccaagaaagaaattcaaattaccttatgaatctatcatgtgtgctacttatgaatttagtgccaaagacggtactcgttagatctatccttgcttttatgcctagctaggggcgttaaacagtaccgctagttgggaggcaacccaatttttctttatgtgttttgtttttgctcctgtttagtaataaatcttgcatctaccttctgtttagatgtgttttatcttttaattagtgtttgtgccaagtagaacctataggataacctacgatgatagttgatttgattctgctgaaaaatagaaactttgcgcgcacgaatataattttgttaaaccatangaacgtgattttgcg

SEQ ID NO: 3737 - DNA, 418 bp, Triticum aestivum
  Clone ID: LIB103-040-Q1-E1-C5
ctacaacccataacgagtcatagcctgaacgggtcctgggtaatcctgtgataaaatccatgcctattttatcccacttccattcgggtatcggcaatggttgtagcaatcctactggcttctgatgctctgccttcactctctgacatacatcacaaactgctacaaactccgcaatatccttcttcattccggtccaccagaaagtattcttcaaatccaaatacatcttggtattccctgggtgaatcgagtacggtgaatcatgcgcttcttgcaaaatcaacttcctgatctccggatcttttggcacatatactcggtccacaaaccataaggtatcgtgctcatcctcacgaaatcccttggcttttcctttgctcatcctctcctttatctcttcaatctccttgtctgt

SEQ ID NO: 3738 - DNA, 188 bp, Triticum aestivum
  Clone ID: LIB103-040-Q1-E1-C8
tcgcccgctacaacaagaagcccacatcacgtcccaggagattcagacctccgtccgcctcgtcctccccggcgagctccccaagcacgccgtctcccagggcaccaaggccgtcaccaagttcacctcctcatagactgaagatgcatccgtcccctgtaattggtctctgtatctgcacctgtact

SEQ ID NO: 3739 - DNA, 431 bp, Triticum aestivum
  Clone ID: LIB103-040-Q1-E1-D2
cggtccaaaataccgggtccacgggctgatcacgaaggctgcgaagaagggtcagatgccctcgcagatcggcgttctcctccgtgaccagcacggtatccccctcgtgaagagcgttacgggaagcaagatcctccgcatcctcaaggctcatggcctggctccggaaatcccagaggatctgtactttttgattaagaaggctgtcgccattaggaagcatcttgagaggaacaggaaggacaaagactccaaattcaggctcattcttgttgagagcaggatccaccgtcttgcccgttactacaagcgcaccaagaagctcccgcccacctggaagtacgagtctaccactgccagcactctggtggcttaagagggctcttcatctggtgtgctcttaccggcttcaagatggtcttgttctacat

SEQ ID NO: 3740 - DNA, 235 bp, Triticum aestivum
  Clone ID: LIB103-040-Q1-E1-D4
ttatagtgtatctaaggtaatgcgtccgaaaggatcagccaatggagctttctgttcttctcctacctgggaacaactgcaactactgctgtgagtcactggatctagtgttagtgctgggtaacataccataacccgtttaatccttttgagacttgtccatctttgggctgaatgcaggaaccacatagtcaaaacctgcttctcacacagacggataacgcaactaacttca

SEQ ID NO: 3741 - DNA, 426 bp, Triticum aestivum
  Clone ID: LIB103-040-Q1-E1-D5
cgggaatcacctagttgtgtatgtgtctgtcagggcctgatgtgtgcgcacgcacgtgtaggttgagcacttgagcgtgagagtgtgtgttggtggtgtggtgtactggtgtgtgcatgcatgcgtgcgtgtgtgcgtgtgagtgttgcgtgcgtgcgtggctgcgtgtatacgtgtgagtgttgcgtgtgtgcgtgggtgcatgtgtttgtgtgagtgttgcgtggatgcagttcgcgtgcatgcgtgcatgtgtgtataatcaccacaccagctcctgtgtgttaaaacagacgactcagcataccaatacaaggccaccttatccgttgtgcccgcgatcatgacttcgaaccaccgtccagatattttttgtcgtttggtttcattcttaccagcaagatgcccgtgcgttgtatgtaacat

SEQ ID NO: 3742 - DNA, 421 bp, Triticum aestivum
  Clone ID: LIB103-040-Q1-E1-D7
cgggttgacgtgattgagctcgtagtagatgtcgtttgtcgtcgtcttgcacatgttgcttggaggtgaattgcccttcatgacgatgtgtatcacgaacgtgatggtggtcgccatggagatgtggacgtggacgacttgagcttgcatcttgtttgcgctccgaagacttgtaacttgaatgtcgccgccttgaggatgatgaaggggaagtagtgatgaggacatgactaccttggatatgaccaaaaatattgcatatatgcatatttgtcacgtgatttctagtgcaaactattcaataatctatttatgttatccagaacataaatacttcacacacttttgtgttttgtctaattgcaggtgtatgcgacatttgtacaatccacatatgaagataaggaagaaagatatgttt

SEQ ID NO: 3743 - DNA, 411 bp, Triticum aestivum
  Clone ID: LIB103-040-Q1-E1-E10
acgggtcgggatgaggtaatatcgacaacgacaacatacatacacgggaaaataatgttatcggggagggggtatatcgaccccccccccacgtgttgaagttatcaggagggggttatatcgacaacgacgacatatatacacgggaaaataatgttatcggggagggggtatatcgaccccccccctcgtgttgaagttatcccccctcgtgttgaagttatcgggaggggtatatatcgacgacgacagacccgataaaacataagaaaacgaagaagaaataaaaagaggagagaagaagaaaggaatagaggagaggattgaagaaaaaagaagaaaaaaaagaagaagaaaaaagaggagaagaagaaaggaatagaggagaagaagaaaaaatagaatattttc

SEQ ID NO: 3744 - DNA, 436 bp, Triticum aestivum
  unsure at all n locations
  Clone ID: LIB103-040-Q1-E1-E12
gggtcgacgggggtggagagctcctcctacaatagactgtgtgcctctgatttntcttcagcattccaagttttagcagccatggcacttacgcttgtgttctcctctctcctcgttttctgtctcaatggcgtgagctccgattcaagctacttcacctccttgtttactctcggagattcctactttgacactggcaatttcctgatcatggctgatccggcgatacccgagtataatggcaacccaccctacggcatgaccttctttggccgccccactggccgcctctgtgatgggagagtcaccgtcgatttcatcgccgagcagtttggtctgccacttcttcaagcctccatgttgaatagctcggacgtgtctaaaggcgtaaattttgctgtgggtggcgcgacagcgatcgacatcgacttctatg

SEQ ID NO: 3745 - DNA, 342 bp, Triticum aestivum
  Clone ID: LIB103-040-Q1-E1-E2
gtccaaaattaccgggtccacggcggagaacatcatcaaaaactttcttgacatttgtgtagtctatcttggagttacggttcgggtcgaaatacgtggccatggaaaatttcgggcttaagaggatgagtgtgcaatgtgtgtcactgcacagaagcaaaaaaaaaaaaaaaaaaaaaaaaaaaaaaaaaaaaaaaaaaaataaaagaaaaacaaaaacaaaaacagaaaaatacaacaaacagaaaaaacaagaacagaccaacagataaaatgccaagatagataaacttcaataaaaaagcagttaaaaaaaaatacgaaggatccacgaaagaggat

SEQ ID NO: 3746 - DNA, 256 bp, Triticum aestivum
  Clone ID: LIB103-040-Q1-E1-E4
ggtccatcacatcagataatcatcatctcatcacagacgggacacctttgcctctatcaagtggtatcagatttccaggttgctcggtgagattttacagtttttcgtaggtgacatcgattcagtccggtatacatacagtccacgaacaagccagccaaaaaattaaggttacttcaacatatccgaaccaatccgagcccttgcataatccttttacggtttttgcttggttaaatttgcggttgcaccgtcg

SEQ ID NO: 3747 - DNA, 395 bp, Triticum aestivum
  Clone ID: LIB103-040-Q1-E1-E5
cgggttcaaccgataaacgtccgattagccattgtgaagctatgtgcattcctcaatgcaatctcttagaaggtgattgatccagaaatcataccaaggctaaggagtgatgtggtgcaatgtcttgtcagtttcgagctggtgttcccaccatccttcttgaatatcatgacgcacgtcctagttcatctagttgacgagattgtcattctgggccccgtatttctacacaatatgtactcctttgagaggttcatgggagtcctaaagaaatatgtccgtaaccgcgctaggccagaaggaagcatctccatgggccatcaaacagaggatgtcatcgggttatgtgttgacttcattcctgcccttaagaagataggtctcccaaaatcgcg

SEQ ID NO: 3748 - DNA, 388 bp, Triticum aestivum
  unsure at all n locations
  Clone ID: LIB103-040-Q1-E1-E9
gggtccacgggacaacaccaagctctactgaactcccaggaggaggatcttgccgcccatgangagaagcttggcgccacactccatggaaaggacgaggaggtggagaaggtcgtcgtgcagtggacctaagagctggagcagaggtacaaggaggcactcaatgcccaggctctggttcatgccggcaaggtgaaagagctagaggtggagcgggacgggctgaaggatcaggccctgaagctggccaaggagaatgacacgctcaacggtgccctggtggaggcgcaaggtgcagtcctcggcaaggctgagcagctctccaangccaacgaccccatcaaagacctgaagctgaagctgganggtcttgaggagatgctctcgg

SEQ ID NO: 3749 - DNA, 409 bp, Triticum aestivum
  Clone ID: LIB103-040-Q1-E1-F10
attaatgaactgagtgagtccacgagatcatattatgcattgtctggtgtagctggaacagccgtatcaacaggaatccagattgcgcttggagagtccaacgaacggttgtcaacaccatgtgggaggcgatatcgtggtcgatgtgtgactgatccatcgacgcgtgcgatcccatatgagcgaaccacaaggccctctgaaactgggcgacgtataaatcttcgtggtgggaattttatgggtacatggcgacgaatccaagttggtagatacgcagtaatgcataacgatgggccttgatcatcatctgtgggatgcgggagacaatcacagtagcattataacgttgtagtggatggggagcttgcttcatggaggtgggtgaatgcaaactggggggtgctgc

SEQ ID NO: 3750 - DNA, 436 bp, Triticum aestivum
  unsure at all n locations
  Clone ID: LIB103-040-Q1-E1-F11
ggggccacgggtactaaaggatgtagagaaatcattcactggaatcacagaatcattttcatctttaaggaacaaacttgaattgcttccacctggtgttctgattataggatcccacacccagatggacagccgtaaagagaaggcacatcctggtggatttctttttacgaagctcgctagtagcagccagacgctcttcgaccttttcccagacagctttggtagtcggttgcatgaaaggaacaaagaaagcccgaaggcaatgaaacatctaaataaacttttcccgaacaaaatttccatccagcttccacaggacgaagcattacttaccagttggaagcaacaattggatcgtgatgttgaaacccttaaagcanaatctaacatcggtagcattcgtacgtttttgaatcgcagtgcgatcgaatgc

SEQ ID NO: 3751 - DNA, 451 bp, Triticum aestivum
  Clone ID: LIB103-040-Q1-E1-F3
gggtccacggcgttgaagaaattgatctagcatggactccaagaaataatatggtgtcagatggatgtcgtggtggtggcgtgtgccgtactcctggacgtgaatgcttgttctggcccatgctaccctactactcctactacttactcctatcagtatatactatactattatcgaggattcgatgtgctggttacgtacaacgaacacattaacatatggctacagtataaacccgcccgacgcgcgatgcatgtgaagctagtactacaaatttagagaagtgactcgaaagccattcattaatttattaagtttatcacacgcatatcattttattacatacaacacgtcatcaagccacatcgacaacgatgatacattataaatactaaaattttcaccacacattagataacacgctatgacatgaacttcaacttaaccaatc

SEQ ID NO: 3752 - DNA, 295 bp, Triticum aestivum
  Clone ID: LIB103-040-Q1-E1-F4
agatggatgtcatttttttcagggatactagatgggtgtcgaaatcgtgtctaatatgctaatcgaacggatgctaagattgcgggtgcatgtggttccgatcgaaaatgccttgctcctttggttggacccgccgcttactatcggttccttggatggttgcctctgtcatttccatcttggtgtccatgtacgtgcatgcctcagactccttgtagtcctgaggccctttgaacggggcaagccactggggtagcgcaatcgtcacaattggccgtggcttcatagatgatga

SEQ ID NO: 3753 - DNA, 418 bp, Triticum aestivum
  Clone ID: LIB103-040-Q1-E1-F5
cgtaaccatttaagacgagctctttttcacctccataaacgagaaacatatccttagtccttttcaggtattcaggatgttcttgaccgctgtccagtgctccactccgggattactttggtaccttcctgctatgcttatagcaagacatacatcaggtctagtacacaacattgcatacatacatgatagaacctatggctgaagcatagggaatgactttcattttctctctatcttctgcggtggtcggtgagggagtccgggattaaggggtcctcggacagccggactatatactttggctggactgttggactgtgaaaatacaagattgaagacttcgtcccgtgtccggatgggactctcctttgcgtggaaggcaagcttggcaattcggatatgtagatctccttct

SEQ ID NO: 3754 - DNA, 377 bp, Triticum aestivum
  Clone ID: LIB103-040-Q1-E1-F6
ttcgcgggtccacgggacattcatattaagcacataatatatttcatttccatattaaggaagcatgatttcataattgaaatacatcagagtacaacatgaaatagcttcagtactcagctaccccattacacaactgcaccagcaccaagtttcacatgcaacatgtagaacctttcgaaattagcatcatagacggtatatagacatatgcatctcatctggaaaactgctgaagcggaaggcgaatattgagccttcattcatgttgaaggtctttgcaactttaggccagtgcatgtggatgattgaccgtccgtccttcatcctcttcaggaacacttcaatattgaaccgtgtgtgttgtatgaaaattt

SEQ ID NO: 3755 - DNA, 434 bp, Triticum aestivum
  Clone ID: LIB103-040-Q1-E1-F9
gggtccacgggaattaagggactgcttgagtccccgagatcatattatgcattgtctggtggagctggaaaagccgtgtcaacaggaagcaagattgcgctggagagtccaaggacggcggagaagccatcggcaggcgacatcgtgtcgatggtgatgaagaggaggcgtgcgatgccaaggagcgaccaacagccctctgaagctgggcgcgtaaaagcttctggtgggatttttggatacatgcgagaatccagtggtaaacaagagaaggagaaggagggcctggcatcatctggggagggggagaaaacacagagcaaagaaggtgtggtggtggcggctgcttcagggggtggtgaggaaactggggttgctgcagatgcgccggtttctgcagagcaggcaaaagcgggtggtgctgctgttgttgt

SEQ ID NO: 3756 - DNA, 371 bp, Triticum aestivum
  Clone ID: LIB103-040-Q1-E1-G1
ggggccacgggatactaagaaaagtatgatgcttgatgattgttttgagatatggaggtaataatatcaaagtcatgctagttgagtagttgtgaaattgagaaatacttgtgttgaagtttgcaagtcccgtagcatgcacgtatggtaaacattatgcaacaaatttgaaacatgaggtgttatttgattgtcttccttatgagtggcggtcggggacgagcgatggtcttttcctaccaatatatccccctaggagcatgcacgtagtgccgaggtttttgacgacttgtagatttttgcaataagtatgtgagttctttatgactaatgttgagtccatggattatacgcactctcaaccttccatc

SEQ ID NO: 3757 - DNA, 404 bp, Triticum aestivum
  Clone ID: LIB103-040-Q1-E1-G10
gggtccaccaaacagggtatctccttgggagattgagctgaccagttcagcttcaagatcccatctggccgcaccaacttcaaagcggatgaagccataccttccccatgctaatccggaattcacagttccacatggaggtggtcgccctgattttgctgagtctgcacaagtccgcaaggtcttgcaaggtcaagaattattgggttatagaactcatgatggtactgctgttgctacttcacagccatgtgaagcaagaaacttgcagtacatcgatgaacgaggttgctctaacaatgggagtaacaatgtcctaaggggggtcccaagccatggtgtgaaaacaccacttggaattccctaccattgctctggctttggggagtctcagagattccaaa

SEQ ID NO: 3758 - DNA, 442 bp, Triticum aestivum
  unsure at all n locations
  Clone ID: LIB103-040-Q1-E1-G2
gggtccacggcttgcagctacagaacacatatcacagttcaatgaggaagcacgatcaccttttgtaaagaagtacaagactatcattcaccctggagaggtaaaccgaatcagggagcttccacagaacagtacgatcatcgccactcatacggacagtccagatgtgcttatttgggatgttgaggcccagccaaatagacatgctgtcctangagctactgattctcgccctgatttgattttaagaggacatcaggaaaatgctgagtttgctcttgccatgtgtccagcagaaccatatgtgctctcaggagggaaggacaagtctgtggtttggtggagcatccaagatcacatatctggacttggagactcctcanaaagtgagacttccccagggggatcaggcatcaagcatagcaaaactgcaaatgaaaag

SEQ ID NO: 3759 - DNA, 428 bp, Triticum aestivum
  Clone ID: LIB103-040-Q1-E1-G3
actgaggaatttattgaatacgagtgaagagaggggtattgggatgctgactttcccaaaagtcatcgttcattgctggtgtagtgcatccaatatccacatcttcatcttctttttcaatttcctcaacaccagcctcttcagctgtgaactgaggcatacgtgaggaaatgactggcattgaagggaatgcttccacttcaatttcttcatcaaactgttctgaggtagtaacagaatgattttcttcatcagatccgcttgggatcttgtagtcttcttcataaggaacaatttccttaaacgacatggacgaaatgggaacgacatcaatacgattttcaatcgagctggtcattggcttcattttcttcgcgaccgaagaatttgccgcagctgatgccttccttttcttcacagcagcacct

SEQ ID NO: 3760 - DNA, 438 bp, Triticum aestivum
  Clone ID: LIB103-040-Q1-E1-G4
agtcaatgcattgtccacgggggcggtgcttctgtgcatggcatcggcttccaggaagcagatctgagaccatggaagatagtgccggggaagaggctccgtgtacaacgaagatggtggaccggctccagtgcggcgtatgaggtcatcaatgaggcagatgcactgcagtggacaagtgcgccgatgtagaaggggaggagcacgaaggctgcggtggtgtggagaagtctattttgtggtggggatagaaaatggggagtattcaggtgtactactctgggtgccgggtggggttggctgggtacgatgaacctaaagttacgaaaacagctccctaccaagcatcatccataggcctgttctgaaggctatgatggtaacttcccactgctcaaatcagggtcgcgggagattttcccgccgaccacaaaattt

SEQ ID NO: 3761 - DNA, 319 bp, Triticum aestivum
  Clone ID: LIB103-040-Q1-E1-G5
ctgcaaggcagaggctgatgacggatttcaaacgactgatgcatgatcctcctgcgggcataactggtacacctcaggataacactataatgccgtggtatgctgtatattttggtcctgatgatactccctgcgatggtgtgtcgttcatgctgatacttcagtttactgaagattatcctaaaaagccacctacagtccggtttgattcacgaatgtttcatcccaatatttatgcagatggcaccatctgtatagatactcctcttcaccactggttcccgatttattatgttactgttatactgtaatccattca

SEQ ID NO: 3762 - DNA, 452 bp, Triticum aestivum
  Clone ID: LIB103-040-Q1-E1-G8
acgggtcaacaacaagagtcaattcattgtccacgacggtggtgcttctgtgcttggcatcggcttccaggaagcagatctgagaccatggaagatagtgccggggaagaggctccgtgtacaacgaagatggtggaccggctccagtgcggcgtatgaggtcatcaatgaggcagatgcactgcagtggacaagtgcgccgatgtagaaggggaggagcacgaaggctgcggtggtgtggagaagtctattttgtggtggggatagaaaatggggagtattcaggtgtactactctgggtgccgggtggggttggctgggtacgatgaacctaaagttacgaaaacagctccctaccaagcatcatccataggcctgttctgaaggctatgatggtaacttcccactgctcaaatcagggtcgcgggagattttcccgccgaccacaaaat

SEQ ID NO: 3763 - DNA, 390 bp, Triticum aestivum
  Clone ID: LIB103-040-Q1-E1-G9
ggggcactacttgtatctatcgtcccgttcatgcctagctatgggcgtatcacgacatcgctaattgagaggcaccccaatttcatttgtaatttcatgtcattattttctgtctagtaatcacttttgcaactaccctatgtttacacgtgtctttacatcttacttactgtttgtgccatgtcaacactacacgataacctatcatcatagtctgatttaattctgcagacatacagatactttgcactcacacaattacttctgttaaatcccacacatgtgaggttgccttgattctttttacttccaatccatagactcattttccacaacttcccacattgttaggatttgtacagatccataaatttacctcagttacagatt

SEQ ID NO: 3764 - DNA, 439 bp, Triticum aestivum
  unsure at all n locations
  Clone ID: LIB103-040-Q1-E1-H1
gggtccacggccagtcgaggaaccgcagggtccttcggaatctaagcatgatgattcaaatggggcggtcagaccagaagctgcagataatgaaggggcgatcaagccagaagctacggtggatgaaggagatgggactggtctgattgtanggatgtgcacagatgtacagaaaggctacttccgtctcacggggcctccagatgcaacaaagataagaccaaagcctgtacttgtagaagccctgaagtttgtccaggtctcaagtaaagactataattttaaaacagatcaactgaaatcaattcgtcaagatatgactatccagaacatagaggatgaactttctgtgcangtttatgagtatcatgcaagacttgcgttgtgcaatcgagatatggctgaacttaacttgtgcctcacgaaactgcactgcctc

SEQ ID NO: 3765 - DNA, 424 bp, Triticum aestivum
  unsure at all n locations
  Clone ID: LIB103-040-Q1-E1-H10
atagacgatgatttatcatccatttgcaaggatatcttagtgggtgtcaacttacttaattcaagtctacggtacaaggaaagaggcataacactaacaccggctcctaaagcacataaagcagttttaacataattcctttttatggagcatggtatggtgggtactccgggatcaccaagtttcttaggtattccatccttaaaggtatagttagcgagcatggtggagatttcagcttcatgtattttccttttattagtgatgatatctttcatatatttagcataagggtttgttttaagcatatcagttaagcgcatgcgtaagaaaatacgtctaatcatttcagcaaaacgctcaaagtcctcatcatcctttgtcatggatggtttacgangaaaaagcatgggtttctcaaccc

SEQ ID NO: 3766 - DNA, 401 bp, Triticum aestivum
  Clone ID: LIB103-040-Q1-E1-H2
ctgattgcaataattccctagaaaagtcagaatgtgataaaatgttgaaacattttgcatattaatctatgataaatttactacactgggaattttctttaataatttttgcagctaagtaagtatggatgttgctgcaatctttacatactgtcgtgtttatgcagaatgctgttaggtttgcattgtttgcatatgtttgcttcgtaagtgattctagttgaggatatgactattaatcaagcatatgcatttaatatgcaatgttgactaataattttactgatttgctatactagagtatgataatgttttggcaatggtttatactaacttatctcacgagtccttgttgacttttgtgtgcatgaaccttttgagatttagggagaccttgatat

SEQ ID NO: 3767 - DNA, 270 bp, Triticum aestivum
  Clone ID: LIB103-040-Q1-E1-H4
cggggataaactagtgctaagacaagaaactaaaagattctattgcagcatctaaagatataccttcaggcacacacctccccggaactggggcccgaaacttcttgatgtctactacacaaccttcttcctgtgcacgttgttgggcctccaagtgtagaagtttgtccgacagtatcaccattcgcgcaactggcagacccaaggtttgtaaatccgtcgcaggtgaatcatgaagacgggctctctcaaacaagcatgcaaccaaat

SEQ ID NO: 3768 - DNA, 174 bp, Triticum aestivum
  Clone ID: LIB103-040-Q1-E1-H5
ggcgaaataaaatccatgataagtcacttaacggtaatgatggaacagcatctatatatttgatcaatacactgtgggaagatgtcaagactaagcttggagatgctgcttcctctggtaacgatatgatagattctacaatgaagcatgctttgcgttcgaatgattatagct

SEQ ID NO: 3769 - DNA, 451 bp, Triticum aestivum
  unsure at all n locations
  Clone ID: LIB103-040-Q1-E1-H6
acggggaaaaagcacaaggcggagaagcgggcgccggcgtccaaggaggccggcggcgaggcgaagcagcggggcaggaagaagggcagcaaggcgaagaagagcgtggagacgtacaagatctacatcttcaaggtgttgaagcaggtgcacccggacgtgggcatctcctccaaggccatgtccatcatgaactccttcatcaacgacatcttcgagaagctcgccggggagtcggccaagctggcccgctacaacaagaagcccaccatcacgtcccgggagatccagacctccgtccgcctcgtcctccccggggagctcgccaagcacgccgtctccgagggcaccaaggccgtcaccaagttcacctcctcncagacaacttaggcttgatcctcgtcgcttcatgcgttctgtaagtacgtagttggcagtatgatgttacaat

SEQ ID NO: 3770 - DNA, 213 bp, Triticum aestivum
  unsure at all n locations
  Clone ID: LIB103-040-Q1-E1-H8
gcagcagctcatcacagttgctttctcatgctaattcgatctgggacctctcnaacctatcgatggctgcagacatcggaagtccggcagttccctcgctctgggtctctcaacagggcacgcggtcggttcgcataggtcgggataactcgtgtgcttcgatgtccttcgtaaactgaccatatcttgttcactccgtgggtatatctgcgt

SEQ ID NO: 3771 - DNA, 449 bp, Triticum aestivum
  Clone ID: LIB103-040-Q1-E1-H9
gggtccacgggccatgtcatatagagactctcaaaataatataagtgaagctgagagttcaacaatttctataaaataaagccaccaccttgctcaaaaaagatataagtgaagcactagagcaaattgcctagctcaaaaggtataagtgaagcacatagagtattctaataaattcacgattcatgtgtgtccccctcaaaagatgtgtaaagcaaggatgattgtggaaatctaaaaagcaaagactcatatcatacaagacgctccaagcaaaacacatatcatgtggtgaataaaaatacagcctcaagtaaatttaccgatggaacgaagacgaaagaggggatgccatccggggcatccccaagcttagatacttggttgtccttgaatattaccttggggtgccttgggaatccccaagcttaagctcttgccactcctta

SEQ ID NO: 3772 - DNA, 410 bp, Triticum aestivum
  Clone ID: LIB103-041-Q1-E1-A3
gggtcgacgcgggccaaaccccagacgaaaccctagcctgcctcccaggagcgccgagtccctccgcccccaacagatctacgcgcgcgaggttcggttcggtcttcggagctcgagacatggcggaggagaatgccccagttgaggttgccgctccggttgcggcccctaccccagttcttggagagcccatggacttgatgactgctctgcagcttgtgatgaagaagtcaagcgctcatgacggccttgtcaagggacttcgtgaagctgcgaaagcgattgagaagcatgctgctcagatctgtgtgcttgctgaggactgcgaccagcctgattacgtgaagctggtgaaggcactgtgtgctgagcacaacgttcacttggtcactgtgcctagtgccaaaact

SEQ ID NO: 3773 - DNA, 381 bp, Triticum aestivum
  Clone ID: LIB103-041-Q1-E1-B10
tgacgggaggggacatgacacgtatgtatcgttgctattaaggataacaagatggggtctatttctacatgaatagatcttgtctacatcatgtcattgttcttattgcattactctgtttctccatgaacttaatacactagatgcatgttgtatagcggtcgatgtgtggagtaatagtagtagatgccggcaggagttgttctactaatcttggacgtgatgcctatataatgatcattgcctggatatcatcataattattttaagttctatcaattgcccaacagtaatttgtttacccgtcgtatgctatttttctctagagaagccactagtgaaatctactgcccccgggtctcttccttaacatatttgcct

SEQ ID NO: 3774 - DNA, 406 bp, Triticum aestivum
  Clone ID: LIB103-041-Q1-E1-B3
cgggtcgaccggataaaggaaaggataagcaaaggaaaggcaaaaggatttcgtgaggatgaccacgataccttatggtttgaggatcgcgtatatctgcctaatgaccccgagatcaggaagttgattctgcaggaggcccatgattcaccgtattcgattcaccccggaaacactaagatgtatctggatttgaaggaaagtttctggtggacaggaatgaagaaggatattgccgagtatgtagcagtatgtgatgtatgtcagagagtgaaggcagagcatcagaagccagtgggattgctacagccattgccgatacccgaatggaagtgggacaagcttggcatggactttatcacgggattgcccaagactcgtttaggctatgactctatctgggttg

SEQ ID NO: 3775 - DNA, 422 bp, Triticum aestivum
  Clone ID: LIB103-041-Q1-E1-B4
gggtcgacgggtcatcggtaactttacttggagctatatttttatttaccacatgatatgtgttttgcttggagcgtcaatttattttgttaggatttgcttgctgttatttagaacaatgtttttcatcttttatttcaataaaagtggcattgatagcctctactatgcctatgttacaagtatacatgttgctgtttgaacacagaaagtttaccgctgttgcaataattccctagaaaagtcagaatgtgataaaatgttgaaaccttttgcatattaagatatgataaatttaatacagtggaaattttctttcataatttttggatctagggaagtatggatgttgcagcattctttacagactatcctgtttaagcagattgctgttatgtttgaattgtttgcatatgtttgct

SEQ ID NO: 3776 - DNA, 406 bp, Triticum aestivum
  Clone ID: LIB103-041-Q1-E1-E1
gggtcggccgggcgatcgccttcggcggatacaagatgagcggtatcggtagggagaagggcattgacagcctgaagaactacctacaagtcaaggcggtcgtcaccgcgcttaagaaccccgcatggttgtgagcatagcgcagctatggtcctccgtgatactccggagaacgtgaagactcgcgacaattgactgcgaataggaagatgatgatgatgacaccagcgatgatcactaataagcccctgccttcatgggcagccactcaccgtctctagtagatagcagatgtgattttcctttgtcaatcgtggaaagacatatatgttgtagcaccattatgtttattatcgcctgttggagaagtctctgggtgcagtaaatcagtcactttgtttcagtt

SEQ ID NO: 3777 - DNA, 322 bp, Triticum aestivum
  Clone ID: LIB103-041-Q1-E1-F1
ccgggtcgaccggggcgatcttcccagctacgctggaaacaatttcgaatgtggggaaggttgtcgagagcctttacatgaggtcagcaaagatcatggcctgaggagatgttttgttcttacccggcgtctccagttaaatcttacacttgagctctgctagtgtctcgaggacatgaaatctctgcgtgttgccattgtttcttccttgcaaattgtcttctgttagctctataaaatttctagcctcgtggacaagaagataccgttgtttctgcgtgatggaaatacagttagcacttgctgatatcaaccatttccg

SEQ ID NO: 3778 - DNA, 390 bp, Triticum aestivum
  Clone ID: LIB103-041-Q1-E1-F2
cgggtcgaccgggaggacgacggcacgagggaggtcgccgggttctgggggtacctgctgcagatcatctatcagacaaatgcaggggccgtgatgcttacagactgcgtcttctggttcatcattttcccattcctcaccataaaagattacagcatgaattttctattgataggaatgcactcggtcaacgctgttttcttgctcggcgaagcatctctaaatagcctgcgcttcccgtggttccggatcacgtatttcttcctttataccgcgctatacgtagtcttccagtggattgttcatgcatctactccaacctggtggccctacgcgttcctcgacctctcctctaatctcgcgcctctgtggtacgttgccgtcccgttc

SEQ ID NO: 3779 - DNA, 426 bp, Triticum aestivum
  Clone ID: LIB103-041-Q1-E1-F3
ccgggtcgaccggcttccatttacacaaggagtacttctgatgggaagaagcattgttcttctgatctgcatagcgttaggcaccggtaaagaaggaggaattttttgcacagaaacaaagcaaactgacctctctctcttcctgatctggaactgtacatagtataaagaagaacagcctgttaggggagggtagttagtgccatttatatattattaacaaaaaagaaagtaaagcaaggctgctgtatccaaaaggagaaggaaggaggcagggtaaagagttgggttaaatttcagatatactaatatacatgtacacagtatagttttaggtagttacgtatgaaatgctagctaaagcatatttacaagggccggatgctgccattctgaatgtaaatcttccgggcattcattcaggtg

SEQ ID NO: 3780 - DNA, 431 bp, Triticum aestivum
  Clone ID: LIB103-041-Q1-E1-F4
cgggtcgaccggtcctaggtctgacagtctcatgaagctcaggaaggttctacatggccgaagggatgtcctgcaagatgcatctggcagatcaaaaactacttgtatccctggaggtgttgttcgagcagaaagataaagcgtgacggcagctggggcgtacgaactagcttaggcacaatgactgaaatacaagtttttctagaatcatacatgtgagtgacagagaaggaacaccatcttagcttttagattttaacaaattgtggaacctaatgatgaattgccaaacatgattttgaattttaacaaattctttacttccgaattaaatgaacctaataatgatgtgctagacaaagtacatgtcagtctaactatgggtatgaatgaaatattcttcacgccatatatacttgaagaactaaaaa

SEQ ID NO: 3781 - DNA, 437 bp, Triticum aestivum
  Clone ID: LIB103-041-Q1-E1-G2
gggtcggcctcttctcacccggcagcggtggctgccgcgctctccaccccaagattgcgcagttcgctgagcggaatccggacgtgctgttcctgcaagtcaactacgagaagcacaagtccatgtgctacagcctccatgtccatgtcctccctttcttcaggttctacaggggagcccagggcagggtcagcagcttcagctgcacaaatgcaaccatcaagaagttcaaggacgccctcgcaaagcactcgccggacaggtgcagcctcggcccggcgcgggggctcgaggaggcggatctcttggctctggcggcaaacagggacctggaattcacctacaacgagaagccgacgctggtgcccatcgccgaggctatccagatggaatctgcctccattgggggcccatggatgccattgccccgcgccgct

SEQ ID NO: 3782 - DNA, 428 bp, Triticum aestivum
  Clone ID: LIB103-041-Q1-E1-G3
cggtccgacgatccgggtcgaccggggtgcgagcaatgtgacagtcagtcatgccagcgcggtcaatgaggtcggagaggtactgacgttgtgagagaaacatgccagcagaggagcgcgtgacattaatgcctaagaagtgatgaagagctccaagatcggtcatggagaattctgaccgaagagaggttataagagagttaggaaggcagtggaggagcaggttaggatgatgtcatcgacatataagaggaggtaagcggtggcgttgtcagagtgataagtaaacatggaagagtcagactttgaagagaggaagccaagggtctgaatgtatgtggcaaaccttgttggaaatatgccctagaggcaataataaatggttattattagatttctttgttcatggtaattgtcgagtagtcatg

SEQ ID NO: 3783 - DNA, 422 bp, Triticum aestivum
  Clone ID: LIB103-041-Q1-E1-H2
gggtcgacctcggcgacacggcgccaggggcaaccgcactgaagctctggtacatgagcaggccacctcccggaagctcctgctcgacgacatcctcgagcacgtaggaggagccagcctccgcaccgcccgcccatgatttggcgaagccgtggccaccgaagatggtgacggcgacggagaagtctgacgggcggaagcacgacagcaccctctcgatcaggtcactgtagaccagggagccagggttgaagttcatcgcttcatagctcgcgtagctgaagccctcctcaggagtgacgtggatcgtggaggctgcggggccgcagacgccgttcatcgagtagccgcacgggtcgaagtcgaagtcgcagatctccatctccgggatgatagcagagatccccgaaacttggtcatct

SEQ ID NO: 3784 - DNA, 352 bp, Triticum aestivum
  Clone ID: LIB103-041-Q1-E1-H3
cgggtcgacgggaactgttagtcacagcaaagatagcaatttgctgtttccattggctgataaaatgtattggtttcgatttcatggtgtatgtaatccttcatacttcagtttgtcgcggaggcaacgtaacgatttccactagaaagattttgtgcagaatgtttcgctggtgtaatgtcacttgagatgccaaaaaaaaaaaaaaaaaaaaaacaaaaaaacaaataaaaaaaaaaaaaaagaagaaaaaaaaaaaataaacaaaaaataaacacaatacaaaaaatcccccttaaaacaacctgaaataaaaataaacaaagaacaaaaaagagggcccccccaaaga

SEQ ID NO: 3785 - DNA, 435 bp, Triticum aestivum
  Clone ID: LIB103-041-Q1-E1-H4
gtacggacgtacattcgtcggtcgggagtaatgcacgatgagtagttgtgaatttgagagatacttgtgttaaagtttgtgattcccgtagcatgcacgtatggtgaaccgttatgtgatgaagtcggagcatgatttatttattgattgtcttccttatgagtggcggtcggggactagcgatggtcttttcctaccaatctatccccctaggagcatgcgcatagtacctcgtttcgataactaatagacttttgcaataagtatctgagttctttatgacgaatgttgagtccatggattatacgcactctcagccttccaccattgctagcctctctaataccgcgcacctttcgctgggatcatacacccaccatatagcttcctcaaaacagccaccatacctacctattatggcatttccatagccat

SEQ ID NO: 3786 - DNA, 373 bp, Triticum aestivum
  unsure at all n locations
  Clone ID: LIB103-042-Q1-E1-A1
cggtccagnctatccgggtcgacggggagggtcactgagtacagcttgctcgcgttcggcattgccgtttcaccacgacgactgctcaattgtcttatgaagttggtctgaactgtacctcgtcgatgtagatcagtatttggagtttgcgtcatttgagtgtgttgcgtcggatgtaattcaaggcacagtggatcagtatgtggagtttgactcatttgagtgtattgcgtctgatgtaattcatggcatagtgtgatggaagactcgtgatcacactgacatgacatggctttgttgtctgatacaatttgattttatatatcaaaatgaaaacatgtatatcgtgttttaagtattgtataacatgcat

SEQ ID NO: 3787 - DNA, 286 bp, Triticum aestivum
  Clone ID: LIB103-042-Q1-E1-A10
cggtcaagatatcccgggtcgacgatgaactataacagcacgtgttagctccccgtatttactcgacaaagaaaagcagatgaatgcctgagaagcgtcaaagaaaaagctccagtaggatatgaggctgtgatgtcttagcgtctgcatttttacacactcgcattgttgtcttaaagagggacttgcagattttcacatatgattactgatgtattgagaacattcaaactttgaggaatttctgcatgctgaattacagttagcagcatggtatgattcgctg

SEQ ID NO: 3788 - DNA, 374 bp, Triticum aestivum
  unsure at all n locations
  Clone ID: LIB103-042-Q1-E1-B5
attcgncggtcgacgggcccttccccagaccctgcgcaagcgggagctacatgcactggggctgccctttaacaatatgctatctcccagtgatattatctcagctggttctgcaagttctgcgtgcactgccggtggtcgtgggcagctgtatgtgtggggaaagttgaagaactggggcgatgagtgcatgtatccaaagccagttagagatttaagcggttggaacatccgctgcatggcttctggcgacatgcaccatattgttggtgcagaggattcttgcataagttggggtctttctgaatatggagagcttggttatggccctacacattagtcatctgtaaatcctaaaaaggttgacattcttg

SEQ ID NO: 3789 - DNA, 427 bp, Triticum aestivum
  unsure at all n locations
  Clone ID: LIB103-042-Q1-E1-B8
attccgggtcgacgacgtcgtcctcatcgagcggcttgccggcggctgcaagttcgtcggtgatgcccttcatcttggtgaagaaggccacagcggagaggtcacccttgcgggtgtgctcgagctgtgagcggagctggatcaccctcgccctagactgcgacgagaagctctacaggagcgccgcccagagagtgctgacctgcatcaggacctctcgagacagagatgcgatcagaaaagtaagaacctgctgatcctgggtgacccatacggcatgctcggggttgggcgtggaggtggtctccttcttgccagcgacgtccttcttcgtgacgatcacagcggggggctcccgaagggagccgtcgatgtagcctgtcatcnctgccgccttgatgtgcggcaggacttgtgccttccacac

SEQ ID NO: 3790 - DNA, 360 bp, Triticum aestivum
  Clone ID: LIB103-042-Q1-E1-C10
ggtcaagatatcccgggtcgactttgacgatccgactacgaacgtgcgaggacgtcgcgccttagcaatcgctaaaccaactccgagaggttattgaccacgccggagcacgatcaacctgaccacgagggtctgtttcctgcgagcaaacgaagaacaagcaagaaactgagattgcaatctggatattgcgaatataagatgaaagctttattgatcaacgtggtgttctgtgacgcctttgtctggtcgttgaacacaaacgaagtacgcgaagttgcagctatggcgaacttttaatctaaacaaaaccccccaaaatctaaacgatgccctaagggctgtatatatggatgaaga

SEQ ID NO: 3791 - DNA, 344 bp, Triticum aestivum
  Clone ID: LIB103-042-Q1-E1-C11
atcaatagatatcactgtgaatgagtcgggattgccatgccacagaggcactatagctataagtatatgatcgctcacaaagaaactaagtgggtgtgcatccagcttgcttgactcacgaagacctaaggcattttgaggaagcccatcattggaatatacaaaccatgttctagtatgaatatttccaactagtatatgaaaatgataacataggagacgcggtatcatgaagatcatggcgctactttgaagcacaagtgtgggaaaaggatagtagcattgtcccttctctctttttctcccattttttgggccttctctttttttagggcctctttttt

SEQ ID NO: 3792 - DNA, 317 bp, Triticum aestivum
  Clone ID: LIB103-042-Q1-E1-C2
tcgacgggctctggtgttgtcgtctatgaatctaaaagtcattgtgtgggagattcaaaaaaaaaaaaaaaaaaaaaaaaaaaaaaaaaaaaaaaaaaaaaaaaaaaaaaaaaaaaaaaaaaaaaaaaaaaaaaaaaaaaaaaaaaaaaaaaaaaaaaaaaaaaaaggaagataaaaaaggataaaaatataaaaaaaaaaaaaaaaaaaggtaaaacctaatgaataaaggtcaacaaaattaaaataaaaggccaaagatttaaaaaatgataacgggaaaaacattgaagtaaccaactttaaaacactagaaa

SEQ ID NO: 3793 - DNA, 370 bp, Triticum aestivum
  Clone ID: LIB103-042-Q1-E1-C4
cggtcgaatattccgggtcgacgggtctgcaacattcagatctgtatgtatcttgcaaatttctatgtctcccacctggactgaatcccggatggaattgaagcgtctcttgatgtgcttggttctcttgtgaaatctggattccttcgccaaggcaattgcaccagtattgtcacaaaatattttcattggacccgatgcactaggtatgacacctagatcggatatgaactccttcacccagactccttcatttgctgcttccgaagcagctatgtattccgcttcacacgtagatcccgccaggacactttgtttagaactgcaccaactgacaactccgccgttcaatgtaaacacgtatccggtt

SEQ ID NO: 3794 - DNA, 275 bp, Triticum aestivum
  Clone ID: LIB103-042-Q1-E1-C7
cggcagcaaggcgaataagggcgtggagacgtacaagatctacatcttcaaggtgctgaagcaggtgcacccggacatcggcatctcctccaaggccgtgtccatcatgaactccttcatcaacgacatctttgagaagctcgccggcgagtcggccaagctcgcgaggtacatcaagaagcccaccatcacctctagggagatgcagacttccgtccgcctcgtcatccccggtaagctcgccaagcacgctgtctccgagggcaccaaggccg

SEQ ID NO: 3795 - DNA, 352 bp, Triticum aestivum
  Clone ID: LIB103-042-Q1-E1-C8
acggggctcaataatagagtaggagtattccgtactagtactactcctactagtaccaagtttttactcctaatactatattactagtactaccactatacaactagtaggtacgtgcacgacataacatcgtatgaacaaaaaacgggaagatcttgttttgggtgatttatctatttttcaatcaacgtagtatgaataatatgatgtggggggcacacatgaagcttatgtggcttggttgcatggctacggcaggttacagaaaattatatagataatgtgtttagagtgtacttcactcaactccatatttatacattggatccattgcagcggcctggcacatcta

SEQ ID NO: 3796 - DNA, 348 bp, Triticum aestivum
  Clone ID: LIB103-042-Q1-E1-C9
cgggtcgacggggtcaccaaccagcggtccgagaacgtcaaggacgagatcgtcctcgacggcaacgacatcgagctcgtctcccgctccgccgccctcatcaaccagaaatgccatgtcaagaacaaggatatcaggaagttcttggacggcatctacgtcagcgacaagggcgccatcaaggaggagtagagagccggaaaccgtcccgcccaccagaagccgtgtttctgcctgccgtgtttgtttcatcgtgtttgtgtctgtctgtcgtcgtcgtcttcgtgattttgaactttctctagactgaattttgtagcggagttaaatttttagggatgtgccgtc

SEQ ID NO: 3797 - DNA, 153 bp, Triticum aestivum
  Clone ID: LIB103-042-Q1-E1-D9
cggtctagactatccgggtcgacgggatagggctcgaatagctgtaccacgagaactgcatggactgagcagtccatgacttatagcaggaccgcgtcatagccatacatacgtgtaccaagagagatctagatgtacaagtcgtcccaggtg

SEQ ID NO: 3798 - DNA, 292 bp, Triticum aestivum
  Clone ID: LIB103-042-Q1-E1-E10
cccgaccggagaagaatacatgaggcatcctttttaacgcaacttgtgagtttggtacagattcgtgagacactgtgagttgggtcacgggatagagatacatgattttcatttctcattggacagatactatgtgagacgtgcgagcttgagatactacggtcatgagagagttatatctgagtttttttgttgattttcttctcacagagtctatctacatcgtcaaattaccgcctcatcagattaactgcccgtataatccagttaacatggtaatttctatggactc

SEQ ID NO: 3799 - DNA, 291 bp, Triticum aestivum
  Clone ID: LIB103-042-Q1-E1-E12
gggacttgacgacatggatgttgcaagtctcaagaagatgaacaagaacaagcagcttgttaaaaagctagccaataagtaccatgctttcctggcatcagagggcataatcaagcaaatcccacgtctccttgggccgtgacctaacaatggaggcaactttctcactcaagatatgccacgtcaagtccttcaaaagaaggtaccaccccatcataccacatcataaacatagctagagcatgttccttgcaagggtgtagcagtaggccacatgtctaagcgagcata

SEQ ID NO: 3800 - DNA, 441 bp, Triticum aestivum
  Clone ID: LIB103-042-Q1-E1-E3
ggtccagcaaatccgggtcgaccgggaagaagcaccaaggcggagaagcgggcgccggcgtccaaggaggccggcggcgaggcgaagcagcggggcaggaagaagggcagcaaggcgaagaagagcgtggagacgtacaagatctacatcttcaaggtgttgaagcaggtgcacccggacgtgggcatctcctccaaggccatgtccatcatgaactccttcatcaacgacatcttcgagaagctcgccggggagtcggccaagctggcccgctacaacaagaagcccaccatcacgtcccgggagatccagacctccgtccgcctcgtcctccccggggagctcgccaagcacgccgtctccgagggcaccaaggccgtcaccaagttcacctcctcctagacaacttaggcttgatcctcgtcgcttcatgcgttctgt

SEQ ID NO: 3801 - DNA, 400 bp, Triticum aestivum
  unsure at all n locations
  Clone ID: LIB103-042-Q1-E1-F10
cggtcaagntatcccgggccgacggggatgacaagatgaagtacaccatagagttccagaagcacaaagagggcggaagcggtagcgctcctgccccggcgacagctgcgacggtggtgacgagttcggccccgacaggcagcaccttccttgctgttcagtacgcgcccgtgccgaaagaaaaccaggcaccagcttcctcttcggttcatgagcaccagcagtccttggcaacatcctataccatttgttgatttgtttctgtaatagcaacctcagtggtcaaaagacaaaaagaaaaccaaaccgaaataagtggctcccctctgtgatttcatgactagactggaaaacatgggaggtgctagagcaatagaaatcccaaacagcaagtcttttt

SEQ ID NO: 3802 - DNA, 403 bp, Triticum aestivum
  Clone ID: LIB103-042-Q1-E1-F4
tccgggtcgacgggctttagtaaatggaggaagaaacaaccatagtaactatctatgaaattgattgatggatatgagagtggtgcaagaccgggacagaggaaccataggaatgttatgtcaggttccttgctcacttctcaagcccaatatcattcctccaactcggactttcatgctagaattaagaacccccctaaacaatgacagcgtaccgagcgggccctacgtctatcggggagctcaaatcctcactagagtgaggcacgtctcgatcaatacatctcgaatctaaagatagaatgttattgttatgctgtcgccactctggagtatgattgaccatatcatccagcgagtggtcttaagcgctcagtgcatccatactgaactcgaatgtgcg

SEQ ID NO: 3803 - DNA, 282 bp, Triticum aestivum
  Clone ID: LIB103-042-Q1-E1-G10
tctggcatgtttgcctccgtgcaatagctgttgccacacagcaatggcgcgtctagtgtcgtcctcggcgatggcttctagcttggccccatacatgtcttcaaggttatgattggcgtcgagacgtacatgatgtgcatcttcatggtgctgaatcaggtgcatcctgacatcggcatctcccctacggacatgtccatcatgaagtccttcatcaaccacatcttcaacaagctcgccggggagtccgctaagctgggccgcttgaatccgatccccatt

SEQ ID NO: 3804 - DNA, 329 bp, Triticum aestivum
  Clone ID: LIB103-042-Q1-E1-G12
ggagggcggggacaataggggcaagaagaatgccaagaagagcgtggagacgtacaggatctagatcttcaaggtgcagaagcaggtgcaccccgacatcggtatctcctccaaggccatgtccatcatgaattccttcatcaacgagatcttcgacaagctcgccggcgaggccgccaagctggcgcggtagaacaagaagccaaccatcatgtcccgggacatccagacctccgtccgccacgtcctccccggcgagctcgccaagcacgccgtctccaacggcaccaaggccgtcaacaagttcacctcctcctagagtgctcctg

SEQ ID NO: 3805 - DNA, 331 bp, Triticum aestivum
  Clone ID: LIB103-042-Q1-E1-G5
tacggaccagaattcgcgcggtcgacggggatcaaggtgtcaagccggcgacgatggagatcatgactgtgctttggagatggagatcacaggcacaagttgatgatgaccatatcatgtcagatattttgattgcatgtgatgtttatcttttatgcatattattttgcttagtacggcgatagcattataagatgatccctaactaaatttcaatgtacaagtgttctccctaaggtatcaccagtactagagttcgtcgtgttgagacagcacgtgatcatcgggtgtgataagctctacgtcgacagacaatgggtgtaagctagtt

SEQ ID NO: 3806 - DNA, 446 bp, Triticum aestivum
  Clone ID: LIB103-042-Q1-E1-G6
attcgcgcggtcgacgggcacaaatacgcacggcaagacatacatcaagtgttctcaaatctttaaagacttaatccgataagataacttcaaaggggaaactcaatccattacaagagagtagagggggaggagaaacataagatccaactataatagcaaagctcgcgatacatcaagatcgtgccaaatcaagaacatgagagagagagagagagatcaaacacatagctactggtacataccctcagccccgagggagaactactcactcctcatcatggagagcaccgggatgatgaagatggccaccggagagggattgccccctccggcagggtgccggaacgggtctagatgggctttcggtggctacgatgcttctggcggctgaacccccgatctattgtgttccccgatgtttttacggtagatggagatatata

SEQ ID NO: 3807 - DNA, 440 bp, Triticum aestivum
  unsure at all n locations
  Clone ID: LIB103-042-Q1-E1-G8
attcgncggtcgacgggttggacgatgagatgggcgtagcttgataagtctgtgttccacttgccttcgcctatagcagaaagttcatccttggcactatgcttggataaagcaacaggattgccaggggcagtgtggccaaagccagtaatcatgatgtcatcttccttgtcaccagcagccttcactggagttggcggtttatcaatagccttagctggacttgccggtttatcagtgtctcggactgggcttgttgttttttcggactggcctgatggagcaacttctacttgttcaacaacgaagtcataatcttgtggtggcagatcatcaagcagagcgtcagtatttgtttctactggatctggagtcttctccggtttaatgactacattatcgtccgccggtttatttaatcaggccttcttgctgggtct

SEQ ID NO: 3808 - DNA, 308 bp, Triticum aestivum
  Clone ID: LIB103-042-Q1-E1-G9
cgggtcgaccgggagcatttggatactggatctagccgatgggagacggtatcacgggctaacttcaaccggtttggatggctgtcatgtaataggataggtgtcaagtttcctagcggttgttttgcctgccggttgtggttgtcctacatttgctttcttgctccttgtgagcattattgcctgtcgtctgaaagcttgacacttatgtaggagcattggtcttgtccataaaatcgacctatccatgagtccgatttataggacgttgcatcgtgggctattaaacttttggcatctttatatca

SEQ ID NO: 3809 - DNA, 326 bp, Triticum aestivum
  Clone ID: LIB103-042-Q1-E1-H10
aagaggaataagacagcgaaatcggctgtgcaattatttggtggcttgacattagtttcctttgcgatgtcgttcccttgtttaagtttacccggtggtgtgtgtgtgtccttgcgagactatttcggctcacggtcaggtctctgcgatttggaagcttctcatgggctccatggtgttggatgatgtggatggaggagggttcgtgttagctatcttagtcgactccctctggtcgagttttgtaggttaactaggactaggtctactactattcagatggcctttaactcggttcacgcaacttatccactccactcaagccg

SEQ ID NO: 3810 - DNA, 375 bp, Triticum aestivum
  Clone ID: LIB103-042-Q1-E1-H11
ccgggtcgacgggctgtatgcccaggccgacaagtgcgcacatgctgaagaggggaggaggctcctcggagagaatgcagaagcggcaggatcagatagtgatgggaccgccgcggcaaagagaaaccggcggcgcaacaacaggaagaagaaaggcaaagacgtgctagtcgttgaacagtccgtcaatggagccagcgccaaggaagccaaagttggtagctctagcaaggaggttgccgcggccgccgacaagcagggcggcaacgacaagcagtactgcaagatccaccgcaccaagggccatgatctccagagttgcaagaatgttgagcagcttgttgagctgcagaaggccggatacgagcgacgcga

SEQ ID NO: 3811 - DNA, 360 bp, Triticum aestivum
  unsure at all n locations
  Clone ID: LIB103-042-Q1-E1-H12
ggtcgaccggtcctttcaggtaggccgtgttgggcccctttctttttcccttctgtcaagtggtcaaagccgtggatccgtgcacggtgcgaccttggaaactaaagcgaccactatgagcatcaagacgatgagtactccggcgcaatccgcgaaagggcggctgcngctgccaaaacagcagctgctgcagctcagagtccattcacgccaaaagtacgcgtaacctcttgtaaacattttccagatttagttgatttcaatcatctttagtacttgcaactaaattttaccaagtaacatttgtcaaacccatctgaaaaaaaaaaaaaaaaaaaaaaaaaaaaaagcggccgctct

SEQ ID NO: 3812 - DNA, 411 bp, Triticum aestivum
  Clone ID: LIB103-042-Q1-E1-H2
ccgggtcgacttccaccaaagagatatccatcatctcatcgagagacgggacagctttgcctctatcaggtggtagcagatttccaggttgctcggtgagattttacagtttgtcgtactttagatcgaatctgttctgcatacgaagagacgacgacaaagccaaaaaaattagggttagttcatcccatccgaaccaatctgagccttgcataatcttttctgtagttgctttgttgaacttgcggttgcatcgtcgtgttcagttgctggtcgtagcgtcaagtcttttagagtttcgagttctgttcacaagttgtcaagccgtcgccgcaccatcatcatcgcccctgccatctatcaccaccgctcagaatccgtatctagatactaccaccaatccgtgtccat

SEQ ID NO: 3813 - DNA, 430 bp, Triticum aestivum
  unsure at all n locations
  Clone ID: LIB103-042-Q1-E1-H4
acggcagctatatgtaatatgcttaaggaaaagaaggcgggcagcttttgttccttgtggtcatcttgtctgctgttgcaactgcgcgaaaagggtggaactcatggatgaaccattgtgccctgtgtgtangcaagacatccaatacatgctcagggtttacgactcttaaggctccttgctgatgtggcccaagcaccggcagagttgcgactccaacggcccatcctcctgtcctgggtgctctccgttttttgttcctagcttacgttactgctaccctgaaagtatgtgaatatatgactgcgctatctaaccctcagaaactaggttaccagtacttgctagttcagcctgtgaatatggattatgtatgatcttagatgaccccgtgaacttgccaagttttttgttggtgttgcatggatac

SEQ ID NO: 3814 - DNA, 343 bp, Triticum aestivum
  Clone ID: LIB103-042-Q1-E1-H9
ccgggtcgaccgggagaatgatgtagcttctccttggggacgacccttgggagtcatttgtgagtaatgtatggtacatcaagatacattcaccagatgatgtgcacaagttgggcaagcaaggaaatgatccacgttacctttccgaaatgcaaaatcattgtgctgtctctgggtccatcgacgattcgacagcacatggtaccacccttgctcaccgcggcacaacatccccggaaccaccgatcgtctcaacttcgtacctgtctcctgcgtgtgctccgtgcacgtcccgagagatccccacccgttacgtatcaccgtcctgatcaagttcacgaca

SEQ ID NO: 3815 - DNA, 415 bp, Triticum aestivum
  unsure at all n locations
  Clone ID: LIB103-043-Q1-E1-A1
ccgggccaacggggaagaacacaaggcggagaagcgggcgccggcaaccaaggaggccggcggcgaggggaagacgaggggcaggaagaagggcagcaaggccaagaagggcgtggagacgtacaagatctacatcttcaaggtgctcaagcaggtgcacccggacatcggcatctcctccaaggccatgtccatcatgaactccttcatcaacgacatcttcgagaagctcgccggggagtccgccaagctcgcccgctacaacaagaagcccaccatcacgtcccgggagatccagacctccgtccgccccgtcctccccggcgagctcgccaagcacgccgtctctgagggcaccaaggccgtcaccaagttcaactcatcctangctagtctgccgtgtccgtgaactgat

SEQ ID NO: 3816 - DNA, 137 bp, Triticum aestivum
  Clone ID: LIB103-043-Q1-E1-A2
tgttgcaatgtattgctttgacgcctcgtgtcttgtgatgggcgtgcttgtagtaagaactgccaagtgttatggtagtcctttccggttgaattgttattccctgtcgaggacgaaacggagaattggttgccccc

SEQ ID NO: 3817 - DNA, 386 bp, Triticum aestivum
  unsure at all n locations
  Clone ID: LIB103-043-Q1-E1-A3
gccttcgggttaacccccaacggcccggccggccaggttggaggaattcgccaacccggaaacggaggaaggcggcaattcaaaattctcggcgctcttctacaacttgtcgcagcaggtcaaggacagcctccagagcatgctgaagatgacgggcgagatcgagcagtgcagtgacgagatcgangtggagatcgagcaggccaaggagggcgtggctgacaagtacagggtgctcgaggaggagaaggaaaggttccagaaggtggccctcgcggcgctcaacatcctgagcggtggcatctgaagcctgcaccaccttaataccaacaaagacaatcctgataactgccccgctctgtagatcaccgttcatgtgcaagcct

SEQ ID NO: 3818 - DNA, 419 bp, Triticum aestivum
  Clone ID: LIB103-043-Q1-E1-A4
cgggtcgaccggtcctcacaaacgcgacgttaccggaaccaacccgaagaagcagacaccggaaagaagcacacaacatagtaaacaaccaacacatgaacatggtatgatatgcgggatgcggtatgcgatgcatatgcatgatttgcaaaggaatgattgaacctggcctcagcttggaaatccaagagtgccactggtaaggtgaggtgatttcggttgaaatcgatataaagaacactggaatcggatgcacggtttggaaaaggcaagcaaaacaaatatggcaccggtctgcgataatcagcaagtagccatctaaatgcatcaagataattatgctacaacactcaaacatgacaacaaaatacatggcagggattcactcatgatgcttgacacaagatgaacactgagct

SEQ ID NO: 3819 - DNA, 345 bp, Triticum aestivum
  Clone ID: LIB103-043-Q1-E1-A5
gccatccggactccgcgcaacagagcggtcgggcacgatgggaagtattcgccgtaggcagcaacggcatgaaggccgcgaatggagtggctcacgtgctcctactaagatgtgtcgcgtgatgtcgaaggtacactccagcgtatgcatcacatgaagggccatatcgatcagtgcagtgatcatatcgaagtgcttatagaacatgccaaggaagtcctggatgataagtcgatggtactcgaggacgacaatgaaatgttccaaaatgtagacctcgctgtgctcaatatcctgagcggtggtatctgaagcctgcatcactttaggcacaagagagatcat

SEQ ID NO: 3820 - DNA, 421 bp, Triticum aestivum
  Clone ID: LIB103-043-Q1-E1-A6
gtcgacggggggacacggatgcaacatatctcaaagctgttgcaaaggcaaacaatttctccatggattcaaattcaagtgattggtaaaagagcggaatctctttcaacggatgacttggaacataaaaagattaacttattattgggcgaaccattttattgtggcagtgaagggatgcttccatggcaaaacctgcgtttctggaatgcaagaactctgtttgattcaatgctatctgaggatgcactcataatgccttgcaaaggagtattaaagttatgtgccatgtctcttccggacttgtggaagagtcgtcgcagccttaaagatgtcgagggtttcgaccacttggttgttaacgagactttaagagcctgcggtgatcttcctggagagcagcaaggtccttgtctgccct

SEQ ID NO: 3821 - DNA, 400 bp, Triticum aestivum
  Clone ID: LIB103-043-Q1-E1-B1
gagcgcagtcggcagaacatcccgacggagaaacaggccgaggatcccttccggcaggcgcagatcgtggagggcggggtccggtaccagcagacggtggtggtgcgctcctacgaggtcggccctgacagaacggccacactcgagaccatactgaatcttctccaggtacgcactactctatctatcttgtttagctaggctcatttctgacgttgagggcacataacatatgcatgcacgtacgcacgcaggagacagcattgaaccacgtgtggatgtcgggcctgcttggcgacggcttcggcgcgacgcacggcatgatcaagagcaacctcatctgggtcgtgtccaggatgcacgtccaagtcgatcactacccattatggggtgatgtgct

SEQ ID NO: 3822 - DNA, 449 bp, Triticum aestivum
  unsure at all n locations
  Clone ID: LIB103-043-Q1-E1-C1
cgggtcgacgcccgccggcttacagagtcccgatgccggtttatacacataccggcccggtctctactttgtcataccttacaatacaagacatgtactacatgacggtttatagctacatgccttaatctacctttgggccttgggccttcgagtctctgtagtaaactgctttattccttgtcttcatgggcttttaagtataaacaatccattatggggataacccggcttccttggccggtttacacctagtagtaatatccccaacagggtcctcgggcatccggcctatgtgacgtgggccggactgatgggctatgaagacacaagacagaagactctctcccgtgtccggataggactctcctttgcgtggatggcaagcttagcgtccagatatgaagattcctttctctgtaaccgactttgtacaancctaatcccct

SEQ ID NO: 3823 - DNA, 414 bp, Triticum aestivum
  Clone ID: LIB103-043-Q1-E1-C12
ctcgacgggctatggaagaagaaattgatgaaagagtgagctcattggatgaaaaagatgatgaggagagcgaagaacaaaagtaggaagagcggattagcaacccgtgcccaccttctaatgagagtaaccctccaactcatacattatttaattccccttcgtgcttaccgaaggatgattgctatgatgattgctatgatcccttgaatttgtttgaaatatccctttttgatgatgcttgctatgcttctggccaagatgccaatatgaattatgcttatggagatgaacttgctatagttccttatgttaaacatgaaattgttgctattgcacccatgcatgatagtcctattgtctttttgaattctccctactacactatatcggagaagtttgtgcttattaagg

SEQ ID NO: 3824 - DNA, 330 bp, Triticum aestivum
  Clone ID: LIB103-043-Q1-E1-C2
tcgacggggagtgtggatgagctctgggcggtgaccgatggcaatgtcgccccgttcccaggcacgttcaaggagtacaagaagatgctcacgacataaaccttgaaaaaggacggggcatacgggaaggtgctcacacagacatacagagactatatgtatgatatgtactccctggcattggaaactgatgtaatattatgcttgtggcctacctgaggtttgaatgtttgagcagaactatgctactacatacaattttgttccagcctgcctgacgatatgtatcgagcttgcgattttcttggacaaaaaaaatgtaaagaaaag

SEQ ID NO: 3825 - DNA, 111 bp, Triticum aestivum
  Clone ID: LIB103-043-Q1-E1-C4
caatttaggcaattaaccaaagctagttaaacgccttgtatccagccaaggacaaaggaaaatgcaacgggaataaaaaaaacaaccagtatcaaaaaaaaaaaacgggcg

SEQ ID NO: 3826 - DNA, 229 bp, Triticum aestivum
  Clone ID: LIB103-043-Q1-E1-C9
gtcgacggggctcccaaaccctagcgccggcgcctccacttctctgctctctcctctcatctcgcgcatggcccggcgaaagggaagcaatatgtacaccgccagtaagattatccagatggacaagggcgtcaacccctcctatttcaaggacaccgtctcgcaggctttctttgacctgcaaaatggcatccaggagctcaggagcgacctcagggacctgtacatc

SEQ ID NO: 3827 - DNA, 422 bp, Triticum aestivum
  Clone ID: LIB103-043-Q1-E1-D11
gtcgacttcttcaccccaggctgcggtggctgccgcgctctccaccccaaggtaggagttcttggccgaagccccctgttccgttccggcaatctgattctgaaactgcgacgtatactcaagcgaattcggttgttccgatgtgcagattgcgcagttcgctgagcggaatccggacgtgctgttcctgcaagtcaactacgagaagcacaagtccatgtgctacagcctccatgtccatgtcctccctttcttcaggttctacaggggagcccagggcagggtcagcagcttcagctgcacaaatgcaaccgtaagcctcactgattatgtttcttcttttgtccactacaaaaatatgttcttcagacacgtttaagatgaatgctgacatgcttgctgcaattcgttctgattacaga

SEQ ID NO: 3828 - DNA, 331 bp, Triticum aestivum
  Clone ID: LIB103-043-Q1-E1-D2
aacgtgaaaggcaccgtccacaagggcatgccgcacaagttctaccacggccgcaccggccgcgtctggaacgtcaccaagcgcgccatcggcgtcgagatcaacacgcaggtcggcaacaggatcatcacgaagaggatccatgtgcgtgtggagcacgtgcagccatccacgtgcgaaccagggtttctccacaaggaactccacaattgcaaaccgaaaggggggggcaaagcgccttgcgaaggcctcagcaccaaaaagcagcccacaagggcccaacctggggtcaagggggagggcgacaccatccagacagggacccccatcg

SEQ ID NO: 3829 - DNA, 416 bp, Triticum aestivum
  Clone ID: LIB103-043-Q1-E1-D3
cgggtcgacattaataaaatagtatttctttctaacattcggcgtaatagacttcgtttctcactattgtcctcaaaagtgttgcaaaatttaggttctttttcagctgcggaggattgatcccttttagaagaaggccttctttcttgcctgagcttggtaacgaaacttcattagtggttagcttccttcttcaacagtgggtctaattggggaagctcatattcctcaagatttaaggccaaagggaaatctggcaatggaggcggcggtgtgatgatccggctgactccggtatttgatgttctttcttgggtgttaaggtcctggttattctggagcttgcttaatgtctcttgtgggatcatgtccaagagatgtttggttgttccgaaaggagttgagatccttgatgt

SEQ ID NO: 3830 - DNA, 272 bp, Triticum aestivum
  Clone ID: LIB103-043-Q1-E1-D6
ggtgagaggcgccgtccacatcggcatgccgcacaagttctaccacggacgcaccggacgcgtctggaacgtcacgaagcgcgccatctgtttccagatcaacacgcaagtccgtaagatgattatcgcgttgaagatccatgttcgtctcgatcaccttcatccatccaggtgcatcgaagactttttccctcaagaccccactttccgtggtcgacgcgttgtgaccttcgacagtcacctggtctctatactattccgtcatcaaaagt

SEQ ID NO: 3831 - DNA, 410 bp, Triticum aestivum
  Clone ID: LIB103-043-Q1-E1-D7
tctgccttaaagaaacataatctgctgatgtatcaagtcccgaggcaagcaatgtacttgtacatgttaaaacaatcaagaaaagaagcagaagcttgcggagcacccgaggactgtgcgtgcgcgtggactggcggagtactacaacaagtttatcatcacgtcaagagaaaaggaaggagtgcctcacgttcggatcagctaccatatccgaattctactaaatgttggtacaagtccaacacaacaaatacagatcggatagctgcctaattatgtgatggtgcatgctgccaaagcaaccccgtgtactgatcgaacacatacctctagcaacagtacttgcatggtttccacagcacagcgggagaccaaaagtactgcttggctaataagtgtatcaaagaaac

SEQ ID NO: 3832 - DNA, 443 bp, Triticum aestivum
  Clone ID: LIB103-043-Q1-E1-D8
tcgacgggactcaatatgaatgcctccggcggtgtaccgggatggtgcaatgaatcaagagtgacatgtatgaaaaataatgcatggtagctttgccacaaatacgatgtcaactacatgatcatgcaatggcaatatgacagtaatttatgtcatgatgatgatgatggaagttgcatggcaatatatctcggaatggctatggaaatgccatgataggtaggtatggtggctgttttgaggaagatataaggaggtttatgtgtgatagagcatatcgtatcacggggtttggatgcaccggcgaagtttgcaccaactctcaaggtgagaaagggcaatgcacggtaccgaagaggctagcaaaggtggaaaggtgagagtgcgtataatccatggactcaacattagtcaaaagaactcatatacttattgcaaaaatt

SEQ ID NO: 3833 - DNA, 354 bp, Triticum aestivum
  Clone ID: LIB103-043-Q1-E1-E10
cggggaaacaggagaagaagtagaacgagaagaagtagaggagcgagaagaagtagaagtacaagaagtgcaagaagcagacgacgaagaagtagaagaagtggaagaagacgcagaacaaagaggaagaggaagaagacgaagaagaagaagaagaagaagaagaagacgaagacgaagaagacgaagacgcagaacgacgaagaagaagaagaagaagaacacgcagaagacgaagaagacgaagaagaagcacaagaagaacaacaatcacatgacgaaaagtccaggaacaagaagacgacgacgacgacgaagaagacgaacaagaacacgatgacgaagaggaagaag

SEQ ID NO: 3834 - DNA, 202 bp, Triticum aestivum
  Clone ID: LIB103-043-Q1-E1-E11
gtcgacgggctcattgatcttgggctaacctattttgccattacagttccaattggattcagaaaagttatgttagccaaccatcctcactgggagtaactacagcaagccaaattggacatcaatgcaatagagcaattcagttcaatgctcaacacaagttctgaatgtcatttcaccccagagtggcagcatcacccca

SEQ ID NO: 3835 - DNA, 408 bp, Triticum aestivum
  Clone ID: LIB103-043-Q1-E1-E7
gtcgacggggataatgaatgctaggctgtagtagctgatgccgacctcgacaactgtagatgacactgttgcgtctcatacatacacggttaccatacgttcttcagcagagtgcgttaggccagaggtctgctgtcactctcggtctgcgtgagcgcgctcgttatagtacagttaacccatggaatcgaggatgctgctcatgatacttggtaaacatcaggtacactctgagtatcatccgaaacccagttgcataccacagtcaatttagtgagtcggctgtgttcggtcgtagagcgatcacatccatatctggagatcgctcaagtggcatccttattaactgttgtactagagtgacttgggtttatgtgttgaagaacatgaacgatgtctttgaatgct

SEQ ID NO: 3836 - DNA, 240 bp, Triticum aestivum
  Clone ID: LIB103-043-Q1-E1-F11
ttttagcatttatagtacagtattgcataaacagtttcacctgatccctggttcgatgtgggttagtgttttccttactgatgatccaaaatgagacctttgggatacttaacggtgatgatagatttgatcttgctgaaacacagaaacttttgatccgagtgaaattaatttgcaggtgcatcagaaccgtgactacaatcgggccgactttttccatcggatgagcaaacaaatttc

SEQ ID NO: 3837 - DNA, 439 bp, Triticum aestivum
  unsure at all n locations
  Clone ID: LIB103-043-Q1-E1-F2
gggtcgacgggcggcgagtgctgatttgacgtggaggctgttttcaatgacccgagaagtcatcgtcggcgcggcggctgaacaggcggtcatgatgaaaccgcctagccggagagtttggctgacagccaaagctcccccaatagtagtaccatctttaaagacaagacaagacatccttccttctggcgatggcacaaaggaactctccatgaaagcaccaatgtcggtgtcaaaaccggcggatctcgggtagggggtcccgaactgtgcgtctaaggcggatggtaacaagaggtangggacacgatgttttacccaggttcgggccctcttgatggaggtaaaaccctacgtcttgcttgatttattattgatgatatgggtattacaagagttgatctaccacgagatcgaagaggctaaaccctagaagcta

SEQ ID NO: 3838 - DNA, 321 bp, Triticum aestivum
  unsure at all n locations
  Clone ID: LIB103-043-Q1-E1-F4
attcngggaatcatcactcaacatcgctatgtactcctagatggggaggtgggctatatctggcagagatgcagcgtctccgatgaatgcaatacgggcatacggtggacgaaacaactgcggtggacgcggcactacaccagccgttggggctgggcggcgctgtgcattgctgcctgtctagatctgtttcagattcagaaaagttgcccaatacgtgtctccttgcggtcccacccgtcagcaggcaacactcagacgaggactcggccccactcatcatcaattaacggtcaacggacggtcaagatgacaaacgcc

SEQ ID NO: 3839 - DNA, 390 bp, Triticum aestivum
  Clone ID: LIB103-043-Q1-E1-F7
attcgccggtcgacgggcttaacatgaaatctctttgcaaaagaagagatggaacaggccctggttgtacaaatgtatgtcaccattcttctgcaaatgcagaaacggaagggacttcaatggtgcgtagagctgttctgtaacaatctagttagccttacagtctaccgtgttgttgagaaattcttcactattgatttccattcaaatatcccttttgtaatccaactgtcatttcaactaccttactgaaactgcctgacattgtatattgccacaatctagaatgttcttttgcgggtgaaaaaaaaacaaaaaaaaaaacattaagcaaacaagaaaaaggtgtaaaacactacatcgaacgagatcgaaacatcaaagcacatt

SEQ ID NO: 3840 - DNA, 182 bp, Triticum aestivum
  Clone ID: LIB103-043-Q1-E1-F9
atcaccgataagtttacagtcaatacaatgtcctactcatgttcgatggctctcatctccgaataaaggggttcaatgggttaagatctatacgaactgacacatctattgccttcactggatgcaatatatttcatccaacgagctaaatagatgcttgatatgttcctctctgaaatgtc

SEQ ID NO: 3841 - DNA, 331 bp, Triticum aestivum
  Clone ID: LIB103-043-Q1-E1-G10
gggtccacgggttgactttaaaacgtgggcatgttcatgtcagagcgacactgcacgtctgagcagctgtcggcgtgacctcgatcatgatatgttacagtggatgattcttgcatgaggtcgatcttcgcacatctgtgcgtctatctttggcgttcgagctctaacttgctattcttgtatgtcactcaatgctgtcctgtgtcgttgtcgtgtgcatagtgtcggataggaggtcatggagagtattggaattccactggcatgtttgtgtcttggattgcagtgtcccagttgggttatgttgatggatccgaacggttcctaagtc

SEQ ID NO: 3842 - DNA, 294 bp, Triticum aestivum
  Clone ID: LIB103-043-Q1-E1-G11
catgccatatggtaattgttgcgtaataggaatacttgtgttgaagattgtgtttcccgtagcatgcacgtatggtgaaccgttatcaacttccttctcaacttcaaggaaataaagagtgtcttacttatcaagttgtccacccaagaaaagggcatgtcttccgaacaggctaaccccttaagggcatgcccagtagtactttgcttcaagggctaataaacttttgcaatgaatatgtgaattctttaacactaatgttgactccacggattaaacgcactctcgtgctcc

SEQ ID NO: 3843 - DNA, 254 bp, Triticum aestivum
  Clone ID: LIB103-043-Q1-E1-G12
actgctgagttcaacgaactgagatttgccaaacgttccttcgtgtgatctggccgattggccttaactgatggtctggccggttgaagggtttgcgttttgtggttgggttaaaaacctgtggtaagtttgaacctggttcgcaccctgggcaataagcatgttatacgggtttccgaaaatgcttgttgaatttgcggttgcaaagcgggcgctctaaagggtttcaaattaaataactcgggctcgcacgt

SEQ ID NO: 3844 - DNA, 422 bp, Triticum aestivum
  Clone ID: LIB103-043-Q1-E1-G3
gggtcgacgggtacggcggaagtgctagagataggagacagcagtacgagatagaaaggatgggcggagactctgtttcatgtgcgtttccattacgtctgggtagatgttctgtttcccgtgaaaatcgctggaaagttgcctttcccaacgaaagtgttacgctctttcctttgtcccgaacgcctccaaaagaaaatatccataggaaaggaaagttgtatgattcctgtgataaatccttcgtcgcgaatatggcctgagagacacagggctgggataccgcagatcgggagtggtaaggtcaaaggaaccgattgacagtggactcacgttcaggggtttttttccagcggaaaatcaacgtgggggagaacgctatcgggtgcccgaagggattaaccattcgggccacatttttt

SEQ ID NO: 3845 - DNA, 360 bp, Triticum aestivum
  Clone ID: LIB103-043-Q1-E1-G4
cgggtcgaccatttggttcaatttgatgaggaacctattccaaaatttgcgcgctgactctccgggctgttcagtttacgagtaacatcagctgcatccggagggcggacataagtcccgtgaaaatctgctctaaacgcgtcctcgagctcatcgcagcttcccatagtgttttctgggatgcttttaagccaatgcacgctggccctttgagcttgaggggtacgtatcttatggcgtcgacatcagctcctctggccatgtgtaaatgtactatataatcttctatccagactccaaagtccgttgttccagcataggtctctatgctcatggagttaaatcctgcagggaattcat

SEQ ID NO: 3846 - DNA, 285 bp, Triticum aestivum
  Clone ID: LIB103-043-Q1-E1-G7
gcctgccttccaggatttattagttgtctctcattatgatgttcccctttttgtgatcagaaacttgacaagttagttactgtgtgtagaagaacaacatcaccgtgggatctttgtagcgcttttgtagtccaatttttaccggaagggaactttatagtcgttaaacgagcaaaaaataaaaaaaaaatcgtgcacttgtctgtctgcaaaaaaaaaaaaaagtaaaggaggtttatccccaccaaaattcaagagttgggaaaaaccaatctgggtttccaa

SEQ ID NO: 3847 - DNA, 355 bp, Triticum aestivum
  Clone ID: LIB103-043-Q1-E1-G9
gggctacgggcagctgagagtctctgtcatggagcgtcacctggtggatcgatctgtcaagcgggcttctggagtaggcgcagctaatacatcctccagaagctatgctgaacttgaagttttcacttgtgagatggaagtcactgttgcctgatcgcatctcccgtactgggcacattaccgtgacatgccgtgtcctagcatatgaatgtggctttggcttggctctacgtgacgggagtacgtatttatctatgcatgtatgtatggttcgtagcatgtgttaagtggtaatactgtaacttaagctgggtgggtggtagtatgccatatccttctatttgtcagaattact

SEQ ID NO: 3848 - DNA, 119 bp, Triticum aestivum
  Clone ID: LIB103-043-Q1-E1-H12
cggtggaatcacactcaacctggatttggttgctggatatcgggggttgatacaataccaacaaagttttgaagctttgaaccccagggcatttgccgtcttgatcgatcccatccaaa

SEQ ID NO: 3849 - DNA, 435 bp, Triticum aestivum
  Clone ID: LIB103-043-Q1-E1-H7
ttcgccggtcgacggggaagacggacggcatggagggcggcgacaagaagggcaagatgaatgccaagaagagcgtggagacgtacaagatctacatcttcaaggtgctgaagcaggtgcaccccgacatcggcatctcctccaaggccatgtccatcatgaactccttcatcaacgacatcttcgagaagctcgccggcgaggccgccaagctggcgcggtacaacatgaagccaaccatcacgtcccgggagatccagacctccgtccgcctcgtcctccccggcgagctcgccaaacacgccgtctccgaaggcatcaaggctgtcaccaagttcacctcctcttaagctgttcgtcttcctgtgtctcgtagttagctgttcgggtgtgtatgttggcgtgttaacctgtaagaatcccaacgcgaatgtt

SEQ ID NO: 3850 - DNA, 419 bp, Triticum aestivum
  unsure at all n locations
  Clone ID: LIB103-043-Q1-E1-H8
gtcgacggggcagctccatggaggtggaggacggggcggctgatctggcgggacgacgagatcgacgacggatcctcatccggtgcggtggatgagggacggcgagctattgcggtggacgacgtcgtcggggaagagtctccggctgggcggcagtcgggaggccaacggaggagcgtggggtttcgcgggttttggcggcctcggtttatgaatggggaggcgaaggggaaggtaggggaccatggctcagggacgtgcgtgtccgaaatgtanggtaagttaccagagtacccccaccggttttgacaccgtgatgtcgaaccggcatttccggctgaggggtaaaagggggatttcgcatgtctgggccgccggaccgatttcggatgacgagggagttttcgcgcgcgtccaaa

SEQ ID NO: 3851 - DNA, 284 bp, Triticum aestivum
  Clone ID: LIB103-043-Q1-E1-H9
tcgacaggcacatgatagggacttactagagtatactatgtgcttcacttaaatccttggggctagagatgttttgctcgaatgattcacgtatggctatacgatcatggaggtggtctgattatgaagtaattattgatcgcccaagctacacgtagatgactttgaaaatcttattgaacatcctagcaatctatatccttaggggcatggttataagaagattgccacacaggctaagtatcttttgcaatatcttagtaagttaattgagagcaatgttc

SEQ ID NO: 3852 - DNA, 434 bp, Triticum aestivum
  unsure at all n locations
  Clone ID: LIB103-044-Q1-E1-A10
tacacctaccgtggccgtgatattagatacatggcgaccgcagaaatggggaggaagccgaacaaaaagaggtgcgcaggcgtaaggtctcggagctgacccacgatctcctcgggcccgagcctcctccccgccacaaccacggtggctgcggccattggtatggtaatcatggctaagaagttgtctacgaccagcttgtanacacatttgaggtgcttgcaaattcctgatgaactcatggtgtcgaagccaacatgtgtttctatgcgtgtgtatgcgaggagagaccggtcttacatataacaattgattttattgctaccaactaccaactaactaattgtacaaatggaatatggcacatgttgtagcattatgcgatcacatgtntttttctctaatatgtacactcaactaataaccatatagtg

SEQ ID NO: 3853 - DNA, 466 bp, Triticum aestivum
  unsure at all n locations
  Clone ID: LIB103-044-Q1-E1-A12
ggtccaaactatccgggtcgaccggcaattaagtttcaacattaaccccaacaaaattaattaaagtaacatgatgagattcacatgataatccaagtactagatactcaagttgtccataaccggggacacggctaaccatgattagtttatacactttgtagtggtttgcgcacttttccccacaagactcgatctcctccgttgggattctcgcattacaggatgtttgagaaacggatgaccgagacatagtctttcagaagtgtttgcaccttacgatcgggtagacagtaccacctacaacccctacatctgctagtctaccactgtaagagttcacacaacttaatcaactatgctagagcccataatagcttgtggctgcacacggaagtttctagcgtgaataatctcatgatccgtttgagcctgngtggcggtacataaaanaaacaggcaatcg

SEQ ID NO: 3854 - DNA, 330 bp, Triticum aestivum
  Clone ID: LIB103-044-Q1-E1-A3
gtcgacgggaggattatgcgcattttgtctatgaaagtaactgcagtcctaacgaagatatgggtgagatcttcaacgactcagatgatgactaggatggtgtctctactaccgttctgcggctcgcatctcatgcatcacggtggtcgagcttggaatcattcatctggtatacgtggcatctcaattctggacacatcgtgacttgcatcgtctagggggtcacggctgatgcgacctctcactgcatccgccatttgaaacagcgcaccggcctatggcgccacccgctgcactcccacttgtaactgcctcctccccgcattcaaa

SEQ ID NO: 3855 - DNA, 396 bp, Triticum aestivum
  Clone ID: LIB103-044-Q1-E1-A5
ggccgacgggaggatgctgtcaagaagatattccaaagagccttgcagtattgtgatcccaaaaaggtgcacttggctcttcttggaatgtacgagaggactaaacagaatgaactggcagatgaactttttgatagaatgaccaaaagattcaaaacttcgtgcaagatctggttgcgccgcattcagttttctctcactcaaggcaaggatgttgaatacatcaaatctgtcgtaaaccgtgcgcttcttagtctgccacaaagcaagcgtataaagtttctcacgcagactgctatcctggagttcaagtgtggggtggctgaggaagggagatccagatttgagctgatcctaagggagtatccgaaaagaacagatatttggagtgtttac

SEQ ID NO: 3856 - DNA, 305 bp, Triticum aestivum
  Clone ID: LIB103-044-Q1-E1-A7
ggtaatgagccagcccagtggcagccagcttgatcagtatcacccagtgtcacagtagacgaatgggcttgtagcaatctaacaatgtggtctacaaagatggtcacatggcatcatattaactgctgaactgttctagttgtttatgaatcttgttactctagttttctatgggattagctgatggactgattaacatgctactagcaatgcaactaggcagtgtttgactaaatctaatgcttatcattttactgcgttcaaaaaaaaaaacaaaaaaaaaaaaaaaaaactacaactcaaaa

SEQ ID NO: 3857 - DNA, 170 bp, Triticum aestivum
  Clone ID: LIB103-044-Q1-E1-B10
ctggtggatgcgtgcctgctggttgaagtcatcaagcattccgcctgtattgaaagtgtccatcgggcccatgcccgtgtaaaggtgcactggggcaagatggatgcccataagctcgtgacagacccaccaccatatggcaatgagcatcgcactcccgagatgtatta

SEQ ID NO: 3858 - DNA, 344 bp, Triticum aestivum
  Clone ID: LIB103-044-Q1-E1-B12
gggtcgacgggcagaagaagaagagtacggtgcccttctgcggctgtgtgcgccccaaaacagtgactgagtcttgattcggagtccgcagcaagcaatgtctttagtatctcttctgtaatgggttgcatgataatgttaacaaggagctcatgcattcggagttttgtccttgttcagaaatgccccctagtttaactagttaatcctactgatacttttatgaatcgaagcattttgtaattccgttgcccttcgctgtttctctgtgtctgcaatgaagatatatgagaatgcttctttcagggatataattttcaaaaaacaaaacattaaacacaaga

SEQ ID NO: 3859 - DNA, 374 bp, Triticum aestivum
  Clone ID: LIB103-044-Q1-E1-B4
cggtcaacattccgggtcgagggggttgttatgagcccaacgttagtgttaaaaatcactcaaccccaacggggaaaccaaccgcaacgcaaccttcaaaacaatgaagggggaacaatccccaatggcccaacaaaatccggcctttaattaaccaacgtccaagttaaaacaatcaaactcaaagttcaacctgcaagctcctaagttaataaccaaacaatgttttggttcaaatgccttggcctaattcaaacctttgattccacgattaaaaaatggagttaatccttggtaatttttaatggaaaaacgctcggatgggtgaagccttttcttaagggcatgaaaaatgttccttaaacctttggtcc

SEQ ID NO: 3860 - DNA, 391 bp, Triticum aestivum
  Clone ID: LIB103-044-Q1-E1-B6
attcgccggccgacggggggcataacgcacgaaggctccagaattaagcatccttgtctatcccagcatggtcgtcacccatggagggcttgcctcactcgggtagatgttcaccaagtatgcaagtctccggtgcacgttacagcacttcttcggttcaactctacatattgtcggaggctcccaagctacaccgaacaaatctagaagacaccactctccaaaaagtaatacattgtgtgttgatgatgaactcctcgatcttgtgcttcaaatgataatctccccaccaatcaactcagtttcacagatttggctatggtggaagaaagatttgtgtggaaagcaacttggggaatgctacaaatcaatgttcaaatggtaagaatgg

SEQ ID NO: 3861 - DNA, 373 bp, Triticum aestivum
  Clone ID: LIB103-044-Q1-E1-B9
acgaaggattcaaaatcagcatggaaggttcttatcatggataagtttacggtcaagataatgtcctactcatgtaagatggcagacatcacagaagaaggggtttcattggttgaagatctatacaaacggagacagccattgccttcactggatgctatatatttcatccaaccaactaaagaaaatgttgttatgttcctctctgacatgtcaggaagaagcccgttatacaagaaggcgtatgtgtttttcagtcctcccatacagaaaggcttagttgctcaaataaaaagggattcaagtatattacctcgtattggtgcacttagtgagatgaatttggagtacttccctattgattcccagggtt

SEQ ID NO: 3862 - DNA, 392 bp, Triticum aestivum
  Clone ID: LIB103-044-Q1-E1-C10
acactggctgacacagtagcacgcactcttgcagaggagaacggacgggatgtacctgttgtcaagccactgactgttttgggcccgatgagtcaacaaaggctcaatgctaacatgggtatgtttcgtcacctaccatatcggctgcactgacgactacaccgacttcatcattgagccaatccacgtcgaacacgtcacagttaacccatatcacactgttcaagatttcgtcgttgtccaggaggcaactctgattcgcacacatctctaacttgcaacgatgtcacatctaaagtcacctagctctattctgatgacaacgtctcaaaattctcctctgacaagtaacctttgctcttaagagcatcagcagttcttcaaatacttaa

SEQ ID NO: 3863 - DNA, 443 bp, Triticum aestivum
  Clone ID: LIB103-044-Q1-E1-C12
gggtcgacggggagaatccctcggtgccagtggcaggcgaatccctcggcggcggcgaaggcgacgacgacgcaggttattcttcttcagcgcgcaagatcgatctagtcctcgtctgaaatgggggacgagagggtcgaggccatggagattgatgggcagcagcggcaagaagtcgccgccgctgtgccggacggcttcaacgccgattacctccgaatctactacggaaagctcttcccatatggtgatttcttcaagtggcttgcatacggaaatgatgcaaagcatcctggatgtgatcagtcatacattgggcgtcgggagctttcgtttacactggagaatgacatctatctgcggtttcagtcctttgatagtgcagctgaactggagacttctatcaaggagaagtgccctttcaagattgatattggacctgt

SEQ ID NO: 3864 - DNA, 378 bp, Triticum aestivum
  Clone ID: LIB103-044-Q1-E1-C2
tgacggggtagaaagacgaattctaaccttgacggagggagagaaatacacgaagtgcgtgtgtgtgattccgatgcccacagggaaatgagatatgtatgcatgtgagagagattgcacaattcattcacgtatcactatctagcgatcgtggacgtgcatcgcttgaacataaatcaatatctactttgtatcatgggcaaaggtacaatatcgattcaatgctataaagattggacactcacatatcacatttttttctatttaaataaacctttttagttgtgcatgccaaagttacagtgatgtttcttcaaacaaccaatgtagctatcatgtacatgcaccattgttactcttgcattcaaaatcaatagt

SEQ ID NO: 3865 - DNA, 133 bp, Triticum aestivum
  Clone ID: LIB103-044-Q1-E1-C4
gtctgttaataacagggtgcaagagtgctataaaatgtgagctcctgttagtcagcagattagtatcatatgtcatttgtgtcacatttgatgcgtccatgatccacaactggggcgctagacgtgtatgggt

SEQ ID NO: 3866 - DNA, 448 bp, Triticum aestivum
  unsure at all n locations
  Clone ID: LIB103-044-Q1-E1-D10
gggtcgacgggcaagccagacttgatgaacaggctgtgaacgatgactcagaggacaacaattacatgccgctctccgaggatgaggtgagcctcggcgatgaagaatttatcgtgcctgaggatcccgtanagcaggagcgttttaagcgccggcttatagccacgacaaagagcctgaagaagaagcagcagcagcttcaagctaatcaagacctgctcactgatagatggattgaagtcctgtcagccgaagaatgccgacttgaacgcccaaccaaaagttacccgaagtgcaaattgctacctcaattcgatgacgaagcgctggagccagcactacaagtgcataatgcggctcaccgaccaccacgtggccgagataaaatgacaattctgcccgaacaccaaccggcactgcgtcaccgaacaaattgaaatacaacaac

SEQ ID NO: 3867 - DNA, 433 bp, Triticum aestivum
  Clone ID: LIB103-044-Q1-E1-D11
gggtcgacgggttctaagtagggagtttgttgtggttaacaagcatcttctccatgacttgactgagatgggtatctggacacctgctctgaaaaataagataatttatgaagatggttctattcagaagatggaagaaatccctgatgatcttaaagcaatttacaagactgtttgggagattaagcagaaaactctggttgacatggctgttgatcgtggatgctacatcgaccagagccagagccttaatgtccacatggatcaaccaaactttgcaaagctaacttcgttgcatttccatgcttggtccaagggcctgaaaactgggatgtactacttgagaacaagggcagctgctgatgcaatcaagtttactgtggatactggctttctgaacgtcaatggggaagctcatggcactaatgggaac

SEQ ID NO: 3868 - DNA, 400 bp, Triticum aestivum
  unsure at all n locations
  Clone ID: LIB103-044-Q1-E1-D3
ccgggtcgacgggggangaaaaagaggaggacatggcggcggcgcggggacaaaaggcgctggcgacgctggtgaggtcgctgcggagcgattccatctccaactccaatgctcccaggctcaggcacctcccgtctctcacgaggaccttctcgctctacgaccagatcaacctcatcgacaacgtccccgaagaccagctccgcttccaaacttacgatgacactggattcaagattaacaatgtaaagtatgaagggagcttgctgatagtagaaaacaagatactgacctggacacccaaaacatttgcggatataactgctgaaagtttatcaatcttcaaaattgtgcacccaatcccagagattctgaatcttggttgccggaaatacgtcca

SEQ ID NO: 3869 - DNA, 394 bp, Triticum aestivum
  Clone ID: LIB103-044-Q1-E1-D7
aattcgccggtcgacgggacaacatcaacaacaagctgcagcttgtcatgaagagcggcaagtacacgctcggctacaagaccgtcctcaggaccctcaggaactccaaggcaaagcttgtgatccttgctaacaactgccctccgctccgcaagtctgagattgagtactatgctatgttggcgaagatcactgtccaccactaccatggaaacaatgttgatttgggaactgcgtgtggtaaatacttccgagtctgctgcctgagtatcatcgaccctggcgattccgacatcatcaacgcaacaccagctggccagtacacctgtgtatgccattttcagtgtctcgtctgatgcgtcatcgaaggtggttctagagtgtagttcctgct

SEQ ID NO: 3870 - DNA, 450 bp, Triticum aestivum
  Clone ID: LIB103-044-Q1-E1-D9
gggtcgacgcggaaccaatagtatttctgatcttcgctttttgttcctatttagtaatagataattcatctatcttaggtttagatgtggttttatgcgtttaattagtgtttgtggcaaatacaccctttgggaagacatgggtgaagtctttgcaatcttgctgtgcaaaacatgaaacttttgtgctcacgagatgagatgccattttttactggagagtgattttacgttgattctgtttgtgaatgaacatcacactaatttctcacgtccgactatttatcgacagacatgctggagtttcactctgtattcaatgtcttccgcaggtgtatcgggaagggcaatgtatccagagtgacatgtatgagtaatgatgacccgtggctttgccacaaatacggtgtcaactacgtgatcatgcaacgcagtatgacaatgatgatg

SEQ ID NO: 3871 - DNA, 241 bp, Triticum aestivum
  unsure at all n locations
  Clone ID: LIB103-044-Q1-E1-E10
gacgtcggcatctcccccaaagccatgtccatcatgaactccttcatcaacgacatcttcgagaagctcgccggcgagtccgccaagctggcgcgatacaacaagaagcccaccatcacgtcccgggagatccagacctccgtccgcctcgtcctccccggcgagctcgccaagcacgccgtctccganggcaccaangccgtcaccaagttcacatcatcatangtttcgtcgtctgttt

SEQ ID NO: 3872 - DNA, 441 bp, Triticum aestivum
  unsure at all n locations
  Clone ID: LIB103-044-Q1-E1-E11
gggtcgacggggagccccggcatccgaacacggggggacagaagaaatttcctccccaggtgaaaacggtcaatatgatatacgccacccacattcccaaacgggaacgaaagcgagcactatgggacgtctatgcgatggagccagtcgccccaaagttcaacccatggtcggcctgtccgatcacttttgattgtagggatcacccgaccagcatccgtcatggcggttcagccgcattggtcctagacccaatcattgacggatttcacctcacgcgagtccttatggacagcagcagcagcctgaacctgctttatcaagacacagtgtgcaaaatgggcatcgacccttcaaggatcaagcccaccanaaccaccttcaaaggtgtaattccaggagtanaggccattgcacgggctccataacactggaagtggt

SEQ ID NO: 3873 - DNA, 421 bp, Triticum aestivum
  unsure at all n locations
  Clone ID: LIB103-044-Q1-E1-E3
cggtctagatccgggcgacggcaaagcacaactcctacatgaccactagcatctccagctatctcatgccagctgctgcagtttcaaaggagaatgagagtatgaaacggcgtgcgccaaagtctatgggatccgctcgcaagaagcagcctgccatcgctaacccagcagcggtaggaggaaagggtgatgtcggggatgcaatggacttgtcacagtangtggtttgtttggtggtttgtttgggtacgagtgccctttgagatgactaccatcatggattctttgctctcacaagtttcaaaccatgccatccaccatcgcacgaagtagtatgaatcagaattttatttactaagtttatgatggaggttaatttaggagatgattatttaaagttagagctccctccaggtgcccg

SEQ ID NO: 3874 - DNA, 410 bp, Triticum aestivum
  Clone ID: LIB103-044-Q1-E1-E6
aattcgccggccgacggggaagtaaattgagactgaagtctctctgcaaaaacataaaataggcaaacgtgagtacaaatgtacccagcaagacttacatcagaactaactacatatgcatcattatcaacaaggggatggtggggtttaactgcagcaagccagctttgactcggtggctatcctgatctacgactgcaagtaactcttttgaggtggcgcacacgagtccacatattcaccaaccaatacaccactatggatccactcccgtctccctacgagagcgccatccatagcactcacgcttatcttgcgcattttaaagtatccactttcacttgtctatgaactgtataggcaacccagacgtccttttccgcggacacggctattccaatagatgatgt

SEQ ID NO: 3875 - DNA, 383 bp, Triticum aestivum
  Clone ID: LIB103-044-Q1-E1-E8
attcgcgggccgacggggatgaaagaatccattgtgagaagagcccttgtgatcatgcaccagagggacgaagtggagtacaagagggagcgccatgtgattgtccgcaaggcttgagctgaactgaaccgatggagctaccatggaaccctctggccatctgatgtgtgtgtataagtagtgctgacactgcagcccgtttcctgaggaaatttgttgggtcgttgaaattgagttgtagttgtactactttgagctgtagctgtagccctaaatcatattgtgtcgaactgaagatgtaccccagtaagttcattcatgaatgcaacattttggcgttctgcagctgagcagagtcaatgcctaggaaaacaatacaaaat

SEQ ID NO: 3876 - DNA, 431 bp, Triticum aestivum
  Clone ID: LIB103-044-Q1-E1-F10
ggtcgacggactcagcgggaaggaaagcaacaagctgctgggggtcaggatgacacagattggttcaacgtcggctgcttcgttgtgccagtgccacacttatgctggtacatgcacgtacgaccatggcgtctgcgcgacttcatcatcttcacccgaactggcccatcctcgccatttccagcgggataagcgagttgtatgaatatcgagaggtgagctggctctactcattgatatgaaattagttgggcataacttcctttttgcaacaggaaatgaaaatgttcccatgagattgattgatcgtgccccgcttttggatgctgccgttgcttttgaaccaatgtcatctatgtcatcggtcatgtaacctctaaggcagctgataatatatatgatgtgactgtcttttcatctaaagatgacct

SEQ ID NO: 3877 - DNA, 277 bp, Triticum aestivum
  Clone ID: LIB103-044-Q1-E1-F12
tcgacgggcattgggtttgcgacgccttgcatcgtatcggtatacgcatcttcattctgtatcttccacgaggtagctgatgtttacacctaccaccgtaccttctgcaatgtcacttccagtacgctctatctcaccgaacacctcctcatgcagttacgatcgggatgtttcttagcctacgcagacacattactgcttcctatcatctcatctcctaatatttgtccttctcttcacttttgtctccctagctagctctgtacgcacgcctatc

SEQ ID NO: 3878 - DNA, 413 bp, Triticum aestivum
  Clone ID: LIB103-044-Q1-E1-F5
aattcgccggccgacggggcacacaacgaatatatcatctcttatgactctgatgatctatatccaggaagtaattcaggtgttggaaagctgagatcggacttcctggggacaaagttcgtcatgtacgacaaccagaaaccatacgacggcgccaagtccttgaagagccgatcaagtcgccgttttgcaaccaaacaaatcagcccacacgtttcaggcgacaatcttgaagttggacaggtgtcatacaggttcaacttcctcaaatcaagagggccaagaagaatgcactgcagtatccagtgccccgtaggccagggcaccgcatccgatccatccaaggagaagccaccgagcacctccagctccttgtctctaaaaaacaaagcgcctcgatggcacgaccacct

SEQ ID NO: 3879 - DNA, 408 bp, Triticum aestivum
  Clone ID: LIB103-044-Q1-E1-F6
aattcgccggccgacgaccaccggcctcgaagacggcgcgtggcggcgagctcgtactggagcaggggagtgagagcaggggagtgagcgagcaatgagagagtgagcgagtgtgtgatctcgaccgaccgagcgggtatatttaccccacttccgaccgggccggtcggctaacggccgtgaactgccgcgccgtgagcgcgcgtggccacgttggctgacagatgggcccaggccgtcagaaaaacggttaaatcgctagtcaccacgggtttggatttttttgaaacagcggaccgcgcgtttggtagctttctgagaaaattaaaaaagtgatagttttttggaaccctaacctgtaaactagtagctttatgctatttactccaaataaccaataacaaaaag

SEQ ID NO: 3880 - DNA, 278 bp, Triticum aestivum
  Clone ID: LIB103-044-Q1-E1-F7
gacggggatcagtagtcgataacggagcgtggaggaccagctcgtactggagcaggggagtgagagcaggggagtgatcgagcattgagagagtgagcgagtgtgtgatctcgaccgaccgagcgggtatatttactccacttccgaccgggctggtcggctaatggccgttaagtgcagcgcccttagcgcgcgtcggcagcttgtctcggagatcggcccacgccgtcataaaaacggtcaactctcccctcaccaccgctttgaatttttttgaa

SEQ ID NO: 3881 - DNA, 396 bp, Triticum aestivum
  Clone ID: LIB103-044-Q1-E1-F8
gtcgactgtcttgcatatcgcgctgtcggtcgggtctccttcgacgtgagctgcggtgcatcacccccggcgtcgagggtacacgcgacgtgttcgtgtgtcaacacatatcatattcagtgatctacaagttttatgtaggattttatgactaaccatgtgaatgaccagttcctgtcatctctctaaatagatataagtgaagcaagatagtttaatcctttctacaaaagatatgcccacgctctaacaaatataagtgaagcaaaatagcattctacaaatggcggttttttatgtgaagagaaacaggcaatccaaacttcaaaagatataagtgaagcacatgaagcattctataaagccatactcaaaagatataagtgaactgttatg

SEQ ID NO: 3882 - DNA, 314 bp, Triticum aestivum
  Clone ID: LIB103-044-Q1-E1-F9
gggtcgactaggaaggattcaaaatcagcatggaaggttcttatcatggataagtttacggtcaagataatgtcctactcatgtaagatggcagacatcacagaagaaggggtttcattggttgaagatctatacaaacggagacagccattgccttcactggatgctatatatttcatccaaccaactaaagaaaatgttgttaagttcctctccgacatgtcaggaagaaacccgttatacaagaaggcgtatgtgtttttcaatcctcccatacagaaaggcttaattgcccaaataaaaagggattcaag

SEQ ID NO: 3883 - DNA, 386 bp, Triticum aestivum
  Clone ID: LIB103-044-Q1-E1-G10
cgggtcgacaatcaaccaagattgccaaaggtgggcagccgcactcaaggcggttgacaagttgaacccaagtggcactaatgatagagatagggtaagtgccatttctttcatgattcttccacgctcatcatgcttcttcttggtgtttctagtgctaacttgttttcttgtttgtagctcaatattgcacaaaacttgttccaaggagatgagaagaagaccaagaaagggagaccatttaccttgcctcattgctatgcagaattgaaggatgatgagaaatggaagcctcgtgatgctatcgatgctgatgatgatgagagatttggatgatgatgaggatgaggcatcaagtgatgacggcaagagacgccctacacaaa

SEQ ID NO: 3884 - DNA, 203 bp, Triticum aestivum
  Clone ID: LIB103-044-Q1-E1-G11
tgcattatcatgtgaatcatgttggcacaatgggaaactgacatctgtagttcaaccattgcttcagttgctcggcaagacaacaatcatccaattccctgctaatttccttcagcattaatgcagtttcagctatcaagtcatccagccaagaagaaggcatagcaatcgatcttgcagaatcactccaacactgcttcctg

SEQ ID NO: 3885 - DNA, 391 bp, Triticum aestivum
  unsure at all n locations
  Clone ID: LIB103-044-Q1-E1-G2
ccgggtcgacggggcacaaacctgcggtccgaaaaggtcaaggacaaaatcgtcctcaacggcaacgacatcgacctcgtctcccgctcggcggccctcatcaaccagaaatgccatgtcaagaacaaggatatcaggaatttcttggacggcatctacttcaccgacaagggcgccatcaaggaggagtanagacccggaaaccgtcccgcccaccagaagccgtgtttctgcctgccgtgtntgtttcatcgtgtttgtgtctgtctgtcgtcgtcgtcttcgtgattttgaactttctctagactgaattttgtancggagttaaatttttaaggatgtgccgtggaacatgctatctttaatgttatcctgcatatcgtcgccgccg

SEQ ID NO: 3886 - DNA, 388 bp, Triticum aestivum
  Clone ID: LIB103-044-Q1-E1-G4
ccgggtcgaacggggcaacatataactgctggccaagctgatacacaccaggatgttcatgaccgaccacttttcaacaacaggcttttacaatatgatccggctgtagctgaacgtgtagtaaaccctcccaagcaagctgtctctgtatttgcagacacacagagcagtgaaatcaaagatcggatatttgatgaatttaacagcctatcagttgtatatcagaagccctcttacatgtttaccgacaaggaacatcgtggaactttcgagtactcagaagatcttgcgaacttaactgttggggcagaggctccagaaaccgtcatttctgcccaaagataccaagaaagcgatagtgatcttctgctaagtacttcagataaag

SEQ ID NO: 3887 - DNA, 191 bp, Triticum aestivum
  Clone ID: LIB103-044-Q1-E1-H10
ttgctccgtgagatctgacagattggcgtaatttgcatccagtctgttcgtcagaccgatggtcgacgtttgggtcaaaacctgtagtagggttagttcatcccatccgaactagtctgagccttgcataatcggttctgtatttgctttgttgaatttgcggttgcatcgtcgtgttcagttgctggtct

SEQ ID NO: 3888 - DNA, 377 bp, Triticum aestivum
  Clone ID: LIB103-044-Q1-E1-H2
ccggggtcacccacaagataatccaaggacgccaaaaagtcaaagcttggggatgccccggaaggcatcccctctttcgttcacttccatcggtaatttacttggagctatatttttattcaccaacatgatatgtgttttgcttggagcgtcttgtattatttgtgtctttgtgttttagtaagacacaatcatccttgctgtacacaccttttgagagagccatacatgaattaaaatttgatagaatactctatgtgcttcacttatatcttttgagctatgtagttttgctctatgtgcttcacttatatcttttgagctatgtatttttgctctatgtgcttcacttatatcttttgagctacgtaattttg

SEQ ID NO: 3889 - DNA, 353 bp, Triticum aestivum
  Clone ID: LIB103-044-Q1-E1-H4
accggcagccggctccacagaagtccgccgccaagggaagaacaagggcaagaagaaaggcaacaaaggcaacaagaaccttgaacacttcaagattcacaacctccaagggcctaaacatgtgcaaccagacgtgggcatctcctccaaggccatgtccatcatgaactccttcatcaacgacatcttcgagaagctcgccggggagtcggccaagctcgcccgccacaacaagaagcccaccatcacgtcccgggagatccagacctctgtgcgcctcgtcctccccggggagctcgccaagcacgccgtctccgaaggcaccaaggccgtcaccaagttcacctcctccc

SEQ ID NO: 3890 - DNA, 449 bp, Triticum aestivum
  Clone ID: LIB103-044-Q1-E1-H6
aattcgccggccgacgggccacaaaaacgatgtcaactacatgatcatgcaaagagcaatatgtcaatgatggagtgtgtcataataaacggaatggtggaaagttgcatggcaatatatctcggaatggctatggaaatgccataataggtaggtatggtggctgttttgagcaaggtaaataatgggttcaagatatcggtgaaagttgcgcggcataatagaggctagcaaagtggaagggtaagtgtgcgtatatccatggactcacattagtcataaagaactcatatacttattgcaaaaatttacttagccctcgaagcaaagtactactacgcatgcccctagagggatagattggtaggaaaagaccatcgctcgtccccgactggcaatcaatagggaaaacattcaaaagagcacctcatgcaacaaatttgtcacac

SEQ ID NO: 3891 - DNA, 354 bp, Triticum aestivum
  Clone ID: LIB103-044-Q1-E1-H7
gccgcggcaagggaggaaaggggctcggcaagggcggcgccaagcgccaccggaaggtcctccgcgacaacatccagggcatcaccaagccggcgatccgtcgtctggctcgcaggggcggcgtgaagcgcatctcggggctcatctacgaggagacccgcggcgtgctcaagatcttcctcgagaacgtcatccgcgacgccgtcacctacaccgagcacgcccgccgcaagaccgtcaccgccatggacgtcgtctacgcactcaagcgccagggacgcaccctctacggattcggaggctaggccaccaccatcgccagattagagtgtctagggttcgtggtcgttgatg

SEQ ID NO: 3892 - DNA, 374 bp, Triticum aestivum
  Clone ID: LIB103-044-Q1-E1-H8
gtgcattatgtgatttgggtgctagtgtttccacgattccgaaaactttatgtgatattctaggtttccatgatcttgatgattgctctttaaatttgcaccttgcggattccaccattaaaaagtcaatgggaaggatcaatgatgttctcattgttgcaaatagaaatttggtgcccgtagattttatcgttcttggtatagattgcaatctttcttgccctattattcttggtagacctttccttagaacgattggcgcaattattgatatgaaggaagggaatattagattccaatttccattaaagaaaggcatggagcactttccaagaaagaaagtcaaattaccttatgaatctatcctgcgggct

SEQ ID NO: 3893 - DNA, 412 bp, Triticum aestivum
  Clone ID: LIB103-045-Q1-E1-A11
ggccgagagggaacaacacaaggcggagaagcgggcgccggcgaccaaggaggccggcggcgaggggaagacgaggggcaggaagaagggcagcaaggccaagaagggcgtggagacgtacaagatctacatcttcaaggtgctcaagcaggtgcacccggacatcggcatctcctccaaggccatgtccatcatgaactccttcatcaacgacatcttcgagaagctcgccggggagtccgccaagctcgcccgctacaacaagaagcccaccatcacgtcccgggagatccagacctccgtccgcctcgtcctccccggcgagctcgccaagcacgccgtctctgagggcaccaaggccgtcaccaagttcacctcatcctaggctagtctgccgtgtccgttaactgat

SEQ ID NO: 3894 - DNA, 363 bp, Triticum aestivum
  Clone ID: LIB103-045-Q1-E1-A3
acgtattaggcaatttggctaggaagtggtggagtaagtaacatacttgtatacgtagtatgcatcgaaggtggatacggtgtccgcggtggtggtggtaaccgatgagcatggcatccatatagaacattagagcccttatccaccggtgttcctcggaagggagaagcctcaccccctggaattctacctggccatgtcttgcctctcgtatttgtattctctgcgagctgtgaacagaatcttaactgaagtttacaggcagttttctagttgcttgtttcaatttccgcatgtgtaatggtcgatggaatgtacgggaattgtttgctaaaaaaaaaaatttaaaaaaatagaataata

SEQ ID NO: 3895 - DNA, 397 bp, Triticum aestivum
  Clone ID: LIB103-045-Q1-E1-A4
cgggccgaccggggtaacaaatcgaagagtgggtctctctctcccggcggcgcaggcgtttctctccttctcctccggcggcggcaaggcattttggcatcttgagcccaacagctagcagatggcaggcggcagggttgcacatgcgaccctcaaggggccgagcgtggtgaaggagatcttcattggactcacccttgggctggttgctggtggtatgtggaagatgcatcactggaacgagcagaggaagacccgatccttctatgacatgctcgagaaggggcagatcagcgtcgttgtcgaggagtagttctgaagtgctgaaccagaagttctacatctcgaagtcttttgtcattttggttttgccagtaatttctgaaactctctggag

SEQ ID NO: 3896 - DNA, 429 bp, Triticum aestivum
  Clone ID: LIB103-045-Q1-E1-A5
cgtattaggcactttgggtccaatgagtggatgacatctgtcccaatggtgagccgacacgtgtttcctccaaccaatgatgattttacacgtggaaaatccccattggtcggggttgttaacgggttatcggatccaaaaccggacccgatagcttaacggtgttccgttacggtggatgacacgtgtcggtcacccttgacgaaagcacttctgtgacgcgtgatatatcatcatggaagtggacacttctgtgatgataattttggtaatgtcatggaacacttctacgacagcacaggtatgactatcttgattctgtcataaatttgtcatggatgtacatgcatgacagaaaatgtgacctactgtgacaaacacatatcaacaccgaagtgtaattttttgaatgatgtttgcaatgggggt

SEQ ID NO: 3897 - DNA, 401 bp, Triticum aestivum
  Clone ID: LIB103-045-Q1-E1-A9
cgggtctataaatcttcacctctaaagccagctgtttggaagttctgataaatatgtctaaggcagaatctttgagggcaatttaggaatacattggctattgctttaagtagaccctgtgaaagtaaactaatgtttgaatatgatgccagaagacactatttgtaagtactaagcatgttctaatttgcactatttgtaagtactaagcatgttctaatttgcactatttgtaagtaccaagcatgttctaatttgcactatttgtaagtactaagcatgttctaatttgcactatttgtaagtaatatggtgtatgagttaccttttgtctatcagatatgatagcgtagtagccatgcttccctgactcaccaccaagagcatacttcagttgtgtt

SEQ ID NO: 3898 - DNA, 387 bp, Triticum aestivum
  unsure at all n locations
  Clone ID: LIB103-045-Q1-E1-B2
cgggtcgaccggtactgctatacgttagctgtagcgccggtccccacgctactgagaggcccaaaacccgcgctgctgctaggcttttccctagtagtgcctgctagagccagcgctgtcggccatgcaaaaccaggagaagggcgcgcgacaaagtagtttttagtgcacggcgcgtagcgcgtgttggagatgctcttagggttagggacttagagtcagtatgtccagtggcaaagcttcggcagtagaagcgatgttgtgtcgaataaatcttctcccaagtccagctacacctggacggctttcatgatggcggcgataaggagccagtgggtttttctcttctggcattcctatggggtgtcngatctggtgtgtttgggt

SEQ ID NO: 3899 - DNA, 396 bp, Triticum aestivum
  Clone ID: LIB103-045-Q1-E1-B4
gaattcaaaatccttatcatcaacaaacataggtgaagtagcaaacttaggatcacatttcattctagcattcaaagatttctctttcagtttgcataataaatttttaagatcatctctatcattgcaagcaagaaagtttctagttgtctcctcatccataacataaccttcgagtactttaggcaattcatatctagaatggctagatctaataggtgttacaagattcccagtttcaagtatttcatcaatttcagcattctcaatatctttagctctagcaagttgttcatcaagaaattcacccaatggcatagtcttatcaagcaaggtactagcatcatcataagcatcattcatataagaagtagcatcatcaataacttgtgacat

SEQ ID NO: 3900 - DNA, 369 bp, Triticum aestivum
  Clone ID: LIB103-045-Q1-E1-C12
caaggccgagaagcggccgccggcgtccaaggagggcggcgagaagaaggggaagaagaagtccaagaagagcgtggagacgtacaagatctacatcttcaaggtgctgaagcaggttcacccggacatcggcatctcctccaaggccatgtccatcatgaactccttcatcaacgacatcttcgagaagctcgccggcgagtcggccaagctggcgcgctacaacaagaagcccaccatcacgtccagggagatccagacctccgtccgcctcgtcctccccggcgagctcgccaagcacgccgtctccgagggcaccaaggccgtcaccaagttcacctccgcttagatagtctgttcctggttcct

SEQ ID NO: 3901 - DNA, 391 bp, Triticum aestivum
  Clone ID: LIB103-045-Q1-E1-C4
ccgggccgacgggaaagtatatgatgagaagcccaagagcatccctgacaagccgctgaacaaaaaaataaagtttgacgactctgattcctccgatgatgaggatcaaggtcattcagtggaggaggctaacaatggaaatgatgcagaaaaaggtgaagccaagtcatctgagcagcaacaagaggtacctggtgccttgggaattgccagcaaggaggatgaagaacaagtggaaactgctggcggatcagcgccaaagaagcaacggatagaagatcctctggtttctgaacagacagaaccaaaagcgcccactgatgaaccagcagagactactgatgataagccaaaagagtccactgataaaccagcagagactactgatgat

SEQ ID NO: 3902 - DNA, 306 bp, Triticum aestivum
  Clone ID: LIB103-045-Q1-E1-C5
aatgcccgggccgacgggagacaggacacatcctgatgatgcggggcgcaggcaatcaaggggcactcaggacagtgctctgcccatatcatcggtggcggattcgccgcgtgaatcacagctggcgatagcacaaaattcagacacgacatcgacagccgacaacgggatttcaggatctgcccctgcattctcctcgagatgctgcgaggatcagctcgatataagcatctgatcatccacaccagaggtctcaacactggcgcctgcgacaactctaagtcccacatgacaatcatcaagagt

SEQ ID NO: 3903 - DNA, 417 bp, Triticum aestivum
  Clone ID: LIB103-045-Q1-E1-D1
gggccgaccgcaattccgatggacctgtggtggtgcacatttattccgaaaagtagcaaaagatattttgactgcgaaggatgtatctctcatcaagaagttccatatgctctatagcttcttcttggttcggagagttgtggcccctactgtcgcgtgtattctctacaatatcatacttccaatctcagttatgatcccagaactattcctaccagtctggggcatcgcatatattcccacagtacttttagtggtcacagccattagacatccaaaaaatttacacattctgccattttggattttgttcgagagtgtgatgacaatgcatcgcatgagagctgccctctctggtctattcgaattatcagagtttaacgagtgggtcgtgacaaagaaaacagggaacaattt

SEQ ID NO: 3904 - DNA, 372 bp, Triticum aestivum
  Clone ID: LIB103-045-Q1-E1-D10
tcgaggggtaagaagggcactgggagagttgaacgtgtggagcagttaacatttttgacacgggtggcaaaaacgcctgcccagaagcttgaaattctttttcatgtgatttctgcccagtttgatgtcaaccctagcttacttggtcatatgccagtcaatgtgtggaagaagtgtgttaataatatgcttcttgtgcttgatattctgcaacagtatcctaatattgtagtggacacctcagtggaggctgatgagaaggaaactcagaagggtgccgactatgatggaacaatccatgttactggtgacctagttgcattcctggagagaattgactcggagttctttaagagtttgcaatgtagtgat

SEQ ID NO: 3905 - DNA, 281 bp, Triticum aestivum
  Clone ID: LIB103-045-Q1-E1-D12
aaactctgtctgggttagggctttcggatgagcactttattaaacgcctgactctcgcaccattggatgggcatcagtctggttctgtccgacgtggccatgctcattggattaagttgtacagctctcctggaggagcctccatgtctaaggattatcgtgtcaatgctaatgttgttctatctgatactccacgctgtcgcgttttgcttctgcgaaggcgttcaatcagttgaattacatggtgttccgattccaattgtccatgtctaacatgccca

SEQ ID NO: 3906 - DNA, 398 bp, Triticum aestivum
  Clone ID: LIB103-045-Q1-E1-D3
aactactagtgaaactgaagtctctttgcaaaaacataaattaggcaaacgtgagtacaaatgtacccaacaagacttacatcagaactatctacatatgcatcattatcaacaaggggatggtggggtttaactgcagcaagccagctttgactcagtggctaacctgaactactactgcaagtaactcttttgaggtggcgcacacgagtccacatattcaccaatcaatacaccactatggatccgctcccgtctccctacgagaacgccatcaatagcactcactcttatcttgcgcattttagagtatccactttcacttgtctatgaactgtatagggaacccagaagtcctttaccgaggacacgactattagaatagatcatttataacc

SEQ ID NO: 3907 - DNA, 396 bp, Triticum aestivum
  Clone ID: LIB103-045-Q1-E1-D6
gacgggctattaaagaaaagaacggagcacatacatgttccaaacatggactttgcgcatttacgtgaagggaacaatccatgagtgcatggtgcgtccctgctctatcactagcaatagcatgcaggatggctcttgacaagaacaacttctatagatagaatttagcttttataaatattaatatggaggaaagaacaaataattatttgctggtagaaaatctggattacaatagtccgtctgacaaaaaaaaaacaaatggaaaattacattaggtggtaagaacaagaaacaaaaaggcatccgatgcatctactataatagttctctacttgcgcttaacaacgccgacataacgaagctctaccgaacccaagtagatcatgccattgc

SEQ ID NO: 3908 - DNA, 376 bp, Triticum aestivum
  Clone ID: LIB103-045-Q1-E1-E12
acggggtacgcgactgagcctccagaggctgatattgaggaaggggttgaagaagatcctgagaacaacgacgatgcccctgatgacgtggtagggggtgaaggtgaacaaaaggaacaggaaaagactgcccgtccacgcaatacaacaaaatatatgaccaagtatgagcgggcacgcatccttggcacacgtgctttgcagataagcatgaatgccccagttatggttgagcttgagggtgaaactgatcctcttgagattgccatgaaagaactgagagcacgtaagatccccttcacgattacgcgctacttacctgatggaagctacgaagactggggagttgacgagctcattgtggaagactcgtgga

SEQ ID NO: 3909 - DNA, 391 bp, Triticum aestivum
  Clone ID: LIB103-045-Q1-E1-E2
cgggtcgaccggggattcaatgtaggaagttctcttggccttcaccacaagggtgcttggtgtacacctccaagaatatttattgatcaggatgaagtgattccacatttggaccctgggatggttccttcaaccgttgatcctgatgctgctggatacgctgaaagagcaaacaaagccaagaagccagtcaagatcagtgcccggagccttgcaaagctggacagaaacgaggtgatgaaagctgcggcaaaagctcgggcatcatcctctgttctccgaccaatagatgcccgtcatggccatgaagctgatattagctccagtggcaatgccagcgtcaggagtagtatgagtgttgattacagtgctacacaagaatcgaagaatg

SEQ ID NO: 3910 - DNA, 388 bp, Triticum aestivum
  Clone ID: LIB103-045-Q1-E1-E3
cgggtcgaccggaggagctagatagcccatttggcaatccagcccgtggcatcgccgttgtttattatgtcattgagtggtacttccgaggccaccgtaattgaacactcttgaaagtagtgtcgtaatttccgggatgccataaataccgcgtatgttatcttttgataatgtgggtaccgtgatttgcatggagtgaggacagtggatacataatatactggcttttgaagtgggaatttatgtccgtccgtctctcgttcgacgacgagcaccgcgctcacaacttggtgagttgccgctatatataacaacattggttcgccaacatttggcgcgaccaagattgggttggtggccaagatggcttttattgcttccaatctgg

SEQ ID NO: 3911 - DNA, 422 bp, Triticum aestivum
  Clone ID: LIB103-045-Q1-E1-E4
ggtccagatatccgggtcgacgggagacaaggcgatacctctgtatcagatgttgaagaaaatagacaatttagtctagagtgacgcaactaatgcggcgtttgaggacttgaagagacagctagtcgaaccgccagttcttgctgctccggttgataaggaaccattgttattatacatggctgctaatgatcaggctgtcagtgtagccattatggtggaacgcaaggaggctgggaaggaatatccggttcaacagccagtttattatatcagcgaggtgttgattgagtcaatgcaaagatatcagcgaggtgttgatggagttgtccttacttcccctcgaggtgataaaatttattatgttctccgcttaatgtttccttgtactatcaatgcagctgagtacgaggccttactcc

SEQ ID NO: 3912 - DNA, 396 bp, Triticum aestivum
  Clone ID: LIB103-045-Q1-E1-E7
aattcgcgggccgacggggcaacacaaaatttccgccgaagcagaaaagcatcgtctctcgtctcgtcgaggaatcaacaaccatgggcggtggcaacgcgcagaagtccaagatggcgagggagaggaacctcgagaagctgaagggcggcaaggggagccagctcgaggccaacaagaaggccatgaacatccagtgcaagatatgcatgcagactttcatctgcaccacctctgaagcaaagtgcaaggagcacgccgaggcgaagcatccgaagagcgacctcgtccagtgcttcccccacctcacgccgtgatatctgccaaatcggacggagagagagagaagctgccgtaatccacctagtattatcatgttccgcaatgactggttgt

SEQ ID NO: 3913 - DNA, 401 bp, Triticum aestivum
  Clone ID: LIB103-045-Q1-E1-E9
gtcgacgggggaatgcagatgtaccagaggccgttcatgaagggcaagctctacattcatttcacagtggaattccccgactcgctggcaccggatcagtgcaaggctctcgaggctgtgcatccaccaaagcctgcatctaagctgaccgacatggagcttgacgaatgcgatgagacgacgatgcatgatgtcaacatggaggaggagatgcgcaggaaagcccatgctgctgctcaggaggcgtacgacgaggacgacgagatgcctggaggcggtgcccaaagagtgcagtgcgcacaacagtaagctagggttgggcaagctttttggggaccctagatcaagatgcctgcctgctctctggggttttggtggtgttaaccataagctgatttttg

SEQ ID NO: 3914 - DNA, 391 bp, Triticum aestivum
  Clone ID: LIB103-045-Q1-E1-F10
gacctggcaatacatcgactggataatgtggtcggagagttccgacctatgatatttgcggaagtacctaatgttactagttttagaggggtggtagtatatgttcatggattttaccctcatgcggggggaacagttgtccgacctgggagatttcctggccacattaatggtgtttaccaactgggtgattttacataccttgacggagacttcacatctgagtctggaacgtctggtggaccagttaccatgggagatagagttattggagtaaatgtgcaaagtgtgggaggatcgagatgcgcggtttcccctctgacactatacatgacatttatgaattggtgtggttttaatggcggagaccatactattgctgccatgatac

SEQ ID NO: 3915 - DNA, 310 bp, Triticum aestivum
  Clone ID: LIB103-045-Q1-E1-F11
tgagttcccatatgacagatgaggagcatgaaatcccggctgtgtagataaaaagcagagttgtagcgtagcacaatcatgtaactcgtttggctgcgccctactgtcctgtaccatatagtagacctttgcgtgtggagtcccgacttatgtacccaagagagaagaatgtaggaggtttagtcctgtgatgagatcggattagcctatttatgtgtgccaacagaagattatagttttgttggttcctgattgttgtaccattcaaccccagctttgtgctgctatcgtaatgttgaaacttggccgc

SEQ ID NO: 3916 - DNA, 403 bp, Triticum aestivum
  unsure at all n locations
  Clone ID: LIB103-045-Q1-E1-F2
ccgggccgacttcttctcccacggctgcggtggctgccgcgctctccaccccaagattgcgcagttcgctgagcggaatccggacgtgctgttcctgcaagtcaactacgacaagcacaagtccatgtgctacagcctccatgtccatgtcctccctttcttcacgttctacaggggagctcanggcatggtcagcagcttcagctgcacaaatgcaaccatcaataacttcaaggacgccctcgcaaagcactcgcctgacaggtgcagcctcggcccggcgctggggctccatgaagcggaactcttggctctggctgcaaacacggacctggaattcacctacaacgagaagccgacgccggtgccgatcgcccaggctatcccgatggaaactgcctcc

SEQ ID NO: 3917 - DNA, 410 bp, Triticum aestivum
  Clone ID: LIB103-045-Q1-E1-F3
cgggccgacctcaggtataaattcgtaatggtaggcctgcaccaccagctcaggtacgagatgatgtccatattcctaaactaaaattgaatattccaccatttgagggtagatatgttcctgatatatatcttacttgggagttagaaactgaacaacgatttacatgtttacaatatcctgaggagagacgagttgctgctgctgtttgtgctttcactagttttgcatgtgtatggtggtctgaacattgaagattatatcctattccaactacttgggctgctttgaaaactgctatgcgtacgcgttgggttccaccatattatcaacgtgaattgcttcaaaaattgcagcgtttaagacaagggaaaaattctgtagaagaatattatcaggaattacaaact

SEQ ID NO: 3918 - DNA, 388 bp, Triticum aestivum
  Clone ID: LIB103-045-Q1-E1-F4
cgggtcgaccggaggccatacagcggctcgaggggatggggttcaaccgtgagcttgtgttggaggtcttctttgcatgcaacagggatgaagaactggctgccaactatcttttggatcatggccatgagtttgaggaacaacaatagatgttagattggtcttgctgttgaaagacagaagagtcagtgacggaagcagtacagtttggtgtcgttcttatatcttgctgctgaatatcactactacttgccattagtgcgatgttgctgactttcaatttcttgtatcctggaaatgctttctaagtacataatatcatatgcaaaccttaaaaaaaacatcaaagaatgcaacgataaaaaaaaaaagcggccgccctaaaaga

SEQ ID NO: 3919 - DNA, 378 bp, Triticum aestivum
  Clone ID: LIB103-045-Q1-E1-F5
cgggtgaagctagttcatcaatctcagcgcctccgactacccgctcatgccccaagatgacctccttcatatcttctcatatcttccaagagatctgaactttatcgaccacacaagcaatattggttggaaggagcatcaaagggctagaccaatcatcgtggatccagcattgcagatctcaaacaaaactgacgttctgacaacaaaggagaaaagaagcatgccttcagctttcaaaatatttgtaggttcgtcgtgggtaatattgagccgatcattcctggagttctgcatattgggatgggacttccttcctcgcacgctgctcatgtacttcaccaatttcctgtcgtcctcggagggatacttccacac

SEQ ID NO: 3920 - DNA, 417 bp, Triticum aestivum
  Clone ID: LIB103-045-Q1-E1-F6
atgcccgggccgacgtcgaactaaaacgaaggaacctacactatcatcaatgctgaagaagaaagttaccgcaaaagataggattgcagggaggcttctaaatggtcatgctagggacgcaacaataagagaagcttctaatactgaggatatgacctacagggaagcattcccaaatcagtggcagtgaaagcaccctgggtaggtctttcttcataattaacagtttcgttttgctgtgctgttgtatggtgaggtgtggctgatattcccttgcacgcttgaagtgcttgaagtacgcgggacgctgaagctgcttccaacctgtgcatggaaaatttcagaaagggaagttgtagaccatttgtactggcagtcggattgagaatccaaatcagaacaacccgacagttaaca

SEQ ID NO: 3921 - DNA, 421 bp, Triticum aestivum
  Clone ID: LIB103-045-Q1-E1-G11
attcgccggtcgacggggataacgaggagtgcgcgtgcaaaaccaaaaactgcaaaaccggagcctgcggttgcaacaagaaactgaaagggtgtaacccaaattgcacgtgcatcgggtgtgagaatggctacgggatgaaaggggctgataagtccaatgctggaccgggaggtacgggtggcacaagtgacgccggaggctcaggttccaacaagcaaataagaatcgggtgatgacagtaggcttgagacataccagagcatgatgcaagtcaccttactttcttaccatcctcaagtcacctcctgttgagatatctcccactgtaaagcacagccaggttcctgtagattccttgtaatggttggttactcgaagcaagcacggcgaaaactccatgttcctcaaccctcaaggg

SEQ ID NO: 3922 - DNA, 340 bp, Triticum aestivum
  Clone ID: LIB103-045-Q1-E1-G12
acggggacaaccatatgtgtgcctgtcagggacgagcgagcgtcatttcctactactcttgcactctaagatgaagcagatgtagcccaggttgcagatgaatccgatgttatagcggcaactggatgaattgggatgacaaatcgagagcccaacgatgaggtacaggtggcacatttgactagtgcgacccacttcgataacacacattgcactctcgcaacgagagaatgcgtgcaacatacgacatcatcatgcaagtcagctctacactacttagcaccatcacatcaactcctgctgagatcttcctcactgtagccacacagacatattcatg

SEQ ID NO: 3923 - DNA, 388 bp, Triticum aestivum
  Clone ID: LIB103-045-Q1-E1-G2
cgggccgaccgggcataatacgttgaagagaatatcacaagcttgagcattgtattgcaacatcttcaactcatccgcggtagcttcacggtttggttctctcccatcaaagaagtcaccctgcaaaccaacacacacaatagtccaaacagcggggttatgtccaagaatatgcattttcattttatgcttccaactagcaaaattagtaccatcaaagtaaggacctctacggtgataatttccctcgctagacgccatactctcctaggttgtgaaaccaaggctatgaccaccaaaagctatggagatcaagcaaatggagaccaaagctctgataccacttgtatgatcgaaagtatgtctagagggggggtgattagactac

SEQ ID NO: 3924 - DNA, 380 bp, Triticum aestivum
  Clone ID: LIB103-045-Q1-E1-G4
agatgcaacaagaaaaaatgaaggaaaagcggaaagctaggaagaggtcgtcgaaggatgatgatgatgatgacgacgatagcaacgaagatggtgctgatgaagatgatgatttctttgaggatgaaaagtctgatgaagacgttaagccaatgaagaagcagaaggtgaatgccaaaggtaaagaaaaagggaaaggaaaggacaagcttccagaggaacatttcgaaccagaagcaactaaagaagagttggagctcttggttgctgatcaggatgcaggcaatggtgcaaagggctttaacatataacgcaagagtaaaaagggcaagaagggcaaggattctgtcgaggacaaacatcctcatattgatcttagc

SEQ ID NO: 3925 - DNA, 417 bp, Triticum aestivum
  Clone ID: LIB103-045-Q1-E1-G6
gggtatcaaaggtcccaactctcatcttgggaatggatgtgtcccatggatcccctggacagtctgatataccgtccattgcagcagttgttggttctcgggaatggcctcttgtctcgaaatatagggcttcagtgcgctcgcagtcaccaaagctcgaaatgatagattcattgttcaagccacaaggaactgatgatgatggccttgttcgggagtgtctcattgacttctacaccagttctggaaaaaggaaaccagatcagatcatcatcttcagggatggtgttagtgagagccagtttaatcaggtgctgaacattgaattggatcaaataattgaggcctgcaagttcttggatgaaaattggaaccccaagttcacgctgattgttgcccaaaaaaatcacaaaacaa

SEQ ID NO: 3926 - DNA, 277 bp, Triticum aestivum
  Clone ID: LIB103-045-Q1-E1-G8
atgcatgagacgaacacgtatgcaaatgcgatgcacatgatgacatgatataagatgcataacagcgacaacaacacacggagagaaagacccgaacccgaggaaataaattaacttaacgccggaaacggcaagagttggagtacaaattgggaaagttatatccggggtgttacaacactccaccactacgaaaggatctcgtctcgagatctaggactgaaagaacaccgggtactcagaacggaggtgatcctcgcggtcccaggtagcttca

SEQ ID NO: 3927 - DNA, 393 bp, Triticum aestivum
  Clone ID: LIB103-045-Q1-E1-H12
gtgagtcgcactagcggtccttcctgctcgcgatgaaggaggacagcctcgaggacattctggacccgagcatcgtgcgcgcagggacggagacgctgctgggagaagtggccgagctcgggaggatgtgcttgggtcccatgggtgaagagaggccttccatgacccaggtggccgataggctgaaggctctgcgaagcacctggagggaagagctggtgttggaccgtgccgtgacggaaaatatggtcgtgcacatgccacctgcagcagctccagtgcccggggatctcgcgtcatcgtcatcgggagccccctcgacggtgccggacatgtccggaatgagcatgggggcacccaagatgatgggttaattttgagccttccttggga

SEQ ID NO: 3928 - DNA, 381 bp, Triticum aestivum
  Clone ID: LIB103-045-Q1-E1-H2
gataacgacagcaggactggcaggagggagaaggccccggcgtcgcccaggttccctccgcgcagcctgcacagcgcgtcccagaaagcgagcgtcatgagtaggaacacaatcaatccgaacacgagctcattccgatgtccaaagtcattctccctcgccgatatgcaagacgctggatacaactagctgaaacgtacgccgaatttaggttggcgatatggtgctgctgccactgctgctactgtataatcaagaggtctctacacataagagagcattaagttgttgtgttagtcagtatgtctgttggactcttcatgaatcacctggttggcaatggcatggcaaatgacaacggcaacatgaagtggccgtttc

SEQ ID NO: 3929 - DNA, 362 bp, Triticum aestivum
  Clone ID: LIB103-045-Q1-E1-H4
actggctacaaagtgggtggtgggtgggctctgaatttcttcgtcgtccgtaccccaaccatcctggccatagtccggccaggactctcccgataacgagaggtgctttagcgaatttaggatgtcgccaaagggcgagtgttggaagatgtccgcggcggtgaattccataaccggcgcccaatccgaatcgattggtaggggcgcgggaggttcggagtccggcaaggagtccggaacctcggaatcacgagtttcgcaggggacaagattagcgttcggctccatcgtcgtggaagttggagcccccaatgcagtgtccatccaccgatcctcggtctgggcgatcggctccggactaa

SEQ ID NO: 3930 - DNA, 424 bp, Triticum aestivum
  Clone ID: LIB103-045-Q1-E1-H9
attcgccggtcgactcccacatctcaaatgcatacccattcgttcacttctcattttcacgaagtcgtagtgttgagattttatctggcataacaccagtagagtatgacccgtagaagtttccgggttcacacagattatggaaggcatagattcaacccatcggtgtaccttaggaacatataccgtaatcttctagagtaattaacacaagctcggaagtagagcatggttgaggaagcagaggatacaacttaccaaaggcattatgtatcggagaaagaactcaccaggtgattaattatgaaggacactgttggataataatccaacaatggatatggcgatcgatagcggagctgatgtgagcatcggtactcaaccagaggaagaaggatgcaaggagatctgagtatagaaacat

SEQ ID NO: 3931 - DNA, 384 bp, Triticum aestivum
  Clone ID: LIB103-046-Q1-E1-A10
cgggtcgaccgacatgggtaagatgaaattttgacggagcatcatactacaacaagcccattaaatggtgctcactgttggaattaattaggatgtgacataagaaccgccgacttcggaattcctccatcaagttgcttttgttttaatttctttgcaatttttaatttaaaactctggtacacaagtgtgtctgctaccttttcatctcatgtatatgctaacattttcgaaaatcggtaaaatttgcaggggttactttgagacggcagtaaagccaacgaatttaaaacacactcgtcaattagggtgcggtcgtgttagcatgtgtaaagtgtacatatcccacattgcttgatcccactcaaactccgttataaaaac

SEQ ID NO: 3932 - DNA, 408 bp, Triticum aestivum
  Clone ID: LIB103-046-Q1-E1-A11
gctctctctctcactctgtggtgtatttcttcctctggctctcttctcctgccccaaacatctcacgccgccgccgccgagggttagggtttgtggccggagatccctcggattcgattccattcgagtcgaatcgaagagaagagaatcgatagagatggacgcgcagcgtgccctgcttgacgcgctgatgggttcgtcgcgggacctgacggaggaggagaagaaggagcaccgggaggtggcgtgggacgaccccgacgtgtgcgccccctacatggcccgcttctgcccccacgacctcttcatcaacaccaagagcaacctcggagtatgcccaaagatccacgacccggccctaaagcaaagcttcgagtcctccccccgctacgccgccggcctccccaa

SEQ ID NO: 3933 - DNA, 389 bp, Triticum aestivum
  Clone ID: LIB103-046-Q1-E1-A12
cgggtcgaccgtggcgtctggctccagggctccagcatctggttgcgacaaccaggtagaagggaaaggggaaaagagggaggaaagcaaccgtgagtactcatccaaagtactcgcaagcaaggaactaaactacatatgcatgggtatatgtgtaaggaggccatatcagtggactgaactgcagaaagccagaataagagggggatagctaatcctgtcgaagactacgcttctggtagcctccgtcttgcagcatgtaggagagagtagattgaagtcctccaagtagcatcttcaagtagcatatccaagcagcatctccaagtagcatcgcatagcataaccctacccggcgatcctctcctcgtcgccctgcggaaaagcga

SEQ ID NO: 3934 - DNA, 384 bp, Triticum aestivum
  Clone ID: LIB103-046-Q1-E1-A2
gttctcgatgcatagataatccatgtagtaggatgcactcttcggttagaaagcccgtggctatgcttccctctggacgtgacatgttgcgaacgtatcctttgatgacaccattcatcctttcgaacggcatcatgctgtgcaggaacgtcagcccgagttggatgatatcctccacgatatggaccagcagatgcaccataacgttgaagaatgcgggcgggaagtacatctcaagctcgcatagtatcaccatgatctcttcctgtagccttctgagttgcctcacgccaaccgacttccgagagatgacgtcgaaaaagttacataggccaaatagcgtttcacggacgtgcgcgtccatgatcccacggattgcaactg

SEQ ID NO: 3935 - DNA, 401 bp, Triticum aestivum
  Clone ID: LIB103-046-Q1-E1-A3
gacgggaagagggaaccagctcaaagtcgacgggttgcaatgttgttagtataaattccttgaatatccatgatgctaatgatatgcaaagccacaagcttggggaagctatgtttgatggagatgatattttttgtcccccaagttttgatgagcaaatttattatgatgaaagcatgcctcctatttatgatgattatattgaaaaagtggatttggagaggtcatgactttatttagtaatgattccactattccggaagaggttccaattgattatgagaacaaagttgctatctatgatgattattgtgatgacttgtatgctataaagaataattatatccatgaatattttcatcatgattttagttttcaattggattatgcctcacatgata

SEQ ID NO: 3936 - DNA, 391 bp, Triticum aestivum
  Clone ID: LIB103-046-Q1-E1-A4
gggccgacgggagattcaaacctccgtccgcctcgtcctccccggcgagctcgccaagcacgccgtctccgagggcaccaaggccgtcaccaagttcacctcggcctagtttcctggtctgattcttgtgttcccttcctggtccttgtctgatgaattctgtaggtagctgtgttctgacagtgtcatgcgacattgtcatcttgtaacagagtttctgcttgtgggtttgtggctgttattcggtctggttaaatagtcaacttcacctcatcctagtattctcatctaatgtggtgaactgtagttagatgtgttctgaaagtgtcatcatgtaactttgtgctgatggtggctgttttcagtctaaataaatagtcatgttgctgcc

SEQ ID NO: 3937 - DNA, 402 bp, Triticum aestivum
  Clone ID: LIB103-046-Q1-E1-A5
cgggccgacgggaagagggagccagctcagaccaaaggcatgaggcagaaagtgatggaagaaatattcaagcctactgatgacagcaccctcagtgctccttctcctgagaagaaggtgcgaaggatcagagactcccccttcaacaagaagagcggctcggttctgcacagaatggcgagcgcttcaacagggacagaagatggtgaggctcctccctccggcagctctgccgagccagttgcaccgagaaggacaacaagggagaggaaggcggcagtagtctacgtcgcttccgagagtgaagacgatgagactgaggatgaagatgtgtcggaaccaagcgatgatgacttctccgaagatgactagactccttggctcaaccgcccaaacattgcg

SEQ ID NO: 3938 - DNA, 293 bp, Triticum aestivum
  Clone ID: LIB103-046-Q1-E1-A6
cgggcggggtaaacccccagatcatgtgatcagtaaaaacaattatttctccttccttgggctcaggaggatttttgaggcctgggaccctccagtggatgtcagctttcttggataagacgcgagtttctacgaaattgttcagatcttccttggtgacccgggatggtgcccagttgcatgtggtgaaagtcttagtcattgttgataatgatctgaaaatgaaaactttgccggtttaaggttatgttgttatgccgaccattgatctaagggtaagaatgataatcatt

SEQ ID NO: 3939 - DNA, 385 bp, Triticum aestivum
  Clone ID: LIB103-046-Q1-E1-A7
cgggccgacgggggccgtcacggcctccacctgtgccctcttgcaggtggactgctggtcattgatgcggcgagtcaggctcttgcagcaaaatctatgatattctctggatgagctgcaggtaggccaagctgttgacgaggatccgacggcgaccaccaaggtatacaaacaacagtgtaacaactctaggaatctacatcttaatacagctctattttcggggattcaaatctccaggctgaaatcaacaagcccacataatcttcagccttccacaattatgttatgcttcatgttctatgatcaggttgtaatctgctggtgcggtgctgccctgctttgatttggggattcatctgggatctaattttgaccgaacaaa

SEQ ID NO: 3940 - DNA, 382 bp, Triticum aestivum
  Clone ID: LIB103-046-Q1-E1-A8
gtcgacgggtgcaatgagagtccatagcatactttgaacctggaaaccagaagatttgactgacggtagattgttttcgtctactgctgtactatataccaagaggacaagcacttgggagtgaaaaagaccaggaaagcagtcattagccatcagttttgacagggtagatccaacaccatctgttcattgaattactgagcttgatgggtagtttttctgcagttacagaaattagtcttaagtcgaaggataatgcggtaggcaatggtgatgtgtactggtgaggcttcacgtataacggagtgtcactctcgtcatctagatttacggacaagattggttgttggtgatgcgttgtggcacctttaagttaaaattt

SEQ ID NO: 3941 - DNA, 397 bp, Triticum aestivum
  Clone ID: LIB103-046-Q1-E1-B1
gggtcgagcggtctctttggtttatgagagtcgttcaacttagatgtaatcgatgctattaatgtcttgcttttctcttccgatcgttctgttgcattattatatattgcttatgtattgtctgtgaattggtactaacgtttcgtttggctagtgcatagtgatgccgacgtatgtcgtgtacaagggtaaggttcccggagtctacgatgactgggaggagtgtcggagacaggttcaccgattcagcggtaacagttacaaagggtacaccactagggccgaggccgaatctagatacgcccgctatctagcgggagaggggagggagcgttggaggaaccggatgaagacgagtttcatcgtgatgatgctcatcgtgatgaccgcagctctc

SEQ ID NO: 3942 - DNA, 396 bp, Triticum aestivum
  Clone ID: LIB103-046-Q1-E1-B3
gggtcggccgggtgcatgtggattctgtatacgtggaaggagaagagacaacatgtttgatgagagagcaggaaatacatggacgagaggggaaggatctcatggattgagggatcgacaattttgtgcgggggagagagggattggtaattttgtgcaagagagagagggcggggggaggagtcactcaaccgtcgtcacatcaccctgcttccaattgaacccgcattctctagcacggtgtggtcgccgtcttcgatatgctcattgccctctttgaagattgaggtgttgtgcatgttggggtgcaaagaagcacaagcgagagtggttgccgtataaccttggatggggatgaattgtgtgctcgggggagtgtgtgtgtgtgttgtgctg

SEQ ID NO: 3943 - DNA, 400 bp, Triticum aestivum
  Clone ID: LIB103-046-Q1-E1-B8
gggccgacgggtgtacccgatggaggcctatcaggaggcaaaagtatacttgttcaacaatgccaccggtgccagcgtcacggcggaaaggatcgtcgtgcacgagatggactcagcacacaaccagctctccaatatggacgatcactcgtatgttcaatgaagctcttgcatctcatcagtaataagctacattggatcaaagacgcgcaccaaggaaggccaaggcatatgtaaatgattctgcacagcctcgcttgcagaattgaaacatctatccttgggtcatgttctgcattgatgtcactatgaactatattactttgttgggcgtggaatcgatatagtttgggtgggtggaattttgtttgtttacatagtgaaccgatgcggtttctgt

SEQ ID NO: 3944 - DNA, 401 bp, Triticum aestivum
  Clone ID: LIB103-046-Q1-E1-C1
gggccggccggtgagatatggaggtagtgatattagagtcatgctagttgaggtgattatgaaaatacctgtgttaagggttgtgattcccgtagcatgcacgtatagtgaactgctttgtgatgaagttggagcacaattttatttattgattgtcttccttatgagtggcggtcggggatgagcgatggtcttttcctaccaatctatccccctaggagcatgcgcgcagtgctttggtttttgatgacttctagatttttgcaacaagtatatgagttcttttgactaatgttgagtccatggattatacgcacctcatccttccattattgctagcctctcttgtgccacgcaacttccactggtaccatacacccaccatttaccttcctcaaaac

SEQ ID NO: 3945 - DNA, 412 bp, Triticum aestivum
  Clone ID: LIB103-046-Q1-E1-C4
cggtcaagacatcccgggtcgaccgggcaatccatacacactcacattgatatatattgatgggcatctccatagcccgttgatacgcctagttgatgtgagactatcttctcctttttgtcttctctacaatcaccattctattccacctatattgctatatccatggctcacgctcatgtattgcgtgaagattgaaaaagttttgaaaaagttagagtatgaaacacttgcttggcttgtcatcggggttgttcgtgatttaaatactttgtgtggtgaagatagatcatatccatactatatgattttgtatggataactttctttgtccatgttattttgagaatacattattgcttagttaatatgcttgacgtattatcatttttatgtcaatatgaacttttgt

SEQ ID NO: 3946 - DNA, 397 bp, Triticum aestivum
  Clone ID: LIB103-046-Q1-E1-C9
cgggtcgaccgggaagatgaatccacagggtcctggttggaacaagagattgaggattggagcctctgccccaagcttgacaccttgcccaccccgcataagcgcttttgagaaggcggtgagggtgttcataaaaaaacccaactgaagatgagccgtggatcataatttagagagtcaattccctggtaccaaaaactgtatggagtttgcgctgaagatgcagactggaagtgtactacactccgaattacactgggtgtgtccaaaaaaatacacctgcagcatacattaatgattcttggtggtaccttgtgcattggaaagttgtattttagcaacaaattcgtatggtaaaaatgtcttgccttgtgcaatgcagcccatgttgtgggat

SEQ ID NO: 3947 - DNA, 410 bp, Triticum aestivum
  unsure at all n locations
  Clone ID: LIB103-046-Q1-E1-D11
gggtcggccggtcggaccagtggagcccgatgggaaagagatccccgttagcttagtgtatgggcaagtagaattagccgcaaagtattcccaacaggattgtaggctagacagcctgttggatggtatagaagaggaatttagtcagtctacatgactatgtaaacaaagtgacatgtataatgccttctagccggattgtaaatcatttgtcttggcagaccttttcgcttcaacctcgggaccctatagtccggagtgtatccgaatacccgctcagttatataagaaccggggtatgtgtggaaaccaggtgtaggggtcattagtgcttgaatagacaagtatccaactagttacgttatattacatgggtagtaagaaacatcttcganggagaatagttccgt

SEQ ID NO: 3948 - DNA, 63 bp, Triticum aestivum
  Clone ID: LIB103-046-Q1-E1-D2
gtgggaggccggatatgtccacactacggcagcgatgaagaaggggtgggaagccctccctcg

SEQ ID NO: 3949 - DNA, 388 bp, Triticum aestivum
  Clone ID: LIB103-046-Q1-E1-D5
cgggaaaagggagccagctcagaccaaaggcatgaggcagaaagtgatggaagaaatattcaagcctactgatgacagcaccctcagtgctccttctcctgagaagaaggtgcgaaggatcagagactcccccttcaacaagaagagcggctcggttctgcacagaatggcgagcgcttcaacagggacagaagatggtgaggctcctccctccggcagctctgccgagccagttgcaccgagaaggacaacaacggagaggaaggcggcagtagtctacgtcgcttccgagagtgaagacgatgagactgaggatgaagatgtgtcggaaccaagcgatgatgacttctccgaagatgactagactccttggctcaaccgcccaaac

SEQ ID NO: 3950 - DNA, 297 bp, Triticum aestivum
  Clone ID: LIB103-046-Q1-E1-E3
gggtcgaccggggtcaccacgataggcgtccgcggcaaagactccgtctgcgtcgtcacccagaagaaagtcccggacaagttgctggatgacaccagcatcacgcacctcttctcgattaccaagtacaccggcttgcttgcaactggcctcacagctaatgcaaggtccttggcctcccaagcaggaattgaaccacctgatttccgtaaaaaatggggatatgatatgcctgtggatgttttaccaaaagggatagcagacaacgcacatatatacacgcaacatgcgtacatg

SEQ ID NO: 3951 - DNA, 105 bp, Triticum aestivum
  Clone ID: LIB103-046-Q1-E1-F1
cgggtccacggggacaccacacaccctcacagcaagatgattcaggaagtgtccaagtttcagtcatgaaagattggacaaatggttgatccaccaaatcaatct

SEQ ID NO: 3952 - DNA, 382 bp, Triticum aestivum
  Clone ID: LIB103-046-Q1-E1-F12
gggtcgacgcgcgggtaaaacaaaggcaacttggaacggggaaccgacgaataacttgaagagaaaacactgttgaaataattgaggaaagaatgcaaaggcttcgcacgggtagggtggatactcgattacgaactccggctccgagaagaagggtgggcgcgtgggaaaagaaagacaacttcacagagggaacaacgtcgttgagaaagaactgaggactgatcttgcaaaagatgaaggggatcacatcaacttgacgagaaaagcaccagatgaaaagagctggcatcggaacgaacgagaactaaccgcgagatcctaataaaaagttttgaaggggaagaggagtatatcaaaacacctacgtcaagatttctca

SEQ ID NO: 3953 - DNA, 323 bp, Triticum aestivum
  Clone ID: LIB103-046-Q1-E1-G1
cgggtcgacgggctgattcaaagtttgaactgggggcataaaggtccatttgcccattttcacctggtcggaacatattccccagcgactcacatttcagaacggaaggagtagaaagtatcacaaggaacagaggaagcaacccgtaaaggacaatcgtgccaaagcaacattaattctgcaaaaaaaaaaatagacaccataccaaaacatatcaagacaatcaataaacataccaaaagaaaagtcgaaatcaactttcaaactataacgtttaacatgacaaagttacaccaatgtaaaaaaaaccgtgtcccctaaag

SEQ ID NO: 3954 - DNA, 398 bp, Triticum aestivum
  Clone ID: LIB103-046-Q1-E1-G10
cggtcgacgcggctgtggagtttaccgacgcgagcccgctgcccccacggagccagctgctggagaacgtgtttgccgatcccaagggcttcggcatcggccccgacggcaagtacaggtgcgaggaccccaagttcactcaaggcacggcgcaagtctaaggacctccaccgcagaagcagcttgtttacgccttgtttctcatgtactacctctctagctaccctcagcccctagttttgtcgaacccgctgtcgatttcttgtgttgttagaggtcatatatcactgtaattcattgctcgctgtgctactgcgcggcgtctgatgcccccagttttttttacccaagaaatgttccccagttcagttgttctacagtaactcaacatccaaccg

SEQ ID NO: 3955 - DNA, 389 bp, Triticum aestivum
  Clone ID: LIB103-046-Q1-E1-G11
cgggtcgacgggtctactcatgtactacccatatcatcaatattaatcaagcaagacgtagcgttttacctccatcaagagggcccgaacctgggtaaaacatcgtgttccttgcctcctgttaccatccagcctagacgcacagttcgggaccccctacccgacatccgccggttttgacaccgacaagtgtgttgaatactatgataagtttgatacttgataattgttttgagatatggagatggtgatattaaagccatgctagttgagtagttgtgaatttgataaatacttgtgttgaagcttgtgattcccgtagcatgcacgtatggtgaaccgttatgtgatgaagtcggagcatgatttatttattgatggtcttcctt

SEQ ID NO: 3956 - DNA, 399 bp, Triticum aestivum
  Clone ID: LIB103-046-Q1-E1-G2
ccgggtcgaccggtttggccatgtttggatccatgggttagagttagtttgagctagttggggctcagatagccctaaagtatccaaacatgagggttaaattggagcaagttgcaccaaacccacccgagaaaaactatcccacccaagagtcgctaacatgtgatgagttaaacgacatcaatagatggcaaaaacgctagcccgccgcactttgagagagacgaggagcgagaagcgatatgggctggtggattactagagctaggtatcgcacggaggccaagaaatatggtgatagctgctacctgttgagcttgcgttggtttttcccttgaagaggaaacggtgatgcagcaaagtagagtaagtatttccctcagttttgagaaccaagat

SEQ ID NO: 3957 - DNA, 313 bp, Triticum aestivum
  Clone ID: LIB103-046-Q1-E1-G9
cgggtcgaccggcccaagataagaagagcaccaaccaaaacagtggtgtccgctttgatgcagaaaccaagacgggaaaggaaacatattatggttatatacaggatatatgggaacttgactatcgacgtggtttaaaggcccctttgtttcggtgcaaatgggtcaatatgacacgaggcggggtaacggaagacccgcaatacggaatgacaacagtggatctcaacaatcttgcgtatgcagacgaaccattcgtcctagccaatgatgtggcacaggttttctatgtgaaggacatgtctaccaagcc

SEQ ID NO: 3958 - DNA, 198 bp, Triticum aestivum
  Clone ID: LIB103-046-Q1-E1-H12
gattaggaaaagtagtagcagtaacatgactctgcatagaagtggtttcgaaaaagctcgaacagcaatgagcttgttttatttgctgataaggctatataatgtgatttctctatcaaaaaaaaaaaaaaaaaaaaaaaaaaaaaaaaaaaaaaaaaataaaaaaaaaaaaaaaaaaaaaacaataaaatcataaaa

SEQ ID NO: 3959 - DNA, 372 bp, Triticum aestivum
  Clone ID: LIB103-046-Q1-E1-H4
acaatatatgagactcactacatgaagaacaatgtgctactttgaagcacaagtgtggaaaaagagatagtagcattgcccctttttttgggcctttctctttttttgggcctttctttttttggcctttctcttttttttgggcaatgctctaataatattgatcatcacacttctattgattacaacataaggattacaactcgatactagaacaagatatgactctatatgaatgccttcggcggtgtatcacgatggtgcaatgaatcaagactgacatgtattgaaaataatgcatggtggctttgccacaaatatgatgtcaactacaagatcatgcaatggcaatatgacaaaagtaatgcatgt

SEQ ID NO: 3960 - DNA, 405 bp, Triticum aestivum
  Clone ID: LIB103-046-Q1-E1-H9
cgggtcgaccggaaggagcaagagcaggagcaggagacccagcagcaaggccaagggctcaccggcagacccccgctcgccaacggcaggtctggaatgttgccaatgtcgagccctccagcaaatccgggacagcttaccattttttatggtgggtcagtatgtgtgtatgactcagtgccaccagagaaggctcaagcaatcatgctcattgcagcagcagctgctgcggcctcaaaaagcaatggcaccgctgctgttaagcctccagcgatgtctgcgaccaatgcgatccaagccatgcttacgcggtcgctctcactccagagcacttctgtagcaaatggacaacctcaggctgttgcggattcgggctcgatttgcaagcttcaggctgattttccc

SEQ ID NO: 3961 - DNA, 416 bp, Triticum aestivum
  Clone ID: LIB103-047-Q1-E1-A11
gccaccaaaaagggacctggctaccattactactgcagttcccgcgtggttggaagatgtccaaggcggttaccaagaagatgcagaagctcaacgcctactgaccaaactcaccacttcgccggagggttttgatgggtttgtgctccaggacggcatcatccgccacaggggacgagtgtggctgggagcaaatgtggctttgcaaagacaggtccttgaagcgttgcacacaggcgctatcggtgggcactctggtttcaatgccacgtaccggcgtgtgcgacatctcttcacttggccgagcctgaaacatcacgtgaagttactcctcgaagcgtgccagacttgcaagcaagccaagccagaaaggattcgttacccgggattgatcgagcctcttcctgtaccttgtc

SEQ ID NO: 3962 - DNA, 435 bp, Triticum aestivum
  unsure at all n locations
  Clone ID: LIB103-047-Q1-E1-A12
cgggtcgacgggatatgagtatcagagtagcatgtctggagaaaccacaccacctacagagttctgttgcccaatatcaacaaagctaatgcatgatcctgtgataataacatctggacagacttacganagagaatatattgagaaatggttcagtgacggatacaacacttgtcccaagacacanaaaaagctagaaaactttgcgatgattccaaatacttgcatganggatctcatttgcaactggtgcagagagcatggtttcacaatctcagattttcttccaagcaaagattcctacagttatttgccagagcaattgcatggtcactctatgtcaagtttgcacaatgtttcagtacctctaattgctgggaatgcaggaattttgtgattgatcacagcagttcatctgtcgcgttttctgatgcc

SEQ ID NO: 3963 - DNA, 441 bp, Triticum aestivum
  unsure at all n locations
  Clone ID: LIB103-047-Q1-E1-A2
acggtcgatgattccgggtcgacgggcgacggtagaggcgcccacatcaacctcaaggtcaaggggcaggatggcaatgaggttttcttccgcatcaagagatccacacagctgaagaagctgatgaacgcttactgcgaccgtcagtctgtggatctcaactccattgctttcctttttgatggtcgtaggctccgtggtgagcagacccctgatgagcttgagatggaggaaggcgacgagatcgacgccatgcttcaccagaccggagggtgctttcctggcccttagaaggagcttgctgcagcctggctgttctatgtcgtatgctacctttagaactagagtaaaatgtaagaagtgaaagaacttgtgaggctatggttctgtgccatanncctgaggggggtctggaggtgaaacaacatcggagtactgttg

SEQ ID NO: 3964 - DNA, 426 bp, Triticum aestivum
  Clone ID: LIB103-047-Q1-E1-A3
attcgcggcgcgacgaggaggagcagcaagcaaggaatgaaggtttcaacttggaaaggaaggcggaaagaggggaaatgtggcttttggttaggggaggggttcaggaggtagatatttccgcggaagccgaaaatttggaatcgcttcagccaaaaaactggcgcgcaaagtgtcatcagacacggtaccttattcagaactatgtacgatatgtggacatcacaaacgattcagatagcttaatctgtgtgtgatgagtttgaacgtcaaatgttttggttcgaatttccatggttacagtggtcatccacgccattgcataatttgggtacacaaaggagactacagcacacccacacttcttaatcgagcaagttcagcaattaaacagagctagctgagctaaacattactctaacaaat

SEQ ID NO: 3965 - DNA, 428 bp, Triticum aestivum
  unsure at all n locations
  Clone ID: LIB103-047-Q1-E1-A4
acggtcaactattccgggtcgaccaagaaggaggaggcaaacggacatcgggacgacatcacactccaaagtgtcctcatatgcaccaattttgaaggagacttggaccgtatgctcaactcggatagtgccagagacacttagccattggactttgtatgggtgcgggtgcttcatcttgaccaattgaagcttggagcatagttcttcacttgccaagttgtggcaactacctccatcgatgatgaccttgacggaccttccattgatgccgccctttgtgtggaagatgtggaatcgttggtcttccccctattgatgttgaagagtcaaggctttggagacaacgagagcagggctcgaatcctcatcacaaaagacttgatcatcttcatcctcgttcatgcgtcngtgcatggccacttgct

SEQ ID NO: 3966 - DNA, 391 bp, Triticum aestivum
  unsure at all n locations
  Clone ID: LIB103-047-Q1-E1-A5
cgggtncaaataaaaaggtgcatgcgatagaagaaattaatgttttgagtggaaagatggatgaacttatgaaattatttgctaataagagtgtttcttctgatcctaatgatgtgcccttttctactttgattgaaaataataatgaatctatggatgtgaattttgttggttggaacaattttggtaacaacgcgtataggggaaatttcaatcctaggccttatcctagtaatccgtctaataattatggtaattcctacaacaattcttatggaaattataataagatgccctctgattttgaatctaatattaaggaatttatttctttgcaaaataattttaatgctatgattgaagaaaagttgcttaagattgatgatttggc

SEQ ID NO: 3967 - DNA, 406 bp, Triticum aestivum
  unsure at all n locations
  Clone ID: LIB103-047-Q1-E1-B1
ccgggtcgacgggtgaaagggagtgcggtgccctctctctctctcactgttagtcactaattcggccgcatcccgtccgccgggggacagggaggaagtgcatcgtttctccgttcgacggtgccgaggcagcacgtcccgatctgcggtacacgtagttctctctgaccaagctccggcgcggcagggcctacgccacctgctcgcagattccgcccgccgccgctcacctagttacatcccgacgacctccaggtatcccctacggccttgctccactgcccgtcttcccacgtcgctgcatgtggatcttccatagttctttgcccaaaacgtagctcgtccggcgtactttccatattgcattctcgtcctcacaccattttagacanacacaaccgtgttg

SEQ ID NO: 3968 - DNA, 415 bp, Triticum aestivum
  unsure at all n locations
  Clone ID: LIB103-047-Q1-E1-B11
gggtcgacggtctgcgcaccaaacacccagagtagtgcgacgactggattacatgtgaacacataaggactttcagtatttggttggaaacacgtctcagaggtgaaaacacggtttgtgangagttgtactcgtttttcaagggaccatcttcgactgtaatgatttggaaaggatacgagataaatgggaatacattttacacgatctcccaagatcaaaagagcaccaaccaaaatagcggtgtccgctttgatgcaaccaccgagaggggaaatgacacatattatggttacacagtggacatatgggaacttgactacggagtagattttaggtccctttgtttaaatgaaactgggtcaatctgtcangangcggggtatangttagaccacagtatggaatgacaaca

SEQ ID NO: 3969 - DNA, 421 bp, Triticum aestivum
  Clone ID: LIB103-047-Q1-E1-B12
gggtcgacgggtggcccccctgatacagcatcaagaacaaaactcaaagacggcaggcatttggcatacctggaatctggcgtcccaaaggagaaggccaagtacaagatcattttcgtccatggattcgactcctgcagatacgacgcgcttcaagtctccccggagctggcacaagagctgggcatctacctgctgtccttcgaccggcctgggtacggtgagagcgaccctgacccggcgccgtctgagaagagcatcgccctcgacatcgaggagctcgccgacaacctgcagctgggccccaaattccacctcatcggcttctccatgggcggcgaaatcatgtggagctgcctcaagcacatcccgcacaggctctccggggtggccgttctcgggccggtgggcaactactggt

SEQ ID NO: 3970 - DNA, 447 bp, Triticum aestivum
  unsure at all n locations
  Clone ID: LIB103-047-Q1-E1-B4
tacggtcgtagattccgggtcgacgggtttttaaagaaaaagaacctatagttaatgaaagaatagatcaagattccacaagaattggtaaacttgaggatatcattactaatttagggtctgccttttcatccgtttgaaataacccaaatcctcctacctccaatattgctaaattaatgtatcttcctaaaaataagggtgaatcttctagtaaggaaaatgcggatctcaaatcaataagtgttcaccccaacttcttcaatatcattagggaaccttttgctacaaatgaatttcttgatttcttgcctaggagtttgatcattaataaaaagaaggaaactccaaagggttataagtgttccattgaataattacataccaaagatgataatacctagatctattcttgcttttatgcctagctangggtgttaaacgatg

SEQ ID NO: 3971 - DNA, 400 bp, Triticum aestivum
  unsure at all n locations
  Clone ID: LIB103-047-Q1-E1-B9
cgggtcgaccggatggtagacatagacatggtcagccctttttgaagagagtactaagaaataactttgatgtgtcncgtcaactcgcagaacgacgagaagcttgcttactacgccttctccctcgccaacgcgtgcgcggtggctcgcagcacgaggagaaacttttgcttacaagcggtggacgtgcagcagttcatttggtgtcagattgccagaagtactactgtagtaccatcattattgttcgacttccggaagaggagaagagccaagcgcaaggtcacctactaacctagtacagtactactatagccaaagccggtccacctttttagagcatggttaataaatataggcggctcttgcagcagcacatcatttagagcaagtactctgt

SEQ ID NO: 3972 - DNA, 365 bp, Triticum aestivum
  Clone ID: LIB103-047-Q1-E1-C10
cgggtcgacctccaccaaagcgatatccatcatctcatcgaaagattgggaacctcgcctctatcaaaactgaacaacgatttacacatttacaatatcctaaggagagacgtgttccaccaaagcgaaatccaccatctcatcgaaagacgggacacctttgcctctatcaagtggtatcagatttccaggttgctcggtgagattttacagtttttcgtagtttagatcgagtctgttcttcatacctatagtccacgaaaaagccacaaaaaaattagggttagttcatcatatccgaaccaatctgagcctttgcataatctttttagggtttttgctttgttgaatttgcggttgcatcg

SEQ ID NO: 3973 - DNA, 414 bp, Triticum aestivum
  Clone ID: LIB103-047-Q1-E1-C3
acggtcgtagattccgggtcgacgggatacttgattgcttcaagttaaacccttttgagcatcttaagttgtcttttgattcttctgtggatgaggtgaagaagcaatataggaagttgtcactgttggtccatcctgacaagtgcaagcatccacaagcacaagaagctttcggagccctggcaaaagcacagcagctcctacttgatccacaggaaagagggtacattcttgatcaagttacttctgcaaaagaagaactgagggcaaaaaggaaaaaagagttgaggaaagacagtgcatccaagataaaatcccaagtagatgagggaaagtatgaagagcagtttgaaagatcggacgaatttcagaagcagctaataattaaagttcgtgagattttgacagacaaag

SEQ ID NO: 3974 - DNA, 226 bp, Triticum aestivum
  Clone ID: LIB103-047-Q1-E1-C9
cgggtcgacctcttctcccacggatgcggtggctgccgcgctctccaccccaagattgcgcagttcgctgagcggaatccggacgtgctgttcctgcaagtcaactacgagaagcacaagtccatgtggtacagcctccaagtccaagtcctccctttcctcaaggtccaaaagggaacccaagggaaggtcagcaacttcaactggacaaatgcaaccatcaaga

SEQ ID NO: 3975 - DNA, 358 bp, Triticum aestivum
  Clone ID: LIB103-047-Q1-E1-D6
ggagagaaaaacagagagagagagagagtccactgcccgtcttcccctgagctccttcgccggcgaacgcccaaagccccgcatggagatcctccaacaaggcactatgttgatgttcccggggatggatcttacgaaaatggatcctccaactcttacccttcttggagcagcttgttgtgtaatgttgtcgatgcatttcacagtacagctggtatcacagcatcttttctattggaaaaatcccaaagagcagaaggctatactcattatagtgctgatgcctccgttatatgctataacttcctttgctggtcttctggatattaagggaagcaaaacgttttttacatgtttg

SEQ ID NO: 3976 - DNA, 410 bp, Triticum aestivum
  Clone ID: LIB103-047-Q1-E1-E1
acggtcgatgattccgggtcgacggggaaaggacaggaggaaagatcgatggccttgtttctggcatcgggacaggtggtaccattactggatctggaaaatacctcaaagagcaaaatcctaacatcaagctctacggtgtggagcctaccgagagtgctgtcttaaatggtggaaagcctggaccacacaagatccaaggaattggagctggttttatccctggtgtcttggatgttgacatcattgatgaaaccatacaggtttcaagtgatgagtccattgagatggcaaagtctctggcattgaaagaaggattgctggttggaatctcttctggtgctgctgcagcagctgcaatcaaggttgctcagaggcctgaaaatgcagggaaactctttgttgttgta

SEQ ID NO: 3977 - DNA, 274 bp, Triticum aestivum
  Clone ID: LIB103-047-Q1-E1-F12
aagacgaagagcattccagtgactttgagccagaagaaaatggtgatggtgctgaggacgaggagattgaggatgatgatgctgaggatggtgaggattctgtcaaggcgcaatcctcttcgaagaggaagaggtctggcgcggaggatgaagatgatgatgacggtgatgatgatggtgatgatgatgagaagcctccatcaaagcgatagtcaatttgttcttgctgatctggtatcttttctgcttgggccaagaaggaaaataatcctca

SEQ ID NO: 3978 - DNA, 441 bp, Triticum aestivum
  unsure at all n locations
  Clone ID: LIB103-047-Q1-E1-F2
acggtcgtagattccgggtcgacgggttggtggatcaaaaagaataacgtgaggatgaagatgatgatgaatatagtgaagcagtggctatggtatccgttgccatttccacaactccccgggtgtctctcttcgactcacccacgagaacatcaccgccaagtgcctcatggctaaagccactaacaaggtaagccccaacatcaaaaccaccattattcctaatccttctttgacggttggctttgatgatggtaaggggtctaatgaggaggtaaatgaatttgagtccttcatgagtaagctcaagggcaaatccaagaagcacttcgtttctctcttggaacaacttggtgaagccaatgacatgatcgaggctcacgaagaaaccatctctaagatggaaggtcatantcgtgactatgccgatgagatatcgga

SEQ ID NO: 3979 - DNA, 61 bp, Triticum aestivum
  unsure at all n locations
  Clone ID: LIB103-047-Q1-E1-F3
accggtcctatcntccgggtcgacgggccggaagaagggcagcaaggccaagaagagcgtg

SEQ ID NO: 3980 - DNA, 451 bp, Triticum aestivum
  Clone ID: LIB103-047-Q1-E1-G10
cgggtcgaccgggctagcctccggatccatccatccgcccctcgctgccgctgcatctcgtctccaccaccccacttgcccccggacccaggaggatcgtcggagatgtcggacaccgatgagcaccacttcgagtccaaggccgactccggcgcctccaagacctaccctcagcaggccggcgccatccgcaagggtggacacatcgtcatcaaggcccgtccctgcaaggttgttgaggtctccacctccaagactgggaagcatggtcacgcaaagtgtcactttgttgccattgacatctttaatggaaagaagcttgaggatatcgttccttcatcccacaactgtgacgtcccccatgttgaccgccaagattatcagctgattgacataactgatgatggatatgtcagccttctaactgagagtggcaacactaaggatgacc

SEQ ID NO: 3981 - DNA, 262 bp, Triticum aestivum
  unsure at all n locations
  Clone ID: LIB103-047-Q1-E1-G11
gggtcgaccgggaagaagcacaaagccgagaagcggccgccgaagtccaaggagggcggcgccgacaagaaaaagaaaaagccaaaaaaagcgtggagacgtacaagatctacatcttcaaggtgctgaagcaagtgcacccggacatcggcatctcctccaangccatgtccatcatgaactccttcatcaacgacatcttcgagaagctcgccggcgagtccgccaagctggcccgctacaacaagaagcccaccatcac

SEQ ID NO: 3982 - DNA, 383 bp, Triticum aestivum
  Clone ID: LIB103-047-Q1-E1-G12
gggccgaccggagcaagatcctccgcatcctcaaggcccatgggctggaaccagaaatcccggaggacctcaactttctgatcaagaaggcggtggcgataaggaagcacctggagaggaacaggaaggacaaggactctaagttcaggctcatccttgtggagagcaggatccaccgcctcgctcgctactacaagcgcaccaagaagctcccgcccacctggaagtacgagtctaccaccgccagcactctggtggcttaagggagatccagatctggtgtgctcttagctgattaaagcttgattgttctggaaaccattcttatgtaatgctttatgatagtttggagccaagcagatgctgcaaattttctatgtttg

SEQ ID NO: 3983 - DNA, 422 bp, Triticum aestivum
  Clone ID: LIB103-047-Q1-E1-G8
ttcgggggtcgacgggataaggaagttgaagacaaaggctgacctgcttgaagttttgagatcggatgtgtcatgtaaaagcatgacagaagcacaattttttaaaaaagaccaatgttcggattggcacaaaaatcttgatttagttcgcacgtcaagattttacttaagttttttggcttttcgagcttatggcactttttagctatttgtatgtttttgtttcaggaagcgggtcaccttcatgaccgagatgcccagcattataattcagctcggaagatctcttccgacccacaactcgatatctttcccacctaactacacctcggcgttaacaatacacacgccacatcgggagttcgggactagttcctgagcagtgtaatgccagacgcatttaaagcattggcaacattaac

SEQ ID NO: 3984 - DNA, 259 bp, Triticum aestivum
  Clone ID: LIB103-047-Q1-E1-H10
ccgggtcgacgcggagcatgcatctagagtattaagttaaaaacagagtaacgccttaagcaagatgacatgatgtagagagataaattcatgcaatatgaaataaaccccatcttgttaccctcgatggcaacgatacaatacgtgccttgctgccctttatgtcactgggtaaggacaccgcaagattgaacccaaagctaagcacttctcccatggcaagaactaccaatctaattggccaaaccaaacgggtaat

SEQ ID NO: 3985 - DNA, 284 bp, Triticum aestivum
  Clone ID: LIB103-047-Q1-E1-H2
ttccgggccgacgggataaagaagttgaagacaaaggctgacctgcttgaattttgagatcggaggtgtcatgtaaaagcatgacagtagcacaattttttaacaaagaccaatgttcggattggcacaggaatcgtgatttagttcgcacgtcaagattttacgtaagttttttggcttttcgagcttatggcactttttagctatgtgtatgtttttgtttcaggaagcgggtcaccttcatgaccgaggtgcccatcattacaattcaccaccgaagatat

SEQ ID NO: 3986 - DNA, 334 bp, Triticum aestivum
  Clone ID: LIB103-047-Q1-E1-H4
cgtgagtagaaatgtacctagcaagacttacatcagttctagctacatatgcatcagtatcaacagagtggtggtggaatttaactacagcaagccagctttgactcggttgctatcctgtactatgactgcagataactcatttgaggtggcgcgcacgagtccactcaccatatcaatacaccactatggatccgctcccatctccctatgagaaggccatccatagcactcacgcttatcttgcacattttagagtatccactttcacttgtctatgaacaatgcaagtgttccaagtagtccatatccgcagacgcggctattcgaatag

SEQ ID NO: 3987 - DNA, 447 bp, Triticum aestivum
  unsure at all n locations
  Clone ID: LIB103-047-Q1-E1-H6
gcaagaccacctccaaggaaggcggcgagaagaagggcaagaagaagagcaagaagagcgtcgagacctacaagatctacatcttcaaggtgctcaagcaggtgcaccccgacatcggcatctcctccaaggccatgtccatcatgaactccttcatcaacgacatcttcgagaagctcgccggggaggccgccaagctcgcccgctacaacaagaagcccaccatcacctcccgggagatccagacctccgtccgcctcgtcctccccggggaactcgccaagcacgccgtctctgagggcaccaaggccgtcaccaagttcacctcctcttagactgcgtcgcctgtatctagtagcaaatgtagttctatactgttggcttagtgcttgtccgtggactctggttatctgcangttatagtagtcctacttttggatgaaaatt

SEQ ID NO: 3988 - DNA, 264 bp, Triticum aestivum
  Clone ID: LIB103-047-Q1-E1-H8
acggggatgatcaggcaccctcaattgcagcaccgccgcgacgcggcatggttctgtacatgtcactgtcggttcgaacagcacagcacggtgctcggcgcgcttttcaatgccgtcgtagctccacgtcaagcggatttaatatctcatttgctgttctgctaggatcatgtgtaagaccgtcgatgcactgcatcctttgggggctgcgcacatgtgatttgtacggataccctgcactgttgatagtcctatttgtgcaca

SEQ ID NO: 3989 - DNA, 433 bp, Triticum aestivum
  Clone ID: LIB103-048-Q1-E1-B10
cgggtcgaccgggccttcaaatacatccgggaggtgctcaagtgggaggaggacaaggacgagaactactaccaggaggagtccttctacagcaccaccgagatgagctcctcccccttcatccgagccgaatgagaccgcgtcccctgcccccgccgaaggccggttcctatactaatgatgcgccgtttcgttttcgccgccagtcgattccgttttgcgccgtacaaaaaatcattcattgattgttggtctgtaaaaagttaatctgcaggtttttgttcttctgatggatgggatgtttttcatgtttgtgtctcttggtccttgagatagagatgaagcatgattgatctgttggtgtgtatttagtgagtggtactagcagttttcttctagtcagtgcacagattgacctgttggcaccaaaatt

SEQ ID NO: 3990 - DNA, 402 bp, Triticum aestivum
  unsure at all n locations
  Clone ID: LIB103-048-Q1-E1-C10
cgggtcgacgggggaagtaatgggccatacgggaaaggatagaggggcctcaatgagtggccacgcgcaccccaagggctggtccgaattggactangagggggtggcgccccccaccttccttctcccctcttcctccttccctccttctcctactaggaataggaaagaggagggaatcctacttggactggggagtcctagtangattccccacacctggcgtgccccccttgggccggccacctcttccctcccctcctttatatacgtggccagggggcaccccatagacacacaagttaatccttacccgtgtgcagtgcccccttccatatttttccacctcggtcatatcatcctagtgcttacgcgaatccccgcgccggtaacttcatcatc

SEQ ID NO: 3991 - DNA, 435 bp, Triticum aestivum
  Clone ID: LIB103-048-Q1-E1-C12
ggtccagaaatccgggtcgacggtgtgcggcagtgaagaaggggaacacgggaggaaggaggcggtcacaccgttaggcgtaccatgcgcaatcgtcgcgctgtagcacttccctttgataatccatgccaagcaaggttcatgcacctggtgagacatgttgtagtaccctgtaattctacaaccacacatcctgattttatgtacgactactaggtcaaacaaaaagaaatgggttgggtcatctcttaagaacatctttgcttgtttagtggatgaggggactcgattttccaagccaaacatcttgtcacgaattattataggcttatgaggacgacttgagaatcagaatgtcaagctgaacagctgataacataggtcacttattagaggctacagccaaggaaaagggttgaagtggcaacatcaaca

SEQ ID NO: 3992 - DNA, 430 bp, Triticum aestivum
  Clone ID: LIB103-048-Q1-E1-D10
cgggtcgaccgggaggaggacattgttggaatatacaagccaagttctataatgaaaatttcccactagtatatgaaagtgacaaaacaagagactctatatcatgaagatcatggtgctactttgaagcacaagtgtggaaaaaaggatagtagcattgtcccttttttatttggcctttctttttttggcctttttttggcctttttctttttttgggacaatgctctattaatgatgatcatcacacttctgtttatttacaactcaaagataacaactcgatactagaacaagatatgactctatatgaatgcctccgacggtgtaccgggattgcgatgaatcaagagtgacgtgtatgaaaaattatgaaggatggcttggccacaaatacgatgtcaactacatgatcatgcaaagcaatatg

SEQ ID NO: 3993 - DNA, 312 bp, Triticum aestivum
  Clone ID: LIB103-048-Q1-E1-D11
gggtcgaccgggaagaagcacaaggcggagaaaccggcccccggggtcaaaggaggccgtcggccaaggggaaaacgaggggcaggaaaaagggcaccatggccaaaaaaacctttgagacgtacatgatctacatcttcaaggtgctgagacaggtgcacccggacgtgggcatctcctccaacgccatgtccatcatgaactccttcatcaacgacaccacaagcatccgcatccgcatcccatctcacatcccatctccccacacgctctaaccaccagcagcaccagcacccatggcacccaaagccg

SEQ ID NO: 3994 - DNA, 337 bp, Triticum aestivum
  Clone ID: LIB103-048-Q1-E1-D12
cgggcgccggcgtcatggaggccggcggcaggggaagagaggggcacgacgaaggcagcatgccaagaagagctggggacgtacaggatcgacatcttcaaggtgctgaggcaggtgcacccggacgtgggcatctcctccaacgccatgtcgatcatgagctgcctcatcaacgacacgagaaggatccgcatccggatctcacctcacatcccatctcgccacacgctcgaaccaccagcagcagcagcacccatggcacccaaggcggcggataagaaccccgctgagaagacgacggctgggaagaagcccacggcgggggaagcggggcgcc

SEQ ID NO: 3995 - DNA, 391 bp, Triticum aestivum
  Clone ID: LIB103-048-Q1-E1-G10
cgggtcgaccgggagtcttttgtgaactaagttgacaaagcccttcgtacatgtcaacctagtagacccacaagtcagcctccaaatctgtcccaaacagcacacaacccgaaatttctggccagattcaaattaactttaaaactaaacataccttaatttaaatccaatgaaattttacccgcacaaaaacaatgaaatttaaaatatcaaaatccgaaagaaaaaaagtattttggaacaaatgtcatgtttgctatatttttcattttacaacccatttattattacttatagcccatttcttattacttatagcccattttctgggaaaaatgcatccctcctcgtcttgaaagatttccggcccagcagggcatagaaaagcaag

SEQ ID NO: 3996 - DNA, 416 bp, Triticum aestivum
  Clone ID: LIB103-048-Q1-E1-G11
gggtcgaccggtatcttaaagtgaccaggcggtggggctctgggccttcttgctatagtgctgcggtgagctgggatggcccgaaccgcttttcccccttcatctcgaatcatctccaaatcctggataaatcaaaccacaaaagaatgtatagcatggggactttggaatataccctcatgtatggcctttctcttagccgcccagattgcccatagcgtgacggatagcttgatgaacagctcatgagataatgactgcatatgtgtaaataaccattgtttcgcattgggttctgaggtggctgcgatttgctgtccaagctcttcatcaaccagcgcccatgtacacctcgacatggtgcaatctactagagagtgcttccatgagtcgggcgccccacatattccacatgc

SEQ ID NO: 3997 - DNA, 420 bp, Triticum aestivum
  Clone ID: LIB103-048-Q1-E1-G12
ggtccagaataccgggtcggccaccgaggtattctgacctgtctggatggttacatgaacatcgcaatggagcaaactgaagagtacgtgaacggccaactgaagaacaagtatggagatgctttcataagaggcaacaacgtcctctacatcagcacgtcgaagcggtccctcaccgacggagcataggcggagtggagcattcacatcatcatgtaatttgaaggtcgttaacccgattattggttgtggtgatctgactggtgctgcctttgtcaatctcgtacctcctgtctgctgtattgcctgctgatggagacttatctggaaccattacgattcgatgttatcttgtgtttttagcttggagatgtttgtggccaagattctgcgatcaggatatagataagatttgtgttt

SEQ ID NO: 3998 - DNA, 137 bp, Triticum aestivum
  Clone ID: LIB103-048-Q1-E1-H10
gggtcgacgcggacctacaagatctacatcttcaaggtgctcaagcaggtgcacccggacatcggcatctcctccaaggccatgtcaatcatgaactccttcatcaaggacatcttcaaaaacctcgccggcaaggc

SEQ ID NO: 3999 - DNA, 387 bp, Triticum aestivum
  Clone ID: LIB103-048-Q1-E1-H11
cgggtcggccggacctacaagatcaagatcttcaaggtgctcaagcaggtgcacccggacatcggcatctcctccaaggccatgtccatcatgaactccttcatcaacgacatcttcgagaagctcgccggcgaggcggccaagctggccaggtacaacaagaagcccaccatcacgtccagggaaatccagacctccgtccgcctcgtcctccccggcgagctcgccaagcacgccgtctccgagggcaccaaggccgtcaccaagttcaccagcaactacggttccgtcgcggtgtctctagggttccgtccccgtgttctcttctagtagcttttgtgtcgccgtcggtcgtgcccatgtgtatcgttataggtaggttacgcg

SEQ ID NO: 4000 - DNA, 405 bp, Triticum aestivum
  Clone ID: LIB103-048-Q1-E1-H12
tgtttggaatttattagaatactctatgtgcttcacttatatcttttgagctagatagttttgctctagtgcttcacttatatcttttagagcacggcggtggcttgattttgtagaaattgttgatctctcatgcttcacttatattattttgagagtcttctagaacagcatgatatttgctatggttataaaattggtcctagaatgacgggcatccaagttgggtataataaaaactatcatagaaagtgaattggatgctatgatcaatttgatgcttgataattgttttgagatatgaggatggtaatattagagtcatgctagtagagtaattatgaatttaaggaatacttgtgttgaagtttgtgattctcatagcatgcacgtatggtgaactgc

SEQ ID NO: 4001 - DNA, 331 bp, Triticum aestivum
  Clone ID: LIB103-048-Q1-E2-A10
ggtcgacgggctatcatgcttcacttatattattttgagagtcttttagaacatcatggtatttgctatgatcataaagttggtcctagaatgatgagcatccaagttgggtattaataaaaactatcatagaaagtgaattggatgctatgatcaatttgatgcttgataattgttttgagatatggaggtagtgatattaaagtcatgctagttgggtgattatgaatttaaagaatgcttgtgttgaagcttgtgattcccgtagcatgcacgtatggtgaaccgctttgtgatgaagttggagcacaattttatttaatgattgtct

SEQ ID NO: 4002 - DNA, 372 bp, Triticum aestivum
  unsure at all n locations
  Clone ID: LIB103-048-Q1-E2-A2
tggcgtgagatgaaagggcgagagggaagggtccctcggtggcaaaaaaggaggttgcctgaagttcttcaccctggggtttacccgggttcaaagttacacggttttcgcaggaccttgtcgttctcatgcttgctgctttcctaaatgtttgtttgcttgtagtcttcggttagggcaaacaatgatcttttcttttctacatttttccgagcttggtcgctccgttgagttgtaagcttccaagagagttcctatgtatcgttatgccgatgaggtttgtatgtggttgtaattcctggtcgggtgatggctttgttaattcaaagccgggctcttctcgagcccacgtttaaaanaaaacttactatg

SEQ ID NO: 4003 - DNA, 417 bp, Triticum aestivum
  Clone ID: LIB103-048-Q1-E2-A3
acgggatagaccaaaacgaattcagtggcatttgggaaaaaccacaagatgctgtccatgggaaaccaaagtcccctgtaacgaatggtgttaaacgggaagccaaaggttccgcagaaaaaaccccctccacggctgctcctccaagcgttaacctacccggcaaaagttggcccaaacagaaccggccgagaaagaaccctgcggcgaccgaaaagaaccctgtcgttgccaacggtgctgtcaagaccggtgtagctgcttgatcgcatacccgatcctcccagctagccatgaagaacaaacggacggtgctggcgaaccaggcgagacatgcggggtcccaaggtactgatcaccaaaggtggctgctggaaagcgggtcggatagttaggtttccctagctctctcctttt

SEQ ID NO: 4004 - DNA, 438 bp, Triticum aestivum
  Clone ID: LIB103-048-Q1-E2-A7
ggaaccacagcggcgcacaaaccctacatccagatccatcccacctctgacctaggctatcatgacttccatcgtctccaagctcgcgcgggcagccgtcgcaacccacgcctcttccgcaccgattggatgtactgctggtggcagtcgctctacggcccggtgtctccctgggctctggctgactggcggtaccatccgacgcatgtgtagaggcgtctctcctgcaggaggtcccaattcagaagaagagaaaggcagacccaactcggaagatgctgtagatgctgcagccatagatcctatagattatctccatgttcaagaggatttcctcaagtcgaaggaagccctgtgggccttgtaagactactggcgcaagtatcatggcatctcgcgggacagaaatgagattgccagacggttcaacatattttg

SEQ ID NO: 4005 - DNA, 452 bp, Triticum aestivum
  unsure at all n locations
  Clone ID: LIB103-048-Q1-E2-A9
gggtcgacgaccacaacgggaccagcaccactgctaactcaatgatggttgctatctctcacaatatatatattacttttatatgtgtcaactttaaggtttatatgtttgggctgtgcttttgtgatattttggactgtcagtgctttgactgatttttaccatctcaatgtttggcattcatgtaggttttagcattacttctgcgctcgtggtatgttaccttgccatgtcgcatcattaatttgtcttgtatgtggtgtttgtccatctgctgagttgtatacttattactcgttttgtctgcgccttttcttcattgagtttacttattgatgctgttctgttgccctctatgctgttgtttgtttgctctgctggttcaatacacctgttgcccctaaatanatcaattatatatgcaatttgagtctgccacttttttgtttcct

SEQ ID NO: 4006 - DNA, 247 bp, Triticum aestivum
  unsure at all n locations
  Clone ID: LIB103-048-Q1-E2-B1
aaaagctacctctcaacccacccttcaattaaaaaccattcggaccccttgccccaacccaaggtattgaagaaggcaatccacctatacaggaaaccttgcgccggcaacggaatcaaaggttcccccaaaggttgcattttcaaactcccctgcttgcggcgtaattcgtttggtggcggtgggtgcctgncgcggaaacatgccctttgttgcctgcacattgacggccattaagaagagtgta

SEQ ID NO: 4007 - DNA, 443 bp, Triticum aestivum
  Clone ID: LIB103-048-Q1-E2-B3
ggtcgacggggaaaccgaactggaggaaaaacactttaaagttaaccaccataaattatattacaaacccttggttaatacaacttcggggaatttcggttacatcaactcgaacatgatgtccttcgagcattggccctctatcaagcgggcaccctctaggacgtcctcaaaatagcgctctggcttgcggtggtccttgcctccgggtggaccctcaactgccacgatggcggccttcattttcgcccagtgcatcttgacacgggcaaaggccagccgcgcaccttctatacatgacgaccgcttgaccatgacaatttgggacagcgcgtcaacgagtcgctgcaccaggccaaaatagctgcttgggacgggttcggctggccacagccggactatgacgtccctcatggccaatccggacaccctatgcagctcgg

SEQ ID NO: 4008 - DNA, 421 bp, Triticum aestivum
  Clone ID: LIB103-048-Q1-E2-B5
acggggaggttaaagcgacgccgccgccgcaagccgtccgcctcgctcttctcccgagcctggtcctcatcctctcgcctctctccccccacacagatttagcaatctaggtttagcgcctccgtccatctcgtagctgctgcgatggcgatcaagaggaccaaggccgagaagaagatcgcgtacgaccagaagctctgccagctgctcgaggagtacaccaaggtgctcatcgccgtcgccgacaatgtcggctccaagcagctccaggagatccgcaagggtctccgcggtgactccatcgtgctcatgggcaagaacaccctcatccgccgctgcatcaaggtgcactcggagaagaccggcaacaaggacttccttgagctcagcaacctcctcgtcggtaacgttggcctcatct

SEQ ID NO: 4009 - DNA, 431 bp, Triticum aestivum
  Clone ID: LIB103-048-Q1-E2-B7
cccgggccgacttctactcccaaggctgcggtggctgccgcgctctccaccccaagattgcgcagttcgctgagcggaatccggacgtgctgttcctgcaagtcaactacgagaagcacaagtccatgtgctacagcctccatgtccatgtcctccctttcttcaggttctacaggggagcccagggcagggtcagcagcttcagctgcacaaatgcaaccatcaagaagttcaaggacgccctcgcaaagcactcgccggacaggtgcagcctcggcccggcgcgggggctcgaggaggcggagctcttggctctggcggcaaacagggacctggaattcacctacaacgagaagccgacgctggtgccgatcgccgaggctatccagatggaagctgcctccattggcggcccatggatgccattgccc

SEQ ID NO: 4010 - DNA, 430 bp, Triticum aestivum
  unsure at all n locations
  Clone ID: LIB103-048-Q1-E2-B9
cgggtcgacggggaaagtggctatgaaattctcccaccatgatgctgcgggtccttcaagctgatgtgcggcaaactccaccttttccgcattcatgcatcctgctgtggtcaactctctagctgtcttgtggagccaatcatctactactatcggctcggtgctactggaaaacaccggtggattcagcctaagaaaacgggctaagtgatcaataggtggtggtggtggtgggttgttgttgttgttattcccttggttctaattctggactagtaactgcatcaatgtgttctgctgctggatcaactgagtgagctccggtgggaaggtaaatccggggtcacgtctcggaggcatctgagggtttagaaaagatgagatttaagaatagangggggctaaagagaaaacactacccatatgcaca

SEQ ID NO: 4011 - DNA, 417 bp, Triticum aestivum
  unsure at all n locations
  Clone ID: LIB103-048-Q1-E2-C1
ggcaaattaataaaaattctgtacaccatggtaaaaacaatcattataccctggtccaaatggataaaaaaattactttgcttccaaggacccctgattcaattttgaaagatgatattaatagagctaataaagcaaaacaggagaaaaataagactgaaaatcatattgtggcaaaagaatttgagcaacaaatgcggcctaataataaacaatctagtgttgcttctgaaattaaattgaaaagtgcatgtttacttgccaccaaatctgatattaatgatctagattttagaaaatctatttgctatgcttttgagtgcaaagaggcattattttcattcgaggacgtgccttcctctttgcctcctgctgtcactaacattttgcangagttcgctgacgtctttccacaag

SEQ ID NO: 4012 - DNA, 368 bp, Triticum aestivum
  unsure at all n locations
  Clone ID: LIB103-048-Q1-E2-C2
tcgatggagaataaaaaggaatgaaaggtgtcggaggaaaaggtgacacaggaggaacttaccagggtttatcggaaaggaaaaggaaagaaaggtcatcgacagaaaaactcaaggaagaaaaacttgggtattaagaacgagactcgtcaaaagtcacatcacgcgagatgcgcaagcgacgacctacaggatcccaacatcgatagtccttgtgcctatcgctgtagccaaggaaaacacactcaaccgactgagtagtcagtttggtgcgttctcggggggcaagaagaacatagcacaaacatccaaacatacgaagagctgagtagtcaggagagagaccagtgagacactccatangaata

SEQ ID NO: 4013 - DNA, 404 bp, Triticum aestivum
  Clone ID: LIB103-048-Q1-E2-C3
ctctgaaggtgatcaattaccaagacttcaaagcctgcaaaggataccccaaggaattgtggctgttcaggtcaacattggtgtattaattgtgtgcaccgctttcttatctggcgagcctgcaaccaggctccggtctcaagaactgcaacagctgatacctgcattgcttgaattcatggctgtctgcaaccgtgcaatccgtgtgcattttagattgataggggaagaagaccaggagttccacacgcaacttgtcaatgggtttcagtctcttactgctgagctttctcactatattcctgccatactttcggagctatgactgtagcaaggtggcaggcagttaggtagcatgtgaatggttggttgatttttcagttggggatctgctccaaatgttc

SEQ ID NO: 4014 - DNA, 375 bp, Triticum aestivum
  Clone ID: LIB103-048-Q1-E2-C4
gtcaggaaaaataggggcggtggcgtcatgggctcaaattccaaggcaaaaacaaaggcaagggaaaggttcaccgcaaaggaggttgcccaaaggatgaactaacccaacccttatatgtgaaagcatatgccatgtagtttccctttcagtgtgtcctgattttgacgaggaactcgaacccttttagcagcagtgtggaatcgtattgtggttttctgaaaaaaaaaaaaaaaaaaaaaaaaaaaaaaaaaaaaaaaaaaaaaaaaaaaaaaaaaaaaaaaaaaaaaaaaaaaaaaaaaaaaaaaaaaaaaaatttaaaaaaaaaaaaaaaataagaaaaaaaaaaattaaaaaaataaaaaaaaggggccc

SEQ ID NO: 4015 - DNA, 369 bp, Triticum aestivum
  Clone ID: LIB103-048-Q1-E2-C5
cgggatagcctaattcatcgtggccgataagaccatcctctccatggcaaggaagcactccttcgaggacgcgccggaccatctcaagaatacctccttcaactaatcagcctataagatatctattattagtactgtaatgttcaggcagcacttatgtgatatcaggcgaggcttgcagacatgcagtggtgtagtaccgcgcttctctgcgcgcaagatcttatctgatgaagtgatcttgatttaatatgaatgaagggactcgattttccaagccaaacatcttgtcacgaattattataagcttataatgacgacttgagaatcaaaatgtcaaactgaacagctgataacaataagtcactt

SEQ ID NO: 4016 - DNA, 352 bp, Triticum aestivum
  Clone ID: LIB103-048-Q1-E2-D1
aaatccatgctgccaactctcaaggtcctcctcatcccggggatcctcaaccaaccgccgttcggtaccccttcctaaggctcaactgaacttgtaaataaaatcccggtaccaacccaaatccttttcctttttttgcggaaaatcacctggttaattgttacctgcccttcaatcaaggaatttcatgtgaaaataaaaagttccagaaatttcaaatttatatgtaccttctctaacgtccaagatgtaaccaggatattaagttccaggaagtttacttaatatcctggaagacagagatgctggtttaagtttcaagagatatggatttttgactaagttgaattta

SEQ ID NO: 4017 - DNA, 258 bp, Triticum aestivum
  Clone ID: LIB103-048-Q1-E2-D12
acggggtagatcacaaggcggagaagcgggcgccggcgtccaaggaggccggcggcgaggggaagacgaggggcaggaagaagggcagcaaggccaagaagagcgtggagacgtacaagatctacatcttcaaggtgctcagtcaggtgcaccctgacgtgggcatctcctccaaggccatgtccatcatgaactccttcatcaacgacaccataggcatcctcatccgcatctcagctcacatcccaactccccaca

SEQ ID NO: 4018 - DNA, 318 bp, Triticum aestivum
  unsure at all n locations
  Clone ID: LIB103-048-Q1-E2-D3
ccctcctaattgcaagagcaaccaggcaagccccccctttgatcaccagatatcgcctactctaatctctactgcttgcattaaagtagtgtaccatgttactgcttttcgatatcctattctgatgcatagcctatccttgctactattgttactacctttacctgcaatcctatctgcttagtctaggatgctagatttccatcagtggccctacattcttgtccgtctgctgtgctatactatcgggccgtgatcacctgngcggtgattcacggcatatacttatatactatatacatgacacatgtgatgact

SEQ ID NO: 4019 - DNA, 286 bp, Triticum aestivum
  Clone ID: LIB103-048-Q1-E2-D4
acgggagtgttttgattatggcgaaggctatgaacaatcgggcttcactggcatgatttcgataagtctttacaacagtatggccactttgctttgctaatgaacctagtcctggtatcagatgcaccaatcagggatgggctccaccctttcagggtccatgaatagaccaccatgaaaattttgctacggtaagatccttttaagaacttaccacagtgatattaatctcatgctagtggagacatagtgcccttacgaactccttgggtcaacgtcagtgact

SEQ ID NO: 4020 - DNA, 433 bp, Triticum aestivum
  Clone ID: LIB103-048-Q1-E2-E1
gacgccgcaaggaggaacaacaccaggatgcccaagtattccaagttcacgcagcaggagctgccggcctgcaagccgatccttactccaaaatgggttgtcccggtgtttttccttgtcggcgtcgtctttgtcccagttggcgtcgtttcgctactagctgcacaagatgttgttgagatcattgatcggtatgatcatgcatgtgtcccacctaacatgactgataacaagcttgcgtacatcaagaatgatactatatccaaagagtgcacaaggattctcacggttacaaaggagatgaaacagccaatttatgtgtactaccagctcgataacttttatcagaatcatagaaggtatgtgaagagccgaaatgatgcgcagctaagagaatataggaagtcagatacgacaacctcatgtgaccctg

SEQ ID NO: 4021 - DNA, 395 bp, Triticum aestivum
  Clone ID: LIB103-048-Q1-E2-E2
ggatgagaatctaagttgggtataataaaaactatcataggaagtgaattggatgctatgatcaatttgatacttgataattgttttgaaatatggaggtagtgatattaaattcatgctagttgggtgattatgaatttaaataatgcttgtgttgaagttagaaagtcccgtagcatgcacgtatggttaaagttgtgtaacaaatttgaaacatgaagtgtacctggcttgtgcatccttacaagtggcggtcggggacgagagatggtcttttcctaccaatctatccctctaggagcatgcgtgcagtgcttgattttttatgacttctaaatttttgcaataattatatgagttcttatgactaatgttgagtccatggattatacacg

SEQ ID NO: 4022 - DNA, 172 bp, Triticum aestivum
  Clone ID: LIB103-048-Q1-E2-E3
tcaagtcgatcgggtcaagatgaagtggggcggtggcgtcatgggctccaaatcgcaggccaagagcaaggcaaaggaaaagctcatcgccaacgacgctgcgcataggatgaactaagcctaaccttatatgtgagagcatatgccatgtactttccctttcattgtgtcc

SEQ ID NO: 4023 - DNA, 333 bp, Triticum aestivum
  Clone ID: LIB103-048-Q1-E2-E4
tccatagcaattcagagatatattgccatgcaacttttcaccgttccttttattatgacacacatcatcattgtcatattgctttgcgtgatcttgtagttgacatcgtatttgtcgcaaagccatcgttcataattctttcaaacatgtcactcttgattcattgcacatcccggtacaccgccggaggcattcatatagagtcatattttgttctagtatcgacttgtaatttttgagttgtaagtaaataaaagtgtgatgatcttcattattagagcattgtcccatgtgaggaaataaaaaaaagagaaaagcaaaaaagaaggcccc

SEQ ID NO: 4024 - DNA, 404 bp, Triticum aestivum
  Clone ID: LIB103-048-Q1-E2-F2
ggaggcgaaaggcgaacagccgaacgtgaccatctacatcaataacctcaacaaaaagttcaaactcaaaccgcttaaaaattccctcaaggccgttttcccccattttgggaaaatcattgaggtgcttgcttttaaaactttgaagcataaagggcaagcatgggttgtgttcgaagatgttgcatcagcaactgaggctttgaagaggatgcaagattttcccttctatgacaaacccatgaaaattcaatatgccaagaccaagtcagatgttatagcaaaagctgatggcacctttgtaccccgagaaaaaaggaagaggaatgatgagaaacctgaaaagaagcagaagcgtgagcagcaccacgatgttaaccaggctggcgtgggcatgcatgcct

SEQ ID NO: 4025 - DNA, 426 bp, Triticum aestivum
  Clone ID: LIB103-048-Q1-E2-F3
tacaggtaaacccacagtactgaatgacaagagtggatctgaaaaatcttgggtacactgacgaaccgttcgtcctacccaatgatgtggcacaggttatctatgtgaaggacatgtctaccaaaccgagaaaaagaaaagataaggaagcgaatacatcatacgatgagccaaagcgccacatagttctttcaggaaaaagggacatcctgggagtggacggcaagacagacatgtctgaagattatgaaaagtttcatgaaattcctcccttcaatgtcaaggctgacccaagcatcctgataaacaatgaagattatccatggttacggcgcaataagcaaatgacacaagcgaagaaaaagtgaagactttctcccgcaactattatgatgataccatgccaactttgtaacagatgatctt

SEQ ID NO: 4026 - DNA, 429 bp, Triticum aestivum
  unsure at all n locations
  Clone ID: LIB103-048-Q1-E2-F4
catcggattagctgccaatcgtgacgctgcagcgatcatgttatccaacggggttgggaagtgacccggcggtgttggcacatactgaggcgggtcatgattttgtcgaggcgggtctgcagcatgtggctgatccggcactcctgtcccaggtgtttcaccccagtttactgctgccagattactggttcctgctcctggcgtgctgaagagatttcttgcctcataaaccgtcggtagacgagattggtgccttctcctcataacgtcgtttgaagcgttctgatccaacatgagccggtaattttctgcttgaatctgctaccctgagcatccanagcggcctactcctcanccatcctggtttcctcagcagccatctcctcattagcctgagctatctgatctcgcaatttcctgacctctaca

SEQ ID NO: 4027 - DNA, 402 bp, Triticum aestivum
  Clone ID: LIB103-048-Q1-E2-G1
aagggcgaggcgcagatctgccgagccgaggaggagaaggggaggaagggtggggagggagagagggaagaggagccatgcagagttgttgttggaggaggtcccctttgcttcttacaggacagcaaatcgcattcaagaagttggaggaggtgtatggcacctttgatgcgccttcacagaggaatggcttctttctgccaaggcccaagatgaccaacgctgaccttggcaggatcatcaactctgatgaggtgcagtctgtcgttaagccaaccaacaaggagataaagctcaggaagaagaggaggaacccgctcaagaatgtggctgcagtgctcaagctgaacccctactttggcactgcccgcaagatggctaccctcgtggaagctgctcgca

SEQ ID NO: 4028 - DNA, 430 bp, Triticum aestivum
  unsure at all n locations
  Clone ID: LIB103-048-Q1-E2-G10
ggtcgacggggagtcttatgtggactaagttgacaaagcccttcgtacatgtcaacctagtagacccacaagtcagcctccaaatctgtcccaaacagcacacaacccgaaatttctggccagattcaaattaactttaaaactaaacataccttaatttaaatccaatgaaattttacccgcacaaaaacaatgaaatttaaaatatcaaaatccgaaagaaaaaaagtattttggaacaaatgtcatgtttgctatatttttcattttacaacccatttattattacttatagcccatttcttattacttatagcccattttctgggaaaaatgcatcnctcctcgtcttgaaagatttccggcccagcagggcatagaaaagcaagtaagcctacgttggttattctgcanaaaaatagctgggcta

SEQ ID NO: 4029 - DNA, 322 bp, Triticum aestivum
  Clone ID: LIB103-048-Q1-E2-G12
ggtcgactaccaaggtattctggcctgtctggatggttacatgaacatcgcaatggagcaaactgaagagtacgtgaacggccaactgaagaacaagtatggagatgctttcataagaggcaacaacgtcctctacatcagcacgtcgaagcggtccctcaccgacggagcataggcggagtggagcattcacatcatcatgtaatttgaaggtcgttaacccgattattggttgtggtgatctgactggtgctgcctttgtcaatctcgtacctcctgtctgctgtattgcctgctgatggagacttatctggaaccatta

SEQ ID NO: 4030 - DNA, 431 bp, Triticum aestivum
  unsure at all n locations
  Clone ID: LIB103-048-Q1-E2-G2
aagataagagtatcatcttaaagaagagcagaagagcaagcagattgaagatattacaagtctttcaatacaatgtcggttggccacccatgatgaaccagagcgcacagagaaatactattatttccggtctctccatatgtggctcacatgcatttcgaacctaaagtaggaacatttagctaaccaattaaacatctctcagttttactaatattagatatgaatttgtacaactaagcttgtttagctcgatgggtggagtagtgctattacgacacgaaccacgtaggctgattgtggtcatcataaaattgggaaaacataagcatgatgggtacagtgttaaccatggcagtgggatggcagatctgaagctgcaaaccgcgcaaagggtagttagcanccgatgttttctttgaaataacaac

SEQ ID NO: 4031 - DNA, 432 bp, Triticum aestivum
  Clone ID: LIB103-048-Q1-E2-G4
ggccgttacatcattgcaaagggaggaatcacttcatctgatcttgctacaaaagctttggaagctcggcttgccaaagtaatgggacaagctttacctggtgtgcctttgtggcagcttggccctgagagtagacatcctggtgtcccctacattgtttttcctggtaatgttggtgataacagtgctcttgcagaagtggtccagaattgggcttgcccttctagaagttcaacaaaagaacttctccttaacgcggagaagagtggctatgcagttggtgctttcaatgtatataatcttgagggaattgaagctgtaattgcagctgccgaggctgaagaaagtcctgctatcctgcaggttcatcccagttccctgaagcaaggtggagttccgttggtagcatgctgcattgctgcagcagaacga

SEQ ID NO: 4032 - DNA, 184 bp, Triticum aestivum
  Clone ID: LIB103-048-Q1-E2-G5
tcgacgggggattcaatctaaaaaaaaaaaaaaaaaaaaaaaaaaaaaaaaaagaaaaacaataagataataaaattatatacaaatggataaacaaatatggtaacttctctaatgtgaggcagcattctcgtctcgagccttatttttacatggtcgcgaattggaggatcttctgttgtgt

SEQ ID NO: 4033 - DNA, 451 bp, Triticum aestivum
  Clone ID: LIB103-048-Q1-E2-G8
ccgggtcgacggggaagtcggccgccaaggagggcggcgacaagaagggcaagaagaaggccaagaagagcgtggagacgtacaagatctacatcttcaaggtgctgaagcaggtgcaccccgacatcggcatctcctccaaggccatgtccatcatgaactccttcatcaacgacatcttcgagaagctcgccggcgaggccgccaagctggcgcggtacaacaagaagccaaccatcacgtcccgggagatccagacctccgtccgcctcgtcctccccggcgagctcgccaagcacgccgtctccgagggcaccaaggctgtcaccaagttcacctcctcttaggctgttcgtcttcctgtgtctcgtagttagctgttcgggtgtgtttgtggccgtgttatcctgtaagaatcgcaccgcgatgtttctgtatctcgagaaatggt

SEQ ID NO: 4034 - DNA, 364 bp, Triticum aestivum
  Clone ID: LIB103-048-Q1-E2-H10
ggtcgacgggaactacaagatctacatcttcaaggtgctcaagcaggtgcacccggacatcggcatctcctccaaggccatgtccatcatgaactccttcatcaacgacatcttcaaaaacctcgccggcaaggcggcaaacttggcaagttcaacaagaaacccaccatcacgtccagggaaatccagacctccgtccgcctcgtcctccccggcgagctcgccaagcacgccgtctccgaaggcaccaaggccgtcaccaagttcaccagcaactagggttccgtcgcggtgtctctagggttccgtccccgtgttctcttctagtagcttttgtgtcgccgtcggtcgtgcccatgtgtat

SEQ ID NO: 4035 - DNA, 291 bp, Triticum aestivum
  Clone ID: LIB103-048-Q1-E2-H11
tctacatcttcggggtgctcaagcaggtgcacgcggccatgggcatctcctctacagacatgtctcagcatgatctccttcatcaacgacatcttcgggaatctcgccggcgatgcggttactgtggccaggtaggggatgaagtccagtatcacatccagtgaaatctagagctccttgcgcctcgtcctccgcggcgacctcgccaagcacgccgtctcggacggcatcacagccgtcaccatgttcatcactaactacggttacgtcgcggtgtctctagggttccgt

SEQ ID NO: 4036 - DNA, 419 bp, Triticum aestivum
  Clone ID: LIB103-048-Q1-E2-H12
cgggttatttggaatttattagaatactctatgtgcttcacttatatcttttgagctagatagttttgctctagtgcttcacttatatcttttagagcacggcggtggcttgattttgtagaaattgttgatctctcatgcttcacttatattattttgagagtcttctagaacagcatgatatttgctatggttataaaattggtcctagaatgacgggcatccaagttgggtataataaaaactatcatagaaagtgaattggatgctatgatcaatttgatgcttgataattgttttgagatatgaggatggtaatattagagtcatgctagtagagtaattatgaatttaaggaatacttgtgttgaagtttgtgattctcatagcatgcacgtatggtgaactgctttgcgatg

SEQ ID NO: 4037 - DNA, 441 bp, Triticum aestivum
  Clone ID: LIB103-048-Q1-E2-H4
ccgggtcgatggtgaatctcaactgttgacccttatggatgggcttaagtcccgtgcgcatgttattgttatgggtgctacaaaccgcccaaacagtattgatcccgctctcagaagatttggtaggtttgatcgtgagattgacattggagtccctgatgaagttggccgccttgaagttctcaggattcacgccaaaaacatgaagttagctgaagatgttgaactggaacacatttctcgagacacccatgggtatgttggtgctgatcttgctgctctttgtactgaggctgctcttcagtgcattcgtgagaagatggatattataggtcttgaggatgagaccatagatgctgagatactgaattctatggctgtgacaaacgaccatttcaagactgcactaacgacaagcaacccatctgctctccgtgaaac

SEQ ID NO: 4038 - DNA, 422 bp, Triticum aestivum
  Clone ID: LIB103-048-Q1-E2-H6
agatttctgagagacttggtgtccaagtttctgacgtgaagaatgctattatctggggtaatcactcgtccagtcagtaccctgatgttaaccacgccactgtgaagacttccagtggagagaagcctgttcgtgaacttgttcaagatgatgaatggctaaacggggagctcattgccactgtccagcagcgtggtgctgcaatcatcaaagcgaggaagctctccagtgctctctctgctgccagctcagcttgtgatcacatccgtgactgggttctgggaaccgccgagggaacatttgtttccatgggtgtgtactctgatggttcatacggtgtgcctgctggtcttatctactccttcccagtaacgtgcagtggtggtgaatggacaattgttcaagggctcccgatcgatgag

SEQ ID NO: 4039 - DNA, 348 bp, Triticum aestivum
  Clone ID: LIB103-048-Q1-E2-H8
ccgggtcgacgggcaattcaaaggggaggaccgtcaggtgtggtgtgaagagctgggttgtatatgcccacatgcgtcagtccatgggttgggcatacatgggtatcccaactaaggacatgtcaaggatgtccgctttgaccatcgacatctttaggaaactagcaggggcagcgtctgttcggttcgctgagttggaattggtcaacatcaactcgggcgaggtttattcatgcgtcttttccgactcacacggcgagctcgccaagcacgccgtctccgacggcagcactgcagtatccaagtttacctcatcgtacgtttcatctcacatcccttctatgatgt

SEQ ID NO: 4040 - DNA, 450 bp, Triticum aestivum
  unsure at all n locations
  Clone ID: LIB103-048-Q1-E2-H9
cgggtcgacggggtaccaatctacccaccctagggtcatgcgtagtagtactttgcttcgagggctaatgaactttcacaataagtatgtgaattctttatgactactatgagtccatggattatacgcactctcatctttctgccatttgctagcctctccagtaccgtgcattaccctttctcacctcgagagttggtgcaaacttctccgatgcatcgaaaccccatgatatgatatgctctatcacacataagcctccttatatcttcctcaaaacaaccaccatacctacctatcatggtatttccatagccattttgagatatattgccatgcaacttcaaccactccgtttttatgacatacacattcaatgtcatatttgcttgcatgatcatatagtggacatagtatttgtggctcagcnnacatccatcattatcatac

SEQ ID NO: 4041 - DNA, 69 bp, Triticum aestivum
  Clone ID: LIB103-049-Q1-E1-A2
ctatggcgtgtcatgtaagccatctgcatgtcgctggatgcatctaccgtggttgctggcacagcaacc

SEQ ID NO: 4042 - DNA, 351 bp, Triticum aestivum
  Clone ID: LIB103-049-Q1-E1-A3
caggagtacccagggcactaagcccaaggccgagaagcggctgccggcgggcaagacggcgtccaaggaggccggcggcaagggcaaaacccggggccgcaaaaagggcaccaaggcaaaaaagggcttggaaacgtacaagatctacatcttcaaggtgctgaagcaggtgcaccctgacatcggcatctcctccaaggccatgtccatcatgaactccttcatcaacgacatcttcgagaagctcgccggggagtccgccaagctggcccgctacaacaagaagcccaccatcacctcccgggagatccagacctccgtccgcctcgtcctccccggggagctcgccaa

SEQ ID NO: 4043 - DNA, 394 bp, Triticum aestivum
  unsure at all n locations
  Clone ID: LIB103-049-Q1-E1-A4
cgggtcgaccggtgagcggatggaaanggggcgagcgggacgggctgggaggcagatggggacccggctacggtttcacaagggggttacaaaagaagctttcggggatttaatactcaaaggtgaaatgataagaataactccgtgggggaaaaaattcacacggcggtggcccaaagatatttcaccacgctggatgcactaagtggagctatcggttgtgcctagaacttcttgaggctttctatgttccattttctggatgcatgcgagtttgactagtggttgattgactccacttctaacggcaacatcacaatagttttctagatgcatccgataatttatgacttaatttatgacttaaaacaacaacttcagattgagataatga

SEQ ID NO: 4044 - DNA, 377 bp, Triticum aestivum
  Clone ID: LIB103-049-Q1-E1-A5
agcgctgccaagtccaaggacaaggcggcacagacctcggcgtccatgcgcgcaccgtgtccctctcaagaggcgcgggaccagcagcgtcatagcgttcgcagcgccatacgtccgctgacccaagatcaagctggtggttcacgtggcgttcaagaccagcatgcacggcagcatgctggctccagcgaggtacggtcgccgggatgggacgctgctccttctaacttggttaggagtccaagcacgcccctctcctcgcaccgttcacctctaccgcgcaccaccccagcagaagccttggcgcgggcccagctgctcctggactatcctcctacggtggacaagaccgacgaatggagggccactatccagag

SEQ ID NO: 4045 - DNA, 370 bp, Triticum aestivum
  Clone ID: LIB103-049-Q1-E1-A6
attcggcgtcgacgtctcgcagtacggctacttcaaggtgctcggcaaggggatgctgccggagaagcccatcgtcgtcaaggccaagctcatctccaagatcgccgagaagaagatcaaggccgccggcggcgctgtcgtgctcgttgcctagggttctgttcgcgactgtgccttgagatctattatatctttactattagttgtttcccgtaccagcaatttgtgttgaacaagacatcgttagtttgttatccttgttcctgtgtggtaaaccaacatcttatgagaattttgcgatatgttaaaacaaaaaaaatttctagaaacaacacaaaacttaacaaaaaatgaaaacatatagtagaac

SEQ ID NO: 4046 - DNA, 421 bp, Triticum aestivum
  unsure at all n locations
  Clone ID: LIB103-049-Q1-E1-A9
gcattgacacttttcgtgctaccaacactacataccagccagtccggaggaggccagcagtgccgacgacggctctgcgatggggaaaggtcgctcatcattgcggcaccagcagttccacgatcacattatatccgcgtgttgatgagcaacatgactctccgcccttcctccctccaggaagagacatgatcatatcgatcaccagtcatggagtcaagtggttgttgtcgtcaagctaaatgttggtgagtgccaaatgagaagatatatgttctaatattcctgagctggacattatggtaaaatattaattttagaaattttgccaatcataccggtctgtagctatatcacattgcaaaattccatgaacatgtggtccacattatttttcacattgcanaattccatgaacatg

SEQ ID NO: 4047 - DNA, 399 bp, Triticum aestivum
  Clone ID: LIB103-049-Q1-E1-B1
ttcgtcggcctcttggtttacaatgggcgttttggcgttccgccgttccattggtagcttgacgcctttgccctgatgttagattcaacatccatgtgacactgattggggtttgccatctcgcggccctgggtatcttcatccatgacctcctcttcaccgtgtttggtccaacgtgtatatccatccatgaatccccgagagactaagttccactggacatctgcaacttgatgtgactctatattggcacaattagtacatggacacatgatgtaatccgcatcaccaattatccactttgtactttcagtcaaattcatgaactctgtcacgccattgatataatctgcggttttccgattcttcatccatcgagattgttccatctgcaccaca

SEQ ID NO: 4048 - DNA, 275 bp, Triticum aestivum
  Clone ID: LIB103-049-Q1-E1-B11
aattcgcgggccgacgggagagggagtacggacgtaggaaaaaacaggttgtaggggcagtacggacgacgtggggcgtggggagtcggatgacgtaagatgggagacagagccttgcgtcttttttaagcagtagagatataccgatgtatgcctgtctgatcttgtaacttctaattacaaataaaattgaaatctggaagtaccttaaaatacttaacctctcaatttcttccatgcttacttaggccccgttcggattccctccaattccc

SEQ ID NO: 4049 - DNA, 407 bp, Triticum aestivum
  Clone ID: LIB103-049-Q1-E1-B2
gggtcgaccgggtattcggtctattgtaaaataagataggctgacaagagcctattttaagcactttatttctaggtacgtgcaatttagtctgtcgtggccaaatgccaaaaacggcagtatcctctgtgggtatagaacccatgggatggttaaacaacaagaggcagtagataaggtttacacaggggcttaatctaaaaagaaacctattgcacggggccctgctgcacgtctacgcctttgtctcttttgtgccgtatcctggaagggtatcgctcgaatgttgtctgtaaaaaagaaaaactcgtaagagggtgcaacgtaagtatgcgttcaataataagagtgtaagttgttggcctgccaataaggtcgagccaagcgtggggctgtattaaatatag

SEQ ID NO: 4050 - DNA, 417 bp, Triticum aestivum
  Clone ID: LIB103-049-Q1-E1-B3
gggtcgaccggtgactttcatacaactgaatagagtgcacgctccgaacgtcaatgttccacagagctctgattttgttccattgttaaagaagttaaagtttcgtgctgagcatcgtcgcgcttttgaacaggtttttggtaggacagttatatgccgagacctggaaactgcgaccagagttgcacgcagcaatagtctagattgcatcacacttgatggtgatcaagtagccaaaaagggtggcatgacaggaggtttctatgattctagacgctcaagactgaagtttgtaaaagtaatcagggacaacaaagcagaaattgaaaaaaagacggcacatctagagaacgtgggaaaaaagttaaaagatatagataagaaaattacggatttgattaccaaacatcagcaaat

SEQ ID NO: 4051 - DNA, 411 bp, Triticum aestivum
  Clone ID: LIB103-049-Q1-E1-B9
aattcgcgggccgacgggtggcaagaccaggctaaccgagggttgctccttccgccgcaagggcgactaaacctccgaagtctatctgaaaaagcaagccgttgttgaactttgagtttttccagggtgttagtctgaagattttgcaatgtctggcaaattgaacccatctttggtaatgtgatatctagcttgagtagtattatgatgaccactgtactatgttccgtttgggttgtgagatcagactagtagtacctgcctggcaatatggttgtctttgatgaaaaaaaaaaaaaaaaaaaaaaaaaaaaaaaaaataaaaaaaaaaaaaaaataaagaaacataaaaaaaaataagggaaaaaaaaaaaaaaaaaaaaaaaaaaaaaacggcccccccaaagggtt

SEQ ID NO: 4052 - DNA, 326 bp, Triticum aestivum
  Clone ID: LIB103-049-Q1-E1-C1
tcgagggaccagaggttcaaggccaacgagaacaagcctgtgatgaatgactgagcgtcgcctggagagtccggtacctgcaaggcctaactgccaatcatgtgactcctatatgttacgatgactggtgtgaagatttgcttggtcgttctgagaactatccaagtatctagtactgtgttttaagttcctactagcaagatgcccgtgcgttgcacgaaacatcaagatgcatttgtatgagtagtttatcttgtgagaaaaataatgatgaacgaggaaaagccttatttgcggaaacttgggtctgaactctggtgtaaaaa

SEQ ID NO: 4053 - DNA, 394 bp, Triticum aestivum
  Clone ID: LIB103-049-Q1-E1-C2
cgggtcgaccggagaggggagatacaggtttttggggagcacactcctgtgactgctgccagcgacgacttcctcaacgaaagccttcttccccgacctcggtaacctcctcatcaacgacatgagtgacaacatcaaccacatcggttctgctcccgctatacagtatgtgattctgtcctcctagtttagtccgcatcattactttgatgtttgcaattgtcgtcatgatctatttactgctgattcggattaaatctcatactaaattgctcatatattcaactatccaatccaaaaacctgattacaggcaatttactccgagtggttttgctgcgcttttgaagccgcctacttttaagggggtgcaatataaaatgtggcgcacaaga

SEQ ID NO: 4054 - DNA, 381 bp, Triticum aestivum
  Clone ID: LIB103-049-Q1-E1-C3
gggtcgacggagtgaagatagaaaacatcttaatctggatcacaaaaatgtcattcacatgcaacaagcagcaaatgcagcagtaaatggtgctattggagcaactgcattgtcgtcgccttccacatctaggaagagaaagcacatcgattcttcacttgacctttcgaccaaggaacatttagctatcaggaatggtcaactatctcaggttatttatcagaagaacgcaatggcctccgatggttcacttccaataggccagtctgcgcatcctcatatgatggggccctttaaagtcacctacaggcctcttttagcggatattattcagccaggggatgtaaaggagctttgtaaacttttggtgacagtatcggg

SEQ ID NO: 4055 - DNA, 383 bp, Triticum aestivum
  Clone ID: LIB103-049-Q1-E1-C4
cggtcgactattccgggtcgaccgcgggatggaggaagcgtcatctccggcgatcgccaaggatgtcaccgagctgatcgggaacacggcgctggtgtacctcaacaaggtgaccgacgggtgcgtggggcgcgtcgccgccaagctcgagtccatggagccctgctccagcgtcaaggacaggattggatacagcatgatcaccgacgcggaggagaaggggttcatcgtcccaggcaagagtgtcctgattgagccaaccagtggcaacacaggcattgggctggccttcatggctgctgccaagggttacagacttgtactcacaatgcccgcatccatgagtatggagaggagaatcatcttgaaggcttttggtgctg

SEQ ID NO: 4056 - DNA, 325 bp, Triticum aestivum
  Clone ID: LIB103-049-Q1-E1-C5
aacagaaaatggttaatctcagcaatctcctcgttgtacacttcggggttctcctcgtccttaacggctgccttgcgacgcagtcacttggggttcctcctcatctacagaacaagtgtcaactcgataacttatatgttctctaaaccaccgaacacttcactagtgagactggtcacatccactaaggtgattataaccacactcagatccgatctgttggtgtttctgtagcacgccagtctgcttcatcatcagatgtctttacttgttcaccttcttcacttcgccacttttttccgatatcattcatcgaacggatatc

SEQ ID NO: 4057 - DNA, 389 bp, Triticum aestivum
  Clone ID: LIB103-049-Q1-E1-C7
tcgacggggatgatcaggctggcatgaagcaaggggatctaatcatttggtatgttgagcagcagaatgcccaaggtgcatatagttctacagaagaggtgaaggaggaagtaaagtgcatcaaagccattatagagaggctgatacagagggaaggccatcttgtagtcatagacgaaggaacagcggcagcagaaggtgctgcagcaagggcatcggagcacagaatcctggctgttaacccgaactacgtcattgattgattaaccagctgaggacacagctaactagatccatcatatgtggttgaccaatagagcagacattcaaacggaagacatcctgttgtcatatgctctagaaatgatatgttgtacctgccatcccct

SEQ ID NO: 4058 - DNA, 387 bp, Triticum aestivum
  unsure at all n locations
  Clone ID: LIB103-049-Q1-E1-D1
gggtcgacaagattctagcatttcaagcctgaaaccttgagcgcttttagatcgttgatggtgtccatcgtagagaaattgtagtcagagctgttgataaacctggagaaacgctcgcaaggccttctggccaggtggtattggtagacaaggacgtcatgtcgcacgcacaactggtcagcgacaccttctcatcgtgcccggcacgaccgatggtgtactccaggtcgaagccgaccacttggtacttgtcctcagcaagcaactgttccatagtttggatggagctctccaccgagaccggctcgttcgtgtacaccaccaagagcgccttcncactcatgtgggtgtccactatgtgatacgtggtgaactgccacccgttgt

SEQ ID NO: 4059 - DNA, 388 bp, Triticum aestivum
  Clone ID: LIB103-049-Q1-E1-D2
cgggtcgaccggtcacttaaacggacttaactaattacatgcataattaatgtctggctaattaattacattaattgcttgatttccaaattgattgggtgtttggtttccaaattgttttgcattaatgactggtgatgcttttaataattaacgtgatcctcctgtttaagtatcagtaatatttttaataattaatgtgatactcaggtccaaagcaaataatactcttcgtaattagcatgggcctttggttaaacactcgatgatacttttatacttccttcgttcctaaatataagctttctgtagatttcactatggactatatacggttatatatatagacgtagtttagagtgtagatacactcattttgctctgtatg

SEQ ID NO: 4060 - DNA, 412 bp, Triticum aestivum
  unsure at all n locations
  Clone ID: LIB103-049-Q1-E1-D3
cgggtcgaccggtaattccaacaatcgaacgtatattttgtgtatgttggatataaagatcgtttgggtaagaagtataacggaaagaaactatatgcttgtttgtttaggaagtgttgcatacttgtgtgagttgacgcgacacatcaaagtagtactgtactactactagtagtactccctccgatcctaatttctctgcgcataagtcgaggtgcagataccaaggaggtcttgcttgtgtctatacttggacaactcatccaactgcgcactangcagacgaagctcgtgtcgtgttggtgccgtgtgtctccatcttagcctccgtgttttagacttctcaatctcaanggcaaggagcaacatgaaacctatgatagagcaaatcggatggtttataacactacaa

SEQ ID NO: 4061 - DNA, 366 bp, Triticum aestivum
  Clone ID: LIB103-049-Q1-E1-D4
cgggtcgaccggggcctcgcactaggggagagctgccgtggagatgtcacctgcggtgccggcttcaaggtagccgctccatggcagtgcgggatggagcaccgttggcgccgggaggtcaagttaaggagaaggtgcgatgcgatgagtgtacaacctctttggtggcgccgagtaggcctcggcttcgtctgaggtgtcggtaaggatgctgcggttccgatggagcaggttaaggcagcgctatggggatggagcagccgcgatagacgaggcgatcgtcggagcagctccttggacgtggaggacggggctgctgaaccggtgggatggcgagatggacgacggatcctcatccggggaggt

SEQ ID NO: 4062 - DNA, 394 bp, Triticum aestivum
  Clone ID: LIB103-049-Q1-E1-D8
attcgccggtcgacgggctggattagaagggtacgtgtgggcgcaaatccaattgagcggccaccctgcccaggcagggtgggagcgcttgagaagactatcaggggccttgtggacagggagtgggacgaagtagtgaagccagagctagggacaaatttcgactcgctgacagaggctaacgatttttaaacttatattcgtgggagcatggcttcggcattagatacgggaaaaacaggctcaatcctgatagaaggaagaccatgcaggagattgtatgtagatgctcggggaagcctctccgtgagaatacaagatcctgtaggtgtgagtgtccagcaatgattaggctgttgagggcatcagataatgggtatccagatttacacct

SEQ ID NO: 4063 - DNA, 400 bp, Triticum aestivum
  unsure at all n locations
  Clone ID: LIB103-049-Q1-E1-E3
cgggtccaccgggggccaaatatagaagagaggatctacttgggaagaaagaagaaaggaggagggccaaagtaaaaaaaagatagatcagggagggggtcaaaatccctagcactgctccattcccaaatcgagcctggcatcttcatctccctcaccctccttctataccttcggccaccgccatggccaggccggcatggtggtgcgcccccgtagccatccatccactcatttccatccaccactccaccatcaccctacaccaccagcacccccaccatcattccgcgccatccatccaccatctccagccaccgacgcatctggcgcgaccgaccaaacagcccgtctggtgtcncgcgtgagcgcgccatccaccactcctctgctctctgcc

SEQ ID NO: 4064 - DNA, 390 bp, Triticum aestivum
  Clone ID: LIB103-049-Q1-E1-E4
cgggtcgacggggacggccacgcccaactccgattcgaaatactccttccccagctagggttttgctggctccgccgccgcctccggccagcgtcgtcgccccatggggctgccgaagcatttcaccgtcgagtaccccagcttcaagctcgtgatcgtcggcgatggcgggactgggaagaccacttttgtgcagaggcatctcactggacagtttgagacgaaatatgagcccactattggtgttgaagttcacccattggatttcaccactaactgtggtaagatccgtttctactgctgggacactgctgggcaagagaagtttggtggccttagggatggatactatgtccatggtcagtgtgcgataatcatgtatgatgtcac

SEQ ID NO: 4065 - DNA, 390 bp, Triticum aestivum
  Clone ID: LIB103-049-Q1-E1-E7
attcgcgcggtcgacggggatgagtcaggctggcatgaagcaaggggatctaatcatttggtatgttgagcagcagaatgcccaaggcgcatatagttctacagaagaggtgaaggaggaagtaaagtgcatcaaggccattatagagaggttgatacagagggaaggccatcttgtagtcatagatgaaggaacagcggcagcagaaggtgctacggcaagggcatcggagcacagaatcctggctgttaacccaaactacgtcattgattgattaaccagctgaggtcacacagctaactagatccatcatatgtggttgaccaatatagcagacattcaaacggaagacatcctgttgtcatgctctaaaaatgatatgttgcacct

SEQ ID NO: 4066 - DNA, 381 bp, Triticum aestivum
  Clone ID: LIB103-049-Q1-E1-F1
gggtcgaccggataggaggttcttctgaaaatgacaaggcgtacggtggatgggaatctgttgctgggcttagtgatgttattcagagcatgaaagaagtggtgatactgcctcttctatatcctgaattctttagctctttaggtcttacaccaccaagaggtgttctgctgcatggtcatcctggtactggtaaaacacttgtcgtacgggcactaataggggcatgctctcagggtaacagaaggattgcttattttgctcgaaaaggtgctgattgtttgggcaagtatgttggggatgctgagaggcagttaagacttctattccaggtagctgaaaaatgccaaccttctatcatattttttgatgagatggatg

SEQ ID NO: 4067 - DNA, 419 bp, Triticum aestivum
  Clone ID: LIB103-049-Q1-E1-F8
attcgccggtcgacttccaccaaaacgatatccatcatctcatcgaaagacgggacaccttggcctctatcaagtggtatcagatttccaggttgctcggtgagattttacagtttttcgtagtttagatcgagtctgttcttcatacctacagtccacgaaaaagccaaaaaaaattagggttagttcatcatatccgaaccagtctgagccattgcataatctttttagggttttgctttgttgaatttgtggttgcatcgtcgtgtctagttgctggtctcagagtctagtattttagagtttcgagttctggtcataagttgtcacgccgccgtcgcaccatcatcatcgcccctgccatctaccaccaccgcttatccgccaccgcttcgaatccgtatccatattccaacaac

SEQ ID NO: 4068 - DNA, 316 bp, Triticum aestivum
  Clone ID: LIB103-049-Q1-E1-G1
cgctctggcaggacaccctcacaaacggcaccctgtagatgctcgatccttcaatctctggtggatgctccatctgggatcgatactcccaccaccgctccctcacgatcggattcggtgaatctgtttgctccagggcccagaggagaagctctatgtactccggcgcgactccctccgggagtatcgccgccttttcgctctgttcaagacatttggccatggatgtcgccgtcgccgctagttggtccttgttgtcaaaccaagactgtatctccaagatcctagctttcttcactgggtcgccggtctgcga

SEQ ID NO: 4069 - DNA, 440 bp, Triticum aestivum
  Clone ID: LIB103-049-Q1-E1-G12
cgacgggtgccaagtagaaccaataggatcttcttgggtgataattatttgatcttgctgaaaaagacagaaactttgcgctcacgcaaataattattaaaattcaccagaacgtgataaattgccaattctttttgcagtagatcaatatacaaattttacaggttttagaagtttttcagaatttttggaattccataagtattcgaacaaatcagattgctacagactgttctgtttttcgtgtgttgtttgcttattttaatgaatctatggggggtatgaaccatagagaagttggaatacagtagatttaacaccaatataaataaagaatgagttcattacaatactttattgtggtggtttgttttatttggctaacggagctcatgagattttctgttgagttttgtgttgtgaagttttcaagtttttgg

SEQ ID NO: 4070 - DNA, 396 bp, Triticum aestivum
  Clone ID: LIB103-049-Q1-E1-G3
cgggtcgaccggtccgatttacaatattagttttcgatctactattttgcaatcttttactttccgatctataaaccaaaaataccaaaaatatttactttatcgtttatctatctttgtcagatctcacttttgcaagtaactgtgaagggattgacaacccctttattgcgttgggtgcaagttgtttgattgtttgtacaggtattcggtgatttgtgcgttctctcctactagattgataccttggttctcaaactgagggaaatacttatttgtactttgctgcaccaccatttcctcttcaagggaaaaaccaacgcaagctcaagaagtagcaccatccttcttatccatcaagtatttggggcagttccgcttccagcgaccattccc

SEQ ID NO: 4071 - DNA, 403 bp, Triticum aestivum
  Clone ID: LIB103-049-Q1-E1-G4
ccgggtcgaccggtattggtaaaattacacttactgatttcagtcttggagaacttccaccatatttgcgtacgatgagagtcgtcccaagggatctaaatgaactgtgggctttcgaatttgattttgaatattgtagtaaaataatactgaatgctgaagcaagacttgaggttcaggaaccagggctgcaaaaagacataatgagaactactgtcgaagcagattctaatggcaaccaatttggaccttcgcaacttttggcttctgtaatggaagatgaagatgaggcagatgtgttaaggcggtcaaagaaaactgggaagacatcaaggtggaaaaatatcttgcattcaatcactgaccatgtctctcaagtgccgttttcgttggcaattaaagt

SEQ ID NO: 4072 - DNA, 286 bp, Triticum aestivum
  Clone ID: LIB103-049-Q1-E1-H10
cgccggtcgacggggctagccaccggatccatccatccgcccctcgctgccgctgcgtctcgtctccaccaccccacttgcccccggactcaggaggatcgtcggagatgtcggacaccgatgagcaccacttcgagtccaaggccgactccggcgcctccaagacctacccgcagcaggctggcgccatccgcaagggtggacacatcgtcatcaaggcccgtccctgcaaagttgttgaggtctccacctccaagactgggaaacatggtcacgcaaagtgtca

SEQ ID NO: 4073 - DNA, 397 bp, Triticum aestivum
  Clone ID: LIB103-049-Q1-E1-H12
acatgttgctgtttgaaaacagaaagtttaccgctgttgcaaaaattccctagaaaagtcagagagtggtataatgttgaatatttttgcatattgaccccgaaaaaattaataacattggaaatttaagtcaaaaattttggaatcaaggaagtaatgatactcctggaatccttacaaactgtgccggtttgacacaatgccggtaagtttgcaatgtgtgcacaaccttgcctgcctaatgagtttaattgaggataggagtattaaatatacagaggcatttagtatgcaatgttgaataataatttttgtgagttgttatagtagaaaatgataaggttttgcactgggttatactaacctatctcacgagttcttattgagtttgttgtga

SEQ ID NO: 4074 - DNA, 398 bp, Triticum aestivum
  unsure at all n locations
  Clone ID: LIB103-049-Q1-E1-H2
ccgggtcgacaacacaacggaactctcaatgaaagcaccaatgtcggtgtcaaaaccggcagatctcgggtaaggggtcccaagatgtgtgtctaaggatcgatggtcacaatggacaatggggacacgatgtttacccaggttcgggccctcttaatggaggtaaaaccctacgtcncgcttgattgtactcgatgagtattggggttagaagagttgatctacctcgagatcgtaatggctaaaccctagctgtctagcctatgattaatctgatagcctctacagactaaacccccaggtttatatacacaccggaggggcctaaggttgtacagagttggtttgcagaggaaggaaataacacatcggaaaccaaacttgccaaccacgcatat

SEQ ID NO: 4075 - DNA, 386 bp, Triticum aestivum
  Clone ID: LIB103-049-Q1-E1-H3
cggtcgacaattccgggtcgacgggcaagtgcagaattggaatcccggcaactcagggtacccaccagctccaggccagtatccaggccatatgtactcagctccaccacagcagtacacggcgacatcagggggcttctccgcccctccgccaccgccgcctcatgagatgcatccttcacaccagatgccacctgctcatcatggaaatgagatgcatccttcacaccagatgccacctgctcatcatggaaatgagatgcatccttcacaccagatgccacctgctcatcatggaaatcagcagagaccggcaagtggtgcccctggaactggccaaccacctccgtattaccaccattaagtgtgtgtgtaccttcgccgcc

SEQ ID NO: 4076 - DNA, 449 bp, Triticum aestivum
  Clone ID: LIB103-049-Q1-E1-H6
cgggaatgttaatatctacaaagctcgacttgttgcaagaggttttcgacaagttcaaggagttgactacgatgagaccttctcaccagtagtgatgcttaagtccgtctgaatcatgttagcaattgccgcattttagattataaaattttgcaaatggatgtaaagactgcattcctgaattgatttctagaagaagagttgtatatgatgcaacctgaaaattttatcgatacaaaggatgctaacaaagtgtgcaagctccagcgatccatttacgaactggtgcaagcatctcggagttggaataaacgttttgatagtgtgatcaaagcatatggttttatacagacttttggagaagcctgtatttacaagaaagtgagtgggagctctgtagcaattctaatattatatgtagatgacatattgttgattggaaatgatat

SEQ ID NO: 4077 - DNA, 340 bp, Triticum aestivum
  Clone ID: LIB103-049-Q1-E1-H7
ttcggcgtcgacgagctcagatgattgaatttaggtcaacctgtagcagaacgttttcgtcacgttcacgggtttgactacaaggagaccttcgcaatactaatgatgcttaagtcggtcggaatcatgttagcaattgccgcattctagattataagattttgcagatggaagtaaagactgcattcctgaattgatttcgagtccaagacttgtacatgatgcaacctgacacttttatctatacaaaggatgctaacagagtgtgcaggctccaccgatccatttacgagccggtgcacatcatctcggtgttggtgtacacgttctgacaatgtga

SEQ ID NO: 4078 - DNA, 336 bp, Triticum aestivum
  Clone ID: LIB103-049-Q1-E1-H8
cggggaacaaacatggtctctgtgtgcttaggatggagtcccgcatttgctttgagaactgtaagcgtgtttaacctgacagcgcctgtaattgtaggccctttccgcatacttcacagcttgttgtcttatgaggtgctgcagggcagcaggctggtttatgccgcctcggtcattattatcatttgtaacttgttagagtgcacattaatctcaggaggacatagacataatacttatgctgctgttgttgtaaaaaaaacaaaaaaaacaattaaaaacaaaaaaaaaaaacataaaaaaaaaaatcaaaattataacaaaaaaattaataac

SEQ ID NO: 4079 - DNA, 134 bp, Triticum aestivum
  Clone ID: LIB103-050-Q1-E1-A3
ggccttcccccgcaggaaagcatcaagcgcgctttcctatttggggtaaagattggcgctgatggtgaaggtaccacgagtgccatcctccttagcggacaccttctttgtcacaggtggatctgccatcgcct

SEQ ID NO: 4080 - DNA, 376 bp, Triticum aestivum
  Clone ID: LIB103-050-Q1-E1-B2
cggtcgagaaatccgggtcgacggggatgaatgaatccattgtgagaagagcccttgtgatcatgcaccagagggacgaagtggagtacaagagggagcgccatgtgattgtccgcaaggcttgagctgaactgaaccgatggagctaccatggaaccctctggccatctgatgtgtgtgtataagtagtgctgacactgcagcccgtttcctgaggaaatttgttgggtcgttgaaattgagttgtagttgtactactttgagctgtagctgtagccctaaatcatattgtgtcgaactgaagatgtaccccagtaagttcattcatgaatgcaacattttggcgttctgcagctgagcagagtcaatgcctagg

SEQ ID NO: 4081 - DNA, 401 bp, Triticum aestivum
  Clone ID: LIB103-050-Q1-E1-B3
gacggaacggaaaacctggacaggcccaggcaaaggggttgtgggaaaattccaaattttcaacctaaggcttcaaataaccaaatttattacaatcattgtaaggacctcaatggtggtaatttccctcgctagacgccatactctcctaagttgtgaaaccaaggctatgatcaccaaagctatggaaatcaaggcaaatagagaccacaactctgataccacttgtaggatcgaaagtaggtctagagggggggggggtgattagactacttgaccaaataaaaatctagccttttcccagctttaagtcacagtctttaacaacttagcacaagtcaagcaataaacctacacatgcaattctaagagtatagcagcggaatataaatcattgcaca

SEQ ID NO: 4082 - DNA, 302 bp, Triticum aestivum
  Clone ID: LIB103-050-Q1-E1-B7
attcgccggtcgacgggactacattactccctcgtcggacgaccggctatgctgctgtgtatacctcaatgcgccaccgtactcccatcgctgatctatccatctctctactcatccatacctgttgttattctccggggacagtagttcaaccactaagccctcgtactcctccacatgggaaacaactactgggtcttcactggatccatgtcgttcgcttcctaagcctcgcgtcgtccatctcactggtgatctcggtgtggtctgtccaacatgttcaatgagcgacatccatcgga

SEQ ID NO: 4083 - DNA, 417 bp, Triticum aestivum
  Clone ID: LIB103-050-Q1-E1-C1
cgggtcgaccggtgaagggcttggggaggcttgaggactgcgagggagctcgggacgggcttaaatagccgcagggatgagctctaggggaggggaggaggtgacacgtggcacggctacatgtattgcgccggcgatgtgcacacgcggccaagggtcacgggaatggcgggaaggcaacgagggggatgcgggcgaggcgcgggaactcacggagacgagggccgctcgcggacgagagggagaaggggacaagagcgaggaagacgacggtgcacgggcgtgcactgtgctcggcgacggcgatggctcaacgaggaagcaaacgaaggggaaacgggccaaggcgcacggcgacgatgaggctgagctggttgataagcttggacgagccagagccagccgaagatgcgctac

SEQ ID NO: 4084 - DNA, 457 bp, Triticum aestivum
  unsure at all n locations
  Clone ID: LIB103-050-Q1-E1-C3
cggggccgacgggaaattccctgcccccgcggcgtttgtcagaccaaaggcccccgatggaacccctgaaatcaggcctcttgacatggcaaagcgccctcgtcgcaaccgcaggtcgccagctcttagggctgcattcaaggagacaacaatctcgcccgctaatttggtgctcccattgttcatccacgaaggggaagaggatgctccaattggcgccatgcncgggtgctttaggcttggatggcagcatgggcttcttgatgaggtgtataaggcacgcgatgttggtgttaacagctttgtgctctttccaaaggttccggatgcattgaggtctccaacaggagttgaagcatacaatgacaatggtttggttccacgaacaattcgcctgctcagggatangttccctgatattattgtttacacggatgttgctttggacccgtattca

SEQ ID NO: 4085 - DNA, 196 bp, Triticum aestivum
  Clone ID: LIB103-050-Q1-E1-C6
gacggggaagacgaagtcgacgacgacgacgaagaagatgatgatagaagaagaagaagtagaagaagaagaagaagaagcagaagacgaagcacaagaagaagaagaagaagacgaagatgcagctgatgcagaagatttcgatgacgtcgacgacgatgactaagctgtcgaagacttcgaagactcctacgaa

SEQ ID NO: 4086 - DNA, 433 bp, Triticum aestivum
  unsure at all n locations
  Clone ID: LIB103-050-Q1-E1-D3
cgggtcgaccggctcgaaaaggtcttacgagagcggcaaagagccttcatcagaagcttagcaagaaactcttgttacaaactagtgttccaacagctgtgctctatcatggatcagtaacagattttgattctcgcttatacgggtttgatattggcacctgtcttgaggtgattgagcatgtggaggaggaccaagcaagtttatttggcaacgttgtattgagttcattctgtccggcggtgctcattgtttccacacccaactacgaatacaatcctatcctccagaggtcagctttgccaaacaaggaagaggagcaggaacaagacgctggaccttgcaagttccgcaaccatgaccacaagttcgaatggacgaagtcncagttccagcgctgggctactcgcctcgctgcaagccacaactacag

SEQ ID NO: 4087 - DNA, 427 bp, Triticum aestivum
  Clone ID: LIB103-050-Q1-E1-D4
gggtcgacgggtctgcaacatttagatctgtatgtattttgcaaatctctttgtctccctccttgacttgatcgcggatggaattgaagcgtctcttgatgtgtttggttctcttgtgaaatctggattccttcgccaaggcaattgcactagtattgtcacaaaagattttcattggacctgatgcactaggtattacacctagatcggatatgaactccatcatccagactccttcatttgctgcttttgaagtagctaagtactccgcttcacacgtagatccctccatgatgctcttcttcgaaccgcaccaactgacagctccaccattcaatataaatacgtatccagtttgtgacttagagtcatccggatcagtgtcaaagcttgcatcaacgtaaccatttacgacaagctccttgtc

SEQ ID NO: 4088 - DNA, 430 bp, Triticum aestivum
  Clone ID: LIB103-050-Q1-E1-E3
cgggtcgacagactggttactaaagagtgagttatgacgaggaacttgcatcccgacttaggcatgcagttgagaccaacatactgagtgcagcagacagatatggtgtacttgatgacacctatgccctctgtatggctggtaaacagaagctggtcacgttgctgcatttgattgctgcgtacaagaatgagactgagtatactgtgcttgcacatgccatcaacacaagcctgagcatatatgagatgatggctgttgctgcacccgaggagttggttaatatgaagaagttcctaattgacttccttgagccattcgcacagagagttggctgggatgccaagagtggggagggtcacctgaatgcactgttaagaggtaccctcttatctgctcttgcggaactaggccatcagtctaccataga

SEQ ID NO: 4089 - DNA, 98 bp, Triticum aestivum
  Clone ID: LIB103-050-Q1-E1-F10
gctagccctttcagataccgccgtccagctctgctaagcaccgtctgactatgaaggactgactaaacattgtaattcacggccaacgagatccactc

SEQ ID NO: 4090 - DNA, 407 bp, Triticum aestivum
  Clone ID: LIB103-050-Q1-E1-F2
gggtcgactgagccaaattgctccttcagattgcaggatccacgtggcattcaaggtctcgaaggtagattccgcgtccgcactcggtttgcgggctcgacgcgcgtgcgaccggcttctgccgtgacagccaccatgcacgcctcctccgcgcgggcggagacgacaatgacacgcttcctcctcaccggcgtgctagagcacacgctcgtcctcctcttcatacgctgcatgcatagacgcggctccaccagttgctcgcgtgcttggcagcgcggcgacattgcgaggagggactgcagacgacatgagcgggcgagccttcagcttcatggcacatggatggcggcgacatggcggtgatgggcgagaaattgtaggccggagcaggcgggcgccggcatgcg

SEQ ID NO: 4091 - DNA, 111 bp, Triticum aestivum
  Clone ID: LIB103-050-Q1-E1-F3
ttcatggtctcgaaggtagattctgggtccgcactcggtttgcgggctgtacgcgcttgcaaccggcttctggcgtggtatgcaccatgcacgccttctccgcgctggtgg

SEQ ID NO: 4092 - DNA, 327 bp, Triticum aestivum
  Clone ID: LIB103-050-Q1-E1-F8
tcgacggggaaggaaagggtgatgctgccgtcgcttctgcctccagtgtgccgtgtagtagaccggccaccgccgtcctgcaccttctcctcaacggaaacgaaccagagcacgcctggaagcggagtaaatccacgtccgtcgctctactggatgtggattgggtcccgtgaatcatcgtcactcagttgatccggaatggagctcaaaactgagctcaaaatgtcaggaacggtgcggccgtgcagaggccgggtcaccatagggcacaccggaggcaatggcgcaggtagtaataaacactcatacatcgcagtcgtggtcatg

SEQ ID NO: 4093 - DNA, 436 bp, Triticum aestivum
  Clone ID: LIB103-050-Q1-E1-G1
cggtccgagatatccgggtcgacgggttctcaaaacaatcataatatgatataacaagatggtatctcgctagccctttctgagaccgcaaaacgtaaatgcagagcacctttaaagaccaaggactgactagacattgtaattcatggtaaaagagatccagtcaagtcatactcaatgtaaactaacagtaatgaatgcaaatgacagcggtgctctccaactggtgctttttaataagatgatgatgactcaacataaaagtaaatagataggcccttcgcagagggaagcagggatttgtagaggtgccagagctcggttttgaaacagaggtgaataatattttgagcggtatactttcattgtcaacataacaaccaagagatggcgatatcttccatgctacacacattataggcggttcccaaacaga

SEQ ID NO: 4094 - DNA, 431 bp, Triticum aestivum
  Clone ID: LIB103-050-Q1-E1-G2
cgggtcgaccggggacgccaagcaccaacaacaccggtgatcccctcctccggcgtgggcgaccttcctcggctatcgtccccgcgtcgccctccacatccaccttttcttctgttccgacgcagccatgaattacatcatcggcgccttcaagccgccctgcgacatcttcgtgaccttttccgatgagaggagccggaagcaggttgcagtcaagaaggataatgggaagacaaccatggtgccggcgttccagagcctggagaccatagccggagaggtatcaatagcgcctgttcctggtaaaaggattgagcacatgggtgttaagattgagctgcttggacagatagagttgtatttcgacagaggcaacttctatgacttcacttcactggtgcgtgagttagatgttcctggtgaaatatatg

SEQ ID NO: 4095 - DNA, 437 bp, Triticum aestivum
  Clone ID: LIB103-050-Q1-E1-G3
ggtcgagatatccgggtcgacttcctggattacctcaagtcctccttgtcctccggcgaggtgaagctgctcttcgccggcgaccaactccgcaagtcaaccggttccgatggtgcaaagcttgtggctaccaaggcaaagggcctgcctctcatcaccatttctctccatagtgttactggcgctgtgacgagtgatgtcatagccgagttctcgctagggctctatggagcttataggactgcacgggagcttgtatccaaagaacaagaacaaatgtcacagctgatggggagtctgtcaactgaaagagaaaagaacgaaatcatgcaaaaacaactcgaatctctttctttcctagacaaaagaaaggcaacaaagccaaagctgttggctgatcaggttccaagtgtgtctgctgtgactctgggctctga

SEQ ID NO: 4096 - DNA, 385 bp, Triticum aestivum
  Clone ID: LIB103-050-Q1-E1-G8
gacgggagaaaatagtaatagattgatagatcgaacgccaaataaataaatagaaataaaacacagcaatgtatttttgtatttttggtttaatagatctgaaaataaatgcaaggaaaaagtagatcgcaaaggcaaatatatgagaaagagacctgggggccataggtttcactagtggcttctctcgagaaaaatagcaaatggtgggtgaacaaattactattgggcaattgatagaacttcaaatactcatgatgatatccaggcaatgatcattatataggcatcacgtccaagattaatagaccgactcctgcctgcatctactactgttactccacacatcgaccgctatccagcatgcatctagtgtattaagttc

SEQ ID NO: 4097 - DNA, 401 bp, Triticum aestivum
  unsure at all n locations
  Clone ID: LIB103-050-Q1-E1-H12
attcccgggccgacgacgtcgagaagcagatgccgacgtacattcgcgcgactcgtaaaacccgtgacttccgcagatgtgatccttgttggggttgcgacaagttcatgagaagagatgcccttgagcgatcagccagtctaaagtctgattgtttcaccagccggtgtgatattgtggtgtgcaaggacaacaccccagatgccactggctccggcaccggcaccgaggttctcctgcccgacatacaccaacattttagcaacctccttcagaataaggtgggtgctgatgtgacattcgaggtcngcggcgagacgttcgctgcacaccggtgtgtgctcgctgccaggtctgaagtgttcatggcgcagctctttgggcacgctacgcccagcgtc

SEQ ID NO: 4098 - DNA, 338 bp, Triticum aestivum
  unsure at all n locations
  Clone ID: LIB103-050-Q1-E1-H4
cgggaagaggaagcgaccctgaacaacctccggaaagggttcccaaacttctccaagccaataacggcctccccaaccttcgcaatgaaggcttccaatccgggttaaaacttcaaccgaaccccgaaccggccccccaacataaaaaggcgcctaacctaataagagtggcattcctctggtcactgtataaaatgtttacagtttgtaggcttgtantgtgatggtagtaaggctggaagagagtttgattttacagagccaacattggtctggtacctggtgactagtctaggcacagaaatgcctggagctcgtttacttgctgtaaatgaact

SEQ ID NO: 4099 - DNA, 359 bp, Triticum aestivum
  Clone ID: LIB103-050-Q1-E1-H6
cggggaactacaagtgagaccgaagtctctctgcaaaaacataaaataggcaaacgtgagtacaaatgtacccagcaagacttacatcagaactaactacatatgcatcattatcaacaaaggggatggtggggtttaactgcagtaagccagctttgactcggtggctatcctaaactacgactgcaatgtaactcttttaaggtggcgcacacgagtccacatattcaccatatcaatacaccactatggatccgctcccgtctccctacgagaacgccatccatagcactcacacttatcttgcgtatttttgagtatccactttcacttgtctatgaactgatataagcaaccca

SEQ ID NO: 4100 - DNA, 242 bp, Triticum aestivum
  Clone ID: LIB103-051-Q1-E1-A1
gatgtggacgactacggatatacaagcttcctagatgactgaaaatgaaacccttatatcatgaaacaagcactcactcctattgtcccatgacagtgctactgcatagaatcctactatcccacaaggctcacagtgccatttgagaataacctgaggctggacggatttagaattcctcctgcgtctgatgacacggtgaatgcaataaacaccagatacatcaaaactatgatctggaa

SEQ ID NO: 4101 - DNA, 459 bp, Triticum aestivum
  Clone ID: LIB103-051-Q1-E1-A11
acgggtccgtactgagagaagtatcaggcgcgttactcaggcagttcaggttgtgatcagaatattattctgatcccgtgatcagaatagtgtttatgtgtgtgtgtgtgtatatatatatatcatgatctttcaaacacaaagagcttgccataggattaaatgaaaaagggaaaggtgtggatcaccttgactcaagcacaaagtaaaaacataaagtaaaagataggcccttcgtagagggaagcacaggttgtcatgtgcgttttgggttgatgcacaaaatcttaatgcaaaagaacgtcaatttatattgccccttgtatgtggacctttattatgcagtccgtcgcttttattacttccacaacaagatcatacaaagcttattttctctgcactaataagtcatacatatttagatagcaatttttgttgcttgcagcatgacaacttact

SEQ ID NO: 4102 - DNA, 461 bp, Triticum aestivum
  unsure at all n locations
  Clone ID: LIB103-051-Q1-E1-A2
ggaagaacccaaggccgagaagcggctgccggcggggaagtcngccgccaaggacggcggcgacaagaatggcaagaagaaggccaagaagagcgtggagacgtacaagatctacatcttcaaggtgctgaagcaggtgcaccccgacatcggcatctcctccaaggccatgtccatcatgaactccttcatcaacgacatcttcgagaagctcgccggcgaggccgccaagctggcgcggtacaacaagaagccaaccatcacgtcccgggagatccagacctccgtccgcctcgtcctccccggcgagctcgccaagcacgccgtctccgagggcaccaaggctgtcaccaagttcacctcctcttaagctgttcgtcttcctgtgtctcgtagttagctgttcgggtgtgtttgtggccgtgttatcctgtaagaatcgcaccgccatgtttctgtat

SEQ ID NO: 4103 - DNA, 315 bp, Triticum aestivum
  Clone ID: LIB103-051-Q1-E1-A3
ggggcacgtatgatgaacagttatgtgatgaagtcggagcataatttatttattgattgtcttccttatgagtggcggtcggggacgagcgatggtcttttcctaccaatctatacccctaggagcatgcgcgtaatactttgctttgataacttgtagatttttgcaataagtatatgagttctttatgactaatgttgagtccatggattatacgcacttttcttccttccaccattgctagcctctctaataccgcgcacttttcgccggtatcatacacccaccataaaccttcctcaaaacagccaccat

SEQ ID NO: 4104 - DNA, 456 bp, Triticum aestivum
  Clone ID: LIB103-051-Q1-E1-A4
ggggccactaattatgtaacaatgtgaagactctcccattcaataatttcagatcttggaattggttccaaacagcaatcaaaacaaaataaaatgacgtgacgctccaagcaaaacacatatcatgtggtgaataaaaatatagctccaagtaaagttaccgatgaacgaagacgaaagaggggatgccttccggggcatacccaagcttaggctcttggttgtccttgaatattaccttggggtgccttgggaatccccaagcttaggctcttgccactccttattccatagtccatcgaatctttacccaaaacttgaaaacttcacaacacaaaacttaacagaaaactcgtgagctccgttagcgaaagaaaacaaaacaccacttcaaggtactgtaatgaactcattgtttaattatattggtgttatacctactgtattccaacttct

SEQ ID NO: 4105 - DNA, 434 bp, Triticum aestivum
  Clone ID: LIB103-051-Q1-E1-A5
ccgggtccacgggttgagaacgaaagataaagaacgtgtactggttcttggtgccacaaatagaccttttgacctggacgaggctgtgattaggaggttcccccgcaggctaatggtaaatttacctgacgcatcaaatagagagaaaattttgaaagtaattttagcaaaagaagagttgggacaagatactgatctggagtcacttgctaatatgactgatggatattcaggaagtgacctgaagaatctatgtgtaactgcagcgcactaccccattcgagaaatcctagagaaggaaaagaaggagaagaatgttgcaaagtcagaaagtaagcctgagcctgcattgcatggaagccaagacgtccgtcctcctaatttggatgacttcaaatctgcccatgagcaagtttgcgcgagcgtgtcatctg

SEQ ID NO: 4106 - DNA, 368 bp, Triticum aestivum
  Clone ID: LIB103-051-Q1-E1-A9
gatccgatgaaggatgtatgaaggtgaccatccaggatataaatccttcaaacaccagaacatgcatccaggaaaaggtgccgcctaacctttgcaccttcaaattgtaggattaaaatttggaacctgacatgaaattgaaaaataccatgctttaattaattatagtacataccttgtgcagggcacataaaatatatctgatatcgcttttttatgaatacttttatcttttctatcctaaaaaaaacaaaaaactggagcaaaaaaggcaatcaattaaaggtcgaaaaaaaaaccttacctttcgggaaaaacaaagggttaaccaaattttggaaaactcgaagattaaaaactgttttccg

SEQ ID NO: 4107 - DNA, 365 bp, Triticum aestivum
  Clone ID: LIB103-051-Q1-E1-B1
gaccatagataagttgtaatacagtatatattacaccaatataaatttagaatgagttcattacagtacctaagtgttggttttattttctcatactaacggagcttacgagttttgttttgagttttgtgtggttgaagttttcaagttttgggtaaagattcgatggactatggaataaggagtggaaagagcctaagcttggggatgcccatggaaccccaatgtaatattcaaggacaaccaagatactaagcttgggtatgcaccggatggcatcccctctttcgtctatgttcatcgataactttacttggggctacatttttattcaccacatgataagtgttttgcttggagcatca

SEQ ID NO: 4108 - DNA, 154 bp, Triticum aestivum
  Clone ID: LIB103-051-Q1-E1-B10
gtggctggcaatcctgctccggctgaaaagaagaaaattcaacccccctccccctcaaaaggaaaaaaggaacctgttgaaaacttaaaccaagggcccccttaagaaaaaaaagccaaaggcaaccaaaaacggtaacccgaatggcctccta

SEQ ID NO: 4109 - DNA, 395 bp, Triticum aestivum
  Clone ID: LIB103-051-Q1-E1-B11
aaaaccgaagggccgtacaattgggactgaagatcaatccatcgtgaagacgtacgactacataaactgtgttgtcacaacacttccgcctaacggtccacaaaggtacctggatgacactttcccctcctgttgccatgcaacaccatgatcctgtgtgtgtgtaagaaattttttgaaattactacgttccccaacaacaccttttgagacacacacacatgaattgggatttaataaaatactccaagtgcctcacttaaatcttttgagctagaaaattttgctctagtgcttcacttatacctttagagcacggtggtggttttattttatagaaattattgatctctcatgcttcacttatattattctgagaatcctcctaaacaaca

SEQ ID NO: 4110 - DNA, 435 bp, Triticum aestivum
  Clone ID: LIB103-051-Q1-E1-B2
attgaccttgacaacatcgatggcaccatcgacgaagttgacgatggcaatgttgatgatggtgctctcacacctaccttcaccttcccccagcttgagtccaccaccgcggagaaggtgatggtcagcgtcgaggcgatcgcggaaaaagatgacgtcgccaccacggaggacgaactcatgctggtgagcgctgagttggagaaggttctcgggggcagcaacgtgccgtcggcacgggtaagcttcgccatgggcatcgattgcccactgcagggcttcctacttggttccccagtgtgcagcgacactgaatcatggccagagaagccaaacggcggtggacgtcctgcctccccccgttgattgttcatgcggacacgcttcacggaagagaagggggccctagttgccgtccaggagagcgaggatggt

SEQ ID NO: 4111 - DNA, 61 bp, Triticum aestivum
  Clone ID: LIB103-051-Q1-E1-B3
cgggcaagatgaaaaggacgatgacgacgacgacggcgatgaagaagaagatgatgaagaa

SEQ ID NO: 4112 - DNA, 464 bp, Triticum aestivum
  unsure at all n locations
  Clone ID: LIB103-051-Q1-E1-B4
gggtcccgggcgagaaaaatcctccgccgctaaaccctagctagctcgaaccccggcgaggccaaaaaaagggcgggatccgcggaaaccccttcggcttcgtcggcggtggggaggctgcaggcngcggcgcaggacgccgccaactcctcctcctcctcgcgctccgccttctccaaccagctcctcgtgcccagggaggcangacggatggtgtctctgtcggcttgcgcgaagttcggcgctgtcagctttgtggttggcgtcgtggttggcttcaccctgaataaaaggctgcgccggtgggctgccaagctgctcaagagaattaagggcgataactagcaaagctagtgcatttaatcttgaaagaaattttgttggcaagtgtgctctagttacatctgtagtaactccaagttgaacctcattgactgcttggatcaactgtgatggatacaaca

SEQ ID NO: 4113 - DNA, 282 bp, Triticum aestivum
  Clone ID: LIB103-051-Q1-E1-B5
gggtccacgggagggaagagggggaagaaacagtaaatacatagcaagcaagtgcataacaggacaacaagcagagctagacgtgttctaacgcggtatgaggtgataccggtgaaggggggaaacatccgggaaagtatccccggtgttccgtgttttcggacagatgaaccggaggggaaatgttgcaggttcactatggtaaggatgcctggcggacgaacaggctgcgtatctggattcgtctcttcgttctgagcaaccttcatgtacaaacttttt

SEQ ID NO: 4114 - DNA, 137 bp, Triticum aestivum
  Clone ID: LIB103-051-Q1-E1-B7
ggacagtgacgagggccatgagtagcagagcctgcctcctgatgctttcccgacgcatgctgctggaagcctatcatcggcccgcgtggcctggtgcgttatcggtccgtttcagcattttcttcgccgcgttctgt

SEQ ID NO: 4115 - DNA, 475 bp, Triticum aestivum
  Clone ID: LIB103-051-Q1-E1-B8
ttcgcgggtccacgggagtccaacccttgcgtgcgaaccaccctggctgtgtatgtgagtgcatgcacgtgtactccctcaatcttccaacaaagagtgtacatatacacttccaatgcacttagcctttaatctaatcgatattgattgactaatgcaccaacttgtgctctagctataggctacatgtctatccttaattacaacatgcaacaatcttcatttaatcttcttctctcaatggtcgcatgcacacataagtctgctacttttgggtgataattatgccatgaagtttcagttcctcttggtcaatgtgtaaatctctatatgtatagtctttcatggacggagggagtaggttgagcacttgagcgtgagcgtgtgtgttgcgccgtgtgctgtgtgccgcatgtatgcatgagtattgcgtgcatgcgtgcatgtgtacgtgtgagtgttgcatgttgcatgt

SEQ ID NO: 4116 - DNA, 177 bp, Triticum aestivum
  unsure at all n locations
  Clone ID: LIB103-051-Q1-E1-B9
aatccatnaaaaaaaaatgcgaaacaaaaattggttggttggaaatgggaaggaaacaatggaaattaagtcaaaaggtgtaaccttttccttccccggttaaaacagtcctggattgcttcatatacaaaaanaaaaaaaaaanaaaaaaaaaaaaaaaagcggccgctccaaaag

SEQ ID NO: 4117 - DNA, 285 bp, Triticum aestivum
  Clone ID: LIB103-051-Q1-E1-C1
cctcaaaaagtctgatctctgtgctcaggtgtcatccctggatcagtaatgctaacaccacacagtacttgaaggatttataacagagtagcaatcgcacacttattacatcgaatgtctcaaagagaacttattacaatgaatatggcttaaggccaactaataacgataacagcggaaggcttggaagataagcgagtccatcaactccaacgacatcactgagtatagaaccatgaccaaaaaggaaccttactcgtcgtctgaaaagtctgcaacatgaaa

SEQ ID NO: 4118 - DNA, 106 bp, Triticum aestivum
  Clone ID: LIB103-051-Q1-E1-C10
tttgaacatttgctttgtggggttggtttaaaaacctgttgtgttgtaaaaaccttgtatgtttgaacctgttatgcaccttggttaatatgcatgctatctggtt

SEQ ID NO: 4119 - DNA, 424 bp, Triticum aestivum
  unsure at all n locations
  Clone ID: LIB103-051-Q1-E1-C11
gcgacgagccattcgggacttaataaggaagtggcctaatcctcctaaagtgcctgtgttcgcgtggtgactcatcactgattcccttccaacatgggttaataagaagcgtcgtaatttggaagtaactgacgtgtgcccggtgtgttcgtctgaacccgaagacacataacacgccttccgcaggtccccacgagcagtangtctctggcaagccatggcgagcgactggaggctcccggacgtccgcaagctggtgaatcctgnaccggagtggctcctgcacatccttggggacagtacagagacngaacggcttcacctgcttatgactctgtggcgcagctggcatgtaaggaatgatatagttcaacataaacggcctccaacgttgagtcatcgaagcgcttccttcatagctatg

SEQ ID NO: 4120 - DNA, 285 bp, Triticum aestivum
  unsure at all n locations
  Clone ID: LIB103-051-Q1-E1-C3
tgcctcccangagcgccgagtccctccgtccccaacagatctacgcgcgaggttcggttcggtcttcggagctcgagacatggcggaggagaatgccccagttgaggttgctgctccggttgcgggccctaccccagttcttggagagcccatggacttgatgactgctctgcagcttgtgatgaagaagtcaagcgctcatgatggccttgtcaagggactccgtgaagctgcgaaagcgattgaaaaacgtgctgcccagatctgtgtgcttgctgaggactg

SEQ ID NO: 4121 - DNA, 476 bp, Triticum aestivum
  unsure at all n locations
  Clone ID: LIB103-051-Q1-E1-C6
tccggggccacggggacggcacaaactgggaggttgcacgggagctgctgcagggtgccgtcgcgccgccgcagcagcgcgtgtttgcggcgaccgagccatcagatgtcgtcgcgtcgagctatctcgcgattctccaggtatgccagagaactacatgttcacattatttgtgcgcaggcggcgaactacatgtcattccccttggactacgctctggagctggaggagaagctgttggcgcgggacgcggagattgccgcgctgcggaagcagctggaggagacgaagggcgagctcgccacggcgaaggtgccgcggaggtagtcagganggtagcaggagagcgagacggaggacatggngcgcaccgcggatcttttcttgcttcgctactctgtaatccagtgatccgttcctttgctatacgagactcgttaactaagattcatcagtgagcaacaagaagggaaaaa

SEQ ID NO: 4122 - DNA, 333 bp, Triticum aestivum
  Clone ID: LIB103-051-Q1-E1-D1
ccgcagccaaagacggcggcgacaagaatggcaacaagaatgccaagaccagcgtggagacgtacaagatctacatcttcaaggtgctgacgcaggttcaccctcgacatcggcatctcctccaaggccatgtccatcatgaactccttcatcaacgacatcttcgagaagctcgccggccatgccgccaagctggttcggtacaacaagatccccaccatcacgtccccggagattcacactccgtccgcctcgttctcccccggcgagctcgccaagcacgctgtctcctccggccacagcgccgtcaccaactttacctcctcgttaaag

SEQ ID NO: 4123 - DNA, 481 bp, Triticum aestivum
  unsure at all n locations
  Clone ID: LIB103-051-Q1-E1-D10
tacgcctccgtagattccgggtccacggggacaatcacagtttttcctctcgctcctcctgtgggcggcgccgccgctgcgcacagaacacatcctcgccagcgtagcttctccggcgtccggccaacgcgctcactagcctcgcgccttcctccacatctcctcgcctccaccccatccagttcgtgccattcgctgctccaagacaagggcatggcgctcggcggctgcggcaacgaagctgatggtgcacgagccaaccatgaaggcagtagcacggggcagcgacagcagcatggagggcgtcctcttgtttgggaaggtaatggaactgcaaataggagtggcagcggcgaccaggatgcaaatggaagtggttcccanagaccttggaaagaaatggcacgtgagcanaggatatcaagaagcttttggatgttgggaagcttggagctgatgcttcanataagctgatggttgt

SEQ ID NO: 4124 - DNA, 374 bp, Triticum aestivum
  Clone ID: LIB103-051-Q1-E1-D11
caaaaaaggtggcaagttccccaaaaaaggccgaaaaaaaggcttaaccaaaaacccgaaccattgaataaccttgtcttgcccggtaaaacaaatggggtaaacgtagatttgtgcttccaaaaaaaacaaattcggaaatctcccttcaattggcttaaccgctgtagtgctctgtagtaacagtgattgctgtgtcgatgtacatctgtgctgcgaagacgataatgtcagaaatctctctgatttgagcaggcatcatcttgtttgggaaggtaatgggactgcaaataagagtggcagcggcgaccaagatgcaaatggaagtggttcccaaagaccttggaaataaatggcacgtgaacaaaagatat

SEQ ID NO: 4125 - DNA, 419 bp, Triticum aestivum
  Clone ID: LIB103-051-Q1-E1-D12
gtccacgtgtcccgcatcaaattgaagttttaaatgggcaaattccctattccggctaccaaccgggctttcaatcacctgcacataaaggcattagggttataacctgggaaaataatctccggtccttctccttttcggataacaacaaaattctcaggggcaacaacctacatagggcaaacctaccatttgcaggactatcatacattatttaacgtacctcaaaccctgtcattagactcataaaagcttcatgcaatccgctttcagcggacgagattctctccatcaccgtattcatcagcacacggtgttcatctgagaatggcgctcgccccaccaactccctcagaacatctgatcgcacaccatatggtgtcagactcttttgttcgctctcttcggcagccggacac

SEQ ID NO: 4126 - DNA, 377 bp, Triticum aestivum
  unsure at all n locations
  Clone ID: LIB103-051-Q1-E1-D4
ggaggagactgaggaggagctaggaactgaatatctggtgcagccgcttggccgtgctgaagacgaagagcattccagtgactttgagccagaagaaaatggtgatggtgctgaggacgacgagattgaggatgatgatgctgacgatggtgaggattctgtcaaggcgcaatcctcttcgaagaggaagatgtctggcgcggaggatgaagatgatgatgacggtgatgatgatggtgatgatgatgagaagcctccatcaaagcgatagtcaatttgttcttgctgatctggtatcttttctgcttgggccaagaaggaaaataatcctcaccganaagggtgtttggtaaatgctgtagctttaggacatctgt

SEQ ID NO: 4127 - DNA, 309 bp, Triticum aestivum
  Clone ID: LIB103-051-Q1-E1-D9
cagcgtcagaacatcaagaacgaagaatgatagtccatgagcctgcttccacagaggctcatgaagttgaagatattccagcagctgaacccaccgctgctgaagacattggtcatgatgacaatgtagccgatgatgaagttcttccttagatcgaacattacgtggtatcatcacctgttcatacgaacagcgaactcatcagcattggtcgtccactgacgccaattgctcaggatgcatcgtgggctgatcacccacaactacaagactcccccagtactccccaataacaacaacaagctacac

SEQ ID NO: 4128 - DNA, 455 bp, Triticum aestivum
  Clone ID: LIB103-051-Q1-E1-E10
gtccacgggtcctctcacagtgttcaccttgtctcatgggagaaggagaatgtgtccagtgaggctcttgaggctgcccgtattgcttgcaataagtacatgaccaagcatgcaggaaaggatgccttccacctcagggtcagggttcacccgttccatgtgctccgtatcaacaagatgctttcgtgtgccggggctgataggctccagactggtatgaggggtgcttttgggaagccgcagggagtctgtgcccgtgttgccattgggcaggtcctcctttctgtgcggtgcaagcccaacaatgccatccatgccactgaggcccttcgtcgtgccaagttcaagttccctggccgccaaaagatcattgagagcaggaagtggggcttcaccaagttcaaccgcaacgactacctcaagttcaagagtgagggcaggatcttgcctgatgg

SEQ ID NO: 4129 - DNA, 388 bp, Triticum aestivum
  Clone ID: LIB103-051-Q1-E1-E11
cttggccccaaccgtatcaacggaaatttcccccctaaggggatcggtttatcgcgataacctgccgagttaagatcgggaggtaggaggagcttttggggggtgggaatggcttccggcgggaacccgcagttccggtacactcagcctccatcgaaggtgatacacgtgaggaacctgccgtgggagtgcaccgacgaggagctgaccgagctgggcaacctcttcggcaaggtcgtcaacaccaagtgcaacgtcggcgccaacaggaaccaggcgttcatcgaattcgctgaccaaaatcatgcaattgctatgatatcatactatgcatcatcagcggagccagcacacgtaagatgcaagaatgtgtaccttcagtactcca

SEQ ID NO: 4130 - DNA, 456 bp, Triticum aestivum
  Clone ID: LIB103-051-Q1-E1-E12
gtccacgggtcccattgtaaccatagataaccacatgcatgacatacatcaattgttctcaaatccttaaagactcaatccgataagataacttcaaagggaaaactcaatccattacaagacagtacagggggagaatcatcataagatccaactatgatagcaaagctcgcgatacatcaagatcgtgccaaatcaagaacaccagagagagagagagagagatcaaacacatagctactggtacataccctcagccctgtgggtgaactactccctcctcgtcatggagagcgccgggatgatgaacatggccaccggtgatggatcccccctccgacagggtgccggaacagggtcccgattggtttttggtggccatataggcttgcggcggcggaactcccgatctacgtttctttctggggtttctgtatctataggaatttttggcat

SEQ ID NO: 4131 - DNA, 274 bp, Triticum aestivum
  Clone ID: LIB103-051-Q1-E1-E9
aagcaaggagtgctaacttctgggcgtgtccgccttctgcttcacagaggcacaccttgcttccgtggttttggcaggcgtaatggtgagcgcacgaggaagtccgtccgtggttgcattgtcagccaagacctatcagttatcaacttggtgattgtcaagaacggtgagaatgatctgccaggccttaccgacactgagaagcccaggatgaggggacccaagaaggcttccaagatcaagaagcccttcaaccttggcaaggatgatgatg

SEQ ID NO: 4132 - DNA, 466 bp, Triticum aestivum
  Clone ID: LIB103-051-Q1-E1-F1
ggggcagtggccagcgcgggccttgccggtgcccacgatcaagaggaagacgttgccgtcctcctccgagactagcaggcggcagtgatcctctagcgactctggcatggtgaacgggtagcacgtctcgtacttgatgttttctgccaagggccagtagtgaccgctgcatgcatccggaggtgatgcatgatgtctgttggcgagcccctaaacggcatcgggcactcatagaagtagatgaagggctccttggaggcatcgaccaggtcgtccatgaaacaggagtgactgtaggggacgttgcgccagttgaatatatgagcacgttactacaagatttaatccaaataagcacaaaataaatcatgacggctataatagagattaaactaatcatgtggactagaatagtagatgaatagatagaatctagtaggatacagagtagaaacatgaattctat

SEQ ID NO: 4133 - DNA, 448 bp, Triticum aestivum
  Clone ID: LIB103-051-Q1-E1-F10
ggcaacacatagggcgggttgccagcaagattggcctcaagtcggtcgttgtgaaggtgaaaggatactcctttttcaggaagaagaagaaggtgatcatgggctttgcggatggtttccgtggcgaaagagtgaggaccccgtctcctatcatgtatgtccacgacgtgacccagcttgcgcataatggttgccggctgcccaaaaaggtaaggaagtaagactgataatatcccccagcaagtgtggagatcaatatcctgcctccaagtagaagcacagaacgatatgtatgtatcgactggtttcgtaataatatcatcagcctgaaagtatttatgaatacttattagacaatcttacatcggcttttgtaagtgataaccattttgtcatttcccgtattgttgctgaggtgatggatttgttttgatttgacctgattgca

SEQ ID NO: 4134 - DNA, 256 bp, Triticum aestivum
  unsure at all n locations
  Clone ID: LIB103-051-Q1-E1-F4
gcttgaaagtcttgcagcanaatatagatgtgtttataactgcacatgaggaacaacaagagcgggagaagaaagaaagaaaggcagcagctgaaaaaaaaaaagatacaattttagatgctgccgttgagagcgaaggcgctgccggacatgctatcgcggaaggaagcaagaagattgtattggtgaagcataagaagaaaattaagcatgccaaagtaacaagctgttgtaccaacgctcataaattggtgac

SEQ ID NO: 4135 - DNA, 315 bp, Triticum aestivum
  Clone ID: LIB103-051-Q1-E1-F5
ggggctgacaatatattataacggagctataactggctacagcggactagttgtgatggccaccatttagcggtaccttgctgaaaaggctatatcgggctatagttgagctatagccggctatttaaaactatgattagacagtgatgttattttcttcctatgttgtacaagccacaaacgtttggtgaaaggaaacaccatcatggtcttttatagagctacaaatgaatctttaccaatgtttttctgtaagcaattgtttgctctgctttaaactgttagacgtgtaagttggtctgcatctcaagtggg

SEQ ID NO: 4136 - DNA, 373 bp, Triticum aestivum
  unsure at all n locations
  Clone ID: LIB103-051-Q1-E1-F6
ttccgggtccacggggaccgcagccgccacacacgaaccccgggacgaagcagatcggcggcgcgtcactccaatcaccggttaggataaatggcgacggtttcggattctctggtctgggagcttgtcaggaagaacaactgcttcctgatcaagcagttcggcaacagcaatgccaaggtccagttcagcaaggagcccaacaacctctacaatgtccactcctacaagtactctggcctggcaaacaagaagactgtgacggtgcagccagctgctgagaaggagatgactgtggtcctctccacaaccaagtcanagaagcagaacaagcctgctgcgtgcacccacaagactgtcatgcgcaaggatt

SEQ ID NO: 4137 - DNA, 459 bp, Triticum aestivum
  unsure at all n locations
  Clone ID: LIB103-051-Q1-E1-G1
gggcccgaggggtagcagcctctatatcacanaacaattatcaagtatcaaattgatcatagcatccaattcactttctatgatagtttttattatacccaacttggatgcccatcattctaggacaaattttataaccatagaaaataccatggctgttctgagagactctcaaaataatataagtgaagcatgagagatcaacaatttctacaaaattaagccaccgccgtgctctaaaagatataagtgaagcactagagcaaaactatctagctcaaaagatataagtgaagcacatagagtattctaataaattccaatcaagtgggtttctcccaaaaggtgtgtacaacaaggatgattgtggtaatctaaaaagcaaagactaatatcatacaagattctccaagcaaaacacatatcatgtggcgaatanaaatatagcaacaagtaaag

SEQ ID NO: 4138 - DNA, 451 bp, Triticum aestivum
  Clone ID: LIB103-051-Q1-E1-G11
tccacgggtcggcggtcagggtcaaccggatgttcaacccgaaaataaacctccagatttgaatcaccaatgaggggaatttaatcgaccggaacaggacctccaacgccaagctggtcaaagctgcaggccaaggtgtcaagtcacaggaagcacctcaccattgatgcatgagctctgaagcttttaccctggcctggaactccttttggcttcaatggttttcctgctgagagcttcatggctgatattgcagtggcacgagttcttcaggtgaaactgtcactgattacatctgaacccattgtaatgttttgggtggtactagctgtgcagatggaaccagcaatgttatgtcgtaacagtagtaacaacgaactggagcaagagtgatcgaggcgcgggtttctcgggaaatggttcgatttcaggcattcacacacaccttttg

SEQ ID NO: 4139 - DNA, 272 bp, Triticum aestivum
  Clone ID: LIB103-051-Q1-E1-G12
gtggtgtcatgggctccaagtcgcaaccgaagaccaaggccagggaaaggcttatcgcaaaggaggctgcgcaccggatgaactaagtttagcattgttgaaccatatctattcctcatccttgagtattgttcaagcatactgtggcagtttggctccagttttggaagtcatttttgtttgtctgagacatcttggtaagaacagtgtcagaatgaagtatttctgtttaatgccagttagtatttttgtcgaacaatcgaattaatcaa

SEQ ID NO: 4140 - DNA, 392 bp, Triticum aestivum
  Clone ID: LIB103-051-Q1-E1-G6
gggtccacgacgacccctactacaccggaggtgcctactactacgtgcaggctgacgacgaccaggagtagttaggaggatcccaggcaggaggcttgcgcctctttcgatctgtatcccagtttgtgctagccatcttatggtaacttgttaacttatgtttgtactcagatattgttgcttccgctgactcgtcaatgattgagcacttgtattccgagccctcgaggccctggcttgtattatgatgcttgtatgacttatttatttgtagagttgtgttgtgatatcttcccgtgagtccctgatcttgatcgtacacatttgcgtgtatgattagtgtacgattgaatccggggcgttacagttacaaaggtacgtttcgggtttgt

SEQ ID NO: 4141 - DNA, 467 bp, Triticum aestivum
  Clone ID: LIB103-051-Q1-E1-H1
cacgtcttccagaacaatatgctcgacatgctcaagcagaccggcaggccagaaatggtggtacggtggtatcactctcatcctggttttggttgctggctatcgggtgttgatatcaatactcaacagagtttcgaagctttgaaccccagggcagttgccgtcgtgattgaccccatccagagtgtcaaggggaaggtggtcatcgatgcatttcgtctcattaaccctcagaccatgatgcttgggcaggagccacgtcagacaacatccaatgttgggcacctgaataagccgtctattcaggctcttattcatgggctcaatagacactactactctattgcaataaattaccgcaaaaatgagctggaggagaagatgctgctcaaccttcacaaaaagaaatggactgatggattaattctgaagaaatttgacgcacattcagaaaccaatgagcaaac

SEQ ID NO: 4142 - DNA, 115 bp, Triticum aestivum
  Clone ID: LIB103-051-Q1-E1-H11
atcacattatactgccatttgcctctcgttttcctctcccccacttcacctttgccgttttattcgccctctctctctctctctctcctccctccccatttgcctctccttcccg

SEQ ID NO: 4143 - DNA, 402 bp, Triticum aestivum
  Clone ID: LIB103-051-Q1-E1-H12
ccacagcctattctttgccggggaggccattgtcggcaaatatggtacccgttatggtgccagtttgcgtaagcagatcaagaagatggaggtgtctcagcactccaagtacttctgtgagttctgtgggaagtttgctgtgaagaggaaagcagttggaatttggggatgcaaggactgtgggaaggtgaaggctggcggtgcttacactatgaacactgccagtgcggtcactgtcaggagcactatccgtcgtttgagggagcagactgaagcataagttgctactagtgttttgtcctagtgaatcatctgggatttcgcagtttagacgatactttggattcagttccattggctgtttagtcaaggattatctttgtacttggtgcgatgatgttc

SEQ ID NO: 4144 - DNA, 451 bp, Triticum aestivum
  unsure at all n locations
  Clone ID: LIB103-051-Q1-E1-H3
cacgggtcgccngggagactagctaaggtttacactctgctctcctctcctccgccatctccgaccgaggtctcccggcggcgggtattgtctcccggccggtcgtgctcaaggaagacagccgtgtgcctcttcctgggacgctgctctgtgtgcctcttccagggacactgctccgtgtgccccttcccgggaagctgctccttgtggtgcctctgccctgtacgacgctctccggctgctgcttcgacccaagttccgacaccatgtagctcgtcaagattttgggcagctggagccatgctccatggacgacgaggatgaccgggaccccaagcccaagccaacgagcacgacgaggtaatcgtcgagtccggggaactttgactcgactccccacaattagatgcaaatgcacggcagcgagagattgatgatgtcgacgtcgtta

SEQ ID NO: 4145 - DNA, 394 bp, Triticum aestivum
  unsure at all n locations
  Clone ID: LIB103-051-Q1-E1-H4
tggactaacttgcacganaaaccgcagaggtaaaacanaaaagaaagcaaataaaagcaaagttttggaatagtccaacacgagtgttttgaagctacatgagcttaagtacaacctaattaaatttctttaaataccgccacatcttgatgtagacatgcagattacctcccccaagcttaagcttttgcaagcccaaaccggcggaatcactgtggcggttggtcacaagcccatccatggctccagttggagaagcttgaattcatgtaggcggacgtgcctcgaagggacacgacaaggttgctcatatcattgatggagccctgcaaactgtaaaggtccgcataggtggtgtaggcttcttgttgtggatgttcctggggttgctcct

SEQ ID NO: 4146 - DNA, 401 bp, Triticum aestivum
  unsure at all n locations
  Clone ID: LIB103-051-Q1-E1-H9
gtaggcgtccgagattccaaggtccacgggccgacaagcatcttctacngtgggaaaggccaaacctccttcacggggggctttccccttctcggcggcggaaaacctcggttaccggcccaatggatgatgcattaaagtaaggaagaagaagcaagcagaacagaagaagagatgggcgacgggggccccgcccctccccttttatagcgggagaaggccaactgacaacccccacgatcggaggtaatgacgtcttttctgcatgcaccagggactcgtcaagtcgggcagttaccgaggcagcatggggaagcggagatgcccacgtcccgtcagtcgccacgcgtcaatcatggacgcatgccgttggggcccgcggcgctccgcacttgcccctt

SEQ ID NO: 4147 - DNA, 408 bp, Triticum aestivum
  unsure at all n locations
  Clone ID: LIB103-052-Q1-E1-A1
cgggtccacgggatattacaaaccaggggcctcaagggctcgaatacataagctcgaaaacacaagagtcggcggaagcaacaatatctcagtacagacatgagttaaacaaggttgccttaagaaggctagcacaaaagcagcaacgatcgaaaaggcaaggcctcctgcctgggagcctcctaactactccaaatcgtcagcggttgtcacgtagtagtaggcatcctccaggtagtggtagtcatcactggcgtcgtctggctcctgngatccgatatctggtcgcaacaatcgggtatgggggaaaacaagtagcaaagcaaccgtgagtgctcatccaaagtactcgcaagacttgcattagatctaaactaagtatgcatctgtatcaaaggaatgggttgt

SEQ ID NO: 4148 - DNA, 471 bp, Triticum aestivum
  unsure at all n locations
  Clone ID: LIB103-052-Q1-E1-A2
ggtccacggggaggcctttccaatccatagccacgtggatcctaaataaaaatggcgtttaaaataagaatgaagaattaaaaggttccaaaggcaaaaaaaattggttaaccgccaaaggaaatacaatggtggtttaaagacgattttttgaacctaatgtggatatatacatatatatggattatcctcttcccaatanaatcgcacttgtcatattcctatacagaatgtaggagtatgattaagcagatgcagcagcgcattgagttgtgtctagccagatctcgtgcacagtacgtaggaccctttcctatcccaaattaaaaatttctgaacatgctacacgtacctctctatcgacaacataaactgaagacacaaatctggtaatcaagaactttctccgcacaacagcttaaagcacacacatacacttgaaccaatcaggcaatcacgcatgaaacgacc

SEQ ID NO: 4149 - DNA, 273 bp, Triticum aestivum
  Clone ID: LIB103-052-Q1-E1-A3
cacaatcctcaggaggttctgaatttcctgaaaaaggcccgcttctctgctaatacaaccatctacttgacatatacattgtggcacaaaggcctcactaatcttaagaatgcattaccaaacacttataccatcgacgacataatgcctgctgaaaagaaatgtgagttcctgaactctggtgattcaaacctatcaagggcccttttacctccaaatctgctcgcataccaacttcttcgtccctgccatccctggtatgttctaccgcaa

SEQ ID NO: 4150 - DNA, 152 bp, Triticum aestivum
  Clone ID: LIB103-052-Q1-E1-A4
tttgggcgattggttggttgcgtgaccggatacctgtcgtcgtctcaagcttctttgtcaacgttcgccatctgccatggtgctgggggatgaagtacttctgggagagcttgcgggcgtccgaccttgtaagctacgcgttgggctggcag

SEQ ID NO: 4151 - DNA, 358 bp, Triticum aestivum
  unsure at all n locations
  Clone ID: LIB103-052-Q1-E1-A6
ggggccacgccggcatgaggaagctttgggccaccggctggctgcatgaccgcatacgtgtcgtcgtctcaagcttctttgtcaaggttctccagctgccatggcgctgggggatgaagtacttctgggacaccttgctggacgccgaccttgagagcgacgcgttgggctggcagtacatctccgggtctctgcctgatggccgtgagctcgaccgcattgacaacccgcagtttgaaggctacaagttcgacccatgcggggagtacgtccggcgatggctgccggagctggcgaaggctacaacggaatggatacaccacccctgggatgcacccgagtctgtgctgcangctgc

SEQ ID NO: 4152 - DNA, 468 bp, Triticum aestivum
  Clone ID: LIB103-052-Q1-E1-A7
ggggccacgggaggaggttcagcgcggagttccagctcgtcttccgtctgatcaaggggctgatattcataacattcatctccatcatcataatcttaacagcaatcgcccacatgacagtccttgacatcttcgtctgcatcctcgccttcatgccaactggatggggcttgcttctgattgcccaagcgatcaagcctgtggtcgagatggtcgggctgtgggggtctgtgaaggctctcgcccgtggctacgagattctcatggggctcctgctgttcacgcccatcgcgtttctcgcgtggttccccttcgtgtccgagttccagaccaggatgctcttcaaccaggcgttcagcagaggcctgcagatctcccgtatcctcggcggccacaagaaggaccgagccacccggaacaaggagtacgtagaaagaagatcaaggctagctcccgcggactttgttc

SEQ ID NO: 4153 - DNA, 477 bp, Triticum aestivum
  Clone ID: LIB103-052-Q1-E1-A8
gggcaaatgtacaatgacatgtacctgaaggtcaagggtaacatgttcaagatcagtatggtcctcatggagagtatccacaggtccaaggctgaaaaggcaagagagaagaccctctctgaccagtttgaggccatccgcgccaatagcaatgcaagcatggagaggaagattgccaggagggatgagatgattggctcaaggcccgagagatcatgcaccagcaccatcggctgcagctctcgctcaggcatcatctgcacctatgaatgccatcaagtgaatgtctgataagaagctttatctttctggtaatatcacgggttatcctaattttggaatatcataaattcacaactgttttctgtgcaatatcatgtttgtgtcatcgtgtctgatcacttaaagatcatatcctatttgttctgttggatgtatcaatcagatatgcttatgcatagtctgttaaacataaaa

SEQ ID NO: 4154 - DNA, 460 bp, Triticum aestivum
  Clone ID: LIB103-052-Q1-E1-A9
cggggtcacgggcacatgtacaatgacatgtacctgaaggtcaagggtaacatgttcaagaacaagagggtcctcatggagagtatccacaagtccaaggctgagaaggcaagagagaagaccctctctgaccagtttgaggccaagcgcgccaagagcaaggcaagcagggagaggaagattgccacgagggatgagagattggctcagggcccgagagatcatgcaccaccaccagcggctgcagctcccgctcaggcagcagctgcacctaagaaggccaagaagtgaacgtctgataagaagctttatctttctggtaatatcaagggttagcctaattttggaacatcagaagttcagaactgttttctgtgcaatatcttgtttgtgtcagcgtgtcggataccttaaatatcatatcgtgtttgttctgttggatgtctcaatcagagatgct

SEQ ID NO: 4155 - DNA, 421 bp, Triticum aestivum
  unsure at all n locations
  Clone ID: LIB103-052-Q1-E1-B1
gggtccacgggtcaggactgtcttcattgttttgatgcttgtttttacggcatcacggctttcttttgcaatcccaaattccggatgtgccgggtcactggtgactctatgggccaacaagctgtcctctcccgtgcaaaagcgggtcataaggcttgttanggccgccattgtccttggcttttcttggccgaggtgtccggcgagccattcgtctcggatactatgcttgaaagccgctaaggcctcggcatccgggcaatcgacgatttgattcttcttagtgagaaatctgttccaaagcttacgggctgactctccgggttgttggattatgtgacttaaatcgtctgcatccggaggtcggacataggtcccttgaaaatttgccctgaaagcatcctcaagttcctcccaactt

SEQ ID NO: 4156 - DNA, 451 bp, Triticum aestivum
  Clone ID: LIB103-052-Q1-E1-B10
ccggggccacggggcagtttacacaggctcaggccaccttgtggtgtaataccctactactgctttgtggtggattagcctcgcgaggggctgaggatgaactagtacaagtggaagaacatcctcaggaggcgtgttcttgtgatgagctctagggattcggtctccgggggtccgatccttctacggttgtggctagactatatttataatggccttggtcctcttccttcgaaacttaggcgggaagggatcccacaacggccaaatttgaaagggaacaagaagtacatataatcttgacgaaaggcggtcttcgcctacaaagcctttgagcgtgacctcgtggtgggatcggcgatgacatctatcctgccgttctggcggtcctgggcccctttccaggcaaatggcaacctttggctgattccttggggctcaacacctgcgc

SEQ ID NO: 4157 - DNA, 463 bp, Triticum aestivum
  Clone ID: LIB103-052-Q1-E1-B11
ccggggtcacgagattgtcatcctggggcccgtatttctacacaatatgttcccctttgagaggttcatgggagtcctaaagaaatatgtccgtaaccgcgctaggccagaaggaagcatctccatgggccatcaaatagaggatgttatcgggttttgtgttgacttcattcctggccttaacaagacaggtctccctaaatcgcggtatgaggggagactgactggaaaaggcactcggaagagactcaataatatgcagggacggatattattggtctcaagcacactacacagttctacagaactctaccttggtgaccccgtatgtcgatgaacacaagaacagtctgcgctccaaacacccggagcagtgcgacgactggattacatgtgaacacatcaggactttcagcagttggttggaaacacgtctcagaggtgacaacactgtttgtgatga

SEQ ID NO: 4158 - DNA, 389 bp, Triticum aestivum
  unsure at all n locations
  Clone ID: LIB103-052-Q1-E1-B3
ggatcatgggaacgacaaccgcaatgacctgtaanaaacataaaacatcctattaactgaaacatgctttgcaacaactttaattcaatcctcaaacaaattaaagggaaagggatcaattgttttccatttatagcccagtaggaaataacacgcaaggtacaaccaacacaatcaccactttgaacctttcaactcttctcagcctcaaaaaggtgtcatggttttgatgatgtcctcatccaagcgatgcaaattatttgtagagaatgcatattagtaaataaaaagaaattccaaagcagaaaacaccaagcttgctaggatatttgtcactcaaggcatcattttttcatgcaaaagatataaaggtccaatgtccaataaca

SEQ ID NO: 4159 - DNA, 414 bp, Triticum aestivum
  Clone ID: LIB103-052-Q1-E1-B4
aagtttgaatccgaaaacccgttcggttcccctccgggaaccgttgctaaaccttggtcctaaaagccgaaccctggtaccccaaacaactaataataagccgcaattaggtgttccgggtacaagttgttgccatgttgtgtcgggcgcatccgcacatgtttaaagttcccggatttgatatccgtggttgtagatattctaagcacttgtacttggtatatatgcccgggcaagtatttttggtacaagatgattagaatgcgccagtacgtgtccggatacaagttgtggttgtcttgtgccaaggcgcgtcactgccttttgaaggcccgaatttgttgttcgtggctgtagatgctttgagaacatggtacaggtacatatgcccacgcagttgttcctgaaacatga

SEQ ID NO: 4160 - DNA, 455 bp, Triticum aestivum
  unsure at all n locations
  Clone ID: LIB103-052-Q1-E1-B5
ccacgggtatggtcaaacatcattgcttaagaggaatgaacaattcctccagtatcgactaatctttgacagacatagcgatgtccatgttactcttcctgctcccttcctttttgattaccaggcaaaaaggaagatacgttgttaccagggaggaaacagctgaacacaaggagagagcagaggcggctcaccaacattcaaaatcaattctcaagatctggctacgaattattagcacgaacgctaaccctagttagattattagcaaaaaaaatatttgtagagaacaaataattgatcactaatcatagaccgataccattcaaacaatcaatacactacatagatctgacgaatcttactccgatttcatggattgggagaacataaccatatgatttttattccagaaaaatganaatggggtgggggtgactaaccggttttccgtc

SEQ ID NO: 4161 - DNA, 204 bp, Triticum aestivum
  Clone ID: LIB103-052-Q1-E1-B6
cattgggtaataagtatgaaaagttcgatcatgatgcattaatcttgcatacagatagagtcgtataatttactcgtgtggatttattcgttatcggtctgtatgcatatttgcttagtagtgtttgttttagacgatgttgtgttgtaagtaccatatgtgtttatgttcattaagaatcatggttaatatgtatgatttggc

SEQ ID NO: 4162 - DNA, 497 bp, Triticum aestivum
  Clone ID: LIB103-052-Q1-E1-B7
tgcccggggccacgggatcatgggaacgacaaccgcaatgacctgtaaaaacatagaacatcctattaactgaaacatgcttgcactaactttaattcagtcgtcaaacaaattaaagggaaagggatcaattgttttccatttatagcccagtaggaaataacacgcaaggtacaaccaacacaatcaccactttgaacctttcaactcttctcagcctcaaaaaggtgtcatggttttgatgatgtcctcatccaagcgatgcaaattatttgtagagaatgcatattagtaaataaaaagaaattccaaagcagaaaacaccaagcttgctaggatatttgtcactcaaggcatcattttttcatgcaaaagatataaaggtccaatgtccaataacaactcaaccttatttatttttcagaatcctttgatacacactataagttgccgaacaaaatctttgagcatgcacagctggcataaaaaattgatat

SEQ ID NO: 4163 - DNA, 466 bp, Triticum aestivum
  unsure at all n locations
  Clone ID: LIB103-052-Q1-E1-B9
tcccggggccacgttcacctgacgacactaaaagaagcaacaacatacccccttcgttcctaaatatttgtctttctagagatttcaacaagtgactacatacggagcaaaatgagtgaatctacactctaaaatatgtctatatacatctgtatgtgatagtccatctgaaatctctaaaaagacaaatatttaggaacgaagggagtatatatcatcaaaagatcgaacgaataccaacttcatgattacttataacaagacttctcccatgtcctcaagaacaaaagtaactactcacaaatcatattcatgttcaagatcagaggggtattgaatatcattaaggatcttaacatataatcttccaccanataaaccaactagtatcaactacaagatgtaattaacactactagcaaccaataggtaacaatctgaggttttgggacaaagattgaataca

SEQ ID NO: 4164 - DNA, 215 bp, Triticum aestivum
  Clone ID: LIB103-052-Q1-E1-C1
cccatttgccgggaattgcaagcccaaccaacgttttggggccaacccaggaagaaggtgagacaccaacaccaaaaacctgggtcaaaccttgggtttgccccaaggggccattcaaccaaaccaaaccttgggttccccccgtttccaatttttcccccaaaaaaaccggaacctttccaatccaatttcaatcccaatccaaaggttccccc

SEQ ID NO: 4165 - DNA, 450 bp, Triticum aestivum
  Clone ID: LIB103-052-Q1-E1-C10
ttcccgggtgcacgggaaacgctccatgcagaagcttgaggatgacaattcagaattaaggcatgcgcgagaacagagcatgacaagagtcaataagatgtcacttgattcagataactctgttgacagacgaattgtgatcaaactactagttacatacttccaacggaatcacagcaaagaggtattggatcttatggttcgcatgcttggcttctccgaagaggacaagcaaagaattggttctgcacagagcaatgttggtaaggttgttgtccgcggtgttatgtgtcttcctgggcgtctagttggaggatttgttagtggaaattcagcacgaaaatctagacatgcaccgcatgataaccattcctttgcagatcactgggtggactttctcactcacggagacagatgacagggagaatcagtaagcttcggaagccgctg

SEQ ID NO: 4166 - DNA, 459 bp, Triticum aestivum
  unsure at all n locations
  Clone ID: LIB103-052-Q1-E1-C11
ttcccgggtgcacgggcaggttttcaatgtgaaggacatgtctaccaagccgagaaaaagaaaagataaggaagcgaatgcatcgtacgatgagccaaagcggcacatagttctttctgggaagagaaacatcgtgggagtggatgacaagacagacatgtcaggagattatgaaaagtttgatgaaattgctccattcacagtgaatattgacccgagcatccagttaaatgatgaagattttccatggctacggcgcaaagggacacacgcgaagaaaaagtttcacacccaaagatctgggatgtgatcggcttcactatcatcactttcttctgtgttntcacaccaggagggaacccttgtaatagttagggtagctagttatgtgttttggcattttgtacgcgaataaattttaggtgcaagcaaattctttcaagcatttaatgatttttt

SEQ ID NO: 4167 - DNA, 449 bp, Triticum aestivum
  Clone ID: LIB103-052-Q1-E1-C12
ttcccggggccacgggcgagccattaatcacggatgctatgcttaaaggccgttagggcttcggcgtctgggcaatcgacaatctggttctttttaatgaggaacctagtccagaattttcgggcggactctccgggctgctggacaatatgactgaggtcatcagcatctggaggccgaatgtaggtgccttggaagttttctctaaaggcatcctccagatcttcccagctaccgatagagttttctgggaggctatttaaccagtgtcgagctggccccttaagttttaggggaggtatttgatggagtgtagatcgtcaccgcgagccatgtgaatgtggagaagaaaatattcagtccatactacgggatctgttgtgccatcatatgattcaatgttcacgggtttaaaacccttctgggaactggtgctccattacctcatc

SEQ ID NO: 4168 - DNA, 325 bp, Triticum aestivum
  Clone ID: LIB103-052-Q1-E1-C2
gtcataggtcatttagtggtggtaggctgtgtaatacaaaagaagcagcagaagattgaaaacatcattctgtgagctgcatgtatgtgatgattttgtgaccatcaggattgatttcttttattaagtggctcatcagatgtttgagaaaatggccataagaggattgatgaaacttgaaagaggttgtggtatttctagcacgttgagaggataactcgtgacagggttcacgtgaagtgggaaagacccaccatgacctgcgagttaatggtttttggggtacgccttttcccagccccaggtaaatatcatgaggctacct

SEQ ID NO: 4169 - DNA, 408 bp, Triticum aestivum
  Clone ID: LIB103-052-Q1-E1-C3
gacaccatttctatattacaaggagaagtgaagaattctacaactccgaattggttgcttgcccattgaataatgtagctgagaccactgtcttgctaccgcatagagaaagtgtgaaaattcaggatgtccaactctttgagaatcacattgctgtatatgagcgtgagaatggtctaccgaaagcaactgtctatcgcctaccaggcactggagaggcagttgggcaacttcagggaggacgggcaattgattttattgatccagcatatgcagtggaacctgagccatcgcagttccattcaaatgttgttcgtttttattatagctcaatgaggacgccaccctctatctttgactatgacatggatacaggggtgtcggtattgaagaaaattgacactgttt

SEQ ID NO: 4170 - DNA, 441 bp, Triticum aestivum
  unsure at all n locations
  Clone ID: LIB103-052-Q1-E1-C4
acacanattgtcatctcgctgcaaaactgaaggtgccaacaaaatacatcgaaactttgatgcccaaggactaaataacgtaactccttgaagaagtcctccaatccaaaatccgaattggccttggaattctggcgccccatctcgatgtccctctcctttgggggcttcgcgtccatttcaaaagaatcctacgattcagttgatcgaaagcatcaacaatcatacagtaattgcaagttccacccatttactgaaggttccaaccaataggatttggacgtatgaccgattacttttcacgtttgacttatctggaaatcaatcagggttatgcagcacgtctaattattgatccatgatgacactagtagaaacaaacaaactttccttgttcgaaaaggangatgaaacccggggcctaaaaagaaacgaactgta

SEQ ID NO: 4171 - DNA, 473 bp, Triticum aestivum
  Clone ID: LIB103-052-Q1-E1-C8
cggggaaagtggaagtgaaattctcccaccatgatgctgcgggtcgttcaagctgatgtgcggcaaacttcaccttctccgcatctgtgcatcatgctgtggtcaactctctagctgtcttgcggagccaatcatctgctaatatcggatctgtgctactggaaaacaccggcggattcagcctaagaaaacgggctaagtgatcaacaggtggtggtggtggtgggttgttgttgttgttgttgttgttcccctggttctgattctggactagaaactgcatcaatgtgttctgctgctagatcaactgggtgagctccagtggaaatgtaaatctggggtcacgtctcggaggcatctgagggtttagaaaagatgagatgtaagaatacatggggtctaaggagaaaacactacgcatatgcacatgaggcaacagcaaacaattcacttcatttaaatcaacaagggca

SEQ ID NO: 4172 - DNA, 463 bp, Triticum aestivum
  Clone ID: LIB103-052-Q1-E1-C9
tcccggggtcacggggaggagaggaggatgcagtaccagtcgcacatccgagggctcaacgcgtacgatcgccacaagaagttcatgaaggattatgttcagttttatggccatgagaaaaatgtggataacagtctgcccatcaaaactgataaagatacattgagagaaggatacaggttcattcttaccgaggaagatgacatggattcaacttgggagaagaggctggtcaaacgttactatgacaagctttttaaagagtattgcattgctgacatgacccagtataaaaaaagcaagattggattgagatggagaacagaaaaagaagtgatatctggcaaagggcaatttatctgtggcaataggcattgtgatgaaaaacatgggctaggtagttatgaggtgaatttttcttatgttgaagcaggggagcagaaacaagcactagtgaagctgg

SEQ ID NO: 4173 - DNA, 454 bp, Triticum aestivum
  Clone ID: LIB103-052-Q1-E1-D12
ttcccggggtcacgggtcacaacgaatgctgaagaagcctctctgctcaccattggtatgacagacttgtcgctccttagatcatgtatgtatcatctgcttctatggagagcctatggcctatgtgaataaatgctttgattggcattgtaatatcttctgtttggctctatttgttaataatgatggcaagcaaaaaaagacattttaatggattcacatgggtgtgttattctggagcaggttgatcatgctgccctgttaaaatttggtaaaccccattttttaaaatagaaattcaatttaaaggggtacccaagctaaataaggcctcataaatcatagtatagaaaaggcggggctggctaattaaatgaaaggatttcgaaccacaatctttgctaattcgacaacgattgcattctttaattatttctcaatttttactacttaa

SEQ ID NO: 4174 - DNA, 408 bp, Triticum aestivum
  unsure at all n locations
  Clone ID: LIB103-052-Q1-E1-D3
cacgggatttcagcgatcatcggaagattacatcgaatagatctccacaagagagggggagaacattgtattgagatccaaaaagagagaataagccatctagctaataactatggacccgaaggtctgaagtaaactactcacacttcatcggagaggctatggtgttgatgtagaagccctctatggtagatgccctctccggcagagctccggaacaggcccctagatgggatctcgtggatacagaaagttgcggcggtggaattaggtttttggtttcgtaaatgatctgacgggggtacgtangtatatataggaggaaggagtacgtcggtggagcaacagggggcccacgaagcaagggggcgcaccctccaccctcgtgacctccacggctgttccttg

SEQ ID NO: 4175 - DNA, 284 bp, Triticum aestivum
  Clone ID: LIB103-052-Q1-E1-D5
cgggtatatgagcaattcgagcatgcacgacagaatgtttatttgaaggtttagagtttggcacatacacatttacttggaactgcacgtacctagggcacatatgtaggtatagtggagtcatacggaacatcttcggggttcatggagttttgaagcaattccttttctccagattagcccttgtgactgcgaacgcgtcactgggaaattatgtctccagacattccatataataagatacaaccctgtgatagaccccactttctctataagcttaagtc

SEQ ID NO: 4176 - DNA, 469 bp, Triticum aestivum
  Clone ID: LIB103-052-Q1-E1-D7
ggggccacgggcagacccaaaacgtgctccgcttcggcgtcaacgacagcgtcaggggcgacctcgcgccgccgcaccccgtccgggccaccatccataaggagaccaagttctgggacgacaagaagaggttcgggaccgaggccatctacgggtccgccttcaacatccgcaaggatctggacgcacaaatcctctccaggttccaaaggcccccaggtgcattgccatcatcgatgctaggatatgaggcaatgacaggttccttggatgattttggatttgaagattaccttaacttgccccaggactctgacagcctgcgcataccggacatgcaccacgggatggaggttcggcttggcctgtcgaaggggcctgtctgccccagcttcagttgattccttccacccatgtatttgtcttgtgcttcccgtccagcatctatggcagtttcatggattggtga

SEQ ID NO: 4177 - DNA, 484 bp, Triticum aestivum
  Clone ID: LIB103-052-Q1-E1-D8
gggtccacgggttgctgctgactgtttgtgctttcactagttttgcatgtgtctggtggtctgaacattgtagattatatcctattccaactacttgggctgctttgaaaaccgctatgcgtacgcgttgggttccaccatattatcaacgtgaattgcttcaaaaattgcagcgtttaagacaaggaaaaaattctgtagaagaatattatcaggaattacaaactggcatgattcgatgtggtatcgttgaggagaatgaagctatgcttgcacgttttctgggtggattaaatagagagattcagaccattctagactataaggagtatactaatatcactcgtttattccatcttgcttgtaaagctgaacgtgaagtgcaggatcgacaagcattggcgcgaactaacttttctgcaggccgaccttcctcatggacgccgcgtgcatcttctacttcaactgcaccagcacctcaatc

SEQ ID NO: 4178 - DNA, 414 bp, Triticum aestivum
  unsure at all n locations
  Clone ID: LIB103-052-Q1-E1-E1
ccccgcaggaaagcaacgagcgcgctttcctatttggggtcaagagtggcgctgatggtgaaagtaccaccagtgccatcctctttggcggacaccttcttagtctcagcggagctgtcattgtcttcttgcacttgccggtggagctcgatggtgcgtcctcgacggtagcgcagcactccgaagaggtgcgcttgccggagtgggcatcagagctcttgccggacttggtattcttcttccccccgggagcttcagcggcaagtgtcctttgttctgctgcggctgctgcttcncggtagatcttgtcggcacagataagagcatccttcttgtcgccagggacagagatgacacttattgggcctggcattttcagtatgttgtacgcatagtgagaggctgccatgaact

SEQ ID NO: 4179 - DNA, 328 bp, Triticum aestivum
  unsure at all n locations
  Clone ID: LIB103-052-Q1-E1-E3
gatggatgacaatgcgaaaggcgaacanaaacaataaccaaaaggcaatgggcaaccaactcctcatattacatttatattgttggcaaaaccaaagaaaggaattggcaacaaaacaccgaggattaccctccaagaaacaaaccaagcgccgacgtcagcggcgccgccccaagtctcgccaaagcaaaagcggtgacaccggcacaggagataatagcactccggacagtgccgaagacgacaacaatcccctacagcaagatttagagcangaggatggagaagccagccctcccgagagagcggcagatggagaagcggaggc

SEQ ID NO: 4180 - DNA, 465 bp, Triticum aestivum
  unsure at all n locations
  Clone ID: LIB103-052-Q1-E1-E6
cgggcgagccatacatcacggatgctatgcttaaaggccgttagggcttcggcgtctgggcaatcgacaatctggttctttttaatgaggaacctagtccagaattttcgggcggactctccgggctgctggacaatatgactgaggtcatcagcatctggaggccgaatgtaggtgccttggaagttttctctaaaggcatcctccagatcttcccagctaccgatagagttttctgggaggctatttaaccagtgtcgagctggccccttaagttttaggggaggtatttgatggagtgtagatcgtcaccgcgagccatgtgaatgtggagaagaaaatattcagtccatactacgggatctgttgtgccatcatatgattcaatgttcacgggtttanaacccttctgggaactggtgctccattacctcatcagtgaagcatanggggtgtgcggtgcct

SEQ ID NO: 4181 - DNA, 477 bp, Triticum aestivum
  unsure at all n locations
  Clone ID: LIB103-052-Q1-E1-E8
ggggccacggggcgtcttactcaacattaagtagttgagacacgtgttgagcgataatttgctgaatcgtgcatggcatgctacgtcgttgtcgctggacgtgtagtttagagaaagaacccatttcatatatagaatagatagtgaaacaaactagtaggaaaaaaagaaatggcaaagaagcataccagtctaacaccagcgtcaggtatttcaccttggacgagcctatattcatacatgacccagtcggtccttgtacccttgggcgccttgccagcgtgaaacaccagggtcctcttcatcccaacagtgcgattttcatacaccacctgcctgtcctttccagtagccttccagtagccaccttcggttgaacggttagctctatgcccaacagagtactttctgccacgggtgcanaagaagtacactggagatcccggtcggcattgacgatttcgctgaagcaagttg

SEQ ID NO: 4182 - DNA, 246 bp, Triticum aestivum
  Clone ID: LIB103-052-Q1-E1-E9
ggggcaacttatagtaaatcatattattactagacatgttaacagataatctactgatactagcatggtatgaaatgtcgatgcctctgaacatctacattaaaaacctaacacattacacacaaaaaatttacagtttggcaatctacttagtattggacaaagagttattcatcatatcttcacatacgacgatcatgtacccaatattggcggatctaatcttcatacatgaagtactctgtc

SEQ ID NO: 4183 - DNA, 462 bp, Triticum aestivum
  Clone ID: LIB103-052-Q1-E1-F1
gtccacgggaccgatcgcacatttaggtgagaccgaaatgttacgaagggaaactgagagtttgcaatcccatctcggtgagaccgagatccctatcggtgagactgaactgattagggtttctagctatggctatgtcaagtgaactcggtggcgccggatgaatcaaatcagtgaggctgagtttgactttaggtttaggacatgtttggaattgagaaagtggctgagggttttggagcatatcactaagcattttgagcaagtagatcattaagcaagacctcatcgccttttaatagtattggctttcctatggactcaatgtgatcttggatcactaagatagaaatgaagaggcttgagcttttgctaatatttgtccttagcattttgagggttccacatctctagtccatgccatagcaaccatttgaactttctgaaataatcaacttgaaa

SEQ ID NO: 4184 - DNA, 459 bp, Triticum aestivum
  Clone ID: LIB103-052-Q1-E1-F12
ttcccggggtcaccgccgtattatcatggactgtcttcattgttttgatgcttgtttttactgcatcacggctttctattgccatccctaatttcggatgtgcctggtcactggtgactctatgggccaaccagctgtcctctcccgtgcaaaagcgggtcataaggcttgttagggccgccattgtccttggcttttcttggccgaggtgtccggcgagccattcgtctcggatactatgcttgaaagccgctaaggcctcggcatccgggcaatcgacgatttgattcttcttagtgagaaatctgttccaaagcttacgggctgactctccgggttgttggattatgtgacttaaatcgtctgcatccggaggtcggacataggtcccttgaaaatttgccctgaaagcatcctcaagttcctcccaacttccaattgagttttcggtgaggcttt

SEQ ID NO: 4185 - DNA, 464 bp, Triticum aestivum
  unsure at all n locations
  Clone ID: LIB103-052-Q1-E1-F3
ccctagctcattctgatacaacccccctctctcgctcctgctctcttgtactgtattaggacaccaacgattcatctgttacttgttgcggtagttgaactccttatcctctgcatgacctgtcattgccacagtaaatagatgaaacccactagcatgagtaggagttgtttgagccctaatgtgcctactcattcatgcttgtttgtcatgcctgctattgcatagaattgtgtcgggtctgattcatcagggatgaatcggaggtgtgtgaacatgtcctactgttgagagctaagtgtgtgaacatgatttggtaaaggtatcgatgagacgccatgtangagtacatggtgggttgtttcattgaagccgtccttaggaactgagttctatgtttgtgatccatgaaacagctactatcacacattgggccctgaaatatgaccccgctcgacttactg

SEQ ID NO: 4186 - DNA, 479 bp, Triticum aestivum
  unsure at all n locations
  Clone ID: LIB103-052-Q1-E1-F4
ggggcttgcgtgagtttccaacctgacaaacaacttgaagggccgtcctcgcagatccaacctgcagaaggtggatctgcagaagctgaagatgaatacgacttcttgaaggatggcaagaagcaggctgaaggcagactacagaggtcattagctcgtgtgaaatcaatgactcaatacccagaagcaagagaacaatacagtaggctgcaagcctgtgttacagaactacaagagtccaaggcgatacaggataagatgctaagcgatgcagctggcggcgatggaggtgatttcatggttgatctggaggatttgtgcgcggatgagctgttagacacaccgatgtccactattttgtgacgttgatgggcttttactagaccagttangctgtgacttgttcgttttaccagactagttgtaaattcctgtgctagatgttcactgctcaacatttgactcagtatagctaatac

SEQ ID NO: 4187 - DNA, 465 bp, Triticum aestivum
  Clone ID: LIB103-052-Q1-E1-F5
ctccaatgcataacttccaatcgcttcccttttgaaaaagtttttaggttcccatctatattttatgtttctaacctttataaaagcactcaacagaaataaatgactctctaaaacttccgggttgtctccctggcagcactttctttaacgccattaaacgaggcataaagtgcttaagtaatggatccacctatatcctaaggtatatcaaagcctattttaattagcattggtttggcatttagtaatgagaacaaagcaacatatagcatgcaatgacgaatgtctaactctctttctatgcatcggcatgtcataaaagaacaattaatgcacatcaagtaaaggctactacacaacataggcagtttcttgcaatttaatcgtgttggaaacacaacgaggtggtcatatggttcctctctcataataattacaagtaggagcagcaagcacatgcat

SEQ ID NO: 4188 - DNA, 271 bp, Triticum aestivum
  Clone ID: LIB103-052-Q1-E1-F9
ttcccggggtcacggggagatctcaaaactgctggcatacttggaaagcctggttggggttcaacatgtccgtgcgattcatcttcatctaagttcatgctccgcggtacggttaccaacgttacctcccttgccatgcacttcattctcatctccgaacttccaatttgacttcctcccgaaccttttaagcaatccagtttttactaggatatcagagattacgatcgctagctatcttagtaaacacatgtatcacattctttcgaac

SEQ ID NO: 4189 - DNA, 347 bp, Triticum aestivum
  unsure at all n locations
  Clone ID: LIB103-052-Q1-E1-G1
ggggctaccgtgatgatcatcggggcagagattctagaaggcgaagtcngagtccggattggaaataaatatggacgtaacaggtacagagaaagggaacatcatcgtcgtagcaagagtcgtagcactagtcctgatgattacaagaggcgtggcagagacagaagtcctagtcgtagcaggagccgcagctacagtcctgatgatgacaggaagggtggcagagacagtttgtcgcccgcacgcagaagcactagtcgctcccctcgcaagacaccacctcctcgcaagacaccacctccttgcgaggngtctcctgctaagcgcaatgatgaccgttctccctg

SEQ ID NO: 4190 - DNA, 485 bp, Triticum aestivum
  unsure at all n locations
  Clone ID: LIB103-052-Q1-E1-G3
ttcaaggggccacgggatgttggctaccacatgctcctcgatgatctcatcggatgaaccacgatgtcaaggattcaagcaaccccgtatacaattccctttgtcaatcggtatgttacttgcccgggatctgatcgttggtatcccaattgtcacagccccagatcagcccttgtttgtttttgctttagcatccatgcaacatgtttaaattttatgaaatttgaaatggggattgctcaaaccctagcattaaaggaattcactaggttcacctaaaatactttcaagtaagtccaaatggctttcaaaaatgttcatgatttttgacaaaggtganaaacctctaacaaaaatgatgccaatatttttgggcattatggattttgaataaccaatatgtatttgaattggggcatttaaatacaattaatatttttaaatgctccaacaattctgaaaatagttaagggcctctgtaataa

SEQ ID NO: 4191 - DNA, 383 bp, Triticum aestivum
  Clone ID: LIB103-052-Q1-E1-G4
gggccgatcgtgatcgcggagaccaacaacctcgagtcactggatcaagcccttgttaggtctgggcgtttcgaccgtcacattcagattcattatccaaatgttgatggccgacaggagatccttgacgctcatatgtcaaaggtgttgaataccaacgatgtggatcttctgccccgtccttaaaacctattgcaattcacataatatctaatttgtgagttctgcattatctaccatcaaccgatgtcactgatgattaccctcaaccttgtcaatcttatcttatttccattaatgtctgtcatgctctacccaaaacgtgaaaaacctctaccaacaatgatgccaatatttttggaccaatatggatttttgccact

SEQ ID NO: 4192 - DNA, 490 bp, Triticum aestivum
  Clone ID: LIB103-052-Q1-E1-G8
tccgacattcccggggccactggcaataagtatatgagttctttatgactaatgttgagtccatggattatacacactctcacccttccatccttgttagcctcttcggtaccgtgcattgccctttctcacattgagagttggcgccaacttcgccggtgcatccaaaccccgtgatatgatacgctctttcacacataaacctccttatatcttcctcaaaacagccaccatacctacctattatggcatttccatagccattccgagatatattgccatgcaactttccaccattccgttcatcatgacacattcatcattgtcatattgctagcatgatcatgtagttgacatcgtatttgtggcaaagccaccattcgtaattctttcatacatgtcactcttgattcattgcctatcccggtacaccgccagaggcattcatatagagtcatattttgttctaagtatcgagttgttgagttgt

SEQ ID NO: 4193 - DNA, 366 bp, Triticum aestivum
  unsure at all n locations
  Clone ID: LIB103-052-Q1-E1-G9
gtacaggtccgacnatccgggtccacgggggagctacaaggggcccactagggtggggggctcagtaaatcgtgtaagcacactccctgccttctatccttgacattctcgacggtattgttcaattacctttcccacagtggctacttagcgcgaacttcctctgtgcatcgatataccgtgataggatacacactttcatacaggacactgattatatgttccgcattgcatcaagtagacttacctatgatcgcatttcgaaagcgagtcttagaaatattgccatgcacctttcaacgtgtcattcaaactatacacactcatcattggcatactactgacatcatcatatagtagatatct

SEQ ID NO: 4194 - DNA, 440 bp, Triticum aestivum
  Clone ID: LIB103-052-Q1-E1-H12
tttaccggggaggccacgagcgtccagtacacgggcacggtgcacggcgccttctccacaggggagatggcggcggaggagtgccggatgagggtcctggagaagttcagggagctggacatgctggagatgtgccacccgatggccgagcaaacggccaccgtctccgtcccgctgctcatctcccggctgtaaacagtcgccccctaaactacctacctattgtcgcggcaggttcgccggccgttcattccagtgattgctcggagaaggcagcgtgggagcaatctatccttgctcttcctcgtggcatgaggcgtgtggtcgtgtgaccctgtggtttgctgaataaaattactgctgggtaataaaagattgtgggcgtctggtatgtatactgtcagcgtgatgcgggggtttgtgtttggtaaggcgttatg

SEQ ID NO: 4195 - DNA, 372 bp, Triticum aestivum
  Clone ID: LIB103-052-Q1-E1-H2
atataattcatattcacatagctaatgaattaaatccagagtcccaaaaataaatccttaaaaatgttcaatatttgggttgggaccagaacccttaccataaattatcaaacatttacgaggagcattttggagcaatgaatgagatttttagggttttttcccttcttttaattaagttttttttaggcttccaaaattcctcagttcaggtttcaacaatttaaacatgatgctcagatgaggtctagcctagtgcataacaggaccatggatgtgacacttttatggacgatggaataacgagtggcaagagcctaagcttggggatgcccatggcaccccaagatagtcacgaataggcaaaagcct

SEQ ID NO: 4196 - DNA, 431 bp, Triticum aestivum
  unsure at all n locations
  Clone ID: LIB103-052-Q1-E1-H3
ggtccacgggccgaaggtacgatacctccgtgatctgcacacattcagctcgatgacatcccatgaactctagatctagctgaggtcgcgggagagtttaattagcacgacggcgtggcgacggtgatgaagaagttagcggcgcagggcttcgcctaagcactacgacgatatgaccaaggtgtgtaactgtggaggggggcaccgcacacggctaaaataattgtctgttgtgcgttctanggtgccccctgctgaaagtgcaatcatgcccttaatcatattttgatgttgatgacaacatgcatgttgggactaatcatgtttatcaagtatatctcaagattatgtctcaagggccgtgtgtggatcatgactacggacataaaacatatatatacatatatcactcgagagcaaagaccaagaca

SEQ ID NO: 4197 - DNA, 449 bp, Triticum aestivum
  unsure at all n locations
  Clone ID: LIB103-052-Q1-E1-H4
cgggatattggaatgaatatgtctcatatacaactcttggattgcgttgccaatggctggtcaggtgcaaaatgtgctaaacagatttgaagaggccatggaaaagatagatggcatggagaagacgttcgaaacacagctcaataacaagtttaatgaattgctcgtgcgtcttccaccaccaccaccggctggacctaacgcacctctactactacaacaacaacaacaacgacaacaacgatgatgattacctccacgtcccgaaacagccctccgccgagtgagccgtctccctcttgcgcctgaccaaactgttggtgctgctgttgatacttctgtggctcctgctgctgatgccgangacgatgattttgcgggagattaccacgatgatgttgataaaattagaactacgtgcaagcaccaggaacacaaccaccaggtca

SEQ ID NO: 4198 - DNA, 394 bp, Triticum aestivum
  Clone ID: LIB103-052-Q1-E1-H6
tcccgggtgcacggggacttctgatcggtccgatgataatatgcagtctccattaccaatagctcgctcgctcggtccgcgcgtctggttgcttgttagtcctagtagtagtagcggtgatacatgtttgctgggtgctccacaatgtttttacttactgttatttcgctgtctcttattggtgatgtactgatgtattgtaatgaatcaaggtattgcttctgaataaaaaaaaaaaaaaaaaaaaaaaaaaaaaaaaaaaaaaaaaaaaaaaaaaaaaaaaaaaaaaaaaaaaaaaaaaaccaaaaaaataaaaaaataaatcaaaaaaaaggggccccctcaaaagtttcaagcttaattaacccttaaagccaatttaaaccctttccaa

SEQ ID NO: 4199 - DNA, 383 bp, Triticum aestivum
  unsure at all n locations
  Clone ID: LIB103-052-Q1-E1-H8
ggatattggaatgaatatgtctcatagacaactcttggattgcgttgccaaaggcaattttattgaaattgatcccagtattgtgcatgaagttatagaaggtatantgggaacactacctcaacanaaggggcctcatcatacccaggaacaaacgcaagtttttgagaaaatttgcgaagtaacgaaaattttacaaaaatctcttgaacctcttaagggtgttagtggaaatcttcaccgcatgaatatgttgattaccctttgcaataagcggttggatgctttagatctaaaaatttctgaatatgaagggaaacgtaaagaacctcccggattcgagcatgattccgctaaaaaattgaaaaccgaagatggcaata

SEQ ID NO: 4200 - DNA, 335 bp, Triticum aestivum
  Clone ID: LIB103-053-Q1-E1-A1
tacggtcgaattcagggtgcacgggaagaacaaaaggcggagaagcgggcgccggcgtccaaggaggccggcggcgaggggaagcagcggggcaggaagaagggcagcaaggccaagaagggcgtggagacgtacaagatctacatcttcaaggtgctcaagcaggtgcaccccgacttgggcatctcctccaaggccatgtccatcatgaactccttcatcaacgacatcttcgaaaagctcgccggaaaatccgccaagctggcaaggtacaacaagaagcccaccatcacgtcccgggagatccagacctccgtccgcctcgtcctccccgg

SEQ ID NO: 4201 - DNA, 311 bp, Triticum aestivum
  Clone ID: LIB103-053-Q1-E1-A10
ccatcaagcgactcgaggggatggggttcaaccgtgagcttgtgttggaggtcttctttgcatgcaacagggatgaagaactggctgccaattatcttttggatcatggccatgagtttgaggaacaacaatagatgttagattggtcttgctgttgaaagacagaagagtcagtgacagaagcatttcagtttggtgtcgttcttatatcttgctgctgaatatcactgctacttgccattagtgccttgttgctgactttcaatttcttgtatcctggaaatgctttctaagtacataatatcatatgc

SEQ ID NO: 4202 - DNA, 427 bp, Triticum aestivum
  Clone ID: LIB103-053-Q1-E1-A11
tgggaggccagaatatgggagtactatgatgtggaacaaataaaagaatttgttgcttttatgggtgcttatgaaattgaatctatgtttaaagagtttgatgatattgatgatgcttgttatagatctgaaaatttagctatcctcaaatattgctatgagaattatgaatagaattatgaaattaatgcacttattaagaaagtctccgctgtccaagaagagactaatattttgcaggaatctatgaaagaagaagttgatgacactgtgagctcattggatgaaaaagatgaggaggagagcgaagaacaaaaggaggaagagcggattgatcacccgtgcgcaccttctaatgagagtaactcttcaactcatacattgtttaattccccttcgtgcttaccgaaggatgattgctatgatg

SEQ ID NO: 4203 - DNA, 386 bp, Triticum aestivum
  Clone ID: LIB103-053-Q1-E1-A12
atcaaggtcatctacgcccgcgccaagcagtacgcctaggagtacgatgcccaggacaaggagttggttcagcttaagcgtgaggcccggatgaagggtgggttttatgtcagtcctgatgccaagctgctgtttgttgtcagaatcagaggtatcaatgccatgcacccaaagaccaagaagatcttgcagctgttgcgtttgaagcagatattcaatggagtgttcctgaaggttaacaaggccaccatcaacatgctccgcagggtcgagccatatgttgcatatgggtacccgaacccgaagagtgtgagggagttgatctacaagataggttatggcaagctcaacaagcaaaggattcctctgatcaacaacaaggtcat

SEQ ID NO: 4204 - DNA, 368 bp, Triticum aestivum
  Clone ID: LIB103-053-Q1-E1-A3
atacctagctatcatggcatttccatagccattccgagatatattgccatgcaacttccatcatcatcatatacatgacttgagcatttatcatcatattgctttgcatgatcgtaagatagctagcatgatgttttcatggcttgcccgttttttgatgtcattgctacgctagatcattacacatcccggtacaccgccggaggcattcatatagagtcatatctttgttctagatatcaagttgtaatattgagttgtaagcaaataaagtgtgatgatcatcattattagagcattgttccagtgatgaaaggatgatggagactatgattcccccacaagtcaggatgagactctagacgaac

SEQ ID NO: 4205 - DNA, 337 bp, Triticum aestivum
  Clone ID: LIB103-053-Q1-E1-A5
gggaaagctctgattacgagcttgtcacaccctccatgcgactacagctcccacgtgttcacgcacgacatatagacatcagcgtattgaatgcataagtcacaatttaggcaatcttcacaagatcccatgtcatatacatcatcaattgggatataacatacttggcctacactcgccatgtcaatcaagtgcatagataacattacatcatgcaaactctcattgctcgaccatagtgccaagtctatgagagaacccatcatgcgacacggtctcgatcaccaccaattgggcagcactactgatcatcacgaagttaaacatagtaatgttg

SEQ ID NO: 4206 - DNA, 449 bp, Triticum aestivum
  Clone ID: LIB103-053-Q1-E1-A7
gggaagcacaagaacaggaagcaagctgccccccccccccctcctcatctccgactcactcacgatccgagatcaggatggccggatcgatggaactccctaccaagggcggcttcagcttcgacctgtgccgcaggaacgccatgctggagaagaatggcctcaagatgcccgggttcaggaagaccgggactaccatcgtcggcctcgtgtttgcggatggagttgttcttggcgcagacacaagggcaaccgagggtcctatagttgctgataagaactgcgagaaaattcattttatggcaccaaacatatattgctgtggtgctggaactgctgctgacacataggctgtgacagatatggtcagctcccatctacaacttcaccgttatgctactagccgtgagtcaagagttgtaaccgctcttacactactgaagacacac

SEQ ID NO: 4207 - DNA, 407 bp, Triticum aestivum
  Clone ID: LIB103-053-Q1-E1-B1
ccaaggccgacaaccggctgccggcggggaagtccgccgccaaggaggtcggcgacaccatgggcaacatcaacgctaagaagagcgtggagacgtacatcatctacagcatcaaggtgctgaagcaggttcaccccgacatcggtatctcctccagtgccatgtccatcatgaactccttcatcaacgacatcttccataacctcgccggctaggccgccaagcttgcgcggtacaacaagaatcccaccatcacgtcccgggagatccagacctccgtccgcctcgtcctcaccggtgagctcgccaagcacgccgtctccgacggcaccaacgccgtcaccaagttcacctcctcgtacagtgctcctgctcctgtgtctcctagttagctgtccaggtgtgtt

SEQ ID NO: 4208 - DNA, 377 bp, Triticum aestivum
  unsure at all n locations
  Clone ID: LIB103-053-Q1-E1-B11
cagggcatgaacccattccaggcggaggccaactacgtgtcagcgcgtaagacgaaacagaattcctacaaatccaagccttgggacaagcccgccagaccgagtcgctagactttgctgaaagaaatggcgccccgaggctccgtagaaagagaagagaagtgttgttgtatcgccaatttttcgaaatataccgtctgctgttcctttttttcccgccttgttgctcctttttttcaccttgttgtttgactagacggctcgaaatagacagaactcttgatcggggcctgtatttaattgtgagattctttgtagcgcagccggagtagtagaacatgttgccgtttttcgcagcatttttcgcagcanaaaaa

SEQ ID NO: 4209 - DNA, 315 bp, Triticum aestivum
  Clone ID: LIB103-053-Q1-E1-B3
gaatgaatccaatgtgagaagagcccttgtgatcatgcaccagagggacgaagtggagtacaagagggagcgccatgtgattgtccgcaaggcttgagctgaacctaaatgatggaactaccatggaaaccctctggccatctgatgtgtgtgtataagtagtgctgacactgcagcctgtttcctgaggaaatttgttgcgtcgttgaaattgaattgtacttgtactactttaagctgtagctgtagccctaaattatcttgtgtctaactgaagatgttccacacttaagttcaatccatgattgcaacatt

SEQ ID NO: 4210 - DNA, 253 bp, Triticum aestivum
  Clone ID: LIB103-053-Q1-E1-B7
cggggaggtggaggcagcagcataagtgaaagtcctctgcaatgaatcactcaatagttaactcacatacttcatgagcacagtcagcaacttacgtcgatcgtcgccatagctacatttcacaatatacatcgtcggcaccatttcattacacaggcctcaattcctaaccaaagcaacttgaccaccatttcttgtcctacctccccttcttccccggttcaaattgaaagttcaggaagattaaggcttc

SEQ ID NO: 4211 - DNA, 437 bp, Triticum aestivum
  Clone ID: LIB103-053-Q1-E1-B9
actgaaactctcaagtagtctaagtgaagtgaaagaacttactgcataatagatagaaacttcacagcaagatcagcacccaaagccaacaatctgaaacatattttgtcacagataagatatgttgctgattgtcttaatgatataagtttacaatcagaagccgttatacagaaaacaaacaagtattattggagcctggatgatgacatcgaaggaatttctgctttgagcaatgcaggccatgaagaacaacaactataaagacttgccacaaagaaattgttctaaacatccaacgatacatgtgtctaacatagctctttctatctacatgccttgctcataatattgtaaatgatcgttcgtaagcttattagaaaacatgtatcatcagcaaccatctatctatcagcaattcatacttatttccaaaa

SEQ ID NO: 4212 - DNA, 359 bp, Triticum aestivum
  Clone ID: LIB103-053-Q1-E1-C1
gggcttgaggctactggtatgagcgacttatcccgagtaaccagtgtagcatccttctttgtcagccgagttgacagtctgatcgacaaaatgcttgagaagattggaacaccggaagctcttgccctgaggggaaaggctgccgtagcacaagcaaagatagcaaatcagctttacctgaagaaattctctggcccgaggtgggaggctttggtgaagaagggagccaagaagcagaggttgttgtgggcatccaccagcgtgaagaacccggcttacttggacactctttacgtcgattctctcatcggacctgacaccgtctctacgatgcccgaccaacctctggacgcgttcat

SEQ ID NO: 4213 - DNA, 436 bp, Triticum aestivum
  unsure at all n locations
  Clone ID: LIB103-053-Q1-E1-C10
gggtcgacggctagcttaacagaaacaatataagataaattcgtaggcattggatcagtgatttgttgaattatattcatcatgagacagtcataacctagggcgatatggcactagctccagttcacaaatataatgtaggcatctatttcgtaaatagtcatacgtgcttatggaaagaacttgcatgacatgttttgtcctaccctcccgtggtagcggggtccaattggaaactaagggatattaaggcctccttttaatagagagccggaacaaagcattaacacacggtgaatacatgaactcctcaaactacggtcatcaccgggagtggtcccgactattgtcactctggggttgccggattataacacgtagtangtgactataacttgcaagatcagatctagaacatagatatagtggtgataac

SEQ ID NO: 4214 - DNA, 418 bp, Triticum aestivum
  unsure at all n locations
  Clone ID: LIB103-053-Q1-E1-C11
gtggtgccacattgaccaaactcacaattatcccttggccaaagggctccttcacagaaactttcgacctatggcaccgggagtggttttgcatcactgaacctcgtggtaccaagtgggcagctacacctgtgttctgatctggccctccgttacagcttgcagaatggattaataagggccaggactggggatctattgatgaagtgcagacgctacaaagccgcattcggagcctcattgaaaaggacaccggtctcatcaacgtaatccaagtaatgctagtccgtcgggtcctaccgtgccagcaacagcctcttcgcatgtgggagttcaatccggaagggacatgaacccttcagcacttctccggcacgacgcttanaggaatgcggaaattattcttcgggacacgaaa

SEQ ID NO: 4215 - DNA, 362 bp, Triticum aestivum
  Clone ID: LIB103-053-Q1-E1-C3
ccattatattcacatcaacatcagagtcccaacggagctgacaccacggcaacgggagctgatggaggagtttgatatagaggagagcaacgacgtggcgagagttgcggctgcatctggatgagatttttatgctcctcatcgattgattgattattggcacacataataagtcagatagccctgaagggcttggtgtaccctatatgtccctatccttgtttgtaggcgttagatggtgagttttgccctgtataatatacacgtcaccataactgataagcctaaattatactgtattgtataagcatctgatttacattcaccacttccttgtggtaccattgttacaagagataaag

SEQ ID NO: 4216 - DNA, 366 bp, Triticum aestivum
  Clone ID: LIB103-053-Q1-E1-C5
cgggattagggccagctctccatacgcgcgcggcatccagcaaccggaggagggacgacacaggtgtcggcgtcccggttactatcacgccatcatcccaggggacagcctcgtctgtgcgccgcgaccacctagcgcggatgacctacattcgggaacgtgccgtcaccacgtggacgacgaatcgagtagcacttctgcccagttgcaggtgcatgctatagaggccgttacgcaccatgtaacggaccttcaaacgcaggaggtgtcgtgattaagctcctcatcagtgctcctcgtgcgatcgctctagcgccagctcctatcgcattcatcgcttcctctctcgccacattctccagcttt

SEQ ID NO: 4217 - DNA, 320 bp, Triticum aestivum
  Clone ID: LIB103-053-Q1-E1-C7
cggggacaacgacaactgggaggttagcggtattctgtgaatggaatgatgacggaattcataacaactgtagatgcacaactctggcaattcgagatcttttcttttgcctgcatggcacaaactatatgagtcaccagccgctctttccacttcaattgtactattttattgtaccaaatgttagctaatgcaatctccattccggatagaaaaaaaaaaaaatgttacaaacaacaaaacaaagcaaaaaatcaaaatgaaagtttaaacatgtatggaattataagtaaaaaatcataaaaagaaaaaaacgggaa

SEQ ID NO: 4218 - DNA, 370 bp, Triticum aestivum
  Clone ID: LIB103-053-Q1-E1-C9
ggcaacaataagttaaggaatgttccaattgcaaccggttgaaggaacaatcagcatatagaaatgggcaccaaggtacactgttcattccctctgaaggaagaatccatgtagtacctagcattcatttttagatgctatgtatctttctgattgtttgggcagtagagagctatttatctgtaaacatctgcagtagagagctatgtatctgtaaacattaaatattgttgcatcaaagagcattatcacctccttgtcattgtcaaaaagtatgacagttcagtatatgggttacaagcttacggcatcgacttacaatacagaccacgtgcattctcgtacattcatccattatcaatgctgagca

SEQ ID NO: 4219 - DNA, 322 bp, Triticum aestivum
  Clone ID: LIB103-053-Q1-E1-D1
caggaagaagtggagcggtggcgtcatgggctccaagtcgcaggccaagaccaaggccagggaaaggctcatcgccaaggaggctgcgcagaggatgaactaagcctagccttatatgtgagagcatatgccatgtagtttccctttcagtgtgtcctgattttgacgaggaactcgaacccttttagcagcagtgtggaatcgtattgtggttttctgaatctctgttcccttctccagacttatgcaaagattagatgaggtttacccatgtttggattcacaaaaaaaaaacaaacgccgcaaaaaaaaaaaacgggcg

SEQ ID NO: 4220 - DNA, 427 bp, Triticum aestivum
  Clone ID: LIB103-053-Q1-E1-D10
gggtcgacggcgagcaactactggaggtggagatgacgccctcaggtgctgcaacccatggctatttttgctggaatcggggcagcacaaaggctacatcgaacactgccggcgatgaagacgacgacctgcggtgctgcatccagcgagttgtttgctggaaccggccggcgaaaaagttgcatccacaccgacccgtgctggaattcgacgaccaggcaagtcgttttgctggaaccggccttttgttttgctacaaccggcaaattttttgctgcttcggcaaggtgtttcattgtgacagtctgcggcgaagtattttggcaggaaccggtgatgtgttttgttggaactgtattccctttttgctactaccggtgacagtgcctttttgttgctgaattttgttttgtcttttgctggaaca

SEQ ID NO: 4221 - DNA, 398 bp, Triticum aestivum
  Clone ID: LIB103-053-Q1-E1-D11
atacccaaggtgcttcacttataccttttgagctaaataattttgccctagtgcttcacttatatccttttagagcacggtggtggttttattttatagaaattattgatgtatcatgcttcacttatataattttgagagtcttatagaacagcatggtaattttctttggctataaaattagtcctaatatgataggcatccaagatgggtataataaaaactttcataaaaagtgcatcaaatactatgagaagtttggtacatgatgattgttttgagatatgaagatggtgatattagagtcatgctagttgagtagttgggaattttagaaatacttgtgttgaagttggtgattcccgtagcatgcacgtatggtgaaccgttatgtgatg

SEQ ID NO: 4222 - DNA, 439 bp, Triticum aestivum
  unsure at all n locations
  Clone ID: LIB103-053-Q1-E1-D12
gggtcgacggcgacggggtgccgccggttcgaagaatggataaaggcctcgactccggcgagtgctgacggtggcagggccagaccggcggccgccggagacgtcgtcgggcggagcaactgccggctgtttgggttctccctgactgatcagaaggtgctgggaggagcangtgagggtgatgccaaggaaggggacgcggatgatgtggtggcggagtgcgccgacccgcgggtgctcgacttgtttgggcgcggccaccctgctcccggcgctctgcatgccatcgtcgccgctcccctggggatgtgatggtgctgctcagttgcgtacgttgtagtatcggacaattggttttccgttggttgaagacggacgccatctgtaatctctcanctaggccactcttaaattctagcaattaaatctactctacttg

SEQ ID NO: 4223 - DNA, 209 bp, Triticum aestivum
  Clone ID: LIB103-053-Q1-E1-D3
gctattatataaggttttttggactaacctattaacctagagcccagtgccagtttctgttttctccttgttttagagtatcgcagaaaaggaaaaccaaacggactccaattgacctgaaacttgacggagcttatttttggaccagaagaaggccacggagtcaaagagttgggccagaagagtccgggctgcccacgaaggtgggg

SEQ ID NO: 4224 - DNA, 336 bp, Triticum aestivum
  Clone ID: LIB103-053-Q1-E1-D5
ggggacagggtaccgccggttcgacgaatggataaaggcctcgactccggcgagtgctgacggtggcaaggccagaccggcggccgcctgagacgtcctctggcggatcaactgccggctgtttgggttcgccctgactgatcagaaggtgctgggaggagcatgtgagggtgatgccaacgaatgcgacgcggatgatgtggtggcggagtgcgccgagccgcgggtgctcgacttgtttgggcgcggccaccctgctcccggcactctacatgccatcttcgccgctctcctggggatgtgatggtgctacgcagttgcgtaagtcgtactatc

SEQ ID NO: 4225 - DNA, 432 bp, Triticum aestivum
  Clone ID: LIB103-053-Q1-E1-D9
attaaaaggtattataaaccataaaaaatttgtaataaattaggtttaacaccaaattaaataaccattgatttcattacattaccttaaattggtggttggttttatttcgttaacggagctcatgagattttctattgagttttgtgttgtgaagttttcaagttttgggtaaagatttgatggattatggaacaaggagtggcaagagcctaagctcggggatgcccaaggcaccccaaggtaaaattcaaggacaaccaaaatcttaagcttggggatgcttggagcgtcttgtatgatttgagtctttgctttttgtttaccacagtcatatttgttgtacacaccttttgagagagacacacatgattcaaaatttattacaatactctatgtgcttcacttatatcttttgagctatatagtttt

SEQ ID NO: 4226 - DNA, 444 bp, Triticum aestivum
  Clone ID: LIB103-053-Q1-E1-E10
gggtcgacgtcatcaagagggctgcagtcttccactatggatcaataagcttgattgccgagccttgccggacagcgcatctgcacgccatgaaggttgccaaagaggccggcgcgcttctctcgtatgacccgaacctgagggaggcgttgtggccatcccttgacgaggctcgcaccaagatcttgagcatctgggaccaggcagacattgtcaaggtcagcgaggtcgagcttgagtttttgactggcatcaactcggtggaggacgatgttgccatgaagctgtggcgccctacctccaagctcatgcttgtcactcttggagatcaaggatgcaagtactataccaaggatttccgtggaactgtcccatcctacaaggtacagcaagtcgatacgacaggtgctggtgatgcatttattggttctctgctccgaaaaa

SEQ ID NO: 4227 - DNA, 430 bp, Triticum aestivum
  Clone ID: LIB103-053-Q1-E1-E11
tgctctagtacttcacttatatctttttaaaccacggcggtggttttattttgaagaaattgttgaactatcatgcttcactttattattttgagagtctttaaacaacatggtaatttgcttatgttatgaatttagtcctaatatgatgggcatccaagagggatataataaaaactttcatctaaagagcattgaatatatgagaagtttgattcattgcatttgttttgagatataaagatggtgatattggagtcatgctggtgagtaattgtggattggtataaatacttgtgttaaagtttgtgattcccgtaacatgcacgtatggtgaacggttatgtgatgaagtcggagagtgatttatttacttttattgtcttccttatgagtggccgtcgggaacacgatggtcttttcctaccaa

SEQ ID NO: 4228 - DNA, 432 bp, Triticum aestivum
  unsure at all n locations
  Clone ID: LIB103-053-Q1-E1-E9
ggtcgacgaccaccatcaaagacatgttcatgctgacccagtacataccgttaatgtatttgagggtgacggggatcngatcgctgtcaagggggttgatgcgtgacatgtcgtttctgaagatcacgcggcatcagcaagcaaggagctggcttaaaaagctccggcctgatggctttgagtaaacggtacagccccgacgagcacacggcgagcggcatggtactgagattgtccacacgtgaaacaatgagcttgattacctctgtggggagtgaattccagccactctttcggcgggcgctgctcggttctgccattgttagtgcttgggtttcagtcgagggggaggcgccttagcggggatggaagagcggacaaagatggagaagtgaatatgtgctgcgggaagtggacaggtgatgatgacta

SEQ ID NO: 4229 - DNA, 427 bp, Triticum aestivum
  Clone ID: LIB103-053-Q1-E1-F12
gggtcgacggcgttataacagtcaatggaaacacagaccgctccctccgtatggaagagcacactgcagccctcgtggcagaagtacaaagcagacttctttgacagacagccaatttggcaatgataaccccgaacaccgtcaagcgagtccggagcaccctgcaacatgatcgtcaggctcgacaagagctcaattagcaatccggcctcctccccagccccattcaggtggcatttgtgccacgcgtacacaactacgcactcaaaataccatgggcataggtggaggcaagtagacaatacggcctacattgcggttcagccgccacgaggcccgcatacccgttttctttctttcaggaccctacttttgggcagccccttcagagaactggaccatcggactaatcacaggagggaaacac

SEQ ID NO: 4230 - DNA, 416 bp, Triticum aestivum
  Clone ID: LIB103-053-Q1-E1-G12
ggtcgacggcgatccacaggtctatctatcggacggtgtcactcgatctagtatcatgatgccctcactgggaagctaacgtcgcctgtggctaatggggtaatcagggatccgaaggttccggcatcgaaagccactgctactgatgtgctcccggccgttattaacccagcgaatgtggcctcaccagcagcggccgacatgacaccagtgcctaacgagaagaacccagttgtcgctaccagtactgtcacaattggagtagctgcttgatcgcattacccgatcctcggagctacccatggataacaacctgactgtgcttgcaaaccacgtgagacatcctcgttccaatgtactgatcatcattcgtggcgtctcgaaatcgggtctgataattaggtttccctagctct

SEQ ID NO: 4231 - DNA, 432 bp, Triticum aestivum
  Clone ID: LIB103-053-Q1-E1-G9
acgttaaaaaaaggaacaacaagccaaggaaacttgggcaaaaacggttccaattaaacaacaacttaggggtaaattgaaaaataggaaaacaataaaaaaccatgcatacaaaaagcatcttcgataatgcatatgttctgagcatttcccttcaattccatccacaagacgagaaacactttctccattctcaaatgactcggtaaggattgttggatgcaaagtagtatcatttaaacgatcagacatatttgaattttgttcagcatgaatccaaaaacgtgggggtaaaaaacacatagaggcatatatgaccaactatcgatagcagaacttttaaaatgcaccatggcatagtatgtgttactttcggacattagaataaggtttgtcagtgtagcattacatgtagtcaagtacagactttac

SEQ ID NO: 4232 - DNA, 372 bp, Triticum aestivum
  Clone ID: LIB103-053-Q1-E1-H10
gtccaacgccgtggacatgaagctcagggatgaccttgaaaggctcaagaagatcaggaaccatcgtggtctgcgtcactactggggtgtgcgtgtccgcggtcagcacaccaagactaccggcaggagaggaaagactgttggtgtctccaagaagcgataagctgcttcacaaagattcctcatagctttgctactactgtgttggtccatttccagaatcttaagggagtgttcttatttagatgattaccttggatgatgttttgccctagataatgttttggttctggaacctttaatatattgtatcttgaattctttgttgaactcgaaaaaaaaaaaaaaaaaaaaaaaaaaaaagcggccgct

SEQ ID NO: 4233 - DNA, 326 bp, Triticum aestivum
  Clone ID: LIB103-053-Q1-E1-H12
gtcgacgtcaacacgaaagccggatcgcaggggctgctgcttctcctcgctctcttaattgaccctgtaaacagtgcagcagatatcgtcactgaagaccaccaagaaattatcaagcattttgccagaatcaaatccgagactgttcctgagaacactgatgcatggtctgatgacgatgattacgatgatgattattaagattatgaaactggtgatgctgatgatgatcattccaattctggataagacttctcgggtcaagattgctaggacgatgaccacgatgatcatccttaggctaacggcgataattctggctcagc

SEQ ID NO: 4234 - DNA, 425 bp, Triticum aestivum
  Clone ID: LIB103-054-Q1-E1-A3
actagcattagtaccctacggcaacgcaacgcccagggagctaggcgagcctagctactacctagaccagtgatctaatggcagctccactagccagctgcgcgcagcctcgcgacgcccgacgttatattcggtcccctcctctctctcctccgggttttcgggcgcgaaatatcactgctcatcgcccatacctctctctctgcctctactacgtgcgtacaacgagagatcctctgagatcatgaaattaggcgctgagatacgtacactgcttgctcgcatgcggtctcagctcgagaatcgagttattgccgtcgtatatttctcgagcttggtccgtcgcatgctcgcatgccaaattttacatgcctgattcgtgttctttctggcgtagccactagtaagctttcagctggtcgtgt

SEQ ID NO: 4235 - DNA, 173 bp, Triticum aestivum
  Clone ID: LIB103-054-Q1-E1-A5
ttctcaacatttggtgtgcaaggcaaaccaatcaacaaggaactaagacaaaataataaagtaacgaaataaagataaaaaaaaagcccacgaccagggaggttgtatgtttccgtcggtgccgcttcgagctcctgcctctcctagagttgcatccatcttcatgggttttc

SEQ ID NO: 4236 - DNA, 455 bp, Triticum aestivum
  Clone ID: LIB103-054-Q1-E1-A6
ggggccacggagatggtctgactggcatgaagcaaggggatctaatcatttggtatgttgagcagcagaatgcccaaggcgcatatagttctacagaagaggtgaaggaggaagtaaagtgcatcaaggccattatagagaggctgatacagagggaaggccatcttgtggtcatagatgaaggaacagcggcagcagaaggtgctgcggcaagggcatcggagcacagaatcctggctgttaacccgaactacgtcattgattgattaaccagctgaggtcacacagctaactagatccatcatatgtggttgaccaatagagcagacattcaaacggaagacatcctgttgtgatatgctctagaaatgatatgttgtacctgccatccccttcccaaggaagcacaagatctctggaattgtatcttctttccaaggttgaagtgtggtaat

SEQ ID NO: 4237 - DNA, 439 bp, Triticum aestivum
  Clone ID: LIB103-054-Q1-E1-A7
gggggagaggggatagaagacactgggaacagggcctcaccgcgtgcatgccagagtggtagaaaggactcccgaggcccaatggtgagcacatgtaccccgtctacggccgccggagcgaggtgccatgaggagggggatgtacgaagaggagctcatcagcgagttgtctggaagatccacgatgacatatggatctcaggaacggtaatttggcgtcaggggatctcggacgacggcgaatcgaagatggcggccgatggacagatccggcggagatggctttggtagagaagttgaagggcacccgacgtctcaatcttcggcgtggtgattcccagcttgacggcgggcatcagggacatggcggtgcggcctctcgacgacattggccacgggagcggtgactctcaggtgagcacgtgagcgacatgccctc

SEQ ID NO: 4238 - DNA, 425 bp, Triticum aestivum
  Clone ID: LIB103-054-Q1-E1-A8
cggggaggaggctcaaatgttcttccacatcgtgctggcgcggtacatgcaactgaacccgcggcacttcggccctcacctcggcgacaagcatcttctccaagctcacgtgtgacatctagggctcctgtatcgggcgggatggcttcatcgtggcgataattggggtggatgacatcatcaatgggctcatcagggaggcgcacaggcttcatcacgttcctcgtcatgtagtaatacgtcgtcttcgtcgtcttcacacagcgacatcatcgacgccatcctcaccatggacaacaacatggggttcttcgcatatgcagggcctgtacagatctttgtgtcagatcacttgattcctgacgatatggaattccaatctgatgatgtgccacactacaggacttctgatgcatcggtgatca

SEQ ID NO: 4239 - DNA, 423 bp, Triticum aestivum
  Clone ID: LIB103-054-Q1-E1-A9
gaagccacaatccggcggagcactacttggagcaggtaacagaaggtgcccgcttaataaaggcgcagttctcgaagaatgtcctgttggagtgacaaatcgaatcattgtaaaaacaatgttattttgattacggggctatatttatacttttttcttgaaagtattattgtgtctcctgcgcggctgtttctatgtatatgtgtaatccaaaagttaggagtcgttggcttcagcccccacgcatacaatgcgggggtgttcgcaaaaaaatatgcataatcacacttgatccaacgtcttggtccattaaggaggtgatcgcacgtcgaactaggcaaccggacgatatagctgtaacactttcgcttagccatgggattttaccggtggggctactatgtagcccctggtaccttcgcg

SEQ ID NO: 4240 - DNA, 212 bp, Triticum aestivum
  Clone ID: LIB103-054-Q1-E1-B1
catcaacgaatcataattccccggcaagaagttccaaggaatccattgaacaacctacaaccaaaggtgacaattcctcaattgacccaatgaaactgctgcccctctaaggcttccggccgaagccaaagggctccactccaaaaggtggtggtcgcggtggaagaagtggtggtcgcggtggaagaggtggccgtggtggattccgtgga

SEQ ID NO: 4241 - DNA, 437 bp, Triticum aestivum
  Clone ID: LIB103-054-Q1-E1-B11
cgggcaaacttaaaccaatgaggttagcaagggcaaaccactatattgggtttcaggacaacgagtcacagatgagcatggacgccttcagattgattaggatgatgacctcgaagagctctaagaactcggttctggaacttttggaactgtgtatcatgggaaatggaggggctctgatgttgcaataacatgaatcaatgacagatgttttgctgggaagccatctgagcaagagaaaatgcggaatgacttctggaatgaagcatctagccatgctgatctgcaccaccccaatgttgtggccttttatggcgttgttctagatgggcctgcgggatccattgcaacggttatagaatacatggttaatggctcacttatgacggctttgctgaagaattccaagagcctggatccgatcatacggctaatta

SEQ ID NO: 4242 - DNA, 233 bp, Triticum aestivum
  unsure at all n locations
  Clone ID: LIB103-054-Q1-E1-B2
gggcactacagaaacagcagcttcncagtcgcagcgccccaaccaatggcgccctaaattcgccgggcatcagcgcgcccctcctgttcgcaacgagaatgcatcgtcggtgctcaaattcgccgggcgtgtggtccggcgattcatcccccaacggtcctgctgccggtcgcccatctccggttccggccggaacacccaactcaacaagtacgtcatctcatcctccggtc

SEQ ID NO: 4243 - DNA, 397 bp, Triticum aestivum
  Clone ID: LIB103-054-Q1-E1-B3
cagtcagtagttctattgcagaggcggcaaacctgctgcctaataaaacgtgtccggggtaactgaaaacttaaggtgtggtgggtaatggtttgcctccgaattggccgaattaatccgttccaatttcaaccattcgtggaattggttaaagggtaataagtcccaagttcaagttaaataataagttggttggtaaaaaaataaatcaactcaaccacaggtcaacaaagtgagtaaggtgaattaggcgaactaagacgaccttattgaggacaagagcagagagctgactcatgtcgtacgtgaactgaaaaaggaatttaaagaactcgaattggtgtataaaaaggatgcttcacgtgccaccagctatgcataggccattcaagatgtt

SEQ ID NO: 4244 - DNA, 213 bp, Triticum aestivum
  Clone ID: LIB103-054-Q1-E1-B4
aaaggaaggggttttccgaaaattttggaaatcccctttttaacgaattcgttcctggcaaaaccgcctccgtctcaaggaagtcacaatatgcaatataccaccaacaaggaaatagatgaacggttatgatgtctcaagtccaagtatagtagtaaattgttggttcaaaaaataaatcatctcatccacaggtccccaggtgagtcaagt

SEQ ID NO: 4245 - DNA, 401 bp, Triticum aestivum
  Clone ID: LIB103-054-Q1-E1-B6
cgggtgtatggcaaaccttactgcccctacaagttctaccacatccggtgcctgaggacgagccagatcgcgctggagaagcagaagaatctggagtgctggtactgcccctcctgcctctgcaggggctgcttcaagaacaaggacgacgaggagatcaccctgtgcgacggctgcggcgaggcctaccacgtgtactgcatgacgcccaagcgcacctgcgtccccaagggccactggtactgcccgctgtgcagcgtgcggcgggcaagggacgggatgcagaggtacgagaagtcgatcctgaagaaacaacaacatataagcgccaagcgtgcgagccagtcggacgacgcttagcctagttgatgatgctattgcttggccaacatgggagtaat

SEQ ID NO: 4246 - DNA, 420 bp, Triticum aestivum
  Clone ID: LIB103-054-Q1-E1-B9
ctatcaagatgaccggggtcttgttgcgaatgatccgcatctccatactcagtgaaaatagccgaacgaaggtgtagtgcagcggatgaaggttaaacatagcaaagatgtcatcaaaccgcaggacgatcatacccccgatgtcgccatccacaaagcccttgccctctggcaccttggccacgaaaaccgggtatgccacatccttctctctgagacgccgcttctccaaagaaagaacattgtcgtgcagactccgcatagcaccggttgcagcattgagcatatttggtggtagcatcgccctacccgccacatgcaccctcctcgagatatcctgcggtgaaggtggcccgtcctgagcacggatcgtactcggtgccggctggctcgcacccttcttagcctttcttttgcgtg

SEQ ID NO: 4247 - DNA, 438 bp, Triticum aestivum
  Clone ID: LIB103-054-Q1-E1-C1
cgtcatgtcatttgcatgcgtgttgcatcctaaccaggtcaccaggtgaatggaaccaccaggttttccaaaacttgcatccgccggggttccccaatttctccccgtggtcaattctgagccaaacaaaacttgcaaatgcccgcgacatgtccgagatagtattttataagtggccggaaaatgttctcggattgggatgagagttggcgtgtggtctggttatggtgtaggtagaccgcctgccaagtttcatcgcaatcggagttcgtttgacgccccaacgattaactatagcgacattatagtcggtctaacgtcgggcgttttcggtctccggaaacagatgccgggccctctctctctcttctccccctcgcagtctcgccacagcccacctagtccatcctccttcccctcttcgtttccggagttgtc

SEQ ID NO: 4248 - DNA, 436 bp, Triticum aestivum
  Clone ID: LIB103-054-Q1-E1-C2
gtcttttacattaagttttcacttttcctttaagcaccaagccgggaagaaaaaatccctgggtgaattaaagaaagcccaatggaattcaactaaaattttggataagggcttaaagaaagcctcaagttgctcaattatatcaatttgagttgggatgcctgtttctcttcacatagacaacagccatttgtagaatgctcttttgcttcacttatatttgttagagcgtcggcatatattttttagaaagaattaaactctcttggttcacttacatcaatttagagagatgacaggaatttgtcattcacatggttagtcatataatcctagataaacttgtagatcgctgaatatggtatgtttgattccttgcaatagttttgcgatatgacgatggtgatattagagtcatgcaagtgggtggttgtgg

SEQ ID NO: 4249 - DNA, 435 bp, Triticum aestivum
  unsure at all n locations
  Clone ID: LIB103-054-Q1-E1-C3
atgcttgataatagttctgagatatggaggtgataatatcaaagtcaggcttgtacattaattgtgaatttgaaaattgcttgagttgaagtttgcaagtcccgtaccatgcacgtatggtaaacgtcatgtaacaaatttgaaacatgaggtgttatttgattgtcctccttatgagtggcggtcggggacgagcgatggtcttttcctaccaatctatcccctaggagcatgcgcgtaatgctttggtttttgatggcttgtacatttttgcaataagtatatgagttctttatgactaatgttgagtccatggattatacgcactctcacccttccatcattgctagcctcttcggtaccgtgcattgccctttctcacattgagagttggtgcaaacttcgccggtgcatccanaccccgtgatatgatac

SEQ ID NO: 4250 - DNA, 96 bp, Triticum aestivum
  Clone ID: LIB103-054-Q1-E1-C4
ccaggacagaaaaaaggagtcaagttaagaaggcggtcctcaattccttgaacctttcaacaatttccctttggaagggcaaattgattgatggcc

SEQ ID NO: 4251 - DNA, 358 bp, Triticum aestivum
  Clone ID: LIB103-054-Q1-E1-C5
cgggagcattctaaggaggttcatcatgcagggatccaactcaatggctggacctgaagcctcgaaagccgtcagcatggggatgcccgtcgagctactgcgtgcaagccttccgcacaccagcgaagatcaacgccagatgcttcttgactttgctcggaaatccatgcccgtgagcggctacaaccactccggcgctaggggcgggcattctactacttccaaacctgttcccggttaaaagtacatgtgctgcttgtctttcagatggtgattacagatagacatgcttcctgcttcgcaagatgtgtgagcttggagagattccgttggctccgtgtcgaaagttagcgttcct

SEQ ID NO: 4252 - DNA, 439 bp, Triticum aestivum
  Clone ID: LIB103-054-Q1-E1-C6
cggggacacgcaaaaaccctagcagatcgctcgagccctccgccgccgccgcgacttcagctctctccttccttctccgatccaagatgatgttcattgctgcctatctgcttgcttacctctctggcaacgccagcccctctgcagaggacctgacatccattcttgagtcagttggttgtgaaattgacaatgagaatatggaactcatgctgtcccaagtgaagggcaaggacatcaccgagctcttggctgctggtagggagaagtttgctgcggttccatctggtggtggtggtgtagctgtttcagctgacgcccctgctgctggaggtgctgctgcacctgcagctgattcaaagaaagaagagaatgtcgtggagaaggatcagagtgatgatgacatgggcttcagtccgttcgactaagttgtggggca

SEQ ID NO: 4253 - DNA, 442 bp, Triticum aestivum
  Clone ID: LIB103-054-Q1-E1-C7
cggggtgagccatagctatggaagggtgctaggtttctggttttgctagacgataggaagagacttggctctgtataccatgttagattggatcgatggaagcgttcctactcctccgtagaggagccgtgtgggtatttattgattgtggcagaaaacctgccttggagtacaagtacttgccgatcgctaggatacagcaggagagaagaccgaggtttacacgggagagaggaagagatagaattaggaggtagttaagattacatgacgtgaatatctctaactctaactctaacacaccgcatgtacggcggcgccgcctcttgcgctgacagtgtgacgacaacataacgcctggagcacggcagtatgctcccttggcttggacgcacactgtacttgttcttgttgatcaatatgttgaatgcgatgaagccac

SEQ ID NO: 4254 - DNA, 450 bp, Triticum aestivum
  unsure at all n locations
  Clone ID: LIB103-054-Q1-E1-C8
ttcccggggtcacggggtcatgcatgtaattcatcattgcctttcgtaataacggagctaaaggaaacaacctctatatagttaattgtggtaagcatgaaacactaagtcttccctgcataaagtataaatcatgagcaccttggtaccaaaccaagcaattggatcgtacttctaacacgcttcagcattttcaacttcactcaatacatgagcgtgagccatagatatagcactatgggtggaacaaaatatggtcgtaaggatcaatangagaaggaagaaagtctcgcattaattgggcggatcaacgggttatggagatgccaatcaatcaatatcaatgagaggagtacggatttccatgcaacaaatgcactaagagctataagtgtatgaaagatcaaactgaaaactaagtgggtgttcatccaacttgcttgctaatgt

SEQ ID NO: 4255 - DNA, 444 bp, Triticum aestivum
  unsure at all n locations
  Clone ID: LIB103-054-Q1-E1-D1
ggtccacgggcaaggaaattaggaagtcaaagaaagatgtgtatccaaaaaacaagataggaaagggagcctcaaaaggcttgggaaggcaaaaatcaaggaatccccggaaataaaggaaaatttggtaaaaccaatgaatactgtanagaaagcagcttcaaatgtggtttctaattcaagtgangagctgaaagtcaatgcatcaatgaaagctcctaatgttgcttataacgcaaaggaaagggaagctacattatattcgccgatgagagctgttgctggggtgatcacgaagaaacaaaaggagcatgttatagatatgggaaaatctgatgattttgtggaagaaccactgcgtcttccgcagtctgttgcgccgcgtactgaaaaagtcactgtcagtcccagtgttcgtacntaaaaagggagaagtacttcact

SEQ ID NO: 4256 - DNA, 104 bp, Triticum aestivum
  Clone ID: LIB103-054-Q1-E1-D2
cacgaagtaagaccttgttaagaagtatgacttcctaatgccgaataatgacttgtcagacgatttgctaagcaagtaatgttccggtaatgcaactgccaacg

SEQ ID NO: 4257 - DNA, 427 bp, Triticum aestivum
  unsure at all n locations
  Clone ID: LIB103-054-Q1-E1-D6
ggggccacggggaaaaggctccggctgggtggcggacggagcagggtgtggggtttcgtcgcgggttttcgcggcctcggtgtacgaatgggtgggcggatgggatggcagtggggaaccatggcttagagacgcgcttgtccgaaatgtggggtaagttacgaaagtacccccaccgatttgaggcggttctttcggttcaggggtaccacgggcatttcgcgtgtcgggatttcacaggaggtgggagttttcgcgcgcgttgtaatttcggaatagcaaggcgcgggttgagatggagggagttgtcggagcacaacgagacanagatatatcttaaatatttcgggctaacaaggcgcggattgaagaggcgggagtttcgcagcatgatagacagagacgctagcttggattttcggcataa

SEQ ID NO: 4258 - DNA, 445 bp, Triticum aestivum
  Clone ID: LIB103-054-Q1-E1-D7
cgggacagctgcaagaagagtaagaatggaatggaatgaacgaaggggaacacgatcttgagagagcacacttacaacaaatactataacggagttgttggaaaaccaacaacgaaaagaataagcttgatatggtcttatggaatacatctcaaataatgaggtgacaacctgccactcacagaaaaagattgtgttgataagaataaggagacgagaaacttattcaccggaaggataaaacaagaacttggatcatttataaccaccataaatagcaaaatccttagggaaagctttaggtgaaatataacccaagataactccaacgaagaggttgatggatttaaaatttctcattcttaacaacatgtgaatcatgaaacatgagctcaaattatcaataatgacataataccacctccaatgatacggtagaaagaat

SEQ ID NO: 4259 - DNA, 412 bp, Triticum aestivum
  Clone ID: LIB103-054-Q1-E1-D8
gggtccacgggcaaagaaggaggtgaagatgtcgctccagagagtgtggaggttgagaagagtgggaagaaaaaggagaagaaaaagaagaaaaaaagatgcagatgaggcacaatacgtagagatagtagtttacattggcttgtcatgttatttggttgcagttatgtgggagcttgaactacctgttttatttgctttgtaccccttgcaaccgtctatggtttggtaggtacgcctgatgtactatctttacgttactgccattcaaccgaaatgctatggtaattacagagatttccctttaaatttggacaatcagccatgtattgcagtatctgttatctgtatttgcagtgaattttgttctcatctcaataaatcaagacacatgagctcaaattatcaataa

SEQ ID NO: 4260 - DNA, 368 bp, Triticum aestivum
  Clone ID: LIB103-054-Q1-E1-D9
cgggcaaagagaatggtgaagatgtcgctccagagagtgtggaggttgagaagagtgggaacaaaacggataagaaaaagaagaaaaagagatgcataggaggcacaataggtacagatagtagtttacattggcttgtcatgttatttggttgcagttatgtgggagcttgaactacctgttttatttgctttgtaccccttgcaaccgtctatggtttggtaagtaggcctgatgtactatctttatgttactgccattcaaccgaaatgctatggtaattagagagagttccctttaagtttggacaatcagccaagtattgcagtatctgttagctgtttttgcagtgaattttgttctcatct

SEQ ID NO: 4261 - DNA, 419 bp, Triticum aestivum
  Clone ID: LIB103-054-Q1-E1-E12
acgggtgaccgtaaaggctcccacatcaacctcaaggttacggggcaagatggcaatgaggttttcttcctcatcaagagatccacacatctgatgaagctgatgaacgcttactgcgaccgtcagtctgtggatctcaactccattgctttcctttttgatggtcgtatgctccgtggtgagcagacccctgatgagcttgcgatggaggaaggcgacaatatggatgccatgcttcaccagaccggttggtgctttcctggcccttagaatgagcttgctgcagcctgactgttctatgtcgtatgctacgtttagcactagactacactgtgagaagtgccagaagttgtcaggctatggttctgtgccatagcctgaggggcggtctgcaggtgagacaccatctgagtactgtt

SEQ ID NO: 4262 - DNA, 428 bp, Triticum aestivum
  Clone ID: LIB103-054-Q1-E1-E2
caacatatgtgcagcaaggaacatgacactgaaataacagttcaacagacaaaaactatcaaacactaatgccccctttgcaagaacaagggaaacactgaaaccaaagcaaaagatctgggtccgatttgcaaaactcgtaacaaagaagaaccaaaaataagttttcattacactgatgtttaagatagtttcccacattaatcataaaatctgcaggattgataagacagttattacaactgcacctacagttgcattatgcgcaacaacggaaccgtcacagcaatgttacccctcctcgtcgcaagctgcatttcactcagacctcaaacatgacgccaaacctggtaacaagaggaatggatatgatggcagcacccagcgcaacgccaaatatacggtgtgagatggagaacgtggcgctc

SEQ ID NO: 4263 - DNA, 440 bp, Triticum aestivum
  Clone ID: LIB103-054-Q1-E1-E3
ttataatagttcgagccaccattgtggtgtaataccctactccattgtgttggtggtggattgcctcttgggctaatgatgaacattacaagggcagaacggcctcctgaggttaaggcgttcttgtgcttggtgagcttgtgtgtgaggtggtctctctcaagctccgatcagtcctctcactccctttttctctctcccttttcactgtggtggctagtcctatttatagaggccctggtcctcttccgaaatatcgagcgggaagggagccaacaatggcgggctaatttgaaggggggtagctagtacaagctatcctgacaaaagtagtattcgcgtgcacaaagttctggtggtgatgttgttttgggctccacgatgacctccgtcttgcagtcctcggtcttggtcttgttgcaccgaaatggcaacctttg

SEQ ID NO: 4264 - DNA, 445 bp, Triticum aestivum
  unsure at all n locations
  Clone ID: LIB103-054-Q1-E1-E4
ggggactcgcagagaccctagcagatcgctcgagccctccgcggcggcggcaacttcagctctctccttccttctcgattccaagataaatttcattgcggcctatctgcttgcttacctctctggcaacgccagcccctctgcagaggacctgacatccattcttgagtcagttggttgtgaaattgacaatgagaagatggaactcatgctgtcncaagtgaagggcaaggacatcaccgagctcttggctgctggtagggagaagtttgctgcggttccatctggtggtggtggtgtggctgtttcagctgccgcccctgctgctggaggtgctgctgcccctgcagctgagtcaaagaaagaagagaaagtcgtggagaaagaagagagtgatgatgacatgggcttcagtctgttcgactaagttgtggggcatcttgtg

SEQ ID NO: 4265 - DNA, 446 bp, Triticum aestivum
  unsure at all n locations
  Clone ID: LIB103-054-Q1-E1-F1
gctgcagtgcaaagctcggtgttccaatggaacttgtcngcggctttcgaaaccaaatttcaaccccccgttgcccaatggaacctctccccggcggtaaccgttgctacttacaaagctcgccgacgggctcgaagttgcagtgcatcgttcagcgctccaatggagctctcactggtggctctcggtgctgcgttgcagcgcttgacgagcctcggagctgcgacgcaaggctcaatgttagtgctacagtgaagctctcgacagcggttctcgaagctgtgatgcagcggccggtggtggctcaagtcttgcgaggcagtgcttgtcggcggcaaccgttgcaaggcgcttcaatggagccctcattggtggctcccggtgctgcgttgcagcgcttgacgagccttggagctgcgaacgcaagctcgatgttagtgctacag

SEQ ID NO: 4266 - DNA, 455 bp, Triticum aestivum
  unsure at all n locations
  Clone ID: LIB103-054-Q1-E1-F2
ggtccactgacaccaaaaacaggtcattcaattggcaaaaaaaaaaaatccaccaacaagggataaggaaatgaccgaccccaaataaggggcaatccacaaagcccaacaaccccaaaaaacctccgaattaggtggttccggcaaccggaattcacccaaaatccaaagccataaaacacaaccaaccaacgcaaaacaacaaggcctcctccctcctttcccctcctcgaaatcgcacgactcaaccgctgccatggacgctggaaaaaacctcagatctgttctgacctctctgtagttcttttgctcacatttcttccttccaaagtccttctcccagtcggcaaacatccactacagaaaaactggaaaagtggatgagttctcatttntcacagatctgtcaagaaggacaaaacggagaaaagaaanaaagggagagaagaacctgc

SEQ ID NO: 4267 - DNA, 433 bp, Triticum aestivum
  Clone ID: LIB103-054-Q1-E1-F4
gtccacgggccatcatgaatattcattggtgtctctcaaattcatgttggcagatgtgctgcatctacgtcaacgacatgtaatctgcgccctgacatacctgtgccttgctcatgtatgtttgcggattcacatgttactgtctgtacttgtgagaatgatgtttgacgaaagtaacaacttgaacataacatagcccatatgaccaagctgttccaattcgggagctcactctgtattcaattactttctattactaaacatatacttgtatctccaaccaatccgagctgggcttggtgggcttaacctatgcatctgcattggatttataaaagtagtaaatgtacatttagagaacttgacagactaaactcatataacttcacacatggataacgcactattataagtactcaaaagatgaccattc

SEQ ID NO: 4268 - DNA, 444 bp, Triticum aestivum
  Clone ID: LIB103-054-Q1-E1-F8
ccggggtcacgggaggtgcttgaggggcccacgagacagggggcgcgccctagagggggacaccctcctatctcttggcctcctcgagggtcttctgacgtgaactccaagtctctaggatgatattctcccaaaaaatcacgatgccgaaggtttcattccgtttggactccgtttgatattcctcttcttcgaaatactgaaacaggcaataaaacaacaatatgggctgggcctccggttaataggttagtcccaaaagtaatataaaagtgtataataaagcccgtaatcattcaaaacagataataaaatagcatgaatgcttcataaattatagatacgttagagacatatcagcaactccttcccctattccctggagatgcaacgcagggaaacaccgttcgaccgtttccggtagagctctccatcttggatgca

SEQ ID NO: 4269 - DNA, 262 bp, Triticum aestivum
  unsure at all n locations
  Clone ID: LIB103-054-Q1-E1-G1
ccacgattcgcattgggcgcgtgacgtgggggtcgtgtgtgggatggcctgaacatgcttgcgtcatcctgtagttgatagtaaagaggcagccagtgcttcccttattattaaaaaagagggattcgcangggcgctacttatttactaagtggacttgggtcgcaacctgcatggcgccacaccccatgatcacggngtggaaaatggtcgccccacctgttctcatgcctctgactcgctcgccacatgtcncgcatgc

SEQ ID NO: 4270 - DNA, 356 bp, Triticum aestivum
  unsure at all n locations
  Clone ID: LIB103-054-Q1-E1-G2
gctgccatgaaaccctacgcggaggaaaataggccccggaaaacccaagaatgaagccgtttaaaacaagaatttgagaaaaaatgaatcctcaattttaaaaaccggccccaaaaaaaaaaggaaaacccaaaaaaaggaaggccggaatatttatatattaattaagaaaaaaaacaggcaagttagttagttggtgccacagaatgcaatgcatgctcncatcatcatcatcatcatcatcatcataatgtgatcagagctgagacctgatcgatggcaaatattagtacttagattagtactcctgcttacacaagtccagtaatgagatgcctcggttgcttcgcttctgc

SEQ ID NO: 4271 - DNA, 113 bp, Triticum aestivum
  Clone ID: LIB103-054-Q1-E1-G3
acatcatcatcgcccctgccatctaccaccaccgctatccgccacgctccgaatccgtattcatataccaccaccgattcatataccaccaccgaatcatatccatatcatat

SEQ ID NO: 4272 - DNA, 434 bp, Triticum aestivum
  unsure at all n locations
  Clone ID: LIB103-054-Q1-E1-G4
aaatgaatacgaaaaggatggcttcatattggatgatgcggataaaaacaaggaggaggaggaaaaggaggcaaaacctattgatgataaaagacccaggaagaaaaagaaaagaaagaaaaaaaaaaaaacggaggatttcaaccttgataaggatgactacatgttgctcaaggataataacattaccggcatcactcgtccgaagcctcctgaaaacaagtttaagcggttgaagaaggcaagacgggaatctgaaatggatgggcgttctggcttctctgatcatgacggagcaagaaaaagccggactgctgaggagacagttcgtagctccttgtttggtaatgaagaaccgtttgaggaagattttgtcgaggaagatcagcangtagatgaagatgaagttggtgaagatgatatggatgatgaaa

SEQ ID NO: 4273 - DNA, 448 bp, Triticum aestivum
  Clone ID: LIB103-054-Q1-E1-G5
cgggtccacgggaagaggaagtgtgaagcactctggccaattttccgcatttctcatcaaagaagccgttacatttatgatcttttctataaaaggaaggagatatcaaaggagctgtatgagttctgcctggaccagggttatgcagaccgtaatctgattgcaaagtggaaaaagccgggttacgagcgcctctgctgcctccgctgcatccagacccgagaccacaactttgcgacgacgtgcgtgtgccgggtccccaagcatctgagggaggagcaggtgatcgaatgcgtccactgtggctgcaagggatgtgccggcggcgattaactgactagttatgtgtattcatcatgtgtcgccgaatccatggtggctctaagccaagcactctagatgtttcttaagcgtgttctctggtaaagaacagatcgtcctgtaatgt

SEQ ID NO: 4274 - DNA, 417 bp, Triticum aestivum
  Clone ID: LIB103-054-Q1-E1-G6
gccacgggccaacggaactgcttttcgtccacggcgggcacacggccaagatctcggagctgtcgtggaaccccagcgagaagtgggtggtggccagcgtggcggaggacaacgtgctgcagatctgggagatggccgagagcatatacagcgacgacaacagcaacaacgccaacagcgcctcgtgcctgtccacataagaagacgccgccaaccaacttcttccctgatgtgtggacgatggccgatggggacatggctcgttcgtagtctttgggtggacgagtcgcgtgcggtttacttgtagtgcctcgtgcggtttcgtcgcttaattagcagctgctgctatcgtttggcgcctagatcctgtagacatggatggatggagaagtgactctggaatatttgtacgtcctt

SEQ ID NO: 4275 - DNA, 433 bp, Triticum aestivum
  Clone ID: LIB103-054-Q1-E1-G8
gagatgtgtcactcgccgtcgggatcacgcgcgacggcgcggtcgggcagggtggaggaattcgccgacgcggcaacggaggaaggcggcgagtccaaactctccgcgctcctctacgacgtgtcgcagcaggtccaggacagcctccagagcatgctgaagatgacgggcgagatcgagcagtgcagtgacgagatcgaggtggagatcgagcaggccaaggagggcgtggctgacaagtacagggtgctcgaggaggagaaggaaaggttccagaaggtggccctcgcggcgctcaacatcctgagcggtggcatctgaagcctgcaccaccttaataccaacaaagacaatcctgataactgccccgctctgtagatcaccgttcatgtgcaagcctagcaatgaaccgccagttgtactcctccatatg

SEQ ID NO: 4276 - DNA, 131 bp, Triticum aestivum
  Clone ID: LIB103-054-Q1-E1-H10
cgggtacatcgaaatctctaccactagatagttcacgctaaatccgatcagcgaacctattatggtatcattgtacttgtgactggccttctacggagcatccactccggtttagatacatacaggatacc

SEQ ID NO: 4277 - DNA, 357 bp, Triticum aestivum
  Clone ID: LIB103-054-Q1-E1-H12
tcagtatcaatcactacatgacaccacacaacagatatgctgctgtcagcagtcctctctaaatagacactgcaattatcgtataagtacatcattgctgctgtcagcagtgctctctaaatagacactgcaattatcatgtacatcattgctgctgcaatgaaccattaagaattatttaaaatctagcctaccatctgcgttgtcgtcaacatagggttgaggcggagttacaaaatctgtatgagaaaccgagggattgtccgagtcagcgacatctttgttatcttcagagctgtcagaagcatctgagatggcgtcacctgattctgaatgtgttctgtccacatatgcttc

SEQ ID NO: 4278 - DNA, 318 bp, Triticum aestivum
  Clone ID: LIB103-054-Q1-E1-H2
agcgggcgtcttgaacaaggcggcgctacagcttggagactaatgtcgtatggaatatgtacattggctccggcgggatgcagagggaggatgtcacgctccggacatacgcgccggtggttgttacttctggcggagtctagactacccctacagatgactactagtcttttctgtgcactttgtctccactcgtgcgcaactgtaagcaacttcccattcggtcacacatcttgaaactactctaagctgatcaagcttaactttggagttctatccgaatgggctctcggattatacggaattccttattgatat

SEQ ID NO: 4279 - DNA, 394 bp, Triticum aestivum
  Clone ID: LIB103-054-Q1-E1-H3
ttcacggggccacggggacgaggacaatgacgagtgaagcggacaatgccggaactgctgttccaaaaaccaactgaactgttttccggtggggtcataaggagcctatcaatctcaactagaattatcccaagtttcacttcacatcgtgatgttgttttaccttttttcttgtcattgtcctgctataacggatagcgctccctgttggcgccgctgccggcggggtgcccttgtgttggagggtgtatgctcccagcgccggggtgcccctgcttgtacctagatggttactctttccgtccaccattgtcaccggctaacattgtgataatatcagtctgggtaatgttagaaaaaaaaaaaaaaaaaaaaaaaaaaaaagcggccgctc

SEQ ID NO: 4280 - DNA, 389 bp, Triticum aestivum
  unsure at all n locations
  Clone ID: LIB103-054-Q1-E1-H4
atttcagtgaatttgatgattgttctttaaatttgcatcttgcggatttcactattaataaacctatgggaaggattaattatgttcttattgttgcaaataggaattatgtgcctatatatttcattgttcttgatatatattgcaatcctacacgtcctattattcttggtagatctttccttagaacgattggtgtaattattgacatgaaagaaggaaatattagattccaatttcctttaaggaaaggtatggaacacttccctagaaataaaattaaattaccttatgaatctattatgagagccacttatggattgcataccaaagatgacaatacctagatctattcntgtttttatgcctagctaggggcgttaaacgat

SEQ ID NO: 4281 - DNA, 408 bp, Triticum aestivum
  Clone ID: LIB103-054-Q1-E1-H5
cggccaatgaaatgcatttcggtgacggcgggcacacggccaagatttcggagctgtcatggaacctcaccgataagtaggtggtggccaacgtgacggacgacaacatgctgcatctctgggagatggccgtgagcatatacagcgacgataacagcaacaacgccaacagcgcctcgtgcctgtccacataacaatacgccgccaagcaacttcttcactgatgtgtggactatggacgatggggacatggctcgttcgtactctttgggtggacgagtcgcgtgcggtttacttgtagtgcctcctgcggtttcttcgcttaattagcagctgctgctatcgtatggcgcctatatcctgtagacatggtttgatgcgtaagtgactctggaatatttgtacgtc

SEQ ID NO: 4282 - DNA, 427 bp, Triticum aestivum
  Clone ID: LIB103-054-Q1-E1-H6
ggggaaggggtagacgataacgggtggctgcgtggtaacgcatagctagcatggcaggttcctgctactgatgagcagatgtggctcagtgagcccacggggaaagagtaagtgccactttataataattgcattagtttgcttgtcacatgctcattctggttgttaattattgtgcgtgtcagatgctaatagttcattcttttgcagcaactggatatattctgaaggggtccgtattcccaacggcctcatcattgtcttgctgatgtttcactggccggggttgtactgtccggatccattcaagcacccgatgcatcaggtcttggacacgagctgggagcactgcgaagcagggctccatgcttgacatgggacgcatgccaaggccgtgatgaccactctcagggtgagttcgcttcat

SEQ ID NO: 4283 - DNA, 418 bp, Triticum aestivum
  Clone ID: LIB103-054-Q1-E1-H7
tccgggtccacgggtaggatttcgaggatcgcgaaatgcaatgcaataaaatatgatatgcatgaatgatctatgtataacattccaaattgaaaatttgggatgttatatatgattgtgttttttatgttttaattagtgtttttgccaagtaaagcctttaggatcttcttgggtgattgttgtttgatcttgctgaaaaaaatagaaagtatgcgctcacgagaataaattttgtttttttaccagagagcgataaactaccaattccaactgaagtggatcaatatacaaattatttaagtcctcctaaatttttagaaattttggagttacacaagtattccaaacctgcagattgctataaactgttctgtttttgacaaaatctgtttttcctgtgttggttgcctaattt

SEQ ID NO: 4284 - DNA, 124 bp, Triticum aestivum
  Clone ID: LIB103-054-Q1-E1-H8
aaaatgatatgtcgagaaagatgatagaggtgaggaggagtggggcgtggtggtgactggtggtcggactgggctgatgcatggggatggactgcgccggcaacggccaccatgccagattgtt

SEQ ID NO: 4285 - DNA, 428 bp, Triticum aestivum
  Clone ID: LIB103-055-Q1-E1-A12
ccctcgagaaaccatttttgtctttttgatagttgcattgttgcagtaaactcggacaatagcaagagaacaaaattctgataacaattttttaaaaaaaaatctacaactagcaatactgctacaaatctggaccagtttagacctcggaccacaagttacggctaagtgctacagttatcttcggaaccttgtctgttcaaggaagtggcgggttggagccttatagaagcatcaccgcagatggccgtcaagacatcaaactctcctcacgttgtctccatggataaccaccgcgccttcagtcatcagggtgccaagagcaccgcggagttcgtgcatatgaatttccattgagctctgcttcctcagttcctccagcaactcaatcatgcgcatcgaggggcctccaagctgcattttccccg

SEQ ID NO: 4286 - DNA, 149 bp, Triticum aestivum
  Clone ID: LIB103-055-Q1-E1-A2
cacctgggcatccattgtcaagtcagaactggggacatcaaaacgatcgggcacagcagatcgtgggcacacatcacatcttcgcaaggcttggaacaggatgctcaataatcatccaaacgacagagaaccagcagtgacaactttgt

SEQ ID NO: 4287 - DNA, 363 bp, Triticum aestivum
  Clone ID: LIB103-055-Q1-E1-A4
acgttccactatcaaaaaatatataagagaaacatacagaccacgtagctctgaatcacttatatgcgtcttttacttgtttacatcatcatattatccctttggagttcgatatatggtcagttgccaatttttcatatcctaagtcgcttaaggtttcatgataaaaggcatgagagagcacatctgtaataggtgcatgcccaatatactgttttaaattcactatattgtttgtgttactttgtgtccacagcctatttaacaatggggctcttacttaaaagctactgtgatgtctacctatctcttgtctgatacaatcctgctttaaacaagtgccgagattttgcatcgtcacca

SEQ ID NO: 4288 - DNA, 357 bp, Triticum aestivum
  Clone ID: LIB103-055-Q1-E1-A5
tctttttttaattttatatagaacatagtgcaacagcctgttgaatggtaccaaaggagtctgggcagattcgatgaacacatagaactataaactggatccaactgcaatcagtgtccagaacacgcaaagccgtacagattcacagtgcaggggaaacacggagttacgatgacacaaacggagataacggtggcagcagggggactcaaacgttcaccagccacagttagtacggttacttcatggggaacacgaaggacacacaacatggattgcctttctgataggcaatgcagggtttggtctcctccttcagttcccgcggggtagcacctcgtcgccgcaggctttact

SEQ ID NO: 4289 - DNA, 386 bp, Triticum aestivum
  Clone ID: LIB103-055-Q1-E1-A6
aataaaacagaaagcagcagcctgttgaatggtaccaaaggagtctgggcagattcgatgaacaaatagaactacaaactggatccaactgcaatcagtgtccagaacacgcaaagccgtacagattcacacagcaggggaagcacggagtttcgatgacacaaatggagataagggtggcagcagggggactcaaacgttcagcagctacagctagtacggtttcttcatggggaaaacgaaggaaacaagacctgcattgcctttctaatatgcgatgcacggtttggtttcctccttcaattcccgcggggtactataccgttaccgcaggctttactcacttggccatcatgaccttgacgaactcctcgtacttgattcgg

SEQ ID NO: 4290 - DNA, 371 bp, Triticum aestivum
  Clone ID: LIB103-055-Q1-E1-A7
atctgcaacccttttgagatttaattgctgcatcgctacaatcgggtcagctacagatagattacactacaccggcagcttacacaccggagcggactcatgcacacaatacaacagcacatcctcgacgatatccgccatctctctcgcattcgagaatggcgcgcgctcgccattgccgtcccccaatcgggattttatctcgctattgctacggtacggccgccgctacccattaggtcgacgtcgccgcgatcgggctggcgaccacgtggtggtcgctggaccagactagccgcccgaacccgttggtgcccgacggcatcccgcccgccgtgaaacccaccgtgtagcgcatcctctcgctggac

SEQ ID NO: 4291 - DNA, 422 bp, Triticum aestivum
  Clone ID: LIB103-055-Q1-E1-A8
cccctagagtattttttcttgtcttttttttattttatttttttttttttttttttttttttttttttttttttcagaaaagccggaagacaatagagtttttgaacattaccccgaacaatacacataaaaggatcgagtctccgttacacgaaatcctggaggacgaatgcagctatgcacgcaggcccatggatcttttattttatgagctaaaatggcttcgagccgacccaaggttaccatggagactctacttgttctgcagcaaggacaccgctgccttatcagtgaaccaggtgaattctccatcttgtagcacagccatctcaacaggcagcaggtctgacgaggtttgcttgtctgaaagcgccttctgcaccgctgccgcctttccagctccagtcaccaccatcgcaacg

SEQ ID NO: 4292 - DNA, 121 bp, Triticum aestivum
  Clone ID: LIB103-055-Q1-E1-B11
gcagtaaactcggacaatagcaagagaacaaaattctgataacaattttttataaaaaaaatctataactagcaatactgctacaaatctggagcagtttagaggtcggaccacatgttac

SEQ ID NO: 4293 - DNA, 154 bp, Triticum aestivum
  Clone ID: LIB103-055-Q1-E1-B4
cacttgcagattactactaccgcctgcaggtgtagcatatcggttgcacagaaatgacgccagtagatccaaacgggaaatcgctgctacaccccgtcggattcacaacgtcaccagcggacgccacacgctgaggaactccagctattgggca

SEQ ID NO: 4294 - DNA, 352 bp, Triticum aestivum
  Clone ID: LIB103-055-Q1-E1-B5
atgcctggcctagcaattctctgaaaagctttattacatgttcatcgagtcgtaactcgtaacaccgtgtcgcaccagcaagcggagcgcccatacaaggtgaataacgtatggtcgccagatgaggttttcagagcctaagaccaggaccttttctgagcctagaaacatccagaggtacatgctcgaaatgtcatgagcagcatgtgtgttttgttacattgtaaaatcaagcctctgggagcttgaagatggctccgaaaggtttccagaactccacctcttcagcatctccagagcagccttcggttgatccataggtaccatgtgaccaacatcgtgaaccttcaag

SEQ ID NO: 4295 - DNA, 217 bp, Triticum aestivum
  Clone ID: LIB103-055-Q1-E1-B9
ctcgtgtgctgaatcgctcgcgcatagctggatccatccgagcgggctcgcgggcgcagcgcgaggctatagcgagcgagagagcgatagcgcggtgcgcgggcgtggctcgctcagcgcgcgaatgcgctcgtcgcacggatgcaggggagagaaggttcgcttggtcggttgatcgataaatcgaaggaaatccggatgagcgatgaatgcgccg

SEQ ID NO: 4296 - DNA, 409 bp, Triticum aestivum
  Clone ID: LIB103-055-Q1-E1-C12
ccctcgagtatttatttttgtctttttaaaacaaacatctattgtgatctgagatttaaaacaggcatcatagatgcttggggtaagtacagactgcaggctaaacatcccaatccaacaacggtcgagtgccgatgaagcgaagaaactacaaactaaactgcctcactccagggacgggacgacacttgcaaggaaactactcagagaagacggcactaatctactgcatctagaaagtccttcgagaaagcccggttaggccgacaacgacgaagatttttttccctgactgcaaacacttggacagagtttcatccgtcatacatcactcgtcaccctcctcgtcctcgtcgttcacctcggacttggacttgtcggaatcaccagacgccgtggggtctcctcg

SEQ ID NO: 4297 - DNA, 383 bp, Triticum aestivum
  Clone ID: LIB103-055-Q1-E1-C3
aatacccctctttggttcatttgaagagaaattgcagtgaatagtattcagcatgtaacctgcatccaatggatgaacaacgttgcttgctgtttacatcatcaaggtttgccaaggcctcgcttgttatccagatgtcacaactaccgcgagtcaagacgctcttacaacgcaaacaccttcactacatatgaggccttctgcacctgattataaccactatatatacattatcatgtgctgcacaggttgcattctccattcctgctccactccttgaccgcccagcaaagcaatggaccaaaacattgcctccagagcttatagcttcatctatgaaaccaaagcattcatcagaatgctttaacagatcagtgtctggg

SEQ ID NO: 4298 - DNA, 417 bp, Triticum aestivum
  Clone ID: LIB103-055-Q1-E1-C5
cccacgagtattttttttttttttttttttattacccctctttggttcatttgaagagaaattgcagtgaatattattcaacatgtaaactgcatcccaatggatgaacaacgttgcttgctgtttacatcataaagtttgccaaggcctcgcttgttatccagatgtcataatacgcggtcaagacgctcttacaacgcatacgccttcactacatatgaggccttctgcacctattataacactagtataattatcagtgctgcacaggttgcattctccattcctgctccactccttgaccgcccagcaaagcaatggaccaaaacattgcctccagagcttatagcttcatctatgaaaccaaagcattcatcagaatgctttaacagatcagtgtctgggatatcaagtact

SEQ ID NO: 4299 - DNA, 407 bp, Triticum aestivum
  Clone ID: LIB103-055-Q1-E1-C8
ccccacgagtatttttttttgtcttttgggaaggacagtgacctctctctctatattggaagtatagaacaaggtgccaaacccattgtcgtcactccaaaccacccaagcacaacaggtggtcgcaaattacacgcgccattaatgcgcagcttggaccagcgggtttcaggtcaaggccaaactgaggaaaagatggcgtccggtccccgacagcgacgcaccccgccgccagaaaacaaatgcagtactgcccgagctcgaaggaggtttgaacggtgcggttttatttcgacttcctgcttggctgcttgctttactgaacgaagcacgaacccgggccgaccggcggcctccgagcgtagtagttcgtgacaggagccgcggcgaccccacggtggttcagc

SEQ ID NO: 4300 - DNA, 400 bp, Triticum aestivum
  Clone ID: LIB103-055-Q1-E1-D1
tcgagtattttattttgtctttgtcaatgtgcaaatatctgcgtgcgcagaacagcaaatggcagctaaagctgaaagaaaacaagtgctcacaagtacacatcataggagaggtcacggaggggttatgcttactaggcagacggctagcatacgcaattgaggacaaaggattactggaaagctttcccgaattgcggcatcactttagagcatcgccgaggcccgcaagcattcccaggctctgcgccaactcagccaacctcactttcaaggcctggacgctccgtcggtgtacatccgtgtaggcatcgttgaccaaacccgaaagtctttcagcacataacaccatcgcagcttctgtgagttcaagactcacaggttgctggtatccaaaaag

SEQ ID NO: 4301 - DNA, 403 bp, Triticum aestivum
  Clone ID: LIB103-055-Q1-E1-D12
ccccctcgagtatttttttttgttcttactcagtaacaagggtaccaatatgatagatactactgctccatttaagtttcaacctcagacagatctaaatgagatacaatttgagtaaccaacatctaaatgcttgataggttggcggataaagcaaatcggggcaagcaattacgccttctggttgtagacataggtgaggccgcacttgccgcagtagtggcggtcgaagtggttggccatgaagacgcccgcgccgcactctgtgttggggcactccttgcggaggcgggtcaccttgccagtggcgtcgtccaccttatagaactgcagcacggagagcttcaccttcttgtgcttgtgcttgatcttcttgggcttggtgtacgtcttcttcttacgc

SEQ ID NO: 4302 - DNA, 323 bp, Triticum aestivum
  Clone ID: LIB103-055-Q1-E1-D4
gtgcagcacagtggacacatattacacaacattatatggtgcactacaatggctggaatttggaaatacgtaccaactactgaactgacatggacacgatatcaccgtacactatgaagggtggaataacatagttcttcatgtcccacaagtaacagagcgctaatttattattacaaccaccatgcctggtcaaactacattaaggactgccactgtccctgccctgtgcatagacacagggagcgagtgaacgggggcctccaccgcaaccatggtagtgacaccgacacctactcacatctacatgagcttgggtcacc

SEQ ID NO: 4303 - DNA, 389 bp, Triticum aestivum
  Clone ID: LIB103-055-Q1-E1-D5
acaactagtctcgagtattttttttttttttttttagtgccatcaccatatattcgatatataaaacgttaccacaatttgctttctgtacttaatagagcgacattagcacatagcagatctacaaagcggtaaaggactccaacacttgtgcaagctcaactgcagatatttcttgaagtttcaacctactaccaaagaattaatggaactatgcctcgcggtatgtacatcgctgcagatagaaaccataaaaactgggtttcaacgtcagaactcatttccttctcttcccacttcctatatttgctcacttgaaaaagaacttccatatcgccctgtcacacacctcagtcaagaagtggccaccaaggacaccttcctcttcc

SEQ ID NO: 4304 - DNA, 396 bp, Triticum aestivum
  Clone ID: LIB103-055-Q1-E1-D9
tttggctgcataaacatacagctggttcgtctgaacatttacatacaacccaaaaggtcacatcgcttcccggaaagagaaacaatataaacaagagcaggaaaacccaaaaggtcggttcggttctttgatgatcccttctaagagaaagtagggaaaagaagaggaagaaaccacgaataaagatgatacaagctcagaagacgttttcttcttcacagcacaccaacatcactgcaaggaagtgtctaagaggtaaacactggacactcagttaccgtcctcttctggccagtaggtgctgttagagatgaacagaggtcagatgtcttcagaacgctcaacctcttcaccgaagaaacaaacatcccccagagggacatcgccaaacagcaa

SEQ ID NO: 4305 - DNA, 432 bp, Triticum aestivum
  Clone ID: LIB103-055-Q1-E1-E11
gatcggccaacagtgtttcacattgctaccactacagctaaaatctcgataatgatacagttgatccatcttacaacaccagaagaaaacaatcctgaggatacacaaggcaaggatgtacaaacgtaaacagcagtacagcacacattgatagaccttcgaatcgaacgacaaatcctagtgcttgcctgacatgcagcgccagaaaaatagagaagatagagaaataattctgattattccaagttgaagcaactcctgcaacatttggtatccgacaagcacccactcatcacataggctaaactagttcgctacaataagctcatcttcaggattggcattttgaggtagcatcgtcaattcatcgtcagctgcactgaaatgatatttctctccaacaactcccaaaaacctggtaaacttcaaaca

SEQ ID NO: 4306 - DNA, 383 bp, Triticum aestivum
  Clone ID: LIB103-055-Q1-E1-E12
tttaaattaacgaaatgcttacaacagatatggaatcctaatattgttacaaaataatcatgctactcatggaggacaaaaacagtgatgcacagttgtaatttgagcaacagcatcaccatatgtgagtacaagacattaaccacaaatggagaatccatggtagcatcttcacaagttcagaagagcagaagctgcagtataacaggctacaaggatacatatcatttatcactttgctgctccttcaaacaagtgctggatgtgggctacaacatcctctggggtgtatttgatgtacaaatcacgcccagtttcaggagaagactttaacttggcaattaaagaggcgtaaactggcatcactgtctcctccaccgctg

SEQ ID NO: 4307 - DNA, 385 bp, Triticum aestivum
  Clone ID: LIB103-055-Q1-E1-E2
tcgagtacttttttttgttctgttttttttttatttttatttttttttttggcacatctcaataacaaggtgcatgttgaggaaccaggtaacatgaaaaccacctgctgcttccaatttgtttgtgctatcaacagccaaaaatcacgattagcagttggcattttgatgatcataggaaaagctaaaaagcattctaacccgatacaacaattggcatctacatatgctaagcagcataacaatttcactggactaacatccccacaaactaacaccaagcttgtggcaaaagctagttacttgttactgatccccgaacaggcactaacccccaagaaaataaggatttatgccaccaaaatgttatcgccacgtgttggaa

SEQ ID NO: 4308 - DNA, 424 bp, Triticum aestivum
  Clone ID: LIB103-055-Q1-E1-E3
gtactgccccgcctcgagtattttattttgtctttttttttttttttttttttttttttttttggcacatcgcaataagaatgtgcatgttgaagaagcaactaaaacgacaaccagctgctgcttccaatttgtttgtgctatcaacagccaagaatcaagattagcagttggcaatttgattagcataggaaaagctaaaaagcattctaaccctatacatcaattggcatccaactatgctaagcagcagaacaatttcactggcctatcaccctcacaaactaacaccaagcttgtggcaaaagctagttactttgtgctgatgcccgagcaggcaataagccccaacaaaatagggatgtacgccaccaaaatgttatcgccacttgttggagagcttggctccaaacggattgctccc

SEQ ID NO: 4309 - DNA, 385 bp, Triticum aestivum
  Clone ID: LIB103-055-Q1-E1-E4
catatcataacgcttgatcagataggcacagacatgaacataagacaagatttgccatcaacaaactaaatatttctctcatatgtgtcctcacaggatcgcaagagcaacagaaacactgggaatcctttttacatgcatcagacccaaaaacaaagtctgaaagtcttaatgccatcacaagatttttctgcttaaccacctagtgggacttgggacttaacatggaccataaaagaggccatccacaacgaagtcttttaccaaagagccatccctggctccatggaccacaaaagcttggagattttcgggaagccacgactcaaaagcttggagatctccagcatcccaaccttgtccctcccaccaaacaagcttttga

SEQ ID NO: 4310 - DNA, 402 bp, Triticum aestivum
  Clone ID: LIB103-055-Q1-E1-E6
ttgtcttttcaaatcaatcactatcatcatggacagatgtcaagttaggctattacaatgaccacagaacatcattcagcatggcacataagccacgccatgacattcagtattcgacacagtaaggacatcatcagtaactaacggtttcacattattagcaacaaggcaactgcaatcacactggatttacattgtacaggaagcacagaaacctaaatcaggatctaacgagtcacaagcaagcatacaggttcctagtatatgccagcagtagtctctaactgtcaatgccaggtccggtttgcccctgtgtctgcagctgacctggcagttggggctgcagctgcgcttgtgagccccccctgtgattgtagagatgtacctgaggttggggttggg

SEQ ID NO: 4311 - DNA, 368 bp, Triticum aestivum
  Clone ID: LIB103-055-Q1-E1-E7
ttgtcttgtctttttttttatttaatatgattcatgtaaatactcttaacttgggagcccccacgatctaattcgtcatgaaaaggctccaggcacgcatactcgatatagagagataaacactgctggagctggactcatcgttccggctttgtggtggcctagtcttgtgctgtgacattctgcccctcctttgtttgtgatatgccataattttgacgtgagtacagtttcactggcatgttgattctggaactacgactggacatgtgggaaaaactagtatactttggtttgggaccgcaacaggcattaagccccatccgtatacggatgttcgctacctaaatgttctcgccacttgttgc

SEQ ID NO: 4312 - DNA, 451 bp, Triticum aestivum
  Clone ID: LIB103-055-Q1-E1-E8
tttttcttgtcttttcaacttcaccagtatgctacgtgcaagttgaccgcatatcagccagcacatcttcactgcatcatgtaactagaaaggtgcaagtcaccatgaatagtaagtactaaatactgataagatggtgataactgataataggataatgctaaaacgaaggttaaaagtggaatggaactggtgtacataaagtttttgataaccagttcaggtgccaaacagaagtagtattccaaggttgaagcagcaactgaaagacggcactacacaactttagctgagaagaggccaccatcgagcaaatgcgtacacataggatcagagcaagtccattcatcctgagctactcaagatgctttgcaagtgaattgcgcttatgtcgatgggctccgagaaccttgaaattggtcaaatgttgcccctgacggaacatctccca

SEQ ID NO: 4313 - DNA, 281 bp, Triticum aestivum
  Clone ID: LIB103-055-Q1-E1-E9
tttgtttttattgtttttttatctgttatcgtgtcgacactagtaaacgtcattttcgcaaaaagcatggatttactgaaatgggaatagtgaaacaagtgaccttcatgccccaaccagacaaacgctttccagttcatccgacgggatggatcaggctgggaaatgcccaatacagtgtcaccatggagggtttcatctgagcggatgacgggagagctatcccagcacaggtcgacggattgcccaaccaaccgtagtatatgcacgacggggggatg

SEQ ID NO: 4314 - DNA, 295 bp, Triticum aestivum
  Clone ID: LIB103-055-Q1-E1-F1
cattatgccagcaaaagcactgatctaattcaccggcatctggccgatccgtaaacaattaggagataagttaggcaacacagtctggttcagttcgatcgccgccaggcatagaatcttctcaggcctaccatctacatactccagcagatccaatccaccggagattagtatttacagctttgtgagcgatttagacattcctctagtgaaccgcaaggagtgcaactgatggaaacctgacaccagaaatcaaagaactctcagttgagttagaaaggccgaccagaagtcc

SEQ ID NO: 4315 - DNA, 405 bp, Triticum aestivum
  Clone ID: LIB103-055-Q1-E1-F10
cctcgagtattatttttgtcttttttttttttttattttttttttataatccaagcacaagcagttgtttacacgattgtatcacatgttaaacctacatcccatcagaaaaagtaacggctaggcccataacatacactccatgcaacgccatcaagtggccaaatacaccagttatcataattaacaaccagcatgatctgacttcaaacttcatgccgtacgaaggggtggagaaaccaatatgacaccatcacctcggacaaaaagaaaggggatagtgcgtttcgtggtgcgcacaatttcttcatatgtttcatcatctatctcaacagttgtcacgacctctcaacatctccaagtatcatgtttaaatgttgatcatacgcatggagcttgccgcgc

SEQ ID NO: 4316 - DNA, 425 bp, Triticum aestivum
  Clone ID: LIB103-055-Q1-E1-F12
cctcgagtattatttttgtcttttttaattaaccattgtaatagctgaaattattaatgtagatagacattatgccagcaaaagcactgatctaattcaccggcagctggccagccgtaaagaattaggagataagttactccacacagtctggttcagaagatcgccgccaggcataacatcttctcatgcctaccatctacatactccagaaaatccaatctactggagattactatttacagctttgtgagcgatttagacattcctctagtgaaacgcaaggaatgcaactgatggaaagctgacaccagaaatcaaagaactctcagttgagttagaaaggccgcgcacaagtccagaaagaggagctgtggcccactgactctttgcaaatcgaggaggtatttctccgtccctggttt

SEQ ID NO: 4317 - DNA, 311 bp, Triticum aestivum
  Clone ID: LIB103-055-Q1-E1-F2
attattgatctcggtgacagaatgcagcagtgaacatggaagaagcgtaaactcaacaccatccgctgctgacaatactttcaaattttagtacacgagatatgacacaaatcatgtgggatgcacacgatgggtagcccatgtaaatgaaatgacgattggatttaactgcattgcagttcataagatcctgttcaatggctcccgtgttgatgaacttctcaatggcatggaccgcttcgaaggcgaccgggatggagaaagttatggggccaaccaataggtcgagagatttggcgacgacctcatct

SEQ ID NO: 4318 - DNA, 288 bp, Triticum aestivum
  Clone ID: LIB103-055-Q1-E1-F3
tcgagtattttattttgtcttgttgaactgtcaaagacgaatctttgtttttctttttgcatcttgaacgataaacaaagaagtgtttttttcctcgtcttcatagatagatgctactcatcattccatgcacaggtacgcttcgtagtcgtcgtcgttcgtaatggtcacttcacgtattaattggcgccatatcggtcgtaagggcggaagccgtgggcgagcgcggcgcgccaggacttgtctatcccggtgaacctggcgcagcactcgtgcgcgtcccagcgt

SEQ ID NO: 4319 - DNA, 403 bp, Triticum aestivum
  Clone ID: LIB103-055-Q1-E1-F4
tcgagtattttattttgtcttgtcttttggcagggaaggagaagacttggaagaggggaagaagataggcagtagtgttttctgttctttttttcgatgtcccagtttacagactgaagccatacatatggcacaacgactgggccacactattacagtcaacgaacccactctaggccggacaccttgctattgggcttaagcttcctttttaatcttggctgtagcagcacaccatcttcgcttccagtctctggcgcaggttcacttgtcttggcatccttgtgtgtgctaacagagtccgataatgtgatcttgattcccaacaagacaacaatagaaatgcttaattagaaacggacaatacattatcataaccagcgtccaaaacttggatgcaaca

SEQ ID NO: 4320 - DNA, 390 bp, Triticum aestivum
  Clone ID: LIB103-055-Q1-E1-F5
tttgtcttgtctttttttatatacccatctttggtctcatttgaagagaaattgcagtgaatattattcaacatgtaaactgcatcccaatggatgaacaacgttgcttgctgtttacatcataaagtttgccaaggcctcgcttgttatccagatgtcataatacgcggtcaagacgctcttacaacgcatacgccttcactacatatgaggccttctgcacctattataacactagtataattatcagtgctgcacaggttgcattctccattcctgctccactccttgaccgcccagcaaagcaatggaccaaaacattgcctccagagcttagagcttcatctatgaaaccagagcattcatcaaaatgctttaacagatcactgt

SEQ ID NO: 4321 - DNA, 415 bp, Triticum aestivum
  Clone ID: LIB103-055-Q1-E1-F6
cccacgagtattttttcttgtcttttttttttgagtatcgaacagcagaataatcagttggaaatacagacagttgactttcaccgctccctcaatattgtcctaataatattaaccaacagcctaagaaatacagtacaaaagagtcacgcctatcatacatcgaatgttctcaatatagacgaagctgctggccagcctacaacaatttcagagtttaacgtgactactgggaagggcaaaatcatctgcgcgatgaaacccagctgcgcccaccagcactggctgtagtcttcgggggaggaaacatgcttatgtcggttggggcagcgggttggtcttcaaccacaaggaccgccctagcatggctctaccatgaacagccatgtatgaagcattcaacttgtcaacatca

SEQ ID NO: 4322 - DNA, 416 bp, Triticum aestivum
  Clone ID: LIB103-055-Q1-E1-F8
ccccacgagtatttttttttgtcttttttttttttttggtgttcatatcttttcgtaattgacatacacaaccattatattggtgaaaaatacatgcagctcctgtcctcaagactcgggcagaggcgcagagcacatccttctaatggtgtatacatatgctttccctgtctatcgtggccatggactttgcaataccatagataccatacgaaaacacgaaacgggagaagcaaggaaacgttacaaatcgtacatgtggatacaacactaaaacaagcgttccacacagctagcacggcactgatcactgtacctgatcccgtggagtgaagcggtgaacggtccgacccacaggacaactgaactgaactgaactgcacaggcggcggcggcaagacagaggaactggtgaa

SEQ ID NO: 4323 - DNA, 377 bp, Triticum aestivum
  Clone ID: LIB103-055-Q1-E1-G1
atccatttgacgttctttaatacatctcaaaacacaccagattcgaaatatccagctgaatgacaaaaatgcagggagagaatgagaagagtacaggcgttcataaaaaggaatgagcgactcagctcatacaaatgtcaatgcaacgtcaagcacatttagcaggtcactgtaccacttcaaggtccttgaagtactcatgctcaagtgcttgcctcgctgtgattcttttgcctggctcgtatcgaagcattttagagagaaggtccaacccagcagggtcaagatttgggactactgttgccaggtcctgagcttgccacctggggaaagctgtcttgaagtcaggcaaacaactgactccctggccaactctg

SEQ ID NO: 4324 - DNA, 426 bp, Triticum aestivum
  Clone ID: LIB103-055-Q1-E1-G10
ttgtgtatgggctgccctcgagtatttatttttgtcttttttttgcttcactgaccaagaaacacttttaggtttcagaagcaacattgtcttgtctcacgaaacaatacaatacttgaatcaaacacctacttcttaaattatttacatgccaaggctcagaatgcttatcactttggaacacataaaacgaacgactctctcaccgttcgttcgttcattcattcattcattcattcattcacaggccagcttggtgtcgaagctcgtcagacatatggcgaaggcctggaaggccgacagcgggtaccggtagtccatggtgaacatgtccctcccgaccttgccgaactgcaggatcaccgggtcatggtacgacgacgacgacggcggcggcggcggcggggggccggaggcctgcggctg

SEQ ID NO: 4325 - DNA, 357 bp, Triticum aestivum
  Clone ID: LIB103-055-Q1-E1-G11
aaaaaagtaaacatctttaggcataatgcaaaatcctgacagcgaccacaaaaactgagacaatgtttcaccatagtacgaggcaacaacacatccgttctgaaacacatgtcctttaacaatctaaagcacagtagacagataaacaacgacaataactctaggtggccttgtcagccttggaggctgtggcagcagcttgacccctgagccttccagtcctcctagcggcaatgagaccaaccttccggccagggggagcgtctcggcggacagtacaggcgtcaccgatgtgttggtggttacctcctccgtggggatgctccacagggttcatggccacaccacgcaccttgg

SEQ ID NO: 4326 - DNA, 399 bp, Triticum aestivum
  Clone ID: LIB103-055-Q1-E1-G2
gctcgagtatttttttttgttcttgtcttttttgcgaacacaatttagaagttggatagaaattagtacgcagacagcaatcagcaggtatggaacatgtttcacatgatgtttagatttgcaggtatctctcttatttggcggttcacggttcaccgccgagttgatttccgatatcgcccttagctcaccggacactcagttgttgcaagtggcaactacgaaggaggagcagcagaggcagatgcctcagccggagccgcctcgtcatccttgtgcttcaccatgcccgagtcgaccagaatcgggacttccgccgcgagccacggcgcgaggccgaggcacagcgcgtgcgccaggccgaacctcgggcagttcttggcccacagcggcttgaag

SEQ ID NO: 4327 - DNA, 396 bp, Triticum aestivum
  Clone ID: LIB103-055-Q1-E1-G3
gagtattttaatttgtcttgttcaatccatttgacgttctttaatacatctcaaaacacaccagattcgaaatatccagctgaatgacaaaaatgcagggagagaatgagaagagtacaggcgttcataaaaaggaatgagcgactcagctcatacaaatgtcaatgcaacgtcaagcacatttagcaggtcactgtaccacttcaaggtccttgaagtactcatgctcaagtgcttgcctcgctgtgattcttttgcttggctcgtatcgaagcattttagagagaaggtccaacccagcagggtcaagatttgggactactgttgccaggtcctgagcttgccacctggggaaagctgtcttgaagtcaggcaaacaactgactcctggccaac

SEQ ID NO: 4328 - DNA, 394 bp, Triticum aestivum
  Clone ID: LIB103-055-Q1-E1-G6
gcctacagagaaggtttcaccttgtcctaggtgatttgcttcctatgaaccaatattaatcagacatgtcacgagcatgcagcttcaactgcaaggctttttgtgacccctgtacatggatttccaaaataattcgacgacactggcacgctgcagctgctcactccgatgcaagcctcctgaacaattgagagagcctgagtgctgctgcattcgccatggctgtagcttccacatgtgccactcggtgtcccaaagcttgcaaacttgacgctgctgatgacctggccttcttttgggcattccaggcgaagtgcaggtccatatctctgcatcggctgttgagaactccaactatcaatttgggctggatgtgcctctgatacttgtgcgc

SEQ ID NO: 4329 - DNA, 423 bp, Triticum aestivum
  Clone ID: LIB103-055-Q1-E1-G7
ccccacgagtatttttttttgtctttttttttttttattttttttttttttagattggatgtatacgtacatttacatcgcaaaaaaaaagtatgtacaatttcgagggacgtggcaaaattcatcaatcactcggccaaaaattggtttgtgcaaacatctctgatgatggatactagtctgaaagaatctgttctaactcaggatccccggccaatacatcgtcaaccatttcagcgtcaacaacctctttgtcagcagggacatcttcgtcatcatcaggttcgcccgcctcttcatccgtatgattgggaacagctggctcgccaatgcctttgccttggtcagcaacactattcaatacttgatcatcttgagatttggctctggctactgctttgccatcagtcctttcacaaatgc

SEQ ID NO: 4330 - DNA, 437 bp, Triticum aestivum
  Clone ID: LIB103-055-Q1-E1-G8
gcctacagagaaggtttcaccttgtcctaggtgatttgcttcctatgaaccaatattaatcagacatgtcacgagcatgcagcttcaactgcaaggctttttgtgacccctgtacatggatttccaaaataattcgacgacactggcacgctgcagctgctcactccgatgcaagcctcctgaacaattgagagagcctgagtgctgctgcattcgccatggctgtagcttccacatgtgccactcggtgtcccaaagcttgcaaacttgacgctgctgatgacctggccttcttttgggcattccaggcgaagtgcaggtccatatctctgcatcggctgttgagaactccaactatcaatttgggctggatgtgcctctgatacttgtgcgcacaaaattcctggtcggcctcatcacaaaggatatcttgcttg

SEQ ID NO: 4331 - DNA, 407 bp, Triticum aestivum
  Clone ID: LIB103-055-Q1-E1-G9
ccctcgagtatttatttttgttttttaaagtgaaagaccaatgcagtcaccaatattcaagtaaaagaaggcgctctagtctgagagagacatattaaagtaaaataacaggtactctagtctgagagagtaagacaggcaggcaggccataacaaagattctcagcttcttcaatagaagaaacctagaaccttgcctcctacgctcttccggcgggcctcctcgtggtccatgatgcctgccgaagttgtgaggacgatgtatccgaactgcctggacgggagcagccttgcagtccatccctcaatgtctttcacgccgatatcaaagcgagggctgatgacgccgcacttgttcagcctcccgttgagttcgaccacgatcttgcccgatcggtggtcatcaa

SEQ ID NO: 4332 - DNA, 244 bp, Triticum aestivum
  Clone ID: LIB103-055-Q1-E1-H1
tgccaggaaattggatttgtgaaaacgtctcagatgctggatcatattcagaaggactctgttctaaatccggatccccggccactacatcatcaaccatttcagcatcaacaacctctttgtcatcagggacatcttcttcatcaacaggttcgcccgcctcttcatccatatgattggaaacagctggctcgccaatgcctttgccttggtcaccaacactattcaatacttgatgatcttg

SEQ ID NO: 4333 - DNA, 394 bp, Triticum aestivum
  Clone ID: LIB103-055-Q1-E1-H10
aattggatatccataatactattatagcttagcttgttcatagagactggaggagcatgacggctgatcacacgcgatcaactatcccaagtttttacaggcacagaactaccaccgacactcatgctggagctaccgacgaatctagagctactgacaatattacgattggatcaaaatccatgaaagaggggaatctataggcggaattgagggggggatctcgccagcgacaaggcaggcagactacttcttggccttcctggccacgcccttcctggccggggcggcagcagcagcagccttcttcggggttgccaccttcttaggagccgccgctgcctttcccttcttggcaggagcagccgccttcttgggtggcctggccggggaa

SEQ ID NO: 4334 - DNA, 342 bp, Triticum aestivum
  Clone ID: LIB103-055-Q1-E1-H5
tttgtcttgtcttttcaatgcacaaatagtaacatatgagagggtaatagtttattacatcaagacgtccgagacatccacataatcatctacgatatatcaacatgcataaacgaatcgtagctaaactaagccttcacatgcagcccactgggggtttaccgctaatccacacctacaactcatcgtactcatggaacccatgaaaatcatccaacaggacatcatcatctcctgatcagtaattgcattatggagaccacgtggatgtgccaccgcaaggttacgtttttggctcgttgtcatggcatggaaatggcactgatgctcgcgtgacgatgc

SEQ ID NO: 4335 - DNA, 405 bp, Triticum aestivum
  Clone ID: LIB103-055-Q1-E1-H7
ccccacgagtatttttttttgtcttttttaattaaccgttgtaatagctgaaattattaatgtagatagacattatgccagcaaaagcactgatctaattcaccggcagctggccagccgtaaagaattaggagataagttactccacacagtctggttcagaagatcgccgccaggcataacatcttctcatgcctaccatctacatactccagaaaatccaatctactggagattactatttacagctttgtgagcgatttagacattcctctagtgaaacgcaaggaatgcaactgatggaaagctgacaccagaaatcaaagaactctcagttgagttagaaaggccgcgcacaagtccagaaagaggagctgtggcccactgactctttgcaaatcgagg

SEQ ID NO: 4336 - DNA, 370 bp, Triticum aestivum
  Clone ID: LIB103-055-Q1-E1-H8
caccagctagaaaatgtgttcaaataggagtggcagaaaaataacacggtttaccagattatactgtcacaaactgttaccgaacacttaaaacaaagactagatgttccccaaaactgatgacaaagcacagctcctcagtacttgataggggcaagaatctccaactgagaccccaacttctcctcggctgccttctcggccttgacacgcagcttggccaattgcttcttcctctcgtaggcaaccttggccttctccttcctcttctcctcaagttccctgatggtgtcatggtagttccacccgacctccttagagagctcgccgaggaggcagtacttgtgtccaggctgtagcctcagaacct

SEQ ID NO: 4337 - DNA, 412 bp, Triticum aestivum
  Clone ID: LIB103-055-Q1-E1-H9
gttctgtcttttttttttctttttcttttgcaatgcaaataatatcagtaatgaatatacgacaacaatgtatctgtttccgcagacccctccagcgaaaatcgacccactgatatctgcaaaatcccagttccagctttccctcgtacaatatgtgaaaaagaaaacaaaggtaaaagtgggcaagccaaaaacaaccacacccaagcagccccactgtatagaaaaaggactattaccaaactggttatcggccctgacaaaaagtgtcaggtgatatcaaccaggaccacgccctcgacatcaagaccgccctaagccactcccacatgtcttgcctgcttggggctatagaatttactggagcgcacacgtaaaaaacagctgatggaccacaactgaactccaagca

SEQ ID NO: 4338 - DNA, 392 bp, Triticum aestivum
  unsure at all n locations
  Clone ID: LIB103-056-Q1-E1-A2
cggtccacgggtagcttatatatgaatattatttgaagcttctctgaattcttttatgcataatttggtatctttgtaattctcttcgaactatcgatttgatttggctaactagattggtttttcttgaaatggagaagtgcttagctttggattcaatcttgcggtgtcctttcccagtgatagtangggcagcaaggcacatattgtattgtcgccatcgaggataaaaagatggggtttacatatattgcttgagtttattcctctacatcaagtcatcttacttaatgcgttactctgttcttgatgaacttaatactctagatgcaagcaagagtcggtcgatgtgtggagtaatagtagtagattcagaatcgttttggactact

SEQ ID NO: 4339 - DNA, 376 bp, Triticum aestivum
  Clone ID: LIB103-056-Q1-E1-A4
cgggtccacgcgggggctttacctgacgcggtaggcggcggggcagttccgcctagtcggttcgacagtgacgcgagaagacgagggagtaggctgctgcaaacgtagggctgtgtgatttgacagtgggttactgctggacaggtggggccctgttatttgacttgccattatcattttaactgtggtgctacgaccggcgtgagtctcccgattcttgaccacctccatacaggtgcctctcccaatgctccaccatgtagtacaggctggctcttgcatgagagccaacttctccactttttccttgcctctctttccttcgcatatgcaaaaatgccatgtaaagcgcactattggtaacacttttacttgc

SEQ ID NO: 4340 - DNA, 373 bp, Triticum aestivum
  Clone ID: LIB103-056-Q1-E1-B1
cggggacagcgaaaagtagaatgggatggaagtggagcctgcggcgttcgcatctgggtgaggatgaaatgaagatgcaaaggagaaggggccgacgaggaggacgaggacgaggatgaggacgacgaagaagacgactccgacgacgaagaagacgaggattcggaggatgaaggggacgaggacgaggacgaagactccgacgaggagggctacgacgacgacgacgaagacgaagacgaggactccgatgaagaccatgaccacgaggaggacgaggacgacgaagacgacgactaggacgacgacgagtataatgggatggaagtggagcctgcggcgttcgcatctgggtgaggattaaatgaagatg

SEQ ID NO: 4341 - DNA, 125 bp, Triticum aestivum
  Clone ID: LIB103-056-Q1-E1-B11
tctccctaactcgagcccttctccacctccagccaccgccgcgaccaggcatacgtgtcggctcgtcagcatcacctccactatcaccttacgcttccagtaaatccatcagccaacccacgatt

SEQ ID NO: 4342 - DNA, 341 bp, Triticum aestivum
  Clone ID: LIB103-056-Q1-E1-B2
cgggtccacgggatgtactgataagtgattcaatacacacattaccaatcgaggaggagaacgatggtcgcggcggcctctgtgagtcatggtcggcaacgggagtcagttcattgtccatgacggtggtacttctacgcttggcgtcggcttccgggaagcagatccgagaccgtggaagacgatgccggggaagaggctccgtgtacgacgacgacggtggaccggctccagtgcggcgtacgaagtcgtcgatgaggcagatgcgctgcggtggacgagtgcgccgatgtaaaggggaggagcatgaaggctgcagtgccgtggagaagtccaatttg

SEQ ID NO: 4343 - DNA, 336 bp, Triticum aestivum
  Clone ID: LIB103-056-Q1-E1-B4
cgggtcgacgggacctacaaaggtgggttcattgatctacaaacccactcgattaagtttaacaattcagatgacgagtaatcgcgtcatttgttcgagccgtgcgacatttcccattcttgccctcgttactcggtcagtcttgctgaacggaagaagtgaaggcatgcctgctttgcagagaagaagcaaaaacattgaattgttgtatcctgccctttttgttatgctgcatgctctgttaagtcatcagaattttgtaatggactcggtgagacgtacattttggctatcccaatgggaaatgaaatattactacatagtaagtatcgtttt

SEQ ID NO: 4344 - DNA, 182 bp, Triticum aestivum
  Clone ID: LIB103-056-Q1-E1-B5
cggtccactgggactactaaaagtagaatgggatggaagtggagcctgcggcgttcgcatctcgttgaggatgaaatgaacatgcaaaggataatgtgccgactaggacgacacgacatgataagactacacaagttactctacaccaaaaacttgattccaagattaagggacaagacaag

SEQ ID NO: 4345 - DNA, 374 bp, Triticum aestivum
  Clone ID: LIB103-056-Q1-E1-B6
cgacgggaggcagcgactacatcgcgtcggcgctcgtcaagatgctgctggagaaggggtacgccgtgaagaccaccgtcaggaaccccgatgacggggagaagaacgcgcctctcaagaccctggcggcgctggggcccttggaggtcttccgcgcagacctgaacgaagagggcagcttcgacgacgccgtcgctggctgcgagtacgccttcctcgtcgccgctccggtggccctcatgccaaagataccccgaggaacaagtgatacatccagcgatccaaggaaccctgaacgtgatgaggtcctgcgtgaaggctgtgactgtgaagcgcgtggtcctcacatcatccacggcggcgatctccagccg

SEQ ID NO: 4346 - DNA, 423 bp, Triticum aestivum
  Clone ID: LIB103-056-Q1-E1-B9
ggtacggctgataacaagacgccatttttccacttcgtgatctttccgatccttgaagtactcggctgcgtcagcagcactggcagccaaatccacgtaggcgttcgcagaactccatagccggtccagatgcgcatacttcggatccccgaacttcgtccgcaacaagaagggcttcccagacacgatatctgcaacttgattcagctcctcctttatcgctctaattttggagcgggcttacttggcagccacccgggccttctccaggtccgtcaccttcgcccgattttcctcttcaagaagccgttaacggtcaggagcatcttttaactccacggccatcttggcaactttttccttgctctcgcaatgtgcggcctgttcggcccttaactcttcagccgcctgtaaaacgggcgc

SEQ ID NO: 4347 - DNA, 415 bp, Triticum aestivum
  Clone ID: LIB103-056-Q1-E1-C1
cgggtccacgcgcggttggtaggacagaaccgggaccaatgggccttgctcctggcccaccaccattggtcccggttggtggcttgaaccgggaccacaggctgccttttagtcccggttcatgccacgaaccgggaccaatgaggtgcctatatatacccctcgcccgcgagcagagcactccagtgctatgtttttctctggtcggcgaggggagggctttgtggtgctctagctcacctcctatgcacatgaggtgttcggtgaaatgcccgagccacactagttaagctttctcctctcggagctcgacctcaaagctccattttcctcgagatttgtctaggtttagcggcccgtcacgtcgcattcccgtcttcaccgccgtcgatcgcccgcgccgatctcgtcgccg

SEQ ID NO: 4348 - DNA, 429 bp, Triticum aestivum
  Clone ID: LIB103-056-Q1-E1-C11
tcgacggggcccctgcagtgtgcaattggcaggaatcctgttagtttgattttcaaaccctttgagagcgatccgtcagagttaaccttctctttttacacctgcttagttaaaaacagactttcattaatattagttgcacaaacgagagtacatcacacggcttaaactcgatcattacaaaagtacgccatcagcaacaccctagctgcgcctacaccattacatacttggctgctaacctatgatacaaatgtcataatacaccctagcaccttgattcagatttgctatcttttctgcggctgctatttcttgctccgatttagggatctattgaggaacagtgtgcaactaggatttgtttcttcgatttggggatggattattatagactgagccgccaccaattgaagagttataatgaaa

SEQ ID NO: 4349 - DNA, 425 bp, Triticum aestivum
  Clone ID: LIB103-056-Q1-E1-C3
cgggtccaggggcaagctcaaaccaatgaggttagcaagggcaaaccactagattgggtttcaggacaaccagtcacagatgagcatggacgccttcagattataaagaatgatgacctcgaagagctccaagaactcggttctggaacttttggacctgtatatcatgggaaatggaggggctctgatgttgcaataaaaagaatcaatgacagatgttttgctgggaagccatctgagcaagaaaaaatgcggaatgacttctggaatgaagcatctaaccttgctgatctgcaccaccccaatgttgtggccttttatggcgttgttctagatgggcctgggggatccattgcaacggttacagaatacatggttaatggctcacttaggacggctttgctgaagaattccaagagcctgga

SEQ ID NO: 4350 - DNA, 269 bp, Triticum aestivum
  Clone ID: LIB103-056-Q1-E1-C5
tgtgtgagcaaggcatgtacattagtatcgatttcgcgagtgaggatcctatgatgttgggcatcctcacatggctggaagacttggatgctcttatgagacaagcatctgatttcggaaaatttcggcctgtctaccatcacaggtcgatgggccatcatattacgtttacgaggatgaagtcctactttgatgcaggcaaccttcttcatgcctcctgtaaccagaatggcttctgcattaacgcagcttaacttgctaatctacaa

SEQ ID NO: 4351 - DNA, 353 bp, Triticum aestivum
  Clone ID: LIB103-056-Q1-E1-D11
gggccacgggactcaatcaaatgaagagaagtcatagagaagatgaaagactcaggtagtctcattcagagtgggacctggccagagtgtcatctcatgtagtgtaatcttgtagctgcgcgcaaatcagactgggaattcacccagaggtgcggtgattggcgcgcgcccctgaagaattttgtagcgttcgatgctaattatttggaataattggttcgggcagccttaaccgggtaaagttgctgtctacaaggctgaaaagtttagaaaattgtgtcaaacctcaggaacaacccctttgtaattgctgaagaagtgggcagttcatctggtattgcaccaaaaaagaa

SEQ ID NO: 4352 - DNA, 368 bp, Triticum aestivum
  Clone ID: LIB103-056-Q1-E1-D2
tcttcctcatataaaagcctacgtaccccgaaaacattcatggttccaatgaaacataatttccaccaccgcgaccttctgtatccgtgagatcccatcttcgagccttcgtcggcgctccgtcggagggggaatcgaccacggacggcttctacatcaacaccatagcccctccgatgagttgtgagtagtttaccacagacctacgggtccatagttattagctagatggcttcttatctctttttggatctcaatacaatgttctccccctctcttatggagatctattcgatgtaaactatttttgcggtgtgtttgtcgagatccgatgaattgtgggtttatgattaagcttatctatgaga

SEQ ID NO: 4353 - DNA, 404 bp, Triticum aestivum
  Clone ID: LIB103-056-Q1-E1-D4
cgggtccacgcggggaccccatggaaggatggttgaacaggaccacgtggagggctggttgaacaagaccccgtggagggctagttgagcagtagcttaagatttctaggatcacaaccaaatgtaaataaaaatatgatatgcatatgatgtcctatgtataacatccaaattgaaaattgggatgttacaaacactcacattctgataatgaagaagataatgatgaggttcatgaaaatactcaaacaaatagtaatgaaccagacaatgatgttgagatagaaccgccagttgatcttgataacccacaacctaaaaataaaagatatgataatagagacttcatcgctagaaaacacggggaaaacaagcgaccagccgagaagaaaaaagcggccgct

SEQ ID NO: 4354 - DNA, 446 bp, Triticum aestivum
  Clone ID: LIB103-056-Q1-E1-D5
attcgcccggtccacgggttatattaagagtgatgagatccacattataatccaacaactagatacccagaacgtccataaccggggacacaactaaccatgattagtttatacactctgcagaggtttgtgcacttttccccacaagactctaatacatccatggtcaaagaaacgagacacagtgtttctgagacaataactctttactctgggtggacagctacacctactttcccctacatctgctagcccacctctaatagaggtctcaaaatgtactcaactatgctagagcccataatagcttgtggatgctcacggaagtttctagcatgaacaatcttatgatccgtttgagcctgggttgcggtccatatgagaatcacacagtattccaggatttccacaggcacaggcatcactgggttccccaagtgccccaa

SEQ ID NO: 4355 - DNA, 436 bp, Triticum aestivum
  Clone ID: LIB103-056-Q1-E1-D6
tcgacgggcgcagattacttcatggagacgtctgtcaaggagtgtggacatgcctggaagtacctgcagaaggagttggaccttctgtcacttgatcttgatctctctgcttgtcgaaaccaggaggcttggtgacatttaatgggggtagcctctgcataaacacctcctcacaacgtctgatttttgaacatcctccactgctactgacatgagatcttgcttctgcccaatggtacgtacctcagtttggagtactgtcatgtcagatcgaagggattcagtctccttctgattgtcaaggacctcggatctcatagctaggagatcctgaatatcagattcttccatggtgcccttgctgcgacccatcgtgaaggaaactgggcagagatttgcttggttgttacctaacacagatgccgctggaaagtga

SEQ ID NO: 4356 - DNA, 413 bp, Triticum aestivum
  Clone ID: LIB103-056-Q1-E1-D7
cggggaaaaagcacaaggcggagaagcgggcgccggcgtccgaggaggccggcggcgaggggaagacgaggggcaggaagaagggcagcaaggccaagaagagcgtggagacgtacaagatctacatcttcaaggtgctgaagcaggtgcacccagacgtgggcatctcctccaaggccatgtccatcatgaactccttcatcaacgacatcttcgagaagctcgccggggagtcggccaagctcgcccgctacaacaagaagcccaccatcacgtcccgggagatccagacctctgtgcgcctcgtcctccccggggagctcgccaagcacgccgtctccgagggcaccaaggtcctcaccaagttcacctcctcctaaacaacttaggcttgatcctcgtcgcctcatgcg

SEQ ID NO: 4357 - DNA, 273 bp, Triticum aestivum
  Clone ID: LIB103-056-Q1-E1-D9
cggggcagaaccacaaggcagagaagcgggcgccggcgaccaaggaggccggcggcgaggggaagacgaggggcaggaagaagggcagcaaggccaagaagggcgtggagacgtacaagatctacatcttcaaggtgctcaagcaggtgcacccggacatcggcatctcctccaaggccatgtccatcatgaactccttcatcaacgacatcttcgagaagctcgccggggagtccgccaagctcgcccgctacatcaggaatcccaccatca

SEQ ID NO: 4358 - DNA, 411 bp, Triticum aestivum
  Clone ID: LIB103-056-Q1-E1-E2
cgggtcacgggaatggttgcaatacaccaccacatggggcaacgttcaacacgtataacgcaaaaagtcgggactccgaattacgaattctgggagcatcctagataattatgtcatcaaaatggcgtaacaaaaggactgtcttggacgcacagactagatactcagtaagctcctatatgcaatccattcccatcatgagataaatgctccaggacttcactacgatgggagagacacggaaatcaagtcccccagattctacagatacgtcgtgtcaactcagggaggttcgacattggcccacacgggtgtgcactaatatataagcgtacatgtcatcacttttaatgccatgcattattgcaaaatcttctgacatgaatgaatgcgatgcgcctgtctcaaaga

SEQ ID NO: 4359 - DNA, 379 bp, Triticum aestivum
  unsure at all n locations
  Clone ID: LIB103-056-Q1-E1-E3
gggtccagcgcggtgttgccatgaacagaataggaaaatgaatattttcgaattattttgaactaggcaaggaatgtttttgacacatttgatgaagatatgatccanaacatttatgagaattttttgggaatttttggaaaaacagaaatataggttgcctcaaaacctagggcaaaaactgccacatggacatgacacataggcanaactgatgagatggcgcctagtcatcacaacccaccacaatcctacaagctatgaccatctatattggtcattaacaactagaaataaggcagcggactaagactgtttgctttgtgaccatttcgtgtaaggaaattacggcctttctgaccaaaatggtcccaatggt

SEQ ID NO: 4360 - DNA, 339 bp, Triticum aestivum
  Clone ID: LIB103-056-Q1-E1-E4
cgggtccacgcgggcggccgaagcaacaactgcagtagtggcggcgcctacccccgcgcgactcctcctcgtctccgcccgccgcgctgctccgcgattcgctaggtcattgtagagcatctccgttcgcaaggtcacctaggagcgcctgctacgcttccaccaccatgggagacgagacctccacttctgcctcaggctcggcccaggaacctgcagcaccggccctgcagggagctgggagtgtcaagcagcagatctccaacttggtggctctgtcactccgtgcgacagtgcctgaagtggatgtagaaccgatagttgaagtttgcacgggaa

SEQ ID NO: 4361 - DNA, 408 bp, Triticum aestivum
  Clone ID: LIB103-056-Q1-E1-E5
gtccacggggacacgcaagaaccctagcagatcgctcgagccctccgccgccgccgcgccttcagctctctccttccttcaccgattcaagatgaagttcatcgctgcctatctgcttgcttacctctctggcaacgccagcccctctgcagaggacctgacatccattcttgagtcagttggttgtgaaatcgacaatgagaagatggaactcatgctgtcccaagtgaagggcaaggacatcactgagctcttggctgctggtagggagaagtttgctgcggtaccatctggtggtggtggtgtggctgtttcagccgctgctcctgctgctggtggtgctgctgcccctgcagctgagtcaaagaaagaagagaaggtcgtggagaaggaagacagtgatgatga

SEQ ID NO: 4362 - DNA, 406 bp, Triticum aestivum
  Clone ID: LIB103-056-Q1-E1-E7
ttcgtcggtcgacgggcggtattgacaccgacactcatcgttatctttgcaagctaatatagccgtaaaagcttctttatcaataatataaccttcaggaatatcaggcatgttttcatcatcaatttcatcaacatgatgagtttcaataatttctttctctctagccctagcaatttgttcatcaaaaaattcactaatgggcacagtagtatcaagcatagaagtagtttcatcataagtatcatgcatagcagaagtggcatcatcaataacatgcgacatatcagaacgaatagctgaagcaggtttaggtgtcgcaagcttactcataacaggagtgaatcaagtgcagagctagatggcagttccttacctcccctcgtagttgagggaaaaatttttt

SEQ ID NO: 4363 - DNA, 400 bp, Triticum aestivum
  Clone ID: LIB103-056-Q1-E1-E9
cgggcatgctcaagatcaaaagaggatagggcggcaactatcctcaccgaaggaacccacaagacccccggcaggatccttgccggggaagcccgcacaccgtggaaagacccttgccgggccacccggcaagaccctcgccaagcgcaccggcagggccactgccaggcccgagccaaccaagtctttgctgccgttcgcatgcagctgccaccccagacagctgggcaggcacctgcgtggcaacatgcaaccttcatggaggctccaccactgcgccacctcagctgcctgcctgccaacagggcaccgcatgcagcgctggccagggcgtgtgtcgaaacgagaacgggcggagacggacgggacagggctcgcacacgtcccccaggccgcgaga

SEQ ID NO: 4364 - DNA, 408 bp, Triticum aestivum
  unsure at all n locations
  Clone ID: LIB103-056-Q1-E1-F1
ccgggtccacgggtgacgtcaacaaacgccggccagcctcggcacagctgcgggtggttatatggtgggcggagtacacgagtgggttccgatgtcaggataaccaccgtccatagctctcatgtgaatgtggcaaggccacaaaacaagttttccatcgccagatatccaacagatcaactggtgttatggatgcttcttaaagatatttttttgtcatttcanacatcaaacaccaactattcacaatggagacaggaaacgtgtagcttctcatgtcaactaagtgagcctgccaattgtggcaatggaaggaggtggcatgtcgcctcattcatgaggctgttagtttcataacagacattttccagttgcatatcttttgtaaagtgttcagactggtttttt

SEQ ID NO: 4365 - DNA, 430 bp, Triticum aestivum
  Clone ID: LIB103-056-Q1-E1-F12
gtccacgggcatagaaaatattgttctctcatgcttcacttatatcattttgagagtcctacaaaacagcatggtaattttcttaaattgtgaaattagtcctaaatatgataggcatccaagatttgtaaaaactttcttataagtgcgttgaatactaagaaaagtttgatgcttgatgattgttttgagatatggaggtagtaaattaaagttgtgctagttgagtaattgtgaattcgagaaatacttgtgttgaagtttgcaagtcccgtagcatgcacgtatggtaaacgttgtgtaacaaatttgaaacatgaggtgttctttgattgtcctccttatgagtggcggtcggggacgagcgatggtcttttcctaccaatctatccccctaggagcatgcgcgtagtgcttagtttttgacgac

SEQ ID NO: 4366 - DNA, 186 bp, Triticum aestivum
  Clone ID: LIB103-056-Q1-E1-F2
gggtccacgcggatgaatgaatccattgtgagaagagcccttgtgatcatgcaccatagggacgaagtggagtacaagagggagcgccatgtgattgtccgcaaggcttgagctgacctgaaccgatggagctaccatggaaacctctggccaactgatgtgtgtgtaaaagtattgctgacactg

SEQ ID NO: 4367 - DNA, 398 bp, Triticum aestivum
  unsure at all n locations
  Clone ID: LIB103-056-Q1-E1-F3
cggtcgaccatccgggtcgactcttaggcgatactcagccagtcccctgggaacacctggcatgtcagcgggcttccatgcaaaaatgtcncagttctcacggaggaactggatgagcgcttcttcctattttaggtcgagtgttgtggagatgcgggtcggagctgcatcggggtcggtcgggtgaatgtgaacaggtttcgtctcgccggacgactggaatgcagactctgtggcgggtttcttcgatcgcagcaagtcactcggatctgcgttttgcttgtattcttcgaactcgaccgctgtcacctgggaatcggcaatcttggggcccttctgatagcactcttctgcctttttccgatcaccggggacagtgattactcctttggggccgg

SEQ ID NO: 4368 - DNA, 391 bp, Triticum aestivum
  unsure at all n locations
  Clone ID: LIB103-056-Q1-E1-F4
cgggtccaggcggctgccaaaaagcggaggcggggcgagctagaaccgcaagtgactccagcaggcctagacttaatcagcagcctccccgatgatatgttgagagtcatcatctccctcctcccagtcaaatatggggcgcgaaccgtcctttcccggcggtggtgccccctatggaactccagccctctcgacctcatcgacacccacgagctctgccatggctatcgcaaaatcttggatgcgttctccaagatcctcgacagtcaccttggtgataacccacaagtataggggatcgcaaccgttttcgagggtagagtattcaacccanatttattgattcgacacaaggggagacaaagaatattctcaagtattagcagttgag

SEQ ID NO: 4369 - DNA, 387 bp, Triticum aestivum
  Clone ID: LIB103-056-Q1-E1-F6
gtcgacggggaacaaacatggtctctgtttgctttgagaactgtaagcgtgtttaacctgacagcgcctgtaattgtaggccctttccgcatacttcacagcttgttgtcttatgaggtgctgcagggcagcaggctggcttgtgccgcctcggtcattattatcatttgtaacttgttagagtgcacattaatctcaggaggacatagacataatacttatgctgctgttgttgtaacctgaaaaaaaaaaaaaaaaaaaaaaaaaaaaaaaaaaaaaaaaaaaaaaaaaaaaaaaaaaaaaaaaaaaaaaaaaaaaaatttataaaaaaaaaaaaaaagaaaaaaaaaaaaaaaaaaaaaaaaaaaaaagggggccccccaaagg

SEQ ID NO: 4370 - DNA, 388 bp, Triticum aestivum
  Clone ID: LIB103-056-Q1-E1-F8
gtcgacgggaaatcttcaaaaaagaaggacttcaagttctagacggcgccgttttgttactgttgctcttccgcttcccaggaggaggatgtttccatttcttcctgtagcctgtactatactctaaatcaagctgtgtatgtatacttagcctctggcaaatgttgaagtgctggatgaaaaaagaaatgaagctctgtagtccatgcatgagaacaagttatgatattaaatgtaactgctagcattattttattgctgttatgaagagtgatgctaagtttgctaaaaaaaaaataaaaaaaaatggaaagcaaaaatagaaaaggagataaaaaaggcatggaaaatttatttccaattagaaagatgtattaggaaaaggggt

SEQ ID NO: 4371 - DNA, 356 bp, Triticum aestivum
  Clone ID: LIB103-056-Q1-E1-F9
cgggcttgagatagacccaagaagccgtacttatcattcgtgatgcatagggttctcctgtccagactgccgtcgtcacgcatgaggagaacgctaatgtgcaggaccttgtcctcctggatgtcatcccaatgtctcttggtcttaaaactgctggaggagtcatgactgtgctcatcatcaggaacaccaccatccccactacgaaggagcaggtcttctcaacctactccgacaaccagcctggtgtgctcagccaggtgtttgagggtgagaggactacgaccagggatatcagcctgctcggcaagttatacctcttctggcatcgcgcctgcacccaagggttttcccca

SEQ ID NO: 4372 - DNA, 391 bp, Triticum aestivum
  Clone ID: LIB103-056-Q1-E1-G1
cgggtccacggggggacggaaattttttctccccaaccagcaaggaagaggaagaggaagcggatcgagtcggcgagagcgagggcgaggacgatggcggcgctccggctagcgttgaggaggttttgcgaccgtgcgctcgggagatcagcgggcatttacgagctcaaggctgccaaggaattccccgacattgatcctgagcatctcaaggctgccaggaaattctccaaacttcgtgtcaaggatgccgatgctacggctctgaatgtctccaagattctccggggcagtccagtcgatggtcataaagatgtaacccttcgtgaagaatgtctacggctctgaatgctacggctctgaatgtccacggctctgaatgtcctcatga

SEQ ID NO: 4373 - DNA, 419 bp, Triticum aestivum
  Clone ID: LIB103-056-Q1-E1-G10
ggtccacgggctggaggaagggttttccccttcttggacccttcggcctccccagttggggcggccttccttttcttcccttcccccgctagagggggaggggtctattcttcctcctcctcatcttcatgggaggagtgcgtcttggagtcgtcggatgagggatctgacacctccaggtggcaggcactcttccgagtccccgtggccatcttcttgaccttcttctccggcaccacatggggtgccgaaaccagcagcttcgccaaacgagcgtccgctgggccttcgggcaaaggagccggatagttgatctgttcggacgtctcctgccaatcctgtcaaaggtaagggagcttagatcccgcatggagtcaaactatgaaaaactgataccctgaaaaaaaaaagagaaggac

SEQ ID NO: 4374 - DNA, 449 bp, Triticum aestivum
  unsure at all n locations
  Clone ID: LIB103-056-Q1-E1-G11
ttcaagggtccacgggcaagaaggagaaaaccatactaccaggacttgaacaagttgatgttggaaaacagatctcctcgcaagtttccacgaaggtggttccaggcgattcatgtaatggcagaatgactaaaagggtggactcgaagtcaaagaaacttgtgagatatccagtaatgaagttgtggcttcggccaagacaattatcactaaagcaacaaaagaagaagcataagaaaaccaaaaagcgtgttaaggacacggccagtgttgattgttctggtgacaacagcagtgagcagcaaacatcaacatcagcaactgtgccgcccaaaactgcagaatctacatctcgtaaacggaaatattcccatgccagtgtaagttctgaaaacaacacccaagcgctcaaagacaggcagcaagctgttggagcaagtantgctggt

SEQ ID NO: 4375 - DNA, 434 bp, Triticum aestivum
  Clone ID: LIB103-056-Q1-E1-G12
cggggagcatgcacgtagtgctttatttttgatgacttataaatttttgcaataagtatatgagttctttttactaatgttgagtccatggattatacgcacttttaccttcccatcattgctagcctcttcggaaccgtgcattgccctttctcaccttgagagttggtgcaaacttcgccggtgcatccaaaccccgtgatacaatacgctctatcacacataaacctccttatatcttcctcaaaacagccaccatacctacctattatggcatttccatagccattccgagatatatttccatgcaactttccaccattccattcatcatcatcatgacatactttacttttgtcatattgccactgcatgatcatgtagttgacatcgtatttgtggcaaagccaccatgcataaattttcatacaagt

SEQ ID NO: 4376 - DNA, 425 bp, Triticum aestivum
  unsure at all n locations
  Clone ID: LIB103-056-Q1-E1-G2
gggtccagacagaacaacaagagtgttgtgtgaatttttgtgatttttcggggttcgtttcgacatttttatgcattaactgagttttcaatgcatttatgtgcataattcaaatttgaactactgcacatgctccagtgcatataaattggttgaaaaatcaaatctttgtccttgggtgcatgcttaggtcccatgcaagaaatgggaatgaatttcaaacaccagggcaccattgattgctagtaaaacattgagatgcctggtttttaaattctagtaaattcaaaactcgtctgaaattcatgaaacttggcatgctatcatggagcgggatcaacatgccgtggtaatttttttcccatttggagcaagtttgggtanatgcttctcacaaaccagagcttctcaaaacaagcatgatg

SEQ ID NO: 4377 - DNA, 362 bp, Triticum aestivum
  Clone ID: LIB103-056-Q1-E1-G4
cgaggtgttccaggtcgtcttccgtcggatcgtggggctgatattcatatcattgatcacgatcatgagattcttatcagcagtcgcggacatgacagtccgtgacatcttcgtctgcagcctcgccttcatgatgtgtggatggggcctgcttcagagtgctcacgctatccatcttgtcgtcgagatggtcgggctgtgggggtctgtgaacgctctcgcccggggctatcagatcctgatggggctcctgctgttctagcacatcgcgttccttgcgtggttcccctttgtgtccgagttccagagctggatgcttttctaccagtcgttcagcagtcgcctgcagatctcccgtatcc

SEQ ID NO: 4378 - DNA, 384 bp, Triticum aestivum
  Clone ID: LIB103-056-Q1-E1-G5
ttcgccggtcgacgggttgcatgaataggatctaattaaattgtgggatgggaagtagttgaggtagtacctattacctgttttattatcaaacctttgggagttacttctacgtttgccattatgctatgctatgctagtagacgtggattgggtgagtgatattcatgacagatgtgagttttttttattaatggtttatctaagatggcaacttaaacacagatctgggtggattgaggtacctgggtattccagggttgcctgtttcttttggaccgccacccaggctcaaagggatcatgagattattcatactagaaactttcctgtgcagccacaagccattatgggctctggcatagttgaataagtcgtgcgaac

SEQ ID NO: 4379 - DNA, 383 bp, Triticum aestivum
  unsure at all n locations
  Clone ID: LIB103-056-Q1-E1-H1
gggtccagacggccaccatagttcaaagggtgggtgctcttggcatggtgatgcagctgccgggggaagatgccgagtttgaactctcgaggaagcagatgctggcgactctggatgtcatgatgggcgggctggtggccgaggagcttatagccggagaaggcggggtcaccactggtccctcaactgatctaagcgaggcgactcagctggcgaccgacatggtcaccaagtatggcatgggcaagcgggtgggctttgttacctatagcaatggcggtgatgctagcagtggcaaggcgaccaacatgagcgagcggatgtcagaactggttgacgangaggtgaaagatttactggacaacgcttacangaacgccaaa

SEQ ID NO: 4380 - DNA, 364 bp, Triticum aestivum
  Clone ID: LIB103-056-Q1-E1-H10
ggtctacagataactacagactgttctgtttttgacagattctgttttgcgtgtgttgtttgcttattttgatgaatctatggctagtaaaatagtttataaaccatagagaagttggagtacagtaggtttaacaccaataaaaataaagaatgagttcattgcggtaccttaaagtagtattttgttttctttctctaacggagctcacgagatttctattgagttttgtgttgtgaagttttcaagttttgggtgaattcttttgatggattatgaaacaaggagtggcaagagcctaagcttggggatgcccatggcacccccaagataatccaaggacatcaaaaagtcaaagcttggg

SEQ ID NO: 4381 - DNA, 304 bp, Triticum aestivum
  Clone ID: LIB103-056-Q1-E1-H2
attccgagtcgacgggatatttagagtccgtatgtgtggggaaacaagagatagggttgatttcagacccctccaccaagggccacgaaattccccctctcttcctccatatatacatcccttaaggcaacgtttagactttgggttttgtttagattaaaagttcgccatagctgcaacttcgcgtacttcgtttgtgttcaacgaccagacaaaggcgtcacagaaccccaccttgatcaataaagctttcatcttatattcgcaatatccagattgcaatcttaggttcttgcatgttctt

SEQ ID NO: 4382 - DNA, 279 bp, Triticum aestivum
  Clone ID: LIB103-056-Q1-E1-H3
attggatgatataatcaatttgatgcttgataattgttttgagatatggaggtagtgatataaagtcatggcaattgggtgaatatgaaattaaagaaagcttgtggtgaagtttgtggatcccgttacatgaacttaggggaaccgctttgtgaagaatttggagcaaaattttatttattgagtgtcctccttaagagtggcggtcggggacgagcgatggtattttcctacaaatctatccccctaaggaacatgcgcgtagtgctttggtttttg

SEQ ID NO: 4383 - DNA, 242 bp, Triticum aestivum
  Clone ID: LIB103-056-Q1-E1-H4
cgcattgtgcttcaagcgttttacgatacgctttgctccatggcgcgggtgcaatccatggatacaaaattagtatactgtatactatttgaaagtcgaaggcggggcttttcctgcgcagtaggtggcagggcagttccacctagtcggttctacatagatacgagaagaccagtgagtacgttgtttcaaacgcacggctgtgtgatttgacaacgagttactgctggacaggtggggtc

SEQ ID NO: 4384 - DNA, 402 bp, Triticum aestivum
  Clone ID: LIB103-056-Q1-E1-H5
attcgccggtcgacgggagtaggaggatggactgctttcccgcccttcagatgcacagggactgggtgagggacgtcgcgtgggcgccaaacctaggcctaccaaagtccacgatcgccagcgcttctcaggatggaaccgtcgttatctggaccgcgccgaaagaaggcgagcagtgggaaggcagggtcctgaatgatttcagaacccctgtttggaggctgtcgtggtcgctgacgggcaacatcttggcggtctctgatggcaacaacaatgtgaccctctggaaagaagctgttgacggcgaatggcagcaagtgactaccgttgagccatagatgttctgcgttctgcctctaggttctttagtaattactatatcataaccaatgtaattttgcc

SEQ ID NO: 4385 - DNA, 382 bp, Triticum aestivum
  Clone ID: LIB103-056-Q1-E1-H7
attcgccggtcgacgggattcacggaaaccccacaacaacatcttgttttcgtgctcgctgttcgcgcttgaaaatggatgtagcaaaaacttcgccgatattagcaaaatccaactatggttgcagcaaagatcatcatcgccgccgtcgcgaggtcatagctctgccttgatggaggtagcacaatatttcgctggtagtaccacaacacatctacggttacagcaaaacttgttatcgccggtgccccacgtccatcctctttgtataaaaaatgaagccggttgtagcaaacaacggagttggttgcagcttttcggcgtcgtccatggcttctgtagtctatggttgaagctttttttgccgccggttgaatctttt

SEQ ID NO: 4386 - DNA, 328 bp, Triticum aestivum
  unsure at all n locations
  Clone ID: LIB103-056-Q1-E1-H8
gcattggcttcaaggtagcaggctgcgttcttctttcaatgcaggagatgcgaccgttgaagaccttggcttgctcctcgactgggagtcacagtaccttggggcactctgcctcnctcncagcagccgtcnccagccccgtctttctactggcctcagcatcaggcctacagcaatttgcccccacagtcttgaagatatgtatgcttcagagatggcaatgtcaccgaggttcaccantgatcaaggtcactcagcctactcancaagccacanatcagccatccttaacaggcttcatcagcagaagggtctcctctcacctgtc

SEQ ID NO: 4387 - DNA, 432 bp, Triticum aestivum
  Clone ID: LIB103-056-Q1-E1-H9
tccacgggctctatccacctaggagcatgcgcgtagtactttctttcgataactaatagatttttgcaataagtatgtgagttctttatgactaatgtttagtccatggattatacgcaccatcacccttccaccattgctagcctctctagtactgcgcaactttcaccggtaccataaacccaccatataccttcctcaaaacagccaccatacctacctattacggcatttccatatccattccgagatatattgccatgcaaatttccaccgttccgtttgttatgacatgcttcatcattgtcatattgccatggatgatcatgtagttgacatcatatttgtggcaaagccaccgttcataattttttcatacatgtcactcttgattcattgcatatcccggtacaccgccggaggcattcacat

SEQ ID NO: 4388 - DNA, 351 bp, Triticum aestivum
  Clone ID: LIB103-057-Q1-E1-A11
cgacaggcaacttccttacagagggtccttcattaagggttcacgttgatccaggggtgcaggctcctccctgggcgaggtgcttggctgagcttgatgtttgtgatgctgtgtagtgaatgatgcagcatatggactgtatcatctgtttgccatgtagcgctgtaagccatgtgtttggtttcagcaattgtttagctgcatcaatttacaccgtgcgtcaagttcatcggtgtcgaagctgacatcgtgtctagaatgcaccttgccttggaactgacgctttcaaactaatcttgtttacctcataatctggtgtagctaaaaacttggtgtgcctaaaaaaaacat

SEQ ID NO: 4389 - DNA, 390 bp, Triticum aestivum
  unsure at all n locations
  Clone ID: LIB103-057-Q1-E1-A2
gggtccacggcggaggaggaaggaaggagatggacttctttgtgacgtgtttaaaactatgtggtttttttgcaaaaaaacaaatacactgccccatggacaacttttcccggacggagggagtactagttaaatctgagctatgggtgtgaagcactgatatgccagtacatttgattgtgacctattctaattttgtacctgaactttttttagaaagggttgtacgtaaacttaatgtgctagcagaacttattgtgttgtctatctgttttctttgcacaacattcaagatatttccccatcattgataaagacgatgaaccgttatgtacgacttcgttggtttcaacatagcccttcncgtagtgatccgctgcttccatcctg

SEQ ID NO: 4390 - DNA, 391 bp, Triticum aestivum
  Clone ID: LIB103-057-Q1-E1-A4
cggctgtagtggaggaggcggtgccggctggccagcaggcggaggaggaagcaatccttcacccttggagattcaggttagccagtgacacttcagggtggtgtggttggacggcttcgcgccactatggaacttgtagggagcatcaagggttttctcataggagaaggcgggcagccaagcaggcttgccacccttctgacgcttggggccgggttgaccctctggctgctgatcttccactgacgccacttgccagctggtggaagccggctgcggggccttgcgcttgttgtccttctgttgctggcaccgactgttatcaccaacctgcgtctggggagccatagggagcactttcccagatgcgtccactcggagctccgacttc

SEQ ID NO: 4391 - DNA, 411 bp, Triticum aestivum
  Clone ID: LIB103-057-Q1-E1-A5
ggaacttgatgcccctgagatgaatgtgggcagcttggatgatcatgtcgagatagacatcaacagtgacgacgacgacctggagtacacgatgaacaagatgtctataaccccgcaccactctttcttacaccagatggccatggacagcgacggcggcctcagcatgccagcgaggatcagaccatcgacaagccctccgtcgcggtgggccatgtcaggagaatcaccatagatggaagaaacagctggatacttggggctgtacaaggagggtatgactgtcaaactgatacggggagcttagtttgtagtggggtcaaagaacccattcatttgcagtgtattcagcccaagtaattcgaaaattttgggttgagagtgtgaagtacagatgttgttagaaaacgt

SEQ ID NO: 4392 - DNA, 321 bp, Triticum aestivum
  Clone ID: LIB103-057-Q1-E1-A7
cgggggatacgagaaagattccggtcctgtttcctggcgcaccgcggcgaccggccgacgagcatccaccgcctccaagccgcctctcctcactgcagcagcgtagcgacttcttcctccagctgcagagcctctccgcatcaagagttccttgccatggagcatggactgtggtcgagcggagctagcgacaagaacaaggccatggttgagcaactgcagagatatggggtaatcaagtcgagcaaagttgcggaggtcatggagaccaccgatagggggctgtttgtgcctcagggtgggtctcccaattttgatagc

SEQ ID NO: 4393 - DNA, 200 bp, Triticum aestivum
  Clone ID: LIB103-057-Q1-E1-B1
caagaggagcagtggcagggagagaaggtgaagactacgccatgtgagttgctgatgttgtgccttatgcggtggggataagggatgtgtgatgtgcttgtgtggcgaaaggcgatgagtggcttttcctttttgcgggaggctgttcatttttgtctattctagttttatattcacgatacatacaattagttatcacc

SEQ ID NO: 4394 - DNA, 356 bp, Triticum aestivum
  Clone ID: LIB103-057-Q1-E1-B2
tcacgggagatatgacgcacgtgacgcaagcgttcgtatacacgcgcatatactcatccctatgaacgcatacacgcacactctatccctatgagcatcttcgaaatactgattcgacatatcatttttaaaacttacgaagtcatcgtagtcacctacgtctcatcccactgaatacgcattgccagaaatcttgaagtaaatccaggaacacatgcgggcaccaagacttaattctgatgggttgggataccacagttcctctaaccatccaatcacagggtgggttcgctacgaagcacgttattgaaatactacctccctctgggtgcacaggttatacacgtagttctacg

SEQ ID NO: 4395 - DNA, 55 bp, Triticum aestivum
  Clone ID: LIB103-057-Q1-E1-B4
agaccaccgcaggcaagaagcccaaggccgaaaagcggctgccggcgggcaaaac

SEQ ID NO: 4396 - DNA, 352 bp, Triticum aestivum
  Clone ID: LIB103-057-Q1-E1-B5
cggggaatcggcagagctcgcccgctacaacaagaagcccaccatcacctctagggagatccagacctccgtccgcctcgtcctccccggggagctcgccaagcacgccgtctccgagggcaccaaggccgtcaccaagttcacatcctcctagactgacggcgtgcagttggtttctgcatctgcatctgtactcttgactctgcttatctatctatctgcaagtagtggtggtggtagtagtacctgtgctgggtgattgccaacgctttgttggcccgttggttgtaagagctgaagttgctgctttggcaaactgaaatctatctagaactgaagttgtggtcctaaa

SEQ ID NO: 4397 - DNA, 379 bp, Triticum aestivum
  unsure at all n locations
  Clone ID: LIB103-057-Q1-E1-C1
cgggtcgacggcaacataaaaaggaaaatcaagagatctaatggaggacaaggtggaagaaccaaaagacatgaaaggaagccatagaatccagaacccacggggatgtaccttattgtgtaatggtggtagctcagcgccataagacaacacacatcgaagaagaacctgaagcggcgattgtacgttttaagtctcacaatatccccctcagttgaggagacaattgatgatgtcaaagaggtgtgtantgtgctccatgttgcgcatgtggcgcttcttcttgaagcaaccagattcacgtgaccatccctgttgcagtagctgcagtgactgcgggagtgacccttgccaacagaaggagaaggcaagaatggtg

SEQ ID NO: 4398 - DNA, 280 bp, Triticum aestivum
  Clone ID: LIB103-057-Q1-E1-C2
gatcgccgagcctagccactcccccgccgcatctggagcgacctcccaccgaggtaaacccccaaaacctagtcgccgtcgccggcgccgccgcagccgcagcagccatgaacgccttcaggttcctcggggacatgacccacctcttctcggtcatcgtcctcctcctcacgatctacgccaccaggtcatgctcaggggtgtcaaggaatacccaggagctgtacctggcggtgttcgtggctcgctacctcgacctcttcactgactacatctcgct

SEQ ID NO: 4399 - DNA, 160 bp, Triticum aestivum
  Clone ID: LIB103-057-Q1-E1-D1
gatggttgagcaggaccacgtggagggctggttgaacaggaccccgtggagggctagttgagcagtagcttaagatttcgaggatcgaagcccattgttgataggattttgatatgcatatgatgtcctatgtatagcatcgagattgataattgggatg

SEQ ID NO: 4400 - DNA, 351 bp, Triticum aestivum
  Clone ID: LIB103-057-Q1-E1-D4
gcaggccaccaggtccaccaggaatgcctgctattgagtacatgtggctccgaactcccattttggtgaattgcactgattctgcaccgtcacttgccttgtaaccaatgacgccgtgctggatcagcatgtaggtgtatccaagtgtgtagaatcttgtccttttacttagcccgcgcacttcgcagtcttgcactatgaaccatattgcgcagccgggttacactacatccgacaggatgacaataggccatgtacacatatggttaataaaaaacgcttgcaatttaattacctactataccaccgtcctggtttaagtatgatttaactaataaaatatgaatgcat

SEQ ID NO: 4401 - DNA, 236 bp, Triticum aestivum
  Clone ID: LIB103-057-Q1-E1-D5
gacgggccaaggcgagtcgtcctaggaggaagcaagggatgcgcggcgcggccggggcggcgttgatgcgcgccgcccgtgctctctgcagatctgactgagggtcagcaagttttggaagataatgcacaaacttttaaattagtttcttcgtttattctcttagattgattctcttggggtagcactgatagctattccctccgttcggaattacgtgtcgcagaagcagaggt

SEQ ID NO: 4402 - DNA, 410 bp, Triticum aestivum
  Clone ID: LIB103-057-Q1-E1-E11
acacggctaaccatgattagattgtacactctgcaaaggttggcgaactttccccaaaagaatcgatttcctccgttggatttcccgcacttcatgctgtttgagaaacagatgaccgagacacagtctttcagaagcattaactctaactccgggtagacagtaccaacctacatccctctacatctgcgagcctaccacttgaagaggtcatgcaacttactcaactatgttagagcccataatagcttgtggctgcacacggaagtttctagcatgaaatatcttagatccctttgagcctgggtggcggaccgtaggattgtcacacgggtactccgggatatcctaggacaacactggattctccaggtgcccaaacaagcaatccacctagatgtgtattaaag

SEQ ID NO: 4403 - DNA, 417 bp, Triticum aestivum
  Clone ID: LIB103-057-Q1-E1-E2
gggtcgacggcattctgctactgatatagatgaaggagaggatgaggatgaagaagatgaagttccttcagcagtgggatatggtgctctgtatctgttgacagcttttcctgtcattattggaatatcagttgtgctgatccttttctacaactctctacagtagcatctgctcacctttgtttctgaagaagatgccgcctttttcttgtaaagccgagttacaacgctgctgaatgagcacccctttcttcgtctcatagtaaaatagtttctgcaatggtatgacaacattgtaaagccctgaggttgtacactacacgaaaaaggaaaaggtcttgaagtattggctttttctaggaaactgaaagttgattaagaaaaacaagggaacccagtcaacggaaaaagcggcgc

SEQ ID NO: 4404 - DNA, 417 bp, Triticum aestivum
  Clone ID: LIB103-057-Q1-E1-E3
ataccatatctgaagcgacccgacccgaatggatcaagtgctctgtgctcaggtgtcatccctggatcagtaatgctgacaccacacagtacatcgaaggatttatagcagagtggcaatcacacacttattacatcgttgtctcaaagagaacttattacaataaatatggcttaaggccatctaataacgataacagcggaagactcggaagataaatgggtccatcaactccaacggcatcactgagtatagaaccacgacctaaaagcaccttactcgtcgtctgaaaagtctgcaacatgaaagttgcagcccgaaaacgggtcagcacatggaatatgctggcaatgtaacacatagagagtaatggaatgaaacaactatactatatgcatatatggccggtggaaaact

SEQ ID NO: 4405 - DNA, 392 bp, Triticum aestivum
  Clone ID: LIB103-057-Q1-E1-E4
cggccaagaccccatctcacgaatcaggcccaacttggcccaggagataattcaaacgtaacttcctggtcgcccagatctcatcgagacccagtgccggcgctggcgccgccgtcagccgtttcttcttccggcgatcttcgacgaccttccaagatcccacaaagtcaccgagagtaagagcagtgagacgcaccttaggtaatggtcccttccatggcctgatcgctgtcgtcgccgttctctgatgaacaactcgccggaccatctcgtttttctctcctgcatgtaaaccgatccttgtcggatcatcaaggggaatcaccttgtcgacagttaatgacacgccgtcctcatcgtaactgaatggaaaaactcgcagatcaagtcag

SEQ ID NO: 4406 - DNA, 392 bp, Triticum aestivum
  Clone ID: LIB103-057-Q1-E1-E5
tcgacgggaagaacggcgagccgaggaggacaattagctacatggctgagcgggtggtaggaactggttcatttgggattgtcttccaggctaagtgcttggagactggagagactgtggccatcaagaaggtgctgcaggatcgccgttacaagaaccgtgagctgcagcttatgcgctccatggaccaccccaatgtcgtctctctgaagcactgcttcttctcgaccacaagcagggatgagctgttcctgaaccttgtcatggagtatgtccctgagactctataccgtgtgctcaagcactacagcaatgccaaccagcggatgccgcttatctatgtcaagctttacatgtatcagctttttagagggctagcttatgttcatact

SEQ ID NO: 4407 - DNA, 371 bp, Triticum aestivum
  unsure at all n locations
  Clone ID: LIB103-057-Q1-E1-F2
gggtcgacgggtcaacacaaatgttctcttaacattgtgccctcaaggttgctgacatagacatgcccatgatcaggaaaacataaccatcatgcaacacttgagctagtcttagaggccagactangaatacattttaccgtttattattccacatgtgcatatgagtccttcctccgagcctcgtggttattgcagactcgagaaccataacagttatagcatggaacataaacataattatgaactcggagataaataatatcatttattattgcctctagggcatatctcctacagaaaacacacaaaaaagtataagaatacaacacagcacatttagggcatcactaacaaaaaggaagctgttg

SEQ ID NO: 4408 - DNA, 410 bp, Triticum aestivum
  Clone ID: LIB103-057-Q1-E1-F3
cggtcgacgggtaaactgaaagtgataaagaaaaacttttacaaactctgtttgctcttgttgttgtaacatgaaaagccagcattcaagtttcagcaaatattatgaactaaccatactcacaataacacataggtctcacaattactcgtatcaatagcataatcagctagcgagccataataataaaactcggatgacaacactttctcaaaataatcataacatgatataacaaaatggtatctcgctagccctttctgagaccgcagaacataaatgcagagcacctttaaagatcaatgactgactaaacattgtaattcatggttaaagagatccagtcaagtcatacccaatataaaccaataataatgaatgcaaatgacagtgtgctccccagcgggtgc

SEQ ID NO: 4409 - DNA, 412 bp, Triticum aestivum
  Clone ID: LIB103-057-Q1-E1-G2
cgggtccacggcgaaacgtaagaagataacgttcgcggatgaagctggaggatcgctctgctctgttaaggtgtttagtgatggacagacctctccttctgcatgccagggcgagttatgaacatcattttggctgatagtgtcaggcatttctttcataataagttggttttgataatgaagaatcaaaaaagatggccctggttttttttgttcaaagagagatagatggccctagagttgggaaccaagtaatgggggaatgcttctgtgtcattgtgtctatacttttttcttctagcagtgtatgtttagatggttagagtccatgtgaagtggcttctaaactgttccatcagaatgccacctgttgtaatttgtaaacaagaatcgacttgctgcagtttgatgt

SEQ ID NO: 4410 - DNA, 401 bp, Triticum aestivum
  Clone ID: LIB103-057-Q1-E1-G4
cggctcgacggggatataatcccatcagagccacttatggagtgcctaccaaagatgacaatacctagatctatccttgcttttatgcctacctaggggcgttaaatgatagcgcttgttgggaggcaacccaattttatttttagtttctttgtttttgcttctatttaggaataagtaatccatctaccttctgtttagatgtggttttatcttttaactagtgtttgtgccaagttaaacctataggatcttcttggatgatagttatttgatcttgctataatttccagaaactttctgtgtcacgaaaaaaattgttaaaaatcaccagaatgtgattccaatgctactgattaataaaaaatttggctaagtattcctaatttggctgaattttt

SEQ ID NO: 4411 - DNA, 301 bp, Triticum aestivum
  Clone ID: LIB103-057-Q1-E1-H10
gggccgacaagactatgcagtcatcaagagacgcagccgagagaccgatgaaagccgaatggagacggtgaagacgcggatcctctgttccatttgagtagcgtggcgacggacgtttgggtggacggcagcttgctcctctgattgttttgcttctgatgtaaaaaatgttctctctggtctgctgccgcgacatcaaggggacctgcttaatttgttgtggtgttgcctacctggtgcctgagtttgacttaattttatagggttttgcgacggtcctgccgcctttggcttgtgtcct

SEQ ID NO: 4412 - DNA, 82 bp, Triticum aestivum
  Clone ID: LIB103-057-Q1-E1-H2
aatcttcagaaaaaaaggacttcaagttctagacggcgccgttttgttactgttgctcttccgcttcccaggaggaggatgt

SEQ ID NO: 4413 - DNA, 82 bp, Triticum aestivum; identical to SEQ ID NO: 4412
  Clone ID: LIB103-057-Q1-E1-H6

SEQ ID NO: 4414 - DNA, 362 bp, Triticum aestivum
  Clone ID: LIB103-057-Q1-E1-H8
ggggctctcttgcatcacttatatctatttagagagatgacaggaattggtcattcacgtggttagtcataaaatcctacttaaaacttgtagatcactgaatatgatatgtttgattccttgcaatagttttgcgatataaagatggtgatattagagtcatgctagtgggtagttgtggattagtagaaatacttgtgttgaggtttgtgattcccgtagcatgcacgtatggtgaaccattaggtaacgaattcggagcatgaggtatttattgattgtcttccttatgattgggggtcagggacaagcgagggtattttccaagaaacttatccccctaggggaatgcttagtattac

SEQ ID NO: 4415 - DNA, 431 bp, Triticum aestivum
  Clone ID: LIB103-058-Q1-E1-A10
cgacggtagaggagcccacatcaacctcaaggtcaaggggcaggatggcaatgaggttttcttccgcatcaagagatccacacagctgaagaagctgatgaacgcttactgcgaccgtcagtcggtggttctcaactccattgctttcctttttgatggtcgtaggctccgtggtgagcagacccctgatgagcttgagatggaggaaggcgacgagatcgacgccatgcttcaccagaccggagggtgctttcctggcccttagaaggagcttgctgcagcctggctgttctatgtcgtatgctacctttagaactagagtaaaatgtaagaagtgaaagaacttgtgaggctatggttctgtgccatagcctgagggggggtctggaggtgaaacaacatcggagtactgttgatgtcgtgactgaact

SEQ ID NO: 4416 - DNA, 418 bp, Triticum aestivum
  Clone ID: LIB103-058-Q1-E1-A11
tacggtcgaaaatacggggccaagtcctactggcaacggtagaggcgctgacatcactctcaaccccaaggttccccatttcgctaaccggaatccggacttgttgttcctgcaattcaactagaagaagcacaattccatgtgctacagcctcaatgtcaatgtcctccctttcttcaggttctacaggggagctcagggcagggtcagcagcttcagctgcaccaatgcaaccatcaagaagttcaaggacgccctcgcaaagcactcgccggacaggtgcagcctcggcccggcacgggggctcgaggaggcggagctcttggctctggctgcaaacagggacctggaattcacctacaacgagaagccgacgctggtgccgatcgccgaggccatccaaatggaagctgcctcc

SEQ ID NO: 4417 - DNA, 393 bp, Triticum aestivum
  Clone ID: LIB103-058-Q1-E1-A12
gggtcgaggcggattactacagaaagttctatttttgacagattaggttcccaatgtgttgtttgcttattttgatgaaccaatgattattatcggagggtatgacccatagaaaatttggaatacagtagatattacaccaatatgaatttacaaggagttcacaatagtaccaaattggggattaatttcctaatacaaacggaccttacaattttccggtaaatttttgtgttgtgaagtttcaagttttgggtaaagattcgacggactatggaataaggactggcaagagcctaagcttggggatgctcaaggcacccaaatgtaatattcatggacaaccaagagcctaagcctggggatgccccggaaggcatcccctctttcgtc

SEQ ID NO: 4418 - DNA, 400 bp, Triticum aestivum
  Clone ID: LIB103-058-Q1-E1-A3
tcgacgggcgagaacaaatgagattatctgttgagttttgtgttgtgaagttttcaagttttgggtaaagatttgatggactatcgaataaggattggcaaaagcctaaccttggggatgcccatggaacccaaatataattcaaggacaaccaaaagcctaaccttggggatgccccggaaggcatcccctctttcgtcttcgtcaattagtaactttacttggagctatatttttattcaccacatgatatgtgttttgcttggaccgtcttgtatgatatgagtctttgctttttagtttaccccaatcatccttgctgtacacaccttttgggagagacacaacatgattcggaatttattagaatactctatgtgcttcacttatatcttttgag

SEQ ID NO: 4419 - DNA, 331 bp, Triticum aestivum
  Clone ID: LIB103-058-Q1-E1-A4
cgggtccacggggaggggcctaagctctgttcgtcgtcgtctgttagtcgtcctcttagcctgatgtgttcatcggtggaaatgtgcgtgcaattgtttgttcgtgtcttggcccatgtattgtgtctgtcctgaggtcacaatcttgctgtcatcattacctgaaatgaaaatgttgcaatcggttctaagaaaaaaaacattaaatcaacaacaaataataacattaaatgaaaaataaaattttaatcaacacactaaaaaatgattttgcatgaaaaaaaaagggggccccccaaagggttcaagcttaatttacccttgaaagcaa

SEQ ID NO: 4420 - DNA, 406 bp, Triticum aestivum
  Clone ID: LIB103-058-Q1-E1-A7
ctgtgtaactgaatctatccaggggctggcatttttcgataaagggtgaattttattgactcgaaataaagcatcaagttgatataaacacgatgacaacatacacggcctctgcataattaagacgcacataaccaataccaacacacacacaatgtacccgctagcaaatagcaaggccatatacgaccacagcattgcataagcgagagaaaaacccgaagcgaagcgaacaaatctgcgatcgacaaactacaacaatgaccatatccacaccaaccatctcatgatatcataaggacaacggggttcttcaacagcaacgccttcatgatgagagcaacgctcgagagccgccgtcatcggattcaaccaccaaaggtaagactctaggttttcaccctga

SEQ ID NO: 4421 - DNA, 393 bp, Triticum aestivum
  Clone ID: LIB103-058-Q1-E1-B1
gagcatgcacgtaatgctttatttttgatgacttataaatttttgcaataagtagatgagttctttttactaatgttgagtccatggattatacgcacttttaccttcccatcattgctagcctcttcggaaccgtgcattgccctttctcaccttgagagttggtgcaaacttcgccggtgcatccaaaccccgtgatacaatacgctctatcacacataaacctccttatatcttcctcaaaacagccaccatacctacctattatggcatttccatagccattccgagatatatttccatgcaactttccaccattccattcatcatcatcatgacatactttacttttgtcatattgccattgcatgatcatgtagttgacatcgtatt

SEQ ID NO: 4422 - DNA, 429 bp, Triticum aestivum
  Clone ID: LIB103-058-Q1-E1-B12
ttccatcaatgcaagcctctctaataccgcgcacctttcaccgatatcatacacccaccatataccttcctcaaaacagccaccatacctacctatcatgacatttccatagccattctgagatatattgccatgcaactttccactgttccgtttactatgacacacttcatcattgtcatattgctttgcatgatcatgtagttaatatcgtatttgtggcaaagccaccgttcataattctttcatagatgtcactcatgagtcattgcatatcccgacacaccgccagaggcattcacatagagtcatatttggttctaagtatcgagttgtaagaaaataaaagtgtgatgatcatcattattagagcattgtcccaagtgaggaaaggatgatggagactatgattccccacaagtcgggatg

SEQ ID NO: 4423 - DNA, 373 bp, Triticum aestivum
  Clone ID: LIB103-058-Q1-E1-B2
cgggtccacgcggccacgtgacataggatcgctctatgcaccccgtgtcagcagcttccctgagaagagcttctaccaggcaacaccagagaggcacccatacccttacgaaaggcagtttgtgtacggcgctgaggcccaccaccaccctacgatgatgaacgcggctccctacaccatctcacccgcccacacgccgtactacggtaatggctacccggtgcagtaccagataccttacatccactaatgggggagagctacaatggctctttccaaactagccctagcttttaaccttccgctgttgttgctattgtaccaactcatctaccaattttgcctagctgaaaatagttggaccactcgcttg

SEQ ID NO: 4424 - DNA, 379 bp, Triticum aestivum
  unsure at all n locations
  Clone ID: LIB103-058-Q1-E1-B3
ggccgcacacctaagggagttcttgatgcagcgggtggctccgcttcaggcgcactcatgccccttacggatgcttggggtgtagacgacaagcttcacctgaatctggtggctttgactgatgaggacctggccgcatctctcctcctcttggtcggggatgactaggagtatccgccgagtgccactgtccccttgttactccgcaaggacagggcgcaggtggtggctactatgcccacatttgatgggcgcgtcctggtgccactggcaccccttgtggtccgggagcaacggcgccggtggacgcgtcttcgggcgactccctcagangaggaggtgaggaggaagacgaggagcgtgactcggaggtgacccc

SEQ ID NO: 4425 - DNA, 421 bp, Triticum aestivum
  Clone ID: LIB103-058-Q1-E1-B4
gacccaccattcacctacgctcttcgcttcctccgccgctaccttcccccggtcttctcgcttcagatgagttaacgtagatggctgacgcagaggacattcagccccttgtctgcgacaatggaactggaatggtcaaggctggtttcgccggagacgatgctccacgtgcagttttccctagtattgttggccgtccacgccacactggtgttatggtagggatggggcagaaggatgcttatgttggtgatgaggcccaatccaagaggggtatcctgactttgaaataccccattgagcacggaatcgtaagcaactgggatgacatggagaagatttggcatcacaccttctacaatgagctccgtgtagcacctgaagagcaccctgttcttcttacagaggctcctcttaaccc

SEQ ID NO: 4426 - DNA, 426 bp, Triticum aestivum
  Clone ID: LIB103-058-Q1-E1-B5
gggtcgacgggactgtgcaaagaaagaggaggaagaagcgcgacgtgggccaagcggatcacgtcatcaccaacttgaaacagaggcagctccacaggatgcaagctaagatttgcgtgcatgcaacgtcaaaacactactaaatgttcacctagctgcatgtcattggccgatgatgaacaacttcatgactgggaaatctcgggcgttacacaagttaatgccctagtatcacaccggcatttggacatatggcgtactagtgaaaatgcactcatagatggcatttcccaagatgtgcgcattcggaagtgagactggaatgctcctggtctcggcgcatgaaccgtcggtggagtcgtggttagtcccagcgtgactctacatttgccagatgctgatagcccggtcctttcactttcctcc

SEQ ID NO: 4427 - DNA, 399 bp, Triticum aestivum
  Clone ID: LIB103-058-Q1-E1-B9
cgggtacggttacgaaatcaaattagtctctttcagtctagtagtaaaattaatcattgtttatatatcaatgcatgaatgacagtacaagtttgttatagggcttaaagaatagatggtttacattcaattcctcgtcggaccggcactcagtacttatcattacatggtaaaactatcaattgcacttggtggttatcacagagttgagatcaagatactaacacaaaatcatagtttggtggtggattacttcatattcatcatggaggcagcggagaagttaatggagaggtcggagatgtgaccaagagagtttctggttgcagtttccggtctaatcttcgttcggcggcagccttctaggttttttgtctcatattacccaacctaatttgc

SEQ ID NO: 4428 - DNA, 430 bp, Triticum aestivum
  Clone ID: LIB103-058-Q1-E1-C1
gggtccacgcgacatgcacaattgatactcttgcattcaaaatcattagtcttggatgatttaaggttctattatgaagtaaaatatgtaatattcataaatgaatacaacgggtacgcaatttttgaaatggaggctatgtaatcatatgaggtaacacttttaagtagcggactacaatatccatttctttttgtgcgcctctacactaacacgtcaatgcattatgtttaaagtaaataaccaattgcactaaattatctatttacacgagaaatacataggctgagcgtttgatcccttttttgtgatcgcgccactacacccgtacgattggccgcgcccgcgtgaatgtccaagttatcggtgcatcatcccgagttattgtctttttttctggggtggacttcacaccagttattaactgctg

SEQ ID NO: 4429 - DNA, 434 bp, Triticum aestivum
  Clone ID: LIB103-058-Q1-E1-C10
gggtcgaggcgaagatggacgccatctactcgacctcgtcggcggcggcgagcggctggggctacgactccctcaagaacttccgcgagatctcccccgccgttgcagtcccacctcaagctcgtttacctgaccctatgctttgccctggcctcatctgccgtgggtgcttacctgcacattgccctgagcatcggtgggatgctgacaatgctcgcgtgtgttggaaccatcgcctggatgttctctgtgccagtctatgaggagaggaagaggtttgggctgctgatgggtgcagccctcctggaaggggcttcggttggacctctgattgagcttgccatagactttgacccaagtatcctcgtgacagggtttgtcggaaccgccatcgccttcgggtgcttctctggggccgccatcatcgccaagcg

SEQ ID NO: 4430 - DNA, 347 bp, Triticum aestivum
  unsure at all n locations
  Clone ID: LIB103-058-Q1-E1-C12
tcggcggggccacacagagtaattcctcaattggacccaacacaaaggccaaattgtatggtgtacaagatgcaggaaaaggagaatttcacatacccaacagttaaaggctttggtcctcttccaaaatctaccttcattgcaaatgcaagagactcaatcccagtagcaagagtgacaacagcaatggcaagtggcagggtcagaagaaatgcagatgcagcagcagaatctagtgccgggaaaaggcaagctagangagggactagagctccaagaggaaggaggagtgctggaagaggaggagctacagctccaataggagggaagagtgctggaagaagaag

SEQ ID NO: 4431 - DNA, 425 bp, Triticum aestivum
  Clone ID: LIB103-058-Q1-E1-C2
ggtcgagatatccgggtcgacggggggacaaaattgataatagcgacaagaaggaaggggcttccgattctgtggaggaatcggggaaagcttctgaagagaaggcccctgagaacactgatgccaaggaagagaagtcagatgatgctgaggagttgaaagggtcagatgcacaatctgttaaaaaggatgataaaagcccttcagaaaatgacaaggagccagtttcaagggaggacttcaaagaatattttgccaaatttggcacagtgcggtatgtggacttcagtaagggggatgattcaggataccttaagtttgaggaatcgacggccgcggaaaaggcccgtgcatttgcagctcttgcggatgaaggtggtttggttatgaagggccaccttgtcactttggaacctgtgtctgga

SEQ ID NO: 4432 - DNA, 436 bp, Triticum aestivum
  unsure at all n locations
  Clone ID: LIB103-058-Q1-E1-C3
gggtcgaggcgtacggctaagagaagaccaccagaattcaaggggcaggaagaagggcagcanggccaanaagggcgtggaaacttacagattcaaaacctcaaggggctgaagcaggtgcacccggacatcggcatctcctccaaggccatgtccatcatgaactccttcatcaacgacattttcgagaagctcgccggcgagtcggccaagcttgcgaggtacaacaagaagcccaccatcacgtcccgggagatccagacctccgtccgcctcgtcctccccggcgagctcgccaagcatgccgtctccgagggcaccaaggctgtcaccaggttcacctcctcttaggctgttcgtcttcctgtgtctcgtagttagctgttcgggtgtgtttgtggccgtgttatcctgtaagaatcgcaccgcgatgttt

SEQ ID NO: 4433 - DNA, 287 bp, Triticum aestivum
  Clone ID: LIB103-058-Q1-E1-C4
tactccgaagggtatctggcgttacatcctgacacacctgaccccattgcggcggatctggacaaatgggtggtgttgggcatggggccaaaggaccacggtcgggaggcggttctcgatacggtgatcactccgtcaatcccttaaacacagctccttcggatcaacccgaccctaatccagcccactatcacgcgcataagcattgcaccgtcactgtccccctttgattaccaccaacctgtacctatttcccctttgagctccattgttccctttagtttccg

SEQ ID NO: 4434 - DNA, 242 bp, Triticum aestivum
  Clone ID: LIB103-058-Q1-E1-C6
ggtcgacgcgccgggaagacagcgacgagcctgaggaggagcggctgctacggaggctgctagcgctctaccgtgcccgccaagcaaagctggagtcctgggaagcgctcgtcgcgaaggcgagcgtggacatagagaattgcgcggaggagcttcggggtcttcgccaggaaactcttcgggccttggcagacgagcgggagcagcttgcggaggagcggaaaggcttcctccttgagaaa

SEQ ID NO: 4435 - DNA, 431 bp, Triticum aestivum
  Clone ID: LIB103-058-Q1-E1-C9
gggtcgaggccaagctgcagtcccagtgtaaacggttgaacttgcggatgggcggtgaggcccgtagggagttgctgtataacatcgaatacagtgccgagtactgaagcagtgagtactgggcaaccttccctgatttcaacatctacctgttatcagtacctcagccgcagtcatttttactgattatgccttgtttgctgattttgtttcttccagtttgattttgatgatgccggtgttctttcaatcaagtaggcacgtgtagtgtttgccggtactcgaagagcacagaggctgtagtctgtaaattatactttgtaacagttttcctaatcattcttcagtatcccaggcttccttttttcgctggagagacaggatgagattttatttgttaggatttcagaataaggtcctaatacatttgt

SEQ ID NO: 4436 - DNA, 89 bp, Triticum aestivum
  Clone ID: LIB103-058-Q1-E1-D1
tgccatccagttgctggacacgatccagctcgctgaggcggacgagttcgaggtctatatgaaggacctggaggccctgtgtaacccca

SEQ ID NO: 4437 - DNA, 344 bp, Triticum aestivum
  Clone ID: LIB103-058-Q1-E1-D10
gagtcggacaagatcgcccgctacaacaagaagcccaccatcacctccagggagatccagacctccgtccgcctcgtcctccccggggagctcgccaagcacgccgtctccgagggcaccaaggccgtcaccaagttcacatcctcctagactgacggcgtgcagttggtttctgcatctgcatctgtactcttgactctgcttatctatctatctgcaagtagtggtggtggtagtagtacctgtgctgggtgattgccaacgctttgttggcccgttggttgtaagagctgaagttgctgctttggcaaactgaaatctatctagaactgaagttgtggtgc

SEQ ID NO: 4438 - DNA, 382 bp, Triticum aestivum
  Clone ID: LIB103-058-Q1-E1-D11
gcaaacgaaggaattgttccctgggggcttgccaaaaaaacccaaaaggcaaaccaattggaaaggccggtatggaaggttggccgggaagggcaacttcccaacatccgttacaattccccacccaatgggcaaggtcggaatgtgcttccaccctgatcaggacaggatcatcactgttcgtgaatgcgcccgatcccagggcttccctgatggataccatttcgctggcaacatccagagcaagcacaggcagatcgggaacgctgtgccgcctcccctctcctatgcgctagggaggaagctcaagcaagccatcgacgccaagcctcgactggcttaagttcactgcactgcatgatacaagtcccgtcattttttg

SEQ ID NO: 4439 - DNA, 420 bp, Triticum aestivum
  Clone ID: LIB103-058-Q1-E1-D3
gggtccacgcgacaggactaatgagtgaaatgcggtaaagatgggcagttgctgaaatgttccagctgcttcttagccgcccatgctacctgttttggttcatcggtgacattcgatgactctggccactttgattgccctgtttgctattgccgtaaagccgctaaagcattggaaaaggctaagaaaacatactctgaagctagaaaaaaattatctgttttctgcagcggctggaagcaattttctaaggaacacagtgagctgatgaatggctttcacacagctaaaaagcaaggtaaccatcagtctgaagcagctgagctatgtcgcaaggatggagagcctagtcatctgaaagaaaatggtacaagtgatgcttgtcctgagaatgcagtcaccacaaagacaaccattttt

SEQ ID NO: 4440 - DNA, 374 bp, Triticum aestivum
  Clone ID: LIB103-058-Q1-E1-D4
ggggcctcaaatacgtcaatggcgtccacgccctccctcaccctcctcctcgctcttctgctgcccctcatccctctcgccgtcgcagctccggagaagcacctcgtgacccacctcccgggcttcggcggcgccctcccatccaaacactacgccgggtacataaccgtggacgagagcaatggcaggagtctgttctactacctggtgctgtcggagcgtgacccggccatcgaccccgtcgtgctctggctcaacggcggccccggctgctccagcttcgacggattcgtctacgagaacggtctggattgatcctaatcttacctcccttcgggaccggcagttccctttgttgtcctcctgtgaatttg

SEQ ID NO: 4441 - DNA, 421 bp, Triticum aestivum
  Clone ID: LIB103-058-Q1-E1-D5
gacgggggcatggataggcaactagtttgtgcgattgggtggtgatttgcctctcagctagcttgacgtccatcatctacccggtgaagacggatctgcgagtaacccaacatccatcagcgcttcattggagaagcagcaagcaaactgaagctgtagctagctctggaggccatgcatgcatcaatgtgcatttcattttactgcctgctgcttgttacccttttttgttgttattattattatttcggtgtagtaaaagggaatttttgctcctgctttagctcttgggtctggtcgtcggcgggtggttccattgcatcgcatgtagatgtcgtagtagtggtggtcaaagtaactcctctctctagtccctagtctagctgtagtggctctgaaagtattgtatccgatgaagggg

SEQ ID NO: 4442 - DNA, 440 bp, Triticum aestivum
  Clone ID: LIB103-058-Q1-E1-D9
gggtcgagactaaggcaacagatgaagatgatgcagaagctaccaaaggtggggaagattcagatgattcagatggtatggacgacgatgctatgttccgtattgatccttatattgcgaggattttcaaggagcgcaacaaccttcctggtagtgaaactcagcaatctcaacttatgcgatttaagcttcgtgtgcttactttactggagttatatcttcagaggaatccaggaaaaaaactggtgctggaggtatatgctttcttaatgcaagcttttgtgaaatcacatagcgccgatggcaatgagcagttcaggcaacgtattggtggtatattgcagaaaaggatattcaaagcaaaagaatgtccaaaaggctttgatgttgaactcagtagacttgaaagtttgctgcagaaggctctgcatctggcatca

SEQ ID NO: 4443 - DNA, 381 bp, Triticum aestivum
  unsure at all n locations
  Clone ID: LIB103-058-Q1-E1-E1
tccgagaaggtcaaggatgagatcgtcctcgacggcaacgacatcgagctcgtctcccgctccgccgccctcatcaaccagaaatgccacgtcaagaacaaggatatcaggaagttcttggacggtatctacgtcagcgacaagggcgccatcaaggaggagtagagtgcgaaaaaccgtcccaccagaagccgtgtttctgcctgccgtgtttcatcgtctttgtgtcgtcgttgtcgtgattttgaactttctctaggctgaattttgtagtggggttaattattanggatgtgccatggaacatgttatctttattatcctgtattgtcgccgcgagaatgggtccgacgcttatctacccctataaaggctgaagac

SEQ ID NO: 4444 - DNA, 369 bp, Triticum aestivum
  Clone ID: LIB103-058-Q1-E1-E10
gacgcgtacggctactccagttattcacttctgctcattaggttgagttgaagatgaacctctatctcaaagacgccagtagtagctactaggtcggcgctattgcatattctgcaaaaatgtatctcggctaccaatttgttggcacgactcatttagctattttcgacaaatgaattggataaaatactgagcatctcagcccggtgccaatcaacatcctctgtccatcatgggacagatatctaacagtttgttagccagagttagcaggcacttgatttttggtttgacgtcgatgatcgtgtccgcttcttgcctgtttgccctcatgtccgccagtacgtggtgtatattccgcctagctga

SEQ ID NO: 4445 - DNA, 306 bp, Triticum aestivum
  Clone ID: LIB103-058-Q1-E1-E11
cagccgaatcgacgatgtcgccggcaggatcaccacacagctggctaccatggggatgtccaacatgaagtacgtcccagagccgaatgtgagtcctaatgccaggctaactttgtttttcgagggtgttctaggggcccctggcggggatccgatccaacagggtggtctctctggcccaagaggtccggccgcattgccggcgtgtgaagaccatggccctcatggaactggtgttccccagattttacgtcttggtcacatcttagttggatggtggagggtagggggtaacccccgtggcgc

SEQ ID NO: 4446 - DNA, 462 bp, Triticum aestivum
  Clone ID: LIB103-058-Q1-E1-E12
cggtccagaataacgggccgacgggcaggctaacccaaacgaataggcgacagacggatacttggaggacgataactatatgcctacctccgaagatgaggcgagcctcggtgatgacaaattcggcgtaccagaggatcccatagagcaggatcgctttaagcgcaggcttatagccactacaagaagcctgaaaaagaagcagcagcagctccaagcggaccaagatctgcttgcagacagatggaccgaagtcctggcggccgaagaatatggactcgaagccccaagcaggggatacccaaagcataaaccgctagaagaagaggccgaagagcttgaacttccagcacaagatgaggctgaccgaccaccacgtggccgggatgaaacggcatgtcaggccggacaccagcccgcacccccacgccggttcaccatggcctgcggcaatacgcaaga

SEQ ID NO: 4447 - DNA, 419 bp, Triticum aestivum
  unsure at all n locations
  Clone ID: LIB103-058-Q1-E1-E2
gggtcgacgggtttgctatagatgatgtggcaagaccatatagccagcaaccggctctactactattaactatgctcttagggcatcttcaatggctataagatagttgttggtccacataggattttgatgatgtgtcataaaataaatgaggaaagagagtaagattgtatgtacatgaaccaacaccctgtgcacaagcttcaatgtagaataagagagcaccttatttattatttcacatcttattggacacactagatacaatctattggagtagttttatgttaaggcgttggttgatgacatgccatattttacgaacaagctaacaaacaaactgttggagatgctcttaagcagtttcatgtactcgggactagcanacatgctgatgtggcagacaaaaagaagagaga

SEQ ID NO: 4448 - DNA, 387 bp, Triticum aestivum
  Clone ID: LIB103-058-Q1-E1-E3
gggtccagtctccggacgcagaagacttagcagctttcaggcataacgtccgagacgaatggctcgccagacacctcggccaagaaaagccaagaacaatggccgcactaacaagcctcatgacccgcttttatgcaggggaagacagttggttggcaaagtgcagccccagcgacccaagtacatccgaaactaaggatggaaacggaaaaccgcgacgcaacaaggaccatcgctggactaaggacaaaagtccgaagagcacggcagtcaatgccggattcaaaggctcacgacaaaatcaagaaaaattgccgcccaggataacagggacgatccatccaacctaaataaaatcctggacaagatatgtcagatacacagtac

SEQ ID NO: 4449 - DNA, 261 bp, Triticum aestivum
  Clone ID: LIB103-058-Q1-E1-E5
gacggggggaatcaaagcgagggcttcgctctacaccgtgagctcccgtgggcgcgccaaacacctcgagcttaacatggcgtgaacaattgtctcgatagatttgctcgtcactcgcttttatgcacgggaggtcagttggttcgcagggtgcagcccgagcgacccaactgtattcggaaactacggatggaacccgtaagccgcgactccactaggagcatcgctggactaaggcctagattccgatcagctatggga

SEQ ID NO: 4450 - DNA, 316 bp, Triticum aestivum
  Clone ID: LIB103-058-Q1-E1-E6
gacacgtggcacgacccaacagaggcccattcctgtgaaaaggccggcctgtttgacttggtcaaaaggtggcgggccggcccatggaaagcctgttaacgacctgttcgtatatagcccatttacagcccgctaacccaaggcccgttacaccctatccgaattaggcccagtagcgtcatctgggccatccaatatgattccagcctaatttcacttccggccccatttagggccaagaagttcttccggccaatataaggcccaaggtactccttggccaataaccggcccttgttaaacctggccggtatta

SEQ ID NO: 4451 - DNA, 185 bp, Triticum aestivum
  Clone ID: LIB103-058-Q1-E1-E7
gacgggtggagcgaaccagcagaggctcattcctgtgataaggccggcctgtttgacttggtcccacggtggcgggccggcccatggaatgcctgtgatcgacctgttcgtatctcgcctatttgcagcccgcgacccctcggtctgttagaccctctccgagttaggccctgtatcgtcctcta

SEQ ID NO: 4452 - DNA, 418 bp, Triticum aestivum
  Clone ID: LIB103-058-Q1-E1-E9
gggtcgaggcgcccgaacacgctgaacaacaggtgatcgcgcgagaagctcttcctccgtaattaagtagcggccaagcgaagaccggggcagagctgcaaatgcaagaagcaaggaggagcagagcagacactccggcgccggtggtgagctgctgctgaaccggagcgccagtcagaatttcccgctcccgagctggtccttctgcccggtgcccatcagcatcctctgtccatcatgggacagatatctatcagtttgttagccatagttagcaagcacttgatttttggtttgatgtcgatgatcttgtccgcttcctgcctgtttgcgctcttgtccgcgagtacttggtgtatattccgcctagctgatgtccttttgttctaccatcagaaacaagaattgttctcttgct

SEQ ID NO: 4453 - DNA, 378 bp, Triticum aestivum
  Clone ID: LIB103-058-Q1-E1-F10
ataagtattgtatgtgaaaccaaaattgaggatctcttgaaaggtggctcgtgacatgatacgaagccaggcgtgaggaataacctcagaaacagggggtaaaggagagtcaggtttcgatctcgtggaactgtgggttatgggcccaccatgtgggttaaaagtaggaagggtgctggcatcttgcacggttatgatagcaaggtatgttagaggatagtatgtcagttatgtcggcaacaacgttggtaccaagggcgagggatgaagagaaccattttcctgctcgttgaacgaggctgaccaataggcacagttctcatccatcggtggctaccggaatgtcaacaccaatagtaccagggtctttactgacag

SEQ ID NO: 4454 - DNA, 402 bp, Triticum aestivum
  Clone ID: LIB103-058-Q1-E1-F12
gggtcgaggccgagtcataattataggtgacaccgggtcatgattgttgcaaacactgggtcaatctgacctgctcaaaactgagaatttgaagattttttccctttatatgtatatcacctgtagcccccaagtgtcgggttgtcatgctagcagcaacctgggatttgtaattgccttatgctcataaaacttcaaccagtgtagcccccaagggccggtttagtaagatattactgagctgggactttgtatataattcattgataataatatcatatgatgtaatatccaccatggggcttgaacccacgtccaaaaggttaagagctttgtgctttacaaactgagcaatgggtccttcaatataatggattaagacttgtgtaccttgaactgttg

SEQ ID NO: 4455 - DNA, 434 bp, Triticum aestivum
  Clone ID: LIB103-058-Q1-E1-F2
gggtccacgggggcggagaacagagcgcgtaattaaactcgaatacctttccgcggcggcggtagagcactgctattaagcgattttggagaagacagatgaattcgagttcctttcagatctagtccatagatttgcaccgctgactttgagtgtgggggacgaacttcttgacaaggaggcttccggtggatctgtcggattaagccggtggttgcaccgatgacagggatgtgagcgccgcggtagccgtgaggcctatggacctgaacgacaatggtacttgcgagactgcctttgcggcggactcgggtcagttggtgctgagagatgatccacaaacgcctggctggacaaaagacgttcaacgatttagctgctactcagtcgtctaattattgtgtgttggccttttagtgctgtggcaagtctgt

SEQ ID NO: 4456 - DNA, 424 bp, Triticum aestivum
  Clone ID: LIB103-058-Q1-E1-F3
gggtccacgcgtctgtcacattcagagtcgtatgtatttttgcaaatattctatgtcttcaatgctctgcatggagctactctagctaatttctcccactttcagtatgtatccagattgagacttagagtcatctggatcagtgtaaaagtttgcaccgatgtaacttttacaacgaaatcttttatcacctccataatcgagaaacatctccttagtcctcactaaggatattcttgactgctgtccagtgatctactattagattaaaattgtattcctttgccaaactcagaggaaggtataaaatatgtctggttcacagcatagcatactttatagaacctatgactgaggcatagggaatgacttttcattctctttctattttctgccatggtcgggtcttgagtcttactcaact

SEQ ID NO: 4457 - DNA, 358 bp, Triticum aestivum
  Clone ID: LIB103-058-Q1-E1-F7
ttcgacgggtcggaccagatcaggaaggagctcgcgggcaaaggcatcgccctgatggacgagcctaccgggacggtgtggagaccatgcgaacgggagtagtcggtgattaatatgtgcctggtttaacagatgacagtgtacaacggacggatcttattgcgctggtgcagattttactcatgcaatatcgccagttttggacgtggtgtttctgtaggggttccaagttgactcaagagacgaggcccgtgttgtgtcggttgttgcgtaggaggacaaattgaagggtcctccgtatattggtatacttcactaaaaaaaaaaaaaaaaaaaaaaaaaaaaaagcggccgctct

SEQ ID NO: 4458 - DNA, 442 bp, Triticum aestivum
  Clone ID: LIB103-058-Q1-E1-F9
acgggcaagaagagcgtcaagacctacaagatctacatcttcaaggtgctcaagcaggtgcaccccgacatcggcatctcctcaaaggccatgtccatcatgaactccttcatcaacgacatcttcgagaagctcgccggggaggccgccaagctcgcccgctacaacaagaagcccacgatcacctcccgcgagatccagacctccgtccgcctcgtcctccccggagagctcgccaagcacgccgtctctgagggcaccaaggccgtcaccaagttcacctcctcttagattcagtctctggcagctgtagttgggtgctgtttgcccagaattagtgttgctcagtggaaatcggtggaatatcgtttagtttgtagttgggttggtgatgttaccgtgtcatgcgactgatcgatctgaaatagcaatggtctggtgc

SEQ ID NO: 4459 - DNA, 399 bp, Triticum aestivum
  Clone ID: LIB103-058-Q1-E1-G1
aagtatataggtactttatgactaatgtgagtccatggttatacggacactcagccttccactttgctagcctctattctgccgcacaactttcgccggtttcatgcacccattacttaccttcctcaaaacagccaccatacctacctattatggcatttccatagccatcccgacatatattgccatgcaactttccattgttccgttattatgacacgctccattattgtcatattgctctttgcatgatcatgtagttgacattgtatttgtggcaaggccaccctcataattttcataaatgtcactcttgagtcattgcatatcccggtacaccgccggaggcattcatatagagtcatattttgttccaagtgttgagttgtaattcctgag

SEQ ID NO: 4460 - DNA, 376 bp, Triticum aestivum
  Clone ID: LIB103-058-Q1-E1-G12
gcgtctagctccaggactccagcatctggttgcgagaaccaggtagaaaggaaaggggaaaagagggagagaagcaaccgtgagtactaatcaaaagtactcgcaagcaaagagctacactacatatgcatgggtgtatgtgtaaagggccatatcagtggactgaactgcagaatgccagaataagagggggatagctagtcttgtcgaagactacgcttctggccatctccatcttgcagcatgtagaagagagtagattgaagtcctccaagtagcatcgcatagcataatcctacccggcgatcccctcctcgtcgccctgttagagagcgatcaccgggttatatctggcacttggaagggtgtattttat

SEQ ID NO: 4461 - DNA, 421 bp, Triticum aestivum
  Clone ID: LIB103-058-Q1-E1-G2
gggtcgaggcgaggtgacaatgaagactgatatggttaccggcagataaaagggggctggaagggccgctggcactgcacaactaacattcaggcgtcgtcacaaggctggagaggtcctatgcatcgctgctgctattcatgtcactggaaagctgaaaactgccaagtttgattgttctcaccgtgggaaggctagcaggacaaatatattgcatcatgtgaagaagcaaacaaagcagcaacaaggttctacaagcccggtgtataggcagatgatggcgatggtcgtgaagacgatcaggctcagccatccgccatgaacatatgcccaagaacaaacaaacaattaatcaagtgaatgcatcaaaatgtgtagatacaggtgacaagtgcttgaactactagctagcattgggctg

SEQ ID NO: 4462 - DNA, 400 bp, Triticum aestivum
  Clone ID: LIB103-058-Q1-E1-G3
cgggtccacgggatgcacacaggatgtcgtcgctaagcatgctagctgttgtggtatgtgaggggctcgctgggatccggctcgtacagctccatgagcctctggctcccattggtcgatctgcgtggaccggcttcatggacgaggttgatggcgaggtggacgaggttgacggcgaggtagatgaggttgacgacggacagggccagctccggctcgccgacatggtggaagggtgcggccatagaagagcagatcgaaaaaaaattgagccttctcctcacccgaggaaacaatgcgacaaaggagggtgaatcaacgcggccgaggcgtggggcgggggagctccgacgaagccccgggaagctgcacgagtgagtcgagcaggggagctccggcg

SEQ ID NO: 4463 - DNA, 386 bp, Triticum aestivum
  Clone ID: LIB103-058-Q1-E1-G4
caagcgggcagatatggtgaagggatgggcctcaattcagtcagttccaaggacaattgctctcgacgagaagacccggacgaacctcctcctctggcccgtggaggagattgagaccctccgcctcaacgccaccgaactcagcgacgtcacccttaacaccggctccgtcatccatatcccgctccgccaaggcactcagctcgacatcgaggccactttccaccttgatgcttctgccgtcgctgccctcaatgaggccgatgtgggctacaactgcagcagcagcggcggtgctgttaaccgcggcgcgctaggccccttcggcctcctcgtcctcgctgccggtgaccgccgtggcgagcaaacggcggtgtacttctacg

SEQ ID NO: 4464 - DNA, 426 bp, Triticum aestivum
  Clone ID: LIB103-058-Q1-E1-G9
ctaaaaataaagttcttcgactgaagactttggatttctgaagactttctgaagactttgaaagtgaagaaattggtgtgaccttgaagacttggtattcattcgaggaacatgaagcgtgaagacttatgttttcgtagtttcattttctctttcttgagtcataggaaacaccgtactgttaaagggggtcgaggaaatactaaggaaaaatttccatgttatgctcaactcaaaatcctacacctaccaatcccttcgagtgaagccattggaaatctcatacagtccagtcatattcttcagtgacagagacgaagttcttctggtctctgaggaatttgttctgactgaggagttaggaattcgccagtgtggattgcctacacagtgaaggacatgatagccctgaggaatttgatactc

SEQ ID NO: 4465 - DNA, 367 bp, Triticum aestivum
  Clone ID: LIB103-058-Q1-E1-H1
agctgagagtcactgtcatggcgcgtcacctggtggatcgatctgtcaggcgggcttctggagtactcgcagctaaaacatcttcaagaagctatgctaaacttgaagttttctcttgtaaaatggaagtcactgtcgcttgatctcatctcccgtactggctacattaccgtgacatgccgtgtcctagcatatgaatgtggctttggtttggctctaggtgccggaagtagttattttatctatgcatgtatgtacggttcgtaccatgtgttatctggtggtactgtagattaaactgggtgggtggtaataggacatatcattcgacttgtcataactactaagttagacatatacttcaaaa

SEQ ID NO: 4466 - DNA, 433 bp, Triticum aestivum
  Clone ID: LIB103-058-Q1-E1-H10
gactgggagtggtactgcgagtgggctaagggtggcattgagactgcgagtttcaccgggaatgatatgcagagactgatggccgatgagcaagaagagcgcatacgaaagaaggtggagaaggcaatggccactttgcaagtctccatgaacagtatttatgacatcaatgtaccatcgaagatatccctggacgatccagatgatgaaacaacattggagcttgatcctgagttccttcctccaacggcgtacttaagctcaagactaggtgagcatgatggcaactatctcctttctgatttggaatttgagcatgaccctttttctggttgcaattttgacctgaagctcaaggatgactactgaaatgatagtttgtctagatcaacagtattactctgttgaggtttcatcgttcagtgactcagtg

SEQ ID NO: 4467 - DNA, 414 bp, Triticum aestivum
  Clone ID: LIB103-058-Q1-E1-H11
gggtcgaggcgggaatacaatagatattacaccaatatgaatttataatgagttcacaacagtacctaagtggtggttttattttcttatactaacggagcttacgagttttctgttgagttttgtgttgtgaagttttcaagttttgggtaaagattcgatggactatggaataaggagtggcaagagcctaagcttggggatgaccaaggcaccccaaggtaatattaaaggacaaccaagagcctaagcttggggatagccccggaaggcatcccctgtttcgtcttcattcatcggtaactttacttggagctatatttttattcaccacgtgatatgtgttttgcttggagcatcattttattttcttttgttttgcttgctgtttgaataaaataccaagatctgaaa

SEQ ID NO: 4468 - DNA, 256 bp, Triticum aestivum
  unsure at all n locations
  Clone ID: LIB103-058-Q1-E1-H12
actacaaaaaaaccaaaagcccactacagggcgtggaaccgtattggagggatggctcaatgggccatgcanaattcacacgatatgggataccataccaacacacagccttagaggatgttggatacttcggcaggtggccaagacggcgaggatctcctcattaacaataccgcggagcatcatcccgcagaaacgacaatacagtgttgacagtcttcgagactttcacctcaaataacaggcgcaagagagc

SEQ ID NO: 4469 - DNA, 396 bp, Triticum aestivum
  Clone ID: LIB103-058-Q1-E1-H2
aagaagggcagcaaggccaagaagggcgtggagacgtacaagatctacatcttcaaggtgctgaagcaggtgcacccggacgtcggcatctcctccaaggccatgtccatcatgaactccttcatcaacgacatcttcgagaagctcgtcggcgagtccgccaagctggcccgctacaacaagaagcccaccatcacgtcccgggagatccagacctccgtccgcctcgtcctccccggggagctcgccaagcacgccgtctccgagggcaccaaggccgtcaccaagttcacctcatcctagacagcttaggcttgatcctcgtcgctccatgccttctgtgtgtacctagtcggcagtatgatgttacaatctttgtaaggattctgctgcttg

SEQ ID NO: 4470 - DNA, 284 bp, Triticum aestivum
  Clone ID: LIB103-058-Q1-E1-H3
ggtggcgtggaggttttctcggtgtgggtcttcgctgggccggggcaggtgcacccgcgtggtccggatcttctcaaccgagctgtatgtcttcggctccttcaatgtggaggtcatcgtgaatgtcgtcgggaatcttatcgtgctaggtgtcatggcttgggcggccaacatcgagtcttgggagattcagatcttcgtgtttcgcttgctctttcgtgagctggccaggccacctttctgcttttggaccactgtcgtctccaacttcaatgcagcctttg

SEQ ID NO: 4471 - DNA, 389 bp, Triticum aestivum
  Clone ID: LIB103-058-Q1-E1-H4
cgacggggaaaaccatttggggagaagcctatttgattagaatttattagaaaaggcaaggtgcttcatttaaacctttggaccttgaaagttttggcccaatggcttcacttaaacctttaaaaccacggcggtggcttaatttggtaaaaattgcaagccccccaggcttcacttaaataattttgaaagcctttttgaacagcatggtatttgcaatggttataaaagtggtccaagaatggtaggcatccaagttgggtataataaaaactatcgtaggaagtgaattggatgctatgatcaatttgatacttgataattgttttgagatatggaggtagtgatattaaagtcatgctagttgggtgattatgaatttaaagaat

SEQ ID NO: 4472 - DNA, 414 bp, Triticum aestivum
  Clone ID: LIB103-058-Q1-E1-H6
gtaaaaacaattgtcagcatacttaaccagagcttccatcggctcccccatgtcactgaagtggcggttgagccgccctagcttctgcttaaggggcaaaaaatgacaattcttctctaacatcaagactactgagccgacattgatacgatccggtgagtgcaggatagttgagacgcggcgcacccaatgggttgttgactcgccctcttcttggacacaagagtccaaatccacaatcgacataggatgtttgcatgtatctttaaattctggataaaccgggcttttaacttggcccatgatccaatggagttggcaggcagcccttttaaccaagtacgggtcgtcccatccagcatcatggtgaaatatttggcacacgcagcattgctaacatccaacagctccatg

SEQ ID NO: 4473 - DNA, 350 bp, Triticum aestivum
  Clone ID: LIB103-058-Q1-E1-H9
acattcaccatgaatcatcatcgccgccatgcgtcgttgacttatggccatgagaagaagggaatgctgtgtgggtagtagggagtatgttgggtatttgtttgtttactgtaaagaggaacacttcctttaatagccattgttatgtggtaggtggtttagtggtgcaaccagaggatgcatgtgttctcatgtggaagggacagtgataatggaaatgagctggtgtttagttaataatcagttagtaaaaaaaaacataaaataaaaaaataaagtgcaaagtctagctaaagatcatggacattatggaaaatcttaaagacaaagggaaaaaaaagtgcccagag

SEQ ID NO: 4474 - DNA, 77 bp, Triticum aestivum
  Clone ID: LIB103-059-Q1-E1-A1
cgggatattacaagaccagatggtcatgttcccaatagtggtcctgtcgacgacgaagagcagacggcctctctgat

SEQ ID NO: 4475 - DNA, 402 bp, Triticum aestivum
  unsure at all n locations
  Clone ID: LIB103-059-Q1-E1-A11
tcgacggggatggtatctacaaggtttttgatctgaagaactattcctttctatattcaatacctgataccaatgtgcaggagataaagattagtccaggaattatgctcttaatatatgatcgaacgccaagttatgttcctttgaggatattatctattgaagatggaaagccactcaaattattcaagcacttgttgcaccgcggcaagaaaattgattttatcgagcaattcaatgagaagctccttgtgaagcaagaagacgagaaccttcagatacttgatgtacgaagttctgagctaattgacatcagtattgagaagttttatgacccgtcagcattaatttttctgtatgagaacaatctcttcttgacattccganacagaacagttgctg

SEQ ID NO: 4476 - DNA, 376 bp, Triticum aestivum
  Clone ID: LIB103-059-Q1-E1-A2
ccggtcaagaatatccgggtcgactggatgctataatgaagccgtttatgctccgccgtgttaagattgatgtcatagcagaaatgacggaaaagaaagaagaaattgtgccctgcagattgagttctcgccagcaaatcttctatcaagccataaagaataagatctctcttaatgagttgcttgatggaagtcgtggcaatctaaatgataagaagctgcttagcctgatgaatattgtcatgcagctacgtaaggtctgcaatcatccagagctgttcgagcgcaatgacggaagctattacttttattttgcggaaatcccaaattctcttcatcctcccccatttggggagttgcaagataaacattatgc

SEQ ID NO: 4477 - DNA, 332 bp, Triticum aestivum
  Clone ID: LIB103-059-Q1-E1-A3
acgggataggggaggggggtggagacgggaatgctagggggtgtggtcttggcaggctgtgagggatcaagagacgcaattgtggcctgcagattgagttctcgccaggaattcgtctaggagggccatacggatatgatctctcttgatgggttgcttgatggtagtcgtgggaatcgaagtgatgagaagctgcttagcctgatgaagattgtcatgcagctacgtaaggtctggaatcatccagagctgttcgagcgcattgagggaagctattacttttattttgcggaggtcccatgttcgcctcttcttctcccatttggggagtt

SEQ ID NO: 4478 - DNA, 391 bp, Triticum aestivum
  unsure at all n locations
  Clone ID: LIB103-059-Q1-E1-A4
acggtcaagacatcccgggccgaccgggttgtcaaatacctcgatggcaagcacggccttgcccttgcgctttatgttgcggcgccggcacttcttcttcggggcggtggtgtcttcgtctgtggagtcggtttccgcaccagcgtcctcactggggtacttcctcccctcctcagctcgagcgcacctatcggccagaacataaagctcggccacatctttgaccttgttcatcgtcggctttcacgcatcttacggttgcacacattctgatagaatgcgctgatcacggtggcgggatgaacatctcggacgttgtactacacccggctgaacctctgtatgtacctgcgccggttttcaccttccttctggangatgatatggaaat

SEQ ID NO: 4479 - DNA, 392 bp, Triticum aestivum
  Clone ID: LIB103-059-Q1-E1-A7
cgggaaacaccagacttttggtggtacctctaattgccataacttgttccaagcatttagataaccattgcccaaaccagttgcttcagtcaacagtttgtatgctgagtgaactgaaaatagacctcggttatttggctgccatgcccaaaaatcttcccccacactaattgggattcgtacaattgcctccgcatcaatacctatgaagtttgctttcaccttttgcacatcccattcttcataattctcaacaagtagttcagaagcatgattggcagtagcatacatgggctttaacatagccttgtaagaattattggaagggattcatggattctcccacacatttatagtatccccatcgcccatccttttgataagaccaattt

SEQ ID NO: 4480 - DNA, 433 bp, Triticum aestivum
  Clone ID: LIB103-059-Q1-E1-A9
tctggcaacggtagaggcgccgacatcaacctcaaggtcaaggggcaggatggcaatgaggttttcttccgcatcaagagatccacacagctgaagaagctgatgaacgcttactgcgaccgtcagtctgtggatctcaactccattgctttcctttttgatggtcgtaggctccgtggtgggcagacccctgatgagcttgagatggaggaaggcgacgagatcgacgccatgcttcaccagaccggagggtgctttcctggcccttagaacgagcttgctgcagcctggctgttctatgtcgtatgctacctttagaactagagtaaaatgtaagaagtgaaagaacttgtgaggctatggttctgtgccatagcctgaaggggggtctggaggtgaaacaacatcggagtactgttgatgtcgtgactga

SEQ ID NO: 4481 - DNA, 424 bp, Triticum aestivum
  Clone ID: LIB103-059-Q1-E1-B11
ccgggccgacggggacaccaacttgcggtccgagaaggtcaaggatgagatcgtcctcgacggcaacgacatcgagctcgtctcccgctccgccgccctcatcaaccagaaatgccacgtcaagaacaaggatatcaggaagttcttggacggtatctacgtcagcgacaagggcgccatcaaggaggagtagagtgcgaaaaccgtcccagaagccgtgtttctgcctgccgtgtttcatcgtctttgtgtcgtggttgtgattttgaactttctctagactgaattttgtagtggagttaattagggatgcgctatgcaacatgttatctttattatcctacatattgtcaccgtgaaaaaaaaacaaaaaacagaaaaacaaaaataggctacaaaaaaataaaaaaaaagcggccgctct

SEQ ID NO: 4482 - DNA, 439 bp, Triticum aestivum
  Clone ID: LIB103-059-Q1-E1-B2
cggtcaagaatatccgggtcgacggggatcttgaaatacagtaggtttaacaccaatataaataaagaatgagttcattacagtaccttatgtggtggttttgctttctttcactaacggagcttatgagatttcttgttgagttttgtgttgtgaagttttcaagtttggggtaaagatttgatggactatggaataaggagtgacaagagcctaagcttggggatgcccatggcaccccaagatattcaagaatagccaaaagcctaagcttggggattgccccggaaggcatcccctcttttgtctttgttcattggtaactttatttggagctatatttttatttgccacatgatatgtgttttgcttgtagcatcttgtatgacattagtatttgctttttagtttaccacaatcatgcttgctgtacacaaca

SEQ ID NO: 4483 - DNA, 201 bp, Triticum aestivum
  Clone ID: LIB103-059-Q1-E1-B3
cctgagaacggaagggggcgtgtcgattgcgtcctctcacgggatgaacctaaacacgaaagcagggctctggaagtcaacgaacttgtaagatccttcgagtgagttcagatagattgcttcgcggggctcttcgctcacgccgctctgcatggcatactccagtgccatttcatagtcaacctgttcaacatgctgcgt

SEQ ID NO: 4484 - DNA, 422 bp, Triticum aestivum
  Clone ID: LIB103-059-Q1-E1-B4
cggtctagatatcccgggtcgaccgggagaatgagaagagacctagtcgggtctatttataaggaaaagactgttaagtgggcgcaaaaaatgaggagcccaaaaaacatagttatccaactataaggacgcctcgattttcggacggtcactaagacaaagatccgttgagatacattggaagaaccgcgtatttatagcaggtgacatcatggcgggttagcacaaattcaagggatgatgtcatggcaggttacaaaaagcttcataagcaaggagcagaagatttttcttaaagtatcgaagattgacatgaaccagttcaaatcaatctggggcctaatgttggggatataactataaggtatgaccctccctggaggggccgggttatatctatgagtattctgaagcccaagacc

SEQ ID NO: 4485 - DNA, 374 bp, Triticum aestivum
  Clone ID: LIB103-059-Q1-E1-B7
cgggccgacggggaatgaacggtgagcaggtgagctctgctctgcctctgcccagctcctctgcatcagctgtaacgttattctgcttgcgaattttcttagatcatcaatcagggagccggagcttgaatgaaacctgagtaggcttgcgaattttgtatgcctgcaacatcatttggtcatgaattatatccctggtgtagaagttaagttgctgcaatggttgacattcgattaaaaaaaaaaaaaaaaaaaaaaaaaaaaaaaaaaaaaaaaaaaaaaaaaaaaaaaaaaaaaaaaaaaaaaaaaaaaaaaaaaattgaaaaaaaaaaaaaaaaaaaaaaaaaaaaaacgggccccccaaaaggttcaag

SEQ ID NO: 4486 - DNA, 361 bp, Triticum aestivum
  Clone ID: LIB103-059-Q1-E1-B9
tgacgggcggtgctttaggcccttctggccagcggagtgaacatcccatgcgaatcagcgtacttgaacatatggtgcaggccctccataaccaatataaacatcaatataaacatcagcccccttaggctcatcaatcagcagttttgtacttatagcatactaaataaaatgctcttgtatacaattctgatctatccgtaaaaatgctgacatgtcaaatatgtttgttacttttgcagtttgttagagaagcaatttcttcgatgatgctggagactcggctaatgcagttttgtgctggttgcatgaatgtacagtcgtcgcgctctcagtctcggtgtatcgggatttttaacct

SEQ ID NO: 4487 - DNA, 418 bp, Triticum aestivum
  unsure at all n locations
  Clone ID: LIB103-059-Q1-E1-C3
gatccttgaactaagagccctagtgcgtctacatctcgtatgctctgctactgttgcttaatgtaaggcagctagcacaccaatatttctgtatcttcacaacgcttaatttttcttcacttgtcctggctggaagtatgtaccaagtatagctatcgaaggccattctattttgctttgtaaccggttcaatcgtttatatacatatatatactactcaaaaataattgcataacgatggttgttcgtttgttattattccataatatacaggccgaatcatggctgacacggacagcaagaagatcgatctaccatactatgcgttgaaatatctcctgacgattgtatgtatcgcgctggttgcttccattgtttggtaactgacgtctactancccactatggatgactgcaag

SEQ ID NO: 4488 - DNA, 236 bp, Triticum aestivum
  Clone ID: LIB103-059-Q1-E1-C4
tctcacctccatggcctccactttcgacggtcgtacgctcagtggtgagcagacccctgatcagcctgagatgtatgaacgcgaccacattggcaccatgcttcaacacaccggagaggggcgtaccactcgcttacgaagggtcatgctgcatcctgactgtcctaagtcctatgccacccttacacatacagtgccatatggcacgtgacagaccctacgacgctcacactctg

SEQ ID NO: 4489 - DNA, 387 bp, Triticum aestivum
  Clone ID: LIB103-059-Q1-E1-C5
acgggttatctcactgtgttcaccttgtctcatgggagaaggagaatgtgtccagtgaggctcttgaggctgcccgtattgcttgcaataagtacatgaccaagcatgcaggaaaggatgccttccacctcagggtcagggttcaaccgttccatgtgctccgtatcaacaagatgctttcgtgtgccggggctgataggctccagactggtatgaggggtgcttttgggaagccgcagggagtctgtgcccgtgttgccattgggcaggtcctcctttctgtgcggtgcaagcccaacaatgccatccatgccactgaggcccttcgtcgtgccaagttcaagttccctggccgccaaaagatcattgagagcaggaagttgggct

SEQ ID NO: 4490 - DNA, 80 bp, Triticum aestivum
  Clone ID: LIB103-059-Q1-E1-C6
gacgggttaacgaaggtgtgtccagattgtctcatgggacagggagaaggtgtcgagtcatgctcttgaggctgctcgta

SEQ ID NO: 4491 - DNA, 225 bp, Triticum aestivum
  unsure at all n locations
  Clone ID: LIB103-059-Q1-E1-D1
ccggtcgaccgggagaagtatgtcattgttagagagctttcaagggcacttggttctaagacgcgtcctccgaattgatcaatactactggcgagtggctgttgtcgttgttgttgtaacctgtaagtccaccattatgaagctttcgcttgttttacgtgtctgccttgtctatatgtgtaaggctacaangaacgaaatcaatgtacatatgttacccctatg

SEQ ID NO: 4492 - DNA, 370 bp, Triticum aestivum
  Clone ID: LIB103-059-Q1-E1-D2
ggatttggatttatgcagtactttgatcccaacgatgcggcagacgcaaaatactacatggatggacaggtcattcttggtagagaagttgcagttgtttttgcacaggagaacagacagaagcctgctgagatgggaactagagaaagtatcagaggtcggtcttacgatcggcggcactctccttccccaagggggcggccatcttaccgcggccgaagctactcagggtctccatcacctcggcccgcaaggcggaggttcagagacgagtctccctcgcgctcccgctcgcccagcggatcgaggagtgcgagtccattggatgggaagtacggcaggtcctcacgaagagagaggtcgatttcgg

SEQ ID NO: 4493 - DNA, 404 bp, Triticum aestivum
  Clone ID: LIB103-059-Q1-E1-D4
gaccggatctcatagccggcaaatctctttacccgttccgtgatgcatcatcccgcaactaactcattagtcacattgcttgcaaggcttatagtgatgtgcattaccgagagggcccagagatacctccccgatagacggagtgacaaatcctaatctcgatctatgccaactcaacaaacaccattggatacacctgtagagcatatttataatcacccagttatgttgtgacgtttgatagcacacaaggtgttcttccggtattcgggagttgcataatctcatagtcagaggaacatgtataagtcatgaagaaagtagtagcaataaaactgaacgatcattatgctaagctaatggatgggtcttgtccatcacatcattatctaatgatgtgatcc

SEQ ID NO: 4494 - DNA, 383 bp, Triticum aestivum
  Clone ID: LIB103-059-Q1-E1-D5
gacgggatacagtacccggtgggacgtatacacaggcagctcaagcagagggtctcggctaatggccgtgtgggtgccactgctgctgtgtactctgcagcaatccttgagtaccttactgccgaggtccttgagctggccggcaacgctagcaaggatctcaaggtgaagcgtatcacccctcgccacctgcagcttgcgatccgtggagatgaggagctggacaccctcatcaagggcaccatcgctggtggtggtgtcatccctcacatccacaagtcactcatcaacaagacctccaaggagtgaatgatatgcaataacgggtagttgttgtgtgttgtatccccgtgatcccttgttacgttgtgctacctgttacg

SEQ ID NO: 4495 - DNA, 407 bp, Triticum aestivum
  Clone ID: LIB103-059-Q1-E1-D7
gacggggtaagggttgccttgggtaggcggcacggcatgggcatgtcacgccgtccagcggtcggcgttggtcgttgggtcgccgtacatggatgcgacaaagtggtgggatgcagactagcggagaaaagattccggcgcacccctacctggtgcgccaaatgtcggatatcgggttcctgcaaaacccttaaggttcaaactctggggtgcgcgcgaagatcttctccctactgatccacgcccacaacctcgccgcgattctaagctaacaagatgaacaacacaaggaacacgagatttatactggtttaggccaccattgtggtgtaataccctactccagtgtgtggtgtgtggattaactcttgggctgatgaggaacagtacaaggggaagaacagcct

SEQ ID NO: 4496 - DNA, 221 bp, Triticum aestivum
  Clone ID: LIB103-059-Q1-E1-E1
cggtcagcatactcaaattagttcctgtaccaaaatatgaacataccaaacaattggatagtttgtatcaagtttttgtggcacttgctaccttgatttcaatggagataacggtgtagcacaaattcaaagcatctgtatatgtatgctatgcattcttatgcccttcatgcgggatggatatttttgaaatcaacaaaagagacagatatattatgtgt

SEQ ID NO: 4497 - DNA, 328 bp, Triticum aestivum
  Clone ID: LIB103-059-Q1-E1-E2
ccgggtcgaccggagcacaaacaaaaccaaaaccaaggcttaaccgcagttccgcagttcgtgtgttgcttatattatatgttgctattatattaccattattaagtgagggaggaattgattagtgccagtgtttgattttgttctgtttgtcatggtacgaggaaagatcaccaagtagataaggtctctagtagcagtttggctgtacctaatcagtacccttatttcattccgactagtaagtaaaaacttgtttttccctcaaaaaaaaaaaaaaaaaaaaaaaaaaaaaaaaaaaaaagaaaaaaaaaagaaattttattat

SEQ ID NO: 4498 - DNA, 442 bp, Triticum aestivum
  Clone ID: LIB103-059-Q1-E1-F3
ggtcaagaaatcccgggccgactatcacgatgaccggggtcttgtcgcgaatgatccgcatctccatactcagcgaaaatagccgaacgaaggtgtagtgcagcggatgaaggttaaacatagcaaagatgtcatcaaaccgcaggacgatcgtacccccgatgtcgccatccacaaagcccttgtcctctggcaccttggccacgaaaaccgggtatgccacatccttctctctgagacgccgcttctccaaagaaagaacactgtcgtgcagactccgcatagcaccggttgcagcattgagcatatttggtggtagcatcgccctacccgccacatgcaccctcctcgagatatcctgcggtgaaggtgacccgtcatgagcacggatcgtactcggtgccggctggctcgcaaccttcttagtctttcctttgcgtgt

SEQ ID NO: 4499 - DNA, 416 bp, Triticum aestivum
  Clone ID: LIB103-059-Q1-E1-F4
gggtcgaccggtaggcatacaaaaatagtaaaaacttccatatagagtattgaatactaagagaagtttgatgcttgatgatttttttgaggtatggagatggtgatattagagtcatgctagttgagtagttgtgaatttgagaaatacttgtgttgaagtttgtgattcccgtagcatgcacgtatggtgaaccgttatgtgacgtagtcggagcatgatttatttattgattgtcctccttatgagtggcggtcggggatgagcgatggtcttttcctaccaatctatccccctaggagcatgcacgtaatactttgctttgataacttgtagatttttgcaataagtatatgagttctttatgactaatgttaagtccatggattatacgcactctcacccttccacctttg

SEQ ID NO: 4500 - DNA, 375 bp, Triticum aestivum
  Clone ID: LIB103-059-Q1-E1-G2
gcggcgtagcaaactggctttgtgaagcagatcatccaggcatcgccgatgctggagcgcgcccacctgttggtcgggcatgtcgtggaggacgaacatcgggagctcgtcggcctgaagatagtccggcgccgccgggattggcatgagtgtgagagatcggaggtgctcaaagacctgtcatacgggatcagttcgccgcatcttgaaatagttttggaatgacttttggtaaaagtctgctgtgccggtagaccttccgtttgtagggcttgtagctgtatgccagggcctaatgattatgttatgctggctctaaatatagaacaacatgtgtttgtacgtggtatcttgtaccttacttttgcttgatta

SEQ ID NO: 4501 - DNA, 384 bp, Triticum aestivum
  Clone ID: LIB103-059-Q1-E1-G4
gtctttgcatttaggtttaccacaataatcctcgctgtaaacaccttttggagagatacacatgaatcggaatttattacaatactctaggtgcttcacttataccttttgagctagatagttttgccctagtgcttcacttaaatctttttagagcacattggtggtttaattttataaaaaaatattgatccctcatgcttcacttatattattttgaaagtcttttagaacatcagggtaatttgctttggttgtgaaattagtcttaatatgataggcatccaggatgggtataataaaaactttcatatacggtgcattgaatactatgagaagtttgattccttatgattgttttgagatactaatatgatgatatta

SEQ ID NO: 4502 - DNA, 307 bp, Triticum aestivum
  Clone ID: LIB103-059-Q1-E1-G5
acggggaaaagtaccgtcagcatgacggcgtcgtgacgatcttgatgttctaccgtcgcagcgcttcgcctaagcaccgctacattattatccaggattattctggagggggaaccgcacacggttcagagaacattgatcaattgttgcgtcactggggtgcccccctgccctcgtatataaatgaccatgggggacgccgccggttcacgaggagggcgcgccacgggggaactcctactcatactgcgactaagaatcttccctcccttgttggcgtatgagacacggaacgatgcggggaatt

SEQ ID NO: 4503 - DNA, 404 bp, Triticum aestivum
  unsure at all n locations
  Clone ID: LIB103-059-Q1-E1-G8
cccgggcngacgggccaggcgatctctctggaggaccggcgccatggcggcggcggcgctggcgcagggaactcctcgggcgattcgccgctgctcctgctgccgatgctggacgatgacatctcccgtgaggtccagcgcctagatgctgatatggaccgattcatcagggcccagagtgagcgcatgaggcagtctatattggagaaagttcaggcaaagcagtttgaagcgctggcctctgttgaagacaagatcctccgaaaaatacgcgataaagagtcagaagtgcagaacatcaacaaaaggaacctggaactcgaggaccagattaaacaaatggcaggggaagttggtgcgtggcagcaacgagctaagtacaacgagagcatgatcagcgcact

SEQ ID NO: 4504 - DNA, 415 bp, Triticum aestivum
  Clone ID: LIB103-059-Q1-E1-H10
gacggggggtgggagcctgatctggaagaagaaatcacttgtagtaacattggtccctgaaatgggtgctatcatcggctgtacctaattgatgttctgatagccctttagctcgcatagaaaatttcacgacgcccttgtaatcaaatgtagtatcagtagtatttttcaatcaaacgcattaaaaaaaaaaaaaaaaaaaaaaaaaaaaaaaaaaaaaaaaaaaaaaaaaaaaaaaaaaaaaaaaaaaaaaaaaaaaaaaaaaaaaaaaaaaaaaaaaaaaaaaaaaaaaaaaaaaaaacaaaaaaaaaaaaaaaaaaaaaaaaaaaaaaggggggcccccaaagggttacaagtttattttcgcggaaaagagttgtaaaaccccttcaaaggggcccccaaatttaattac

SEQ ID NO: 4505 - DNA, 422 bp, Triticum aestivum
  Clone ID: LIB103-059-Q1-E1-H12
gccgacgggaacctcgattctcttggagatctatttgatataatactttttgcggtgtgtttgtcgagatccgatgaattgtgggtttatgatcaagattatctatgaacaatatttgattcttctctggattcttttatgcatgatttaaatatctttgcaagtctcttcgaattatcggtttagtttggcctagtagattgatctttcttgcaatgggagaagtgcttagctttgggttcaatcttgcggtgctcgatcccagtgacagaaagggaaccgacatgtattgtattgttgccatcgaggataaaagatggggtttatatcatatttcttgagtttatccctcgacatcatgtcatcttgcctaatgtgttactctgttcttatgaacttaatactctagatgcatcctggat

SEQ ID NO: 4506 - DNA, 380 bp, Triticum aestivum
  unsure at all n locations
  Clone ID: LIB103-059-Q1-E1-H4
cggtttatatagacaccggagggggcaagggtaacacaaatccggttaaaaggaaggaattcacaaaaccgtaatggccaacctggcttccaagccaaaggaaatcccaaccgggaaacggaacaaatcctcaatcctggaacctccaaagccaaaaattctggcaaaagggtaaattccggctgtccggaaaccccctaatcaaggactccctcacccatagcatgcacttatggtgaaccgttatgtgatgaagtcggagcatgatttatttattgatcgtcttccttatgagtggcggtcggggacgagcgatggtcttttcctaccaatctatccccctangagcatgcgtgtagtactttgtttcgataactaat

SEQ ID NO: 4507 - DNA, 333 bp, Triticum aestivum
  Clone ID: LIB103-059-Q1-E1-H8
catcatgaaattggtgatggaggatggttggtgatgacgatggcgaccgattcccctctccggagccccgaacggactccagattagccctcccgagaggttttagggcttggcggcggttccgcatcgtaaaacgtgatgatttcttctctctgattttttctccctgaaactcaatatatggaagtggagttggagtcggagaggcaacagggggcccacgaggtaggggcacgccctaagggggcaggcgcaccccccaccctcgtggcaaggtggtggccccctggccttcatctttggcaggtttttttcttattttctgaaaagtgt

SEQ ID NO: 4508 - DNA, 410 bp, Triticum aestivum
  Clone ID: LIB103-060-Q1-E1-A10
tgttaaaaacattgatgtcggcgtctgccgcatcaaactgccgttctaaatgggcaaattcgcaattcgggttagcaaccggagcttcaatcacctgcacataaaggcattatggttattacctgggaatatgatcctctgttcgtcgtcgtttccgacgataaccagagtctcaggggctactatctacacagggcacacctagcatgtgcaggactatcatatattcttttacgtacctcaaagcctgtcagtagactcataaaagcttcatgcaatctgctttcggcggacgatattctctccatcaccgtattcatcagcacacggtgttcatctgagatggccgctcgccccaccaactccctcagaacatccgatcgcacactatacggtgccggactcttttg

SEQ ID NO: 4509 - DNA, 394 bp, Triticum aestivum
  Clone ID: LIB103-060-Q1-E1-A11
ttggctgatcaaaaaccacagctaccacccgcattacccggtgacggacctgaacgaaaaggacttctggcgcatgttcgacgcgtcgcactacgagcactgccggcagaaatacggcgccgtgggcaccttcatgagcgtctactacaagagcaagaaggggcgcaagtccgagaaggaggtgcaggaggccgaggccgccatcctcgagcctgcctacgccgacgaggcctaggcgtgttcgtcgtccatcgccgtcgtgctcgtcgtcggccgcctgtgtctcgccggtttcggtttcggtttcttcggtcgtcggaactctggattaattggttcccttttgcttggttgcttattaataagtagaacttgatcgatcgtgtagcgttga

SEQ ID NO: 4510 - DNA, 373 bp, Triticum aestivum
  Clone ID: LIB103-060-Q1-E1-A2
gtcggaatcacgggtcgaccctggatggacctcaccgacgccggggactccgacgacatctcccacaccgtcagctacagcgacatctacaggtgcagtaccccgcccccgccccgtctcagtctcatcatggtgctgtataaattcagtccaccttgtcactgctcatcgatcgacctgcttggcgtcgcggtacagttagctcaccatccgttccgtatcagagaatgctgccatgcgtacgttcacagtgattccttgccgaacgtttcgattgctatgcacctcagaactaactctgcggttggtaccctcgacctgtaattagtccattatatatgtatatgttgcatttccagagccaaaatattgt

SEQ ID NO: 4511 - DNA, 404 bp, Triticum aestivum
  Clone ID: LIB103-060-Q1-E1-A3
tatcaagtatcaaattgatcatagcatccaattcactttctatgatagtttttattaaacccaacttggtggccaaccatcctaggacaaatttattaccaatagaaaatacaaggctgtccgaaaaaactctcaaaataatataagtgaagcatgagagatcaacaatttctacaaaattaagccaccgccgtgctctaaaagatataagtgaagcactagagcaaaactatctagctcaaaagatataagtgaagcacatagagtattctaataaattccaatcaagtgggtttctcccaaaaagtgtgtacaacaaggatgattgtggtaatctaaaaaagcaaagactaatatcatacaagattctccaagcaaaacacatatcatgtggcgaataaaaa

SEQ ID NO: 4512 - DNA, 419 bp, Triticum aestivum
  Clone ID: LIB103-060-Q1-E1-A4
ggtcgaccggcacgtgtttcctatagacaatgatgattttacacgtggaaaatccccattggtcggggctgttaacgggttatcggatccaaaacccgacccgatagcttaacagcgttctgttacggtggatgccacgtgtcggtcacccttgaggaaagcacttttgtgacgcgcgatttatcgtcatggaagtggacactttcatgatgataattttggtaatgtcatggaacacttctacgacagcacaggtatgactatcttgattctgtcataaatttgtaatggatgtacatgcatgacaaaaaagcgacctactgtgacaaagacgtatcatcacggaagtgtatttttttagtgatatgggggacaatacagagtacatgtgtctatcacgagattattccaatgaatat

SEQ ID NO: 4513 - DNA, 326 bp, Triticum aestivum
  Clone ID: LIB103-060-Q1-E1-A5
gaagcgggcgccggcgtctaatgaagccggcggccaaggcattactaggggcaggaagaagggcaccacggccaagacgggcgtgcagacgtacaagatttacatcttcaatgtgtatgatcacgtgcacccggacctaggcatctcctctaacgccatgtccatcatgaactccttcatcaacgacatcttcgagaagctcgccggggagtcggccaagctggcgccgtacagctagaagcccaccatcacgtcccgggagatccagacctccgtccgcctcgtcctccctgtggagctcgccaagcacgccgtctccgatggca

SEQ ID NO: 4514 - DNA, 342 bp, Triticum aestivum
  Clone ID: LIB103-060-Q1-E1-A6
tcgcgggaactaaattgctgcagcatgtaaggattgctcgagttgttaccgtttgtcgctggttgaacttgtgatcgttgagatccttggtcttagatgaagaaactagtagtatgttgttccattgttgctacccattgacaattattattgtctgttgctccatcactggaattggtctggtgtatgtgagatttgttctatttgctggaaattcaccggcagttaaagttatgtgaagctcaaattgtagatttgggcatggaaggatagttgataagcacaaaaaaaaaaaaaaaaaaaaaaaaaaagaataaaaaaaaaaaaaaaaaaagaaataaa

SEQ ID NO: 4515 - DNA, 473 bp, Triticum aestivum
  Clone ID: LIB103-060-Q1-E1-A7
ggtccccccaggcacctttatatacgggggcggggggcaccccatagacacacaagttgatcaacggatcgttccgtatccgtgtgcggtgccccctccaccatattccacctcggtcatatcgtcgcggagtttaggcgaagccctgcgccggtagagcatcatcatagtcaccacgccgtcgtgctaacggaactcatccccgaacctttgctggatcggagcccggggatagtcatcgagctgaacgtgtgctgaactcagaggtgtcgtacgttcggtacttggatcggtcggatcgtgaagacgtacgactacatcaaccgcgttgtcataacgcttccgcttacggtctacgatggtacttggaccacactctctcctctcgttgctatgccatcaccatgatcttgcgtgtacgtaggaaattttttgagattactacgtccccatcaggaatgttcttttcgcat

SEQ ID NO: 4516 - DNA, 497 bp, Triticum aestivum
  Clone ID: LIB103-060-Q1-E1-A8
ccgggtcgacgggaatggttcacaagatcgatgtgatcgccgtcggcacacaatctctacatttacctacaggattagttttaaacctcaataattgttatttagtgccaagtttgagcatgaacattgtatctggatctcatttaatacgagatggctactcatttaaatccgagaataatggttgttctatttatatgagagatatgttttatggtcatgccccgatggtcaatggtttattcttaatgaatctcgaacgtgatgttacacatattcataatttgaataccaaaagatgtaaagttgataacgatagtcccacatacttgtggcactgccgccttggtcacattggtgtcaagcgcatgaagaaactccatgctgatggacttttagagtctctcgattatgaatcatttgacacatgcgaaccatgcctcatgggcaatatgaccaagactccgttctccagaacaatggagcgagcaaccaac

SEQ ID NO: 4517 - DNA, 404 bp, Triticum aestivum
  Clone ID: LIB103-060-Q1-E1-A9
acaaggaggaaaagcccaaggaggagctaggaactgaatatctggtgcagccgcttggccgtgctgaagacgaagagcattccagtgacttcgagccagaagaaaatggtgatggtgctgaggacgaggagattgaggatgacgatgctgaggatggtgaggatcctgtcaaggcgcaatcctcatcaaagaggaagaggtctggtggggaggatgaagatgatgacgacggtgatgatgatggtgatgatgatgagaagcctccatcaaagcgatagtcaatttgttcgtgctgatctgtgatcttctctgcttgggccaagaaggaaaataatcctcatggagaggattgttggtaaatgctgtagctttaggacatctgtggtaggtgtagcagctcaaac

SEQ ID NO: 4518 - DNA, 406 bp, Triticum aestivum
  Clone ID: LIB103-060-Q1-E1-B1
gtctggccagcagattgtactgctatggaatacattgaacagtttgatcgtgatggtgattgtatgattgagaatgatggttttcctgatcaaacttatgatgcttggactgttcttggagtaagtgcctattgtggttgtctttggcttgctgcccttcaagctgcagccgcaatggcccgcagccttgggcatgatgactatgctgacaggtgcatggtgaaatttgcaaaggctaagcacgtgtttgaagccaagttatggaatggttcatatttcaattatgatagtggaacaagttacagtagccactccatccaggcagatcaattgggcggacaatgggacactgcatcatctgggtttgcacctctgtttgatgaggacagaataaaatgcacgcttc

SEQ ID NO: 4519 - DNA, 388 bp, Triticum aestivum
  Clone ID: LIB103-060-Q1-E1-B11
ccgaccgggtttaaaatttattgcgggaagacttctctctaaatgggaagacccctatgttatcgaaaaagtctatcgttccggtgccataaaaatcaacaacttcgagggcacaaatccgaaggtggtaaacggtcaaagaatcaaacattatatcttaggtaatcctataaatgttgaaaccaatattattgaaaccgtaaccccgaggaatacataagggacactttccagaacgtttcagactccgaaaaggaataagtatgtggtacggtaagtaaaccgactccaaaacaatttttaaggcaatatttctccgttttggaatatttagaaaaatagaaagataagtatcagtccgggaaggacacgagggccccacaagggt

SEQ ID NO: 4520 - DNA, 425 bp, Triticum aestivum
  Clone ID: LIB103-060-Q1-E1-B12
cggggccgacgggaaacggaagaaaaacccaaggaatccgaatttaacaagaagttacgggaagttaggaacaacaaggacttgaagggaattaccaggagccacaaccttttaaaacccttaaattggaacctggggtcccaagaccaacccgggaaggaaaccccgggccggcggcttaacgggggtaacaaaacccccttcctaaccaccttgtcacaaggtcaggataacctttgcttaactctgtcgtaaaccatgcaaactaagccttgcctaaactgtcatagacaacactaaccaacgaagcgatgggctagctgatcaaagccgagcccagtcggagtcggatcaagagtgtgctgggaacgcaaaggccgcctcgccttgccaccgaaaaggacaacagcgagatacctttgtgt

SEQ ID NO: 4521 - DNA, 112 bp, Triticum aestivum
  Clone ID: LIB103-060-Q1-E1-B3
gcatgtcgatcgagagtggttattgcaaagtatggaaataggataaggtaccggcgagacaaccgtttaaataagtgtcaagttgaaattcaatgatgtatgcaactgaagg

SEQ ID NO: 4522 - DNA, 358 bp, Triticum aestivum
  Clone ID: LIB103-060-Q1-E1-B4
ggtcggaatcacgggtcgaccgggcttggtatgtgagatacatgaaagttgcgagtgatataataattaagggtaaccttaaggtggcaacattaacacacatctgggtggattggtaaggggcaccctgaagaaaccagtggacttgtccgggaaccctggagaaaccagtggacttgcccagtggatcccggagtacctgtgtgatcaccctatggactgccaaccaagatcaaagggattcatcaatttttcatgactagaagcttacgtgcacagccacaagctattatgggctctggcttagttgagtaagttgtgtgacctcttacggtggtagactagcagatgtagttat

SEQ ID NO: 4523 - DNA, 367 bp, Triticum aestivum
  Clone ID: LIB103-060-Q1-E1-B5
gcatgtcgttccaagggtttattgctacaacttggcagacttcagcgaggcacggagtgcccttttgtgcctattgtttgaggcaaaagtctcgaagactgtcagcactgtatggttgttgtcttccatgggatgttgctctgcggtatttttgatgaggagatccttgctgctcttggctacccgccggagtatccaacatgctctaaggctgtgggttcgtatggtatccggtattgtgtgtatcttgcatggcctatcgagccatccctgtaggacggttccgtgccctgtaatgggctttgattttttggttactggatcgggcgaaaaacaagggtgcaacctttttgtccggacgaggggt

SEQ ID NO: 4524 - DNA, 211 bp, Triticum aestivum
  Clone ID: LIB103-060-Q1-E1-B7
ggggccgtagtgcgtgaataagagcaaggcttgaggtgggtcttcatactctagagcatatgcacctatgtagtcgtgaactgctcatcaagtatttctagtccaaatttcatttcggccctcttcacgatcctatcttaatttctcgtggattcaagttccaatctcttctatggtgtctgcgaaatgttgttcaatgccccgtcgtttt

SEQ ID NO: 4525 - DNA, 209 bp, Triticum aestivum
  Clone ID: LIB103-060-Q1-E1-B8
tgacagaggcggccggcgtgacaggggccgtggtcggggtggtgcaccccccaggcagagtgctggcacacctagttcagggaagaagatcactttcggtgatgactgagctcggtgactccgcttgaaatcgcgcagaaactcgaacccacccctagtgaaatgtcaagtatttcctttttgcctggagacgcgtacttgctgttttt

SEQ ID NO: 4526 - DNA, 393 bp, Triticum aestivum
  Clone ID: LIB103-060-Q1-E1-B9
cgatctaaaggatatacgcctttcttcatggtttacagaccaaaggcggtactccccattgatattcgtcatgactcccccttgggttgcaaacaatgttgaagcagacaacaagcaagcacgtcaataagcactggacctgttagatgagaagggagatatggctttggctcatttggcggtttaccaacaagacccgtagcgttatcacaaccgtcgggttaaaacaataacctttcaagaaggtgacttaatgccccggctcatccaggatcagaccgatatgcacaagttatccccaccttgggaagggccctttgtggtcagcaagaatctgcacaatggatcatactacctcattgacattccgagaagactcacgcacttctgagg

SEQ ID NO: 4527 - DNA, 246 bp, Triticum aestivum
  Clone ID: LIB103-060-Q1-E1-C1
ggtcgaccgggcctacatcaaagagaatgaggatcactatccaggtgtacatgacagttacagggcttgtggagtcgatgagtttgtggctcagaagctcacaaaatggaatgataacctcatcacttatttcaatccaaaagtcaatttcaaccaaattggaaggatggccggaatttcgaaaggtataaggtacaatccaacggtgccgaattggaaaaatttgttaatggcccaaaagaaaat

SEQ ID NO: 4528 - DNA, 409 bp, Triticum aestivum
  unsure at all n locations
  Clone ID: LIB103-060-Q1-E1-C10
tctgtctcaacatacattctcggttctacaggacaatttacatcacccggaacaattgcacccccttcaccaggtcgtcggccgctctcacccggtactacaggacctggtaattgcatangcggggtggtggtctccgcacatgcttgttgatgtgtggttattggtgtgctcttggccggctccagacgaataagattcttcatccatagcagcacccaacccttgcagcttccaatccgcggcggggtctcgtcgtcctctcccacatgctgtactggaggaggcaaatcctcgtgccccgattccacactggacaagctaaccctgaagtgcccagcagggatcggctggttgtggaacgtgggttgcaaggggtccattatcatcncctttcctacgtccatct

SEQ ID NO: 4529 - DNA, 349 bp, Triticum aestivum
  Clone ID: LIB103-060-Q1-E1-C11
agggcaagaggaagaagaaggcgagatcggctgtggaattatttggcggcttgtcttcggtttcctttgcaattctttctttccctggttaattttaccctggtgtgattgtgtgtgtgtccttgcaaaactatttcggctctctgtctggcctctgcgacttggtagattctcatggactccatggtgttggatgatgtggagggaggagggtgcgtgttagctaagttagtccactccccttgttcgtgttttgtaagctaattagtagtatcggtactaccagtatatggaactttcaatcggttcacgggcgagttgtgtgctacaaaaaaaaaagagagagaag

SEQ ID NO: 4530 - DNA, 299 bp, Triticum aestivum
  Clone ID: LIB103-060-Q1-E1-C2
ggtcgaccggggctcaggccgcagaggtggtggaagattcggccggggtgacagaggcggccggagtgacaggggccgtggtcggggtggtgcaccccccaggcagagtgctggcacacctagttcagggaagaagataactttcggtgatgactgagctcggtgactccgcttgaaatcgcgcagaaactcgaacccacccctagtgaaatgtcgaatatttcctttttgcctggagactcgtacttgctgtttttaatattatcttattattattattattgtggaccgtggtggtt

SEQ ID NO: 4531 - DNA, 338 bp, Triticum aestivum
  Clone ID: LIB103-060-Q1-E1-C3
accggtcaggtactcgtcgaccggcaagaagcccaaaacgaagaagccggcccccggcttcaaaggaggccggcggcaaggggaaccaccggggcaggaagaagggcagcaaggccaaaaagggcttggaaacttccaaaatcaacacctccaaggtgctcaaccaggtgcaccccaacttggcaatctcctcaaaggcaatttcaaccatgaatcccttcatcaacaacatcttcaaaaacctcgccggcaattcgcccaacctggcaaggtacaacaggaaccccaccatcacttcccggaagatcaagacttccttcggcctcttcttccccggc

SEQ ID NO: 4532 - DNA, 414 bp, Triticum aestivum
  Clone ID: LIB103-060-Q1-E1-C4
ggtcgaccggtgctctagtgctacacatatatcttttagagcacggcggtggttttattttatagaaataattgatctctcatgcttaacttatattattttgagagtcctttagaacaacatggcaatttgcttttaggcataataagaagctttcatataagtgcattgaatactaagaaaagtttgatgcttgatgattgttttgagatatggagatagtgatatcaaagttgtgctagttgagtagttgtgaatttgagaaatacttgtgttgaagtttgcaagtcacgtagcatgcacatatggtaaacattgtgtaacaaatttgaaacatgaggtgttatttggttgtcttccttatgagtggcggtcggggacgagtgatggtcctttcctacaaatatatccccc

SEQ ID NO: 4533 - DNA, 495 bp, Triticum aestivum
  Clone ID: LIB103-060-Q1-E1-C6
ccgggtcgacgggtggacaagattcaccttacttgggatataattcacttaaggattttttcccaacaatggaaatgagaccaaatccacaatgttcaaacccggcatgtcttgagagacagaaagaatatatgcaatcaaaacctgctagagatgcagcagcaaaggctaagatggaagccgaagcatccgcagcaattgaatacccggttcacatggataacgagtggaacattagtgttcttgatgatagtgacacagcaacgtcaagcgttcaaagggctgcaacagacatccttccagaaggccttgtccgtgaacttccagatgaagatacctacgtggaaccacctgctgcaccagccagctgtggtgccatcgatgacgatctcgaggagctccagcggcaactcgacgccctaaactcatcttgacctcgcgcagatctggctcaaacagtgcattggaaaaccaaaccagatgccattgtttgcg

SEQ ID NO: 4534 - DNA, 390 bp, Triticum aestivum
  Clone ID: LIB103-060-Q1-E1-C9
ggatggcagaggagggaaagccgagggtggtggtggtcggcggcggcatcggcggcgccctcctcgccaagaccatggagcccgacgccgacgtcgtcctcctcgacccgaaggactacttggagatcacctgggctgaattgagatcaacggttgaaccatcctttgctgagagatcaataatatatcacacggattacctccacacaggcaacaatggtaacatcttcggcattcagtatcactgacacatgctgttctgactgctgatggtcaatcacttgcatatgattacctcgttgtagctattggccatgtttttgcttctgctggaagcagaacagagaggcttacggaattccagagagataacgagaagataaaatcttc

SEQ ID NO: 4535 - DNA, 405 bp, Triticum aestivum
  Clone ID: LIB103-060-Q1-E1-D10
tctttctgatcacacagttaccctacagctcactggggatcttgacaaaatggttgcactacaaaaactgttggagccttatggcatatgtgaggttccgagaacaggccgggcggcactaatccgtgaatccagggtggactccaagtacctccgcggctactctcttccactgtaataagaagtcatgtgcaacgacgacccaagaagggtcacttggttttggttgagctgagcagaatgtgtaggcagctcagctttttgtgcggctgtggtcttgtttaggatgacttgtttcctctgtggtaatgtgttgacttgtcgaataaattgctcttggtagatgcaagtcgaggtttgcccatgtattgcatcgacaagcagaataagtacatgcctcctttt

SEQ ID NO: 4536 - DNA, 361 bp, Triticum aestivum
  Clone ID: LIB103-060-Q1-E1-D12
gtgaagaacgctattgtccaccccagtgtatccttgcaacgtgcgtttttgttaaagtccggaaccctgcacaatgaccggttcctttgagttttgtttgtcttgctggagttatagattgtgttatctcgattatgtgccgtgctggcatttggatcttaatcttaatccgttcgtctggcaccaaaaaaaaaaaaaaaaaaaaaaaaaaaaaaaaaaaaaaaaaaaaaaaaaaaaaaaaaaaaaaaaaaaaaaaaaaaaaaaaaaaaaaaaaaaaaaaaaaaaaaaaaaaaaaaaaaaaaaaaattttattaaaaaaaaaaaaaaaaaataaataaaaaataaataaaaaatatatttt

SEQ ID NO: 4537 - DNA, 244 bp, Triticum aestivum
  Clone ID: LIB103-060-Q1-E1-D2
ggtcgaccgggcaatcactaaaatcgatcagcattataaggtcaagctgggagaagactgataggttcctgacgttcaagctcctccctcgtagactgactgcagtcaccagtgcaagcagattcttgttctgcccagggcatccccactcacagatgtgatggtgtgatattgataatccattggctagttctcatcttgtggtgtgatgatggtaataaagcattgatttgtttggtgccgc

SEQ ID NO: 4538 - DNA, 399 bp, Triticum aestivum
  Clone ID: LIB103-060-Q1-E1-D3
ggtcgacgggcagaccaatgggaaagaatgcatatttaacggacacaactcgaatccttcgagatctgctttcgcaattagaatctctccgaaaggagaatagcaccctgcagaatgaatcccattatgttacaatggagaggaatgagctgcaggatgagaacgatgtgctccgcaacgaaatactggagctacagaatgaactggcgacgcgtcctgcaggcaacccaggttggggccatgctactgctggatcgcctcacgctgcgagcacagttttcccgtcacatcagccaatgcagccgagcaacatcgcaagcgcagtattcccctttgcagcagcactgcaacagacaaccatcctggaacaaccttatgcaccaccaacaccaccacggg

SEQ ID NO: 4539 - DNA, 461 bp, Triticum aestivum
  Clone ID: LIB103-060-Q1-E1-D4
ggtcgaccgtgtttgtacattcatctactcttcctgtgcatcagccatttgagtcggtgatggaaaattctagagtgaaaatagtgtctttagatcagtcagtggtacccgtcgaagcggatatgttgctggttacagatagtttctcaaaagagtattcagagataaatgaccagtcctatccccccagaggtgtacgctctaacttggtagggttatattgctcatatcaatcatatggtgtcttgcattgctgtgccatcttcttagtttagacatgctttgtgtgaatgctacttgtttagtttctatattatatatgtgaattatgcaatgccatcttgtttagctgggcaacatatatgtgaattatgcaatgccatcatgtttagccaagaatcatatatgtgaattatgtcatgccatccttttttccattacgtattccatttatcgacaat

SEQ ID NO: 4540 - DNA, 315 bp, Triticum aestivum
  Clone ID: LIB103-060-Q1-E1-D5
gtgaagagagctcattgtccaccccagtgtagtcttgcaacgtgcgtttttgttaaagtccggcactctgcacaatgacctgttcctttgagttttgtttgtcttgctggagttatagattgtgttatctcgattatgtgccgtgctggcatttggatcttaatcttaatccgttcgtctggcaaaaaagaaaaaggaaaagcaaaaaaaaagcaaatgaaaaaagaagaaaaaagaaaaaaaggattaacacaccataaaaaacaaaattgaccggaaaaaaaaaacgggccgcccaaagggttcaaactttag

SEQ ID NO: 4541 - DNA, 506 bp, Triticum aestivum
  unsure at all n locations
  Clone ID: LIB103-060-Q1-E1-D6
ccgggtcgaccggcccttcacataaacaaccgccatttgtagaatgctcttttgcttcacttatatttgttagagcgtgggcatatcttttgtagaaagaattaaactctcttgcttcacttatatctatttagagagatgacaggaactggtcattcacatggttagtcataaaatcctacataaacttgtagatcgctgaatatgatatgtttgattccttgcaatagttttgcgatataaagatagtgatattagagtcatgctagtgggtagttatggattagtataaatacttgtgttgaggtttgtgattcncgtagcatgcacgtatggtgaaccgttatgtgatgaactcggagcctgatttattcattgattgtcttccttatgagtggccgtcggggacgagcaatggtcttttcctaccaatctatccccctaagagcttgcgcgtagtactttgtttcgatgtctaatagatttttgcaataagtgtgtgagtt

SEQ ID NO: 4542 - DNA, 479 bp, Triticum aestivum
  unsure at all n locations
  Clone ID: LIB103-060-Q1-E1-D8
ccgggccgaccggggcagcaacagcatcatgggcagcatcgcctcgtccatcggcaagatgggccggcgcaaaaccgacagcagcgagctgcaggtgcaggtcgacgacaagccatagccatggaatgaatgccgagcctctcagcattcattcattcactcaccgtgttatcacgaagcatcataatacgtcatcgccaatgatggagctggctgctactatttttgtagattatttttcttataattttggggagattggcaattgttccatctgtgtagattcgatcccaagctataggctagatccagtcagtccaaataagtgaagagtgcggtcgttgcttggtagcccccatccacacccctcctggagttgctgaaaggttgtacatgtccggattgagaggggttgttggccccgacatgatgataatgagaacccagtacaaatacaanaacggaaacggccccgtaac

SEQ ID NO: 4543 - DNA, 409 bp, Triticum aestivum
  Clone ID: LIB103-060-Q1-E1-E12
gccggatatataaaaaactttcatataaagtgcattgaatactatgagaagtttgatccttgatgattgttttgagatatgaagatggtgatattagagtcatgctagttgattagttgtgaatttgagaaatacttgtgttgaaatttgtgattcccatagcatgcacgtatggtgaaccgttatgtgacgaagtcggagcatgatttatttattgagtgtcttccttatgagtggcggtcggggatgagcgatggtattttcctaccaatttatatccctaggagcatgcgcgtagtactttgtttcgataactaatagatttttgcaataagtatgtgagttctttatgactaatgttaagtccatggattatacgcactctcacccttccaccattgctaacctc

SEQ ID NO: 4544 - DNA, 385 bp, Triticum aestivum
  Clone ID: LIB103-060-Q1-E1-E2
ggtcgacgggatgaaaatgattagaatgccatctttatgaaagcagggtttagcgactacaaaattgtcaagaagcttggagctcgtggtgtcatggaagtctatccataagtttgtgatgcaaatgttgtgatggtgaccgtttggtataaataaagtacgtagtggtgtgctataagaaataaataagggagtctggtgccttgctttttaatggaaaacacaatggaactcaaattagtagttcagcccgtgccttgtcacaacataaccggagcgtgtatttaaattagttttgagaagtattgagtcactcagtgtgtgtctgtgtacacggtatgtctgtatgctccaacatgctgaaatatcaagtttatattatgtt

SEQ ID NO: 4545 - DNA, 265 bp, Triticum aestivum
  Clone ID: LIB103-060-Q1-E1-E3
ggtcgacaggctcttcaagctgacggagggtgcaaaacccaaaggagaaaattgacaaaatgtttaaaggcgaaaagataaataccacggagaaacagttaattgctcaaggtggctttgaaacccccagaaaatgcatccataacaattgacggtgtgaacttggcccccgaatttggggcggtaaaggataaaatcaggcagtttccaaaaactttcaggattggcccatgggttggggcaaccgggaaaccgttgacaaatg

SEQ ID NO: 4546 - DNA, 395 bp, Triticum aestivum
  Clone ID: LIB103-060-Q1-E1-E4
ggtcgaccggggcacataactcagtgacgcttatatcgatctcccctatatgtacccatccatgcaatgtgtttatgcagcatcaagttaccaaccaagttcagaagattaagaaacaagcttcttgaggtccatttagccgcctgttcgatcaacaatgagctccatggacgtcacaggcaccgaaggtctcgccgttgattcgtggcagaagtcgtggccagaggtggtgggcaagtccataaaggaggccagggagatcattctcaaagacaagcccgacgccgacatcgtcgtgctgccagccgggtcgccggtgaccccggacttgaggcccaaccgcgtgcgcatcttcgtcgataccgtcgctgacacacccttcactggctagctct

SEQ ID NO: 4547 - DNA, 483 bp, Triticum aestivum
  unsure at all n locations
  Clone ID: LIB103-060-Q1-E1-E7
acggtcaagatctccgggtcgacgggtgggtaataaagggatatgatcaaagtgttacttgccttgctgacgatttgaaaaccctagagagtaatagtagcaagcctcgcacttcggaaactctatcgtgaacaaacaatggcatacataagcactcaagcataagatgcaagggtaaaactcaaaagaaaagatccaaactgaacgttcaactgaagagctttgatttgcaaaaagaatcaatcgaatcggacctacgaacacaaactgcgatcaaacgaagttcaaattcaaatctgcttgaaaccaaattttaatttgttaaaaccatgttcaagttgattatctggaaagagggtaacaagacgaagattttggcgttggtttcactggatttggacgaacgagcaaaaagtagcgagggtttgaagatcanggactaatctgtgatagaagtattcgtggataggtccctgnccgctc

SEQ ID NO: 4548 - DNA, 409 bp, Triticum aestivum
  Clone ID: LIB103-060-Q1-E1-E8
gggtcgacgggagactgccggacacatacgagaccttggctcggctctctcccccgctacagtaggagaggcgattttttccccttccccgttcgatctagttcgccggcggcggctcgctggtttccccccctctgccggccgcttcggcggcgggagggtggggaaacctcggttcccgtctgtacatagctaggatggagtgggtggttcgccggcagcgccgtggagaggaaggcgctgtcgggttggtggtttgtggcggcggtgatcttctccggtggcggggttctgcggaatccgaccacttccccgcctccttcctggtgctcgtaactcggcggagttgccgtgcgccttcttcccgtgccggagtccgtaggcggcggctccggttgttgaaagtttg

SEQ ID NO: 4549 - DNA, 299 bp, Triticum aestivum
  Clone ID: LIB103-060-Q1-E1-E9
gggcaaaggcgcacgtgcagaagggttccaagggcccaaagattggcggcggcggcgggaagcgttgaaagtgcgttgaaagtcgattacgccaatagacatagagttgtgctgcctagccttgtttcctatcctactatcatagacctttgtcaagttattaccccgccctcttgaatttgcaccttatctgtgaggctgaatggtgttaacgttttggattgtctcgatgagtttatttataatgaatggtacttatgttggttccaaaaaaaaaaagaataaaaaaaaaaaaagga

SEQ ID NO: 4550 - DNA, 407 bp, Triticum aestivum
  Clone ID: LIB103-060-Q1-E1-F10
ccaaggaaacaaaggccccggccttggaaaccccccccctcctcctccggcccccggcgttggcggaactaacaaccacgccaaccaacaaccccaacaccaccaccaccagcaacatgaagggaactacccaaattgttaaatttgctataagtttcatcctggaggtgcaagggcctgttggcatcggtatgatgatgaacatgaagagaagaagaaggccaacctcgtcaccaactcctacgggattgatacaaattggtacgcagattctggagctaccgagcacataacgggggaactagacaaattgacaatgcgagaaagataccacggaggtgaccaaaaagcaatccaattccccaccagccccctcgcaccttccggcgaatcaccgcacctctccc

SEQ ID NO: 4551 - DNA, 382 bp, Triticum aestivum
  Clone ID: LIB103-060-Q1-E1-F12
ttgatcagaaagctgcgaagaagggtcagatgccctcgcaaatcggtgttctgccccgtgacaagcacggtatcccccttgtgaaaagcgttaccggaagcaagatcctccgcatcctcaaggctcatggcctggcgccggaaatcccagaggatctgtactttttgattaagaaggctgtggccattaggaagcatcttgagaggaacaggaaggacaaggactccaaattcaggctcattcttgttgagagcaggatccaccgtcttgcccgttactacaagcgcaccaagaagctcccgcccacctggaagtacgagtctaccactgccagcactctggtggcttaagagggctcttcatctggtgtgctcttaccggc

SEQ ID NO: 4552 - DNA, 380 bp, Triticum aestivum
  unsure at all n locations
  Clone ID: LIB103-060-Q1-E1-F2
ggtcgaccggcccaaattgctcattcagattgaaggatccacgtggcattcaaggtctggaaggtagattccgtgtccgcacctagtttgcgggctcgacatgtgcacgaccggattccaccgcgacagccaccatgcgcacctcctccgcacgggcggagacggtaatgacacgctagttcctcctcgccggcgtgctagagcatgcgctcgtcctcctcttcgtatgttgtgtgcatagactcggctccaccagctgctcacgtgtttggcatcgcagcggcatcgcanggagggactgcagacggcgtgagcgggcgagccttcggcttcatggcacagggatggcggcgacacgggggtgatgggtgagaaatttt

SEQ ID NO: 4553 - DNA, 414 bp, Triticum aestivum
  Clone ID: LIB103-060-Q1-E1-F4
ggtcgaccggccactagtttcgattgattatcctctatatgcctctgtgagagcaattgaaacaaaatctcaagtagatgatcagcagtggcttacttactgggtgctgtactcgtttatcactttgtttgagctcacttttgctccgatacttgaatggcttcaattctggcccaatggaaaactgttcttcaactgctggctagtcttcccctgcttcaatggtgctgcttatgtttatgagcattttgcgcggccaatgtttgtgaatcgccaaatagtcaacatctggtacgtctcaaggaaggataagttgagtatacctgatgatgtactcccaacccgcagagaaatatattgaactaaatggaccagaagcatttgagaagctaattatcacgtctacaagtacaa

SEQ ID NO: 4554 - DNA, 501 bp, Triticum aestivum
  unsure at all n locations
  Clone ID: LIB103-060-Q1-E1-F7
ccgggtcgacgggtgatgatgactaaagcacgccgcttgacttacgagacacataccagcagcgtagggtcatatcgatgccagacaatttgcttgagtgatcacagtactggtactccctatagtacctactacagtactatgccctagcttgctagagtagattagtagagtaggactctgctccactactagcaccggaggagtagtatattctaatctaaaatagttacaaacttcgatgcccgatcatggaacgactatgaaccgtgctcaaagaccgtgtctacgtggtgtttggacttatatgcaaaaaatagcaagatgccgtgcattgcacggcacaccatcatcaccaactcggttttttctctactcctactcctatagaagacttagttggtgatgatgggggtgaggaggcgtgttcagccgggcgtgcagcggacggcgcagcactattcgatttgttacaaaanagtacttgtagagatagataca

SEQ ID NO: 4555 - DNA, 410 bp, Triticum aestivum
  Clone ID: LIB103-060-Q1-E1-F8
ccgggccgacagcctcaaggaaaagatccacgacaaggaaggtatcctgccggaccagcagcgcctcatcttcgccgggaagctgcttggcgacggccgcaccctggccgactacaacgtccagagggagtccacgcttcacctcgtgctgggcctcgccggcggggacaagggctcctgctacccgcccaagatggagcctaacctgctcgccctcgcgctcaagtacaggcagcacaggcttgtttgccgcaagtgctatgcacgcctgcccctcaggtctgccaactgccgcaagaagaagtgcggccacagcaatgagatcaggcccaaggagaagctgcgctaccactgaagcattggaaacttgaccctgggagacatgccatagctggattaactgggagttc

SEQ ID NO: 4556 - DNA, 422 bp, Triticum aestivum
  Clone ID: LIB103-060-Q1-E1-G10
caggctcaaggattaggctgcaacagttcttaccccatagggttacaaccttttttcctggctttgtggcaaattgtttgggaaccggtttatgcattgcaattgcaaccctgagctgctgcaaatgtttgaactgatgaggtttatgcattttgaacttaatagtaatgctatttgcatgccttcaaatttggaagcaaatgtttcagctgtgccaaaaaaaaaaaaagaaacaacaaaaaaaaaaaactgaaacataaacaaaaaaaaaaaaaacaaaccatacaaataaaaacccaaagacaaaaaaaagagcacatccaaccaaaacaaaagcgacacgggaaaaacaagataaaaacttgcttcaaaaggcccccaaaaatttccccataactccaaaaaaaaaaaaacggcccccc

SEQ ID NO: 4557 - DNA, 406 bp, Triticum aestivum
  unsure at all n locations
  Clone ID: LIB103-060-Q1-E1-G11
ggcataatgacgaaattgcaaagattcccaagtggatgactaaggcctaggaggatatcaacgctgaaaactcaaggatggccgatttgcaagctcacatcaatataaaggcggagcgtctgaaaacacgggcttggcgtctaaaccttgagcagaatgcttccaacgcagttcatgagcggaggtacctaatgcggcttgaaactacgtcggtatttccccaaagaggaagggatgatgcagtacagctatggtaggtatttccctcagttatgaaaccaaggtatcaatccggtaggagaaccaagcaacactatgtacacagtacctatgcacaaagaacaaacccttgcaacccaacatgtaaggtatcaatctggtangagaaccaagcaacactaaaccg

SEQ ID NO: 4558 - DNA, 159 bp, Triticum aestivum
  Clone ID: LIB103-060-Q1-E1-G2
ggggtgatggaaaagttcttggttcctagcctcaagaccttctctctgcaaccgtacgacccaaaccagggattaattccgggcgggaacaataaggcgttgggaattcccccgaagggtacctaatggcatccaatcaactccccggggcttcgaacc

SEQ ID NO: 4559 - DNA, 132 bp, Triticum aestivum
  Clone ID: LIB103-060-Q1-E1-G3
gggtcgaccgggcaaagcttgtcaaagatgcctttgatccggcaaaagaaaaaggcccctggcaccattttaattgaggaattggagccaattggcgcaaaccgttttgccatccagttattgggggccacc

SEQ ID NO: 4560 - DNA, 394 bp, Triticum aestivum
  Clone ID: LIB103-060-Q1-E1-G5
accggtcagtactccgggtcgacgggcagtaaactcacatcacgtgacaaaagggaaaaatagagcggtgcccatagaggtacgtgccatacggcctatcccagaggagtcccgccactggttgttaaaaccaatcaccttcgaccatcaggattactctagaagtatccggtatgcaggatggactgccttgatattagatctgataattgacggactccaatttacacaagtcctaatggacggcggcagtgatctaaacctgctataccaggacacaagccgcaaaatggggatagacccaaccaaaattcaccatagcaacacttcctttcaaggggtaatgccaggcccacatgcccattgtacgggctctctactgctagaagttgtg

SEQ ID NO: 4561 - DNA, 513 bp, Triticum aestivum
  unsure at all n locations
  Clone ID: LIB103-060-Q1-E1-G7
ccgggtcgaccggaggtgcgccattattcatcgacgagctcatccaaagagcggaggcacaaaagaagaggaagagcattcacacgggttcatatacacaagatgaggacaagtttatttgccaagcttgatggagattagccaagatccgaggaccggcgcgcaacaaaagggcattgttttttggacgagagtccacagaacattccatgaaaggaagatgtttaagccctaccaaattacaagcaaccgtggcatcggctctattcaaaaaagatggttgttcatccaacaagagtgcaacaagtattgcgctgcatttgagagcgttgaagcacgtcncgtgagtggtctcggcgttggggacatggtatgctctcctctttccagccctttccttgctacggccatgagacttcggccgtgtatatgtttgcatgttcacttgttgttgatcatctggtgtaggcatttcaatctttggaggcattcaaggcccgacacaatgacaag

SEQ ID NO: 4562 - DNA, 488 bp, Triticum aestivum
  Clone ID: LIB103-060-Q1-E1-G8
tcgacccgacgggtgatttaatttattgattgccttccttatgagtggcggtcggggacgagcgatggtcttttcctaccaatctatccccctaggagcatgcgcatagtactttgtttcaataactaatagatttttgcaataagtatgtgagttctttatgactaatgttgagtccatggattatacacactctcacccatccacctttgctagcctctctagtaccacgcaactttcgccggtaccataaacccaccatataccttcctcaaaacagccaccatacctacctattatggtatttccatagccattccgagatatattgccatgcagctttccaccgttccatttattatgacacgttttttcattgtcatattgcttagcatgatcatgtagttgacattgtatttgttgcaaagccaccgttcataattctttcatacatgtcactcatgcatcgttgcacatcccggtacacg

SEQ ID NO: 4563 - DNA, 414 bp, Triticum aestivum
  Clone ID: LIB103-060-Q1-E1-H11
ccggaacgacgacgtgagatgtggacgagtcggatagaaagctcttagatgatgaaaagaaacccgatatcacgaaacgaccacacactcctattggagatgaggtggaatgcaagaagccatagatagcagaaggctcaaggtgccaaggagaagaacctgatgctggagggataaagaattcctcctgggtctgatgacaggggaatgcagtaaacaccagaagcatcaaaactatgatctggaacagtatcctgaataaactattttctggattatgaatgaattctgaagcatggggctataagtgaattatgtaacatggatttgtaactatggtggatgttaagttaacgttctatcagtgcatcgtgaatgcgtgctcaaaaaaaaattaaaaaaattattcaaaaa

SEQ ID NO: 4564 - DNA, 397 bp, Triticum aestivum
  Clone ID: LIB103-060-Q1-E1-H12
ggggatctcacacaggacggcgtaaaagggcaaattgccaacaacaatggccaaaaaaactgggaaatgcaccccctgatgaaattggaccaccaccccctgctgaacctggaaatgctgcttcaactggattcaaaaaaccgcttgggaggccgaaaaaggagaaacaacctgcatcaatctctgctgaaactggagatgcaacccctgctgggactggtgatgctgaaactggagatgcaacccctgctgggactggtgatgctgaaactggagatgtaacccctactgaaactggagcagcaacgcctgctgaaggtggaaatgctgcatcgacagggatcaagagaccgcttggaaggcctagaaaggtgaagaagtttgggaggccaagaaa

SEQ ID NO: 4565 - DNA, 325 bp, Triticum aestivum
  Clone ID: LIB103-060-Q1-E1-H2
tcgataaatttaatctcatcaaaagatcgggacaccctcgcctctatcaagtggtatcagttttcaggttgctcggtgagaatttctagtttcccctaaattagattttttttcttaccaattgtcaaaaaaagccacaaaaaagttagatctattcatccttttgtcaaagccagtctgagcctttgcaattttcttttcattgtttgcattattgaattatcggttgcatcgtcgtgtcgagttgctggtcttagtgtctagttcgtttagagtttcgagttctgttcacattagtcatgtcgccgctgcatcgttatccctc

SEQ ID NO: 4566 - DNA, 193 bp, Triticum aestivum
  Clone ID: LIB103-060-Q1-E1-H3
ggtcgaccggtccctgcccacggagcaacaactagcattagtaccctactgcaacgcaacgcccagggagctaggcaagccaacctacaacctaaacaattgttcaatgggaactccaataaccaactgggcggaaccttgccaaggccgaaggtaaaatccggcccctcctccctctcctccggggtttccg

SEQ ID NO: 4567 - DNA, 297 bp, Triticum aestivum
  Clone ID: LIB103-060-Q1-E1-H4
accagctcacgaaccaaagttcactgcaaatggagttgattgggaagaagttaagtaccccaggatgaatttggtcccccaacaggagaggtaggatccaacttctttcaagggaacacaggctcaagaggttctcccaccacaggaccacaggctaaaagcaagggacaagcttcaagaggagattgatgcatttgaagaagctcccaaagccttggtcaatttggttcccaagactacatcaagttctacttcatcatgtacgactacaactccagggatttccatcaaaagggg

SEQ ID NO: 4568 - DNA, 385 bp, Triticum aestivum
  Clone ID: LIB103-060-Q1-E1-H6
ggttttgaatttaactctatgcaggatctaaactccctctcctttgacaggactggctggcgaaggccgagcagattatctgtccggccccattgccagaggacccaccggacgccctcttaacggggctgctggctccggcaccccacgtggtgctggaaaataaggccaagaagaaggccacgggcactcggaagagttcccgttttcaggtgttatcggatgatgactccaaggctgactcctctcacaaaggtgaggaggagaagaagaaagcctctcccccagcggggggagggaagaaaaggaagcctccccaacgagggaggccgaagggtccaagaagggaaaaactctttccccggactgctcctgcaacgccaac

SEQ ID NO: 4569 - DNA, 382 bp, Triticum aestivum
  unsure at all n locations
  Clone ID: LIB103-060-Q1-E1-H7
acggtcaggtactccgggtcgaccggttcggtaccgtgaattgccctttctcacattgagagttgctgcaaacttctccggtgcatccaaaccctgtgatatgatacgctatttcacacataaacctccttatatcttcctcaaaacagccaccatacctacctattatggcatttcatagccattccgagatatattgccatgcaacttttcaccgttctgttcatcatgacatacgttacttttgtcatattgccattgcatgatcntgtagttgacataatatttgtggcaanagcacaatgcattatttttcatacatgtcactcttgattcattgcaccatcccggtgcaccgccggaggcattcatatagagtcat

SEQ ID NO: 4570 - DNA, 418 bp, Triticum aestivum
  Clone ID: LIB103-060-Q1-E1-H9
ccgggccgaccggagtcgaaaaagagatcgaaggaggtgcaggcagagaagctcaaggagacggccaaggagaagaaggagagcattgagtcggtcaagaagtggaggaagcagaggcaacaggggggattttccaaggggaacgaggacgggccaaacctcaactttgaagttgaaggactcaagcaacacaagaagcataggcctggcgtttctcctggtgacaggtctggtggtcttgctaagcgaggcaaacaaggaaagaaccataggtcaaaggattccaagtttgggcatggcggccgcaaagggatgaagaagcaaaacactgctgagacgacgaatgacttcagagggtttaacaaccagaagggcgagtcaagaaacaagaagaggaagatgttttgatacggtgttg

SEQ ID NO: 4571 - DNA, 274 bp, Triticum aestivum
  unsure at all n locations
  Clone ID: LIB103-061-Q1-E1-A1
ttttatttgttcgttatcgctgtgttgtaaaccgttggctgctcgagaatgatcctctgcaagtgtttgtagcaacattccttttctgttttttgactttgataagagtgtaactttatctgtggtggtgtagaattctaaagctgaatcgctgtgccttgtanaagcttgacattgccaaatggcaccaagaaaatttggcataattattaggcgtgaatgtcgatggtgataaccatctgggaatgcanaactttagacttaggtttctgat

SEQ ID NO: 4572 - DNA, 402 bp, Triticum aestivum
  unsure at all n locations
  Clone ID: LIB103-061-Q1-E1-A3
ggcgtcgacctgagcctctcacatcctttcgttgcgccgcgcgctgtccaactttcttcatcctcctcctcgcgaagctcccgtaccaacccgacctctggactcaacccccgcggaagcaaaagttgtcaaagaatcaattcaacccactgcgaaaagcgaccgagagagagaggaaccggaagcaagaagatggggcaggcgctgcgcaggctcttcgactccttcttctccaccaaggagatgagggttgtgatgcttggtttggattcagctggcaaaacaacaatcttgtataggctgcacctgggggaggttcttcaaactgtgcctacagtaggttttaatgtcgaaaaggttcagtacangaatgtggcatttactgtgtgggatgttggtgga

SEQ ID NO: 4573 - DNA, 387 bp, Triticum aestivum
  Clone ID: LIB103-061-Q1-E1-A5
agctcgtgatgtttctgcctcaccatgtccatgtattgggaacgggctcgccgatggtcacggtgcaatgcaccagcgaggatggcgcagaggagggggttggcgccggatcatcgaccaccgcattctccattgggacgtcggcgtcctctggatgcctgccggccagccagtcggtagcaatggctgccatctccttttggtccgtcgtccggccatccggaagagtgctggagcgcgaggaaaccatcgtgggagtggtgtggacaggagaaagggaacggaggcaaatgactacggctacggccggcgcagcagtttatatagcaatggtgggcggcagagggacggacgggtagcgccggagtagctgccttggcaatcgtg

SEQ ID NO: 4574 - DNA, 372 bp, Triticum aestivum
  Clone ID: LIB103-061-Q1-E1-A6
cggaaggactacataagaattgggtcaagttggagcgtgattgagctgtactcgtctatggtgcgtgatttacccgcttccagtgcgtctgaactcgacggactagcagtaatgcaaactgaaaaatggagcgtgatattacagctctatgattatatacctctcagctcacgtctaaccgagattatgacaagtatgaaagggcatattctataataagttcgacatagtcacagtagcatcaggatattctttagcgagaatactatgagagggcacattcgaatcgaactaagacgagcgagagcaacgagcacaatcttggaaccgtacatccaatacagctggtcagcgtgaacaatcgagtcggat

SEQ ID NO: 4575 - DNA, 453 bp, Triticum aestivum
  Clone ID: LIB103-061-Q1-E1-A7
ggggctccaatgcttccagacggcaccagtggacctccaaggatgcacctgccgggtggattgagctcgaggggctttggaacgtggtggaggggctgcgggggtcaccggcaagctcgggtcggggacggcgactagaggcctgcccgatcgggctgcagctaagctacggggtcgtggtggttgtgcggtgaggtttgaggcttcggagcagaggaaggggctctatatatagccggaggatgagggggtacgtggctccgtcagagttctctagaagtcggcgagcgacgacgaagggtgccagcgagggggggagagctcagcgatcatgcgggagctgttgcagctcgcggacgagcacaggaagcaaaggggggagaagacacgggcacgggcgcactatggcttttggccgcgacgtacccgtgatcgctatggcatctccggcat

SEQ ID NO: 4576 - DNA, 133 bp, Triticum aestivum
  Clone ID: LIB103-061-Q1-E1-B3
aaaatattattgcgttgcgcgtgttgttaaatttgtatcgacgagcgtacaaataatggaacatatcaaagattttttgttttggttaaaaaaaaaaacaagaaaccaaaaaaaacacaacaaacccaacaaa

SEQ ID NO: 4577 - DNA, 451 bp, Triticum aestivum
  Clone ID: LIB103-061-Q1-E1-B5
cggagaagcgggcgccggcgtccaaggaggccggcggcgaggggaagacgaggggcaggaagaagggcagcaaggccaagaagagcgtggagacgtacaagatctacatcttcaaggtgctgaagcaggtgcacccagacgtgggcatctcctccaaggccatgtccatcatgaactccttcatcaacgacatcttcgagaagctcgccggggagtcggccaagctcgcccgctacaacaagaagcccaccatcacgtcccgggagatccagacctctgtgcgcctcgtcctccccggggagctcgccaagcacgccgtctccgagggcaccaaggccgtcaccaagttcacctcctcctagacaacttaggcttgatcctcgtcgcttcatgcgttctgtatgtacgtagttggcagtatgatgttacaatctttgtaaggattgtgttg

SEQ ID NO: 4578 - DNA, 232 bp, Triticum aestivum
  Clone ID: LIB103-061-Q1-E1-B7
tgacaagctgacggcggccgttgatgactatatccgctggtgtatggcaagcactgacagggcgcaaggttggtggttcggagctgctacgacgtaccgtgtatgcatgctggttctgtgggcgctatacgccgcgcatacgtacatttggacaacgccatttgtatgttgtgtttgtcgctcaattacgtcgttaggtcgatctctgtcgatccgtcctgttaagttcttg

SEQ ID NO: 4579 - DNA, 476 bp, Triticum aestivum
  Clone ID: LIB103-061-Q1-E1-B8
gcatgtgtagttagcttattttgatgaatctatggctagtaaaataaccatatagaagttggaatacagtaggtataacaccaatataaataaagaatgagttcattatagtaccttgaagtggtcttttattttctttcgctaacggagctcatgaggttttctactttaagttttgtgtcatgaagttttcaagttttgggtaaagatttgatggattatggaacaaggagtggcaagagcccaagcttggggatgcccatggcacccccaagataatccaaggacacctaaaagccaaagcttgggggagccccggaaggcatcccctctttcgtctacttctatcggtaactttacttggagctatatttttattcgccacatgatatgtcttttgcttggagtgtcttgtattatttgagtctttgcttgttagtttaccacaatcatacttgccgtacacaacttttgag

SEQ ID NO: 4580 - DNA, 145 bp, Triticum aestivum
  Clone ID: LIB103-061-Q1-E1-C2
gtcgaccggtcgacgagctgcagtcaattctactacatggagccaagacaattgtggacaaaaagaagatcaatgctgtatcaattcattatgatgacaaggccatcgacattctccccaatttaaacccttcaatggggaaaat

SEQ ID NO: 4581 - DNA, 330 bp, Triticum aestivum
  Clone ID: LIB103-061-Q1-E1-C3
acaatcacttcagccagttagagagtcttcacatagttgcataattattcgactactcattgatcttcacttatatcttttggagtagtttggtgttgctctagtgcttcgcttatatatttttagagcacggtggtggtttaattttatagaaagtaatgaactctcatgcttcacttatattattttgagagcctttagaacaacatggtagtttgctttggttatgaaactagtcctaatatgatgggcatccaagagggatataataaaaaaattcatatagagtgcattgaatactaagagaagtttgatacttgataattgttt

SEQ ID NO: 4582 - DNA, 229 bp, Triticum aestivum
  Clone ID: LIB103-061-Q1-E1-C4
ggtcgtgaatttgaaagaaacttgtgttaaagtttgtgattcccgtagcatgcacgtatggtgaaccgctatgcgatgaagtcggagcatgatttattttttgattgtcttccttatgattggcggtcggggacgaccgatggccttttccaaccaatctatccccctaggagcatgcgtgtagtacttcatttcgataactaatagattttggcaataagtatgtgag

SEQ ID NO: 4583 - DNA, 483 bp, Triticum aestivum
  Clone ID: LIB103-061-Q1-E1-C6
gtgacaatagtaaccttactgaattggttgcggagctagatggtctacggaaagagcatcacagtctaagatctgccttcgagtatgagaaaaacacaaacatcaagcaagttgagcagatgcggacgatggaaatgaacttgataaccatgactaaagaggcggacaagttacgagctgatttggcaaatgctgcaaacagagcacatgcagcacaggttacacctccacagcctgggacaggacaagctgcagcggtttcagcagccacaaatccatatgcaagtgcatataccagtcacccctccgcatatcagcaaggaacttcccaagccgcggcataccagcagggaactgcccaagccgcggcataccagcaaggaactccccaatccgcggcataccagcaaggaaccccccaatccgcggcataccagcaaggagccccccaatccgcggcataccagcaaggagccccccaat

SEQ ID NO: 4584 - DNA, 472 bp, Triticum aestivum
  Clone ID: LIB103-061-Q1-E1-C7
gcacccaaatggatagttcttcgcagccatcagaaggttcaaacggcagcagggttcaaagtcttcaggtgggcgctctacatggcaaagcactgtcctccgccgagcttttggctaagatgcgtggaacgcgagagggggcagcttcagacgcactggaacatcagctcagcctgggctctgcttccaaccagagaccaggctcgacagagaacggacgcacatctaactcttcttctagtaggaacattatcgtgcaacctgaagtcctgatccgccagctgtgcaccttcatacaacaaaacggtggctccgccagctcgacgagcttgacggaacatttcaagaaccgcatacaaccaaaggatatgctggtgttcaagaaccttctgaaggagatagcaatgttgcaaaggggcgcaagcggctcaacgtgggtgctgaaacccgagtatgggtaatttgcggcagt

SEQ ID NO: 4585 - DNA, 483 bp, Triticum aestivum
  unsure at all n locations
  Clone ID: LIB103-061-Q1-E1-C8
acggggccccgaaaataggcccgaccttcggcgccatgatgatctccggccagaaggcggcgcacctggcgctcaaggccctcggccggccgaacggcatcgacgggacgctcaagaacgtgaccccggcgctgcacccggagatgatcctggcggcgaccaacaacggcgacatcgtggacgcctaaagcaaagcaatgaaccacggacaccaagaggcgtacgtacgctggtgtttgggggcgcaaaatcaataagatggttcggtgaaacggaggatgcttagggacgagggcttgtctttgtgatttgtcagactcgtgtttaattccgatgtttatctttagttttcttgtgttagcgtattttgttcatgccacctgcccgccatgtgctctgctctgctctgcctcacggcagctccatggatgatgaatccttctggaacaagaggagggaataaaaaggttgagttcanaaaaa

SEQ ID NO: 4586 - DNA, 388 bp, Triticum aestivum
  Clone ID: LIB103-061-Q1-E1-D1
tataataaaaacgaccatattgagtgcgttgaatactaagagaagtttgatacttgatgattgttttgagatatggagatagtaatattaaagttgtgctagttgagtaattgtgaaattgagaaatacttgtgttgaagtttgcaagtcccatagcatgcacgtatggtaaacgttgtgtaacaaatttgaaacatgaggtgttctttgattgtaatccttatgagtggcggtcggggacgagcgatggtcttttcctaccaatctttccccctaggagcatgcgcgtagtgcttcgtttttgatgacttgtagatttttgcaataagtatgtgagttctttatgactaatgttgagtccatggattatacgcactctcaaccttcc

SEQ ID NO: 4587 - DNA, 295 bp, Triticum aestivum
  unsure at all n locations
  Clone ID: LIB103-061-Q1-E1-D2
ggaggatgaacgagtgatatgtcaagtagtggacagataagccaaccactggatgtggttctgagggattttgcagtggggtttgtagggtgctatgctgctgaactgctctgtgtttgggatttgaaataaaacgaagggagatgtgccccgcccttaaaaaaaaaaaaaanaaaaaaaaaaaaaaaaaaaaaaaaaaaaaaaaaaaaaaaaaaataaataaaaagatgttaagaagggaaaaaaaaaaaaaaaaaaaaagcggccccccaaaaggttcaagctttaattaccc

SEQ ID NO: 4588 - DNA, 422 bp, Triticum aestivum
  Clone ID: LIB103-061-Q1-E1-D5
acgcttccgtggcactcggcgttcctgttcatagacttgtgagagccgctgattcagtttcggtatgcctatcgaaaggtttaggtgctcctgttggatcagttattgttggttcgaaggacttcatatacaaggctaagattcttaggaagacactatgtggtggaatgaggcaggttggaattctctgtgctgctgcctatgttgcggttcgcgacacggtaggcaagcttgccgatgaccatacgaaggctaaagttttagcagatggactgaagaaaatcaaacagtttacagtcgatctaacttcagtggagaccaatatggtattctttgatattgcggatccacacataacgcctgacaaactgtgtcaagtcctggaacagcgcaatgtgcttgcaatgccagcaagctccaag

SEQ ID NO: 4589 - DNA, 441 bp, Triticum aestivum
  Clone ID: LIB103-061-Q1-E1-D7
ggtattctaaaaagaatggtaggaagaaaattactgcagcaaagaaaagtgacaagagagctcaaataaaggcaccacctgcaggaagagtcgtcgtgctcgatgagaatggagtgccacttggacacaggaaatctagtctgtgcaaccaggttgcgggacacaacaagctgacatgtccaacactcttggaaagaaacaatgatgaggaggtcaagcaacccaaatctcaaaaatagcagcccaaagttatggaacaaaagaagggaccacacccaaagaaagcaagtagtagactttgtagcatatgcaaggagtatgaaccacataatgcaagaacatgcccgaagcacgctgatgctgaaaagacaagcaaaaagatagagaagaaacataaagcaaaacctagagccatcaacaagaaagtggtggaagatgaag

SEQ ID NO: 4590 - DNA, 483 bp, Triticum aestivum
  Clone ID: LIB103-061-Q1-E1-D8
gggaatcaaaaaacagcgtgggaggccgagaaaagagagaccgccagaagaaatgtctccagaaactggagatgcaatgcctgctcctgaaactcgagatgcagcgcctgatgaaaatgaagcagcaacgcctgctgaagctggagatgctgcttcaactggattcaagaaaccgtgtgggaggccgagaaaggagagaccaccagcatcaatccctactgaaactgaagatgcaacccctgctgagactggtgatgcaaggcctgctgaaactggagcagcaacgcctgctgaagctggagcagcaacgcccgctgaagctggaaatgctgcatcgacagggatcaagagaccgcttggaaggcctagaaaggtgaagaagcttgggaggccaagaaaggagaagccagaagaagcagcaatatctggtgaaactggagatgatgctgcagcagctatatttgctgaatctggagcagcaac

SEQ ID NO: 4591 - DNA, 253 bp, Triticum aestivum
  Clone ID: LIB103-061-Q1-E1-E1
agtaccgcatcaacaggaacggtcttgctacaaaggtggagaagtcacgaaagcagatcaaggaaaggaaaaacaggaccaagaagatccgtggtgtgaagaagaccaaggccggagatgcgaagaagaagtaagggcctttgcttggtttaggacggtatccctgtggcaatgttgctgagtgcttaattataactagaaaagactttgtcatttatgtcatctcctggtatgctaagaggcattttgtagt

SEQ ID NO: 4592 - DNA, 431 bp, Triticum aestivum
  Clone ID: LIB103-061-Q1-E1-E2
gtcgacgggtcgccggtgcaaaaaaacccgtgatacgatacgctctatcacacataagcctcattacatcttactcaaaacagccaccatacctacctatcatggcatttccatagccattccgagatatattgccatgcaacttccatcatcatcatatacatgacttgagcattcattgtcatattgctttgcatgatcataagatagctagcatgatgttttcatggcttgtccgtttttttgatgtcattgctacgctagatcattccacatcccggtacacaaccggaggcattcatatagagtcatatctttgttctagatattgagttgtaagtaaataaaagtgtgatgatcatcattattagagcattgccccagtgaggaaaggatgatggagactatgattccccacaagtcgggatgag

SEQ ID NO: 4593 - DNA, 395 bp, Triticum aestivum
  unsure at all n locations
  Clone ID: LIB103-061-Q1-E1-E3
gtcgaccggtcctaggctggaactaaagttttaccgtcgtagtctccatggcttgtgcagacttgggtttcatcggcaacttttcacactgaccacctttgtttgtaggcttgttgaacgtcgtttttgttcgatgagcgacaagctgcataaaattttctatatccatggattttgaagctaactcttcaaacgtgaggggcctcactccttgtaactggacagccacttccgancggagattgttcatgcacatgcgcactgcttccggctcattgattggctgtgggcaatgaagacttaggtttctccatctgtttatgaaatcagccgccctctcgttgaacccttgttcagtttgggtcaactcagttatgcccaccgtcctctgtgtg

SEQ ID NO: 4594 - DNA, 428 bp, Triticum aestivum
  Clone ID: LIB103-061-Q1-E1-E4
gtgtcattattgatttgcttgccatttgcaaaccgtgcatccgtttcttgtgttctttatatcgatttcgaccgaaatcatctcatctttccagtggcatgcttggtttgccaagttactgccttgttcatcttttcccttccggaccacgcatacgcatcgcatatcatatctcgcatatcatacatgttttgcatcatgttgcttgtgcatttctcgtgattgattgtggttcgttgcttgtgttcttgtcttgggtagagccaggagacgagttcgtgaacgaggaacctgtttagtacgcttacgaggatcaagctttcgacaactctgagaaccttgcaggcaagataaccacccctcgaaatcacttctatctttgctttgccaattgttccgctcaattgccatgttgcgctacctaacac

SEQ ID NO: 4595 - DNA, 470 bp, Triticum aestivum
  Clone ID: LIB103-061-Q1-E1-E5
ggggagcaaacaaacccttcccaagcaggctcaacgcagttcctccaagaatttctaatgggttaattccaggggtttcatctgaggcatatcagaaagacaacaaaatgtggaagaagcatgtgaaggcttatagcaatgtgaacaagtatctacttactggtaggtacagaaacatcatggacatgaatgcaggttttgggggctttgctgcggcgatcgagtccccaaaatcttgggtgatgaatgtggtgccaaccattgcaaagattgcaaccctgggggctgtttatgagcgaggattgattggcatttaccatgactggtgtgaagctttctctacttatccaaggacctatgatcttatccacgctagtggccttttcaccttgtatagcaataagtgcagcatggaagacatcctccttgagatggaccgcatcttgaggcctgaaggtgctgctataatg

SEQ ID NO: 4596 - DNA, 447 bp, Triticum aestivum
  Clone ID: LIB103-061-Q1-E1-E6
gggggtgtacacttagtgtcgaggaagagtgatatccatgggaatcagttgtactagtagcaaaaaaaaaaaaaaaaaaaaaaaaaaaaaaaaaaaaaaaaaaaaaaaaaaaaaaaaaaaaaaaaaaaaaaaaaaaaaaaaaaaaaaaaaaaaaacaaacgaaaaaataaaaaaaaaaaaaaaaaaaaaaggggccgcccaaaaggttcaaacttaacttacccttgaaggcaacttcaaacccctccaaaagtgcccccaaatttcattccaggggccttctttttaaaacttcttaacgggaaaacccttgggtttaccaaattaaacccccttgaaaaaaatccccttttcccaactgggcttaaaaccaaaagggccccaacgtttcccctttccaaaaatttgcccaccctaaagggcaattggaaccccccttttaccggc

SEQ ID NO: 4597 - DNA, 462 bp, Triticum aestivum
  unsure at all n locations
  Clone ID: LIB103-061-Q1-E1-E7
gtacgatgtgtcagatggcatgggcttcggaatgctaaccgagggtgagagatccttggtcgagcgcgtgaggcaagagctgaagcatgagcttaaacaggggtacagagaaaagcttgtggacatcagggaggagatactgcggaagcggagagccggtaagctcccaggagacacggcgtccactctgaaggcgtggtggcaagcctacgccaaatggccgtacccaactgaggaggacaaggcgcggctggtgcaggagacggggctgcagctgaagcagataaacaactggttcatcaaccagcgcaagcggaactggcacagcaaccctacctcgtcctcgtcggacaagagcaagagaaaaaggaacaatgcaggtgacggcaacgccgagcagtcctggtanggcgggcgcggctggagagcgaagaacgaatgccccatatatgtacatagcgc

SEQ ID NO: 4598 - DNA, 184 bp, Triticum aestivum
  Clone ID: LIB103-061-Q1-E1-E8
tgctatgtgcttcggtatgctggctcagggtcatatgtccttggtctcgcgcttgaggctgctgctgcagcattctcttagacatgggtggtttgacaagcttgtgccatgctggacgataccctgcgggtgcgcgcagccggtgggctcccaggatctccggcgtccactctgtttgcctttc

SEQ ID NO: 4599 - DNA, 403 bp, Triticum aestivum
  unsure at all n locations
  Clone ID: LIB103-061-Q1-E1-F1
ggtcggtatctagggtcgaccgggccaacattgaaatgaagagcaggcaccagcgcaagatcctggagcgcgcaaggaagatgtcagagaagattgggaggctggaggtggaaatgcagaaggtccaacangccctggtgaagtatgaggaggagcagacgacgtcgaaaaccgtggtccagcggtccaaagtgcagctggtggactatctctacggtcgaatgcgggaaagccggaagccgcggttctcgccctgccgttgcatgaaagcgaaaaccattgatgactgactctgccttcgttcgcgccgctccttttttttgaaggcggaatgtgnaaaggttggggttttcagtttcagatggagcgactcattagttcatgtttttctacgtanatacag

SEQ ID NO: 4600 - DNA, 426 bp, Triticum aestivum
  Clone ID: LIB103-061-Q1-E1-F10
ccgggccgacggggaactcaatggcgtccaccttcgttggcaactcgacctccatccaggagatgttccggagggtgagcgagcagttcactgccatgttcaggaggaaggctttcttgcattggtacactggtgaaggcatggacgagatggagttcaccgaggcggagagcaacatgaacgacctcgtctcggagtaccagcagtaccaggatgccactgctgacgaggagggcgagtacgaggatgaggatcaggagcctgaggaggacatgtaaggtgggatgtccatgtcgtgctttgctgggtgggggttctgggggcagagtttgatctgtttggtgctttgttataaatctgtttatcatcgcaactaccgcttgtacgccaccgccattcttcctgcctttcctaagctctgtattt

SEQ ID NO: 4601 - DNA, 399 bp, Triticum aestivum
  unsure at all n locations
  Clone ID: LIB103-061-Q1-E1-F4
gacagagctagcaaaagctcttgccgagcagctatttgacaatgaaaatatgttggttcgctttgacatgtccgaatacggtacgaagggatctgtgttgcgcctcatcggagcacctccaagctattttggttatgacgatggaggacaactgactgaaaaagtcaagagtcacccgtacagtgtcaccctgtttgatgaggtggaaaaggcgcatcgcgaggtgtaaaatgttttccttcaacttctcgatgatggtttgttgaccgatggcaaaggccgaacagtagatttcanaaacaccatcatcattatgacctcaaatcttgggtcaaagcaccttgcagcaggaatggttgggaagaacacantgcaagaaacacacaagcttgtcatgaa

SEQ ID NO: 4602 - DNA, 394 bp, Triticum aestivum
  Clone ID: LIB103-061-Q1-E1-F6
acgggggtagcgagtggagggctgggccggccagctacagtgctgggccggtttggctaccaggtgagcgccaggtaggcttctgctccctttttttttatttctgttttctattttctgtagtttgttttgatttagtttagcaactaaatcatttaaataaattcagtagaattttatgtggcttgctaaaatatatataaagccactcacaaacttccagaattattggagtcatatttaatatatattaaatataaatccaaagcaaatagttattggattaattcaaatggccaaaataattatctctgtgactccaaaaatattggtttgaattttacctctcaccaatatttccatggaataacaggaacattttcttggacacatt

SEQ ID NO: 4603 - DNA, 402 bp, Triticum aestivum
  Clone ID: LIB103-061-Q1-E1-F7
acgggagactttaacctatcaccgtcacaagtaagatttcgtcgtgctttttatgtaaaccacctaagaacaaacctctgggaacatcgtcgctattcacgattctgcctgaaaaaaaagtaaatgaattgattaaggaaaatatggaaatgaattaaataaaaaaagtaagagatcagatgttgtaaaaataaataaaaaaacaaatgaaaagggggcgatcctaagggttcaaggtttatttcagcttgaaggcaaggtaataccccttcaaaattgccgctttaattcaattcaggggcgttgtttttaaagggactggacgggaaaaaccttgggttatccaatctaaatgccattgaagaaaatccccatttcgcaattgggggtaatatgtaaaag

SEQ ID NO: 4604 - DNA, 478 bp, Triticum aestivum
  Clone ID: LIB103-061-Q1-E1-F8
gggggagattctaagacacgattgtgtttgtccactattagcgtgacatgaaaattcctactaacgcaggatcgcatcgcattttctggaaggacttcgaagtggagttctggtttgcctttcctgatgatccttttagccttatgtaccttgagaccaacaactcttggccacgaaaacccatgatatttgtacacatttgaactatttgctctccataatgttcgttttgcctcacctggaacctgcatagattgagtagaactttggcattatgttaaaaattggagatcttaaatgttttctaatgttgttaccaacgttcgcatgatagagcatataaattaggtccgtagctgtaaatgtatctaaaattctagacaagcaaacacatcattttttgttttttctgatgttaaaccatggcattccttcttatgatggtgatatatgtaccttgggcatgtattccgcaacc

SEQ ID NO: 4605 - DNA, 432 bp, Triticum aestivum
  Clone ID: LIB103-061-Q1-E1-G11
attcccgggccgaccaccactggccatctgatctacaagcttggaggtattgacaagcgtgtgatcgagaggttcgagaaggaagccgccgagatgaacaagaggtctttcaagtacgcctgggtgcttgacaagctgaaggccgagcgtgagaggggtatcaccattgatattgccctgtggaagttcgagaccaccaagtactactgcaccgtcattgatgctcctggtcaccgtgacttcatcaagaacatgattactggtacctcccaggctgactgtgctgtgctcatcattgactccaccactggtggttttgaggctggtatctccaaggatggccagacccgtgagcatgccctccttgctttcactcttggagtgaagcagatgatctgctgctgtaacaagatggacgccaccactcccaag

SEQ ID NO: 4606 - DNA, 424 bp, Triticum aestivum
  Clone ID: LIB103-061-Q1-E1-G12
gtcccgggccgacgggaaacacaaaactgcggtggttatctgtaaaccagcctgaccgggagctcgaaatgcttctgagtagaagaagcaacctttcccacttccacaacgctcgttcgctatctatatccggtgcggtggacgacctactattccctcttgataagtttatctatctggtggtgttggaccttgaaggttggcagtgcttcaaggacgaagacatgttgttgatatgcagcagcaggatgctccttctccgttatctgagcgtgaagaatacaagagtccgcaagctcccggccaagatcaaggagctgcgcagtctggaaacgttggacatgagccacacagaggtcagtgagctcccatcagaagcgtgcgagttgtcacggttggagacgctggacctaaggagcacact

SEQ ID NO: 4607 - DNA, 438 bp, Triticum aestivum
  Clone ID: LIB103-061-Q1-E1-G2
ttcaatgatagatagatttttgcaataagtatgtgagttctttttgactaatgttgagtccatgaattatacgcactctcacccttccaccattgctagcctctcttgtaccgcgcagcttctgtcggtacggcggtaccatacacccaccatataccttccttaaaacagccaccatacctacctattatggcatttccatagccattcctaaatatatttccatgcaacttgccactgttccgtttattatgacacgcttcatcattgtcatattgctttgcatgatcatgtagttgacatcgtatttgtggcaaagccacctttcataattctttcataaatgtcactcttgattcattgcacatcccggtacaccgccggaggcattgacatggagtcatattttgttctaagtaatgagttgtaattttttga

SEQ ID NO: 4608 - DNA, 404 bp, Triticum aestivum
  Clone ID: LIB103-061-Q1-E1-G3
ggtcggacctcagggtcgaccgtgcggtggttgcaatcaaagcaacaaatggcatcgtcgcagaagccacagaggaggagctcatgaacgcaatgtccctcgctgaccgcaccggcatgtttgcctgcccgcacaccggggtcgctctcgcggcgctcttcaagcttcgggaaaagggcacaatcggggcaaacgaccgcacggtggtcgtcagcacggcgcacggcctcaagttctcccagtccaagatcgactaccatgatcagaagattgaggacatggcctgcaattacgccaacccaccggtcagcgtgaaggccgacttcggcgccgtcatggacgtcctcaagaagaggctcaagggtaagctttgagcatgccctcctgctgctgctgctgaaccc

SEQ ID NO: 4609 - DNA, 318 bp, Triticum aestivum
  unsure at all n locations
  Clone ID: LIB103-061-Q1-E1-G4
agtcacaggaacagatttctgtgatgaactactttccaataagggagtaggtacagttacctcatcaggttcaacttccctccaattcacttctttagggagaaaccccttccctaaaaaggatcaatcctaagcagcaaatatctggcctttggatcggtgataaaaggtgtacccaacagtccctttggggtaccctataaagacacatttctcctatttgggttcgagcttatcaggttgaagctttttcacataggcatcgcaaccccanactttaagaaacgacaactttggtttcttgcaaaaccatagttc

SEQ ID NO: 4610 - DNA, 482 bp, Triticum aestivum
  Clone ID: LIB103-061-Q1-E1-G8
gatgttgatgccaaggaaaaggaggtggtggctatgcgattagagaaagagcaggatacgaaagcaagaaggttcggcagttcaagcacctctgcctcacagatgccacctggaaggactctgcctcggagcggttcagcacgcaacatgtgatgctgatatgaagcattaaaaagaccttggagcatcccttgtgtagttagttgaatcatggcatccagggaccctctgctgacttgtgtgtagagaaaacaagaagacattacatcttggttgcctgcccagaagtgtcgagcctgagcctgaccctgatcgatcgtgcctactacatctcgtggtcgcggaaatcaatcaatcaatcagcgactcgagtcgggtgaagttagtgtcgttgatgagatttggtggtgtttttattcattttctatcgtggaatcgaaacactttgttgtataggtatggtgtggccttgcaatattttt

SEQ ID NO: 4611 - DNA, 404 bp, Triticum aestivum
  Clone ID: LIB103-061-Q1-E1-H12
ggggaatctcacacaatacgatgttctgctgcgtcaagcagccgcctggcggtcagaagggtgcctactacgccatccatcacatgcgggcgatcgtacgggaccatcatcaacttctgctaccgagtaaactcaaagattgggccgcgagcgtgtcggcagtccaggacgcggacatcagacaagaattctttcgcatccagtcggagtttgcggaaatcatccatcaagatgtccttcgtacctcggggcagttctgcctcagaaatcaaccgtccaacagtgacatcgacacaatgctacaaatgcagcctgacaacgcccgttatttcatgactcccacgatagacagcagcttcatccacgctccggtcccttgagtcgagtcgaaagcagtgaacctg

SEQ ID NO: 4612 - DNA, 376 bp, Triticum aestivum
  Clone ID: LIB103-061-Q1-E1-H2
tgaggagcgcgaagaaggagaaggagggaggaaagaagagccaccatggttctttttgtccgatgttagactatgggctatctttttccataagccgtcttgcttattcattggggcttctaaactagttatgaaatagctaatttagaagtcctcaacaaatcctaaagggcaacttatattttaagccggaaagaggcatcttattttgtaagccactcaaaagaactagccctacaaataagatacacacatttacacacacacatatgctaaatgtcacttgtctgaagatgaatttggcactacttgattatgcgtatagcatcgacaacgcgacccgtcatggtgtcccatcggagatgtgcctggaacg

SEQ ID NO: 4613 - DNA, 479 bp, Triticum aestivum
  unsure at all n locations
  Clone ID: LIB103-061-Q1-E1-H4
ggtatgtaagtggaaggtggatgagatctatcatgtaatcgagttagttttgttagggtttgatccctagtatgcactatattctgagattgatgttgctatgactttgctatgcttaatgcttgtcacaagggcccgagtgccatgatttcaattctgaaccaataaggtttccaggaaaaaaggtgagtccttgatccaaccttgcagttcaaatatcaccaacaatgtgtaagaatccggaaaccccaaattgacaataatcggaacaattcccggtgatgacaatagtttgaggagttcatgtattcactaggtgttaatgctttggtccggtactctattaaaaggaggcnctaatatcccttagtttccgttanggacccgctgccacgggagggtaggacaaagatgtcatccaagtttcttttcataggcacgtatgactatattcgaaatacatgcctacattacattga

SEQ ID NO: 4614 - DNA, 436 bp, Triticum aestivum
  Clone ID: LIB103-061-Q1-E1-H8
gtattgttttcttttactaacggagcttataagatttcctgttgagttttgtgttgtgaagttttcaagttttgagtaaagtttttatggactatggaataaggagtcgcaagagcctaggcttggggatgcccaaggaaccccaagatattcaaggatagccaaaagcctaagcttggggatgccccgggaaggcatcccctctttcgtctttgttcattggtaactttacttggagctatatttttatttgccacatcatatgtgttttgcttggagcgtcgtgtactatattagtatttgatttttagtttaccacaatcacccttgttgtacacaccttttgggagaagcctattttattaggatttgctagaatactctatgtgcttcacttatatcttttgagcttgatagtttttgctctagtgcttca

SEQ ID NO: 4615 - DNA, 318 bp, Triticum aestivum
  Clone ID: LIB103-062-Q1-E1-A1
attggaaaataaattcaaagggctttgaatttaattctttgaaactcccaactcatatttcatataatttgaagaagtcattttatcttctctcgtgaaaatcattgagtcgcataaagtttcagaattggaatatttccaaatgaaattcaattattctcagaaccccttgtcatttaaataaatggaagaagtcaggtcatcttctctccggggttttgtgttgaaaagaatttgaattcacggggatcagaaagccattatgaaagtttgggaaagtcgttttattccctctcatttacctttcaaaaggttttg

SEQ ID NO: 4616 - DNA, 423 bp, Triticum aestivum
  Clone ID: LIB103-062-Q1-E1-A10
acggtccatatccggtcgacgggggagaaagaaagttgggaatgatgcagtcgatcagctcaacaagttcaatcagaaattggcagatctttccactgttcccacagcgagactgatcgatggtatcctgctcaccaagtttgacgctatcgacgacaaggtcggagccgcgctgtccatggtttacatatccggatctccggtcatgttcgtcgggtgcggccagtcctacactgacctgaagaagctgaacgtgaaatccatcgtgaagaccctcctgaagtaaaatggtagtgctagtacatgtcgtgctccgatatgtgccgcattcaaggagtctctgttatatctccgaaaatcccccgtgacatcgtcgttttctcgtttggtttggcgtgaaactgtcgtccctagcaaactttt

SEQ ID NO: 4617 - DNA, 413 bp, Triticum aestivum
  Clone ID: LIB103-062-Q1-E1-A11
gacggggatattgaagctggtgaatacgaggaaatcagttttcagcttaattagttttactccttttgcttcttcttttttgagggattactccctttaatttttgtttcagaggcctgatatatccatgttccatgtatactccccttatatataaagtcattttcactctgtgggatactagatgttgcagtaattagataagtgaagtaaagtaaaacctcatgtgcacttcatcttagtctaatcaatgtggtcaatctcaagatcatggtggaacatggtgcaatgaaagtatgcgccatgaatggacagaaacggtacagcaactagggttctcggaacatgcaaagcagccgaaaacggaaagccagccggcctggagctgggggttgcatcgattccaaatctcc

SEQ ID NO: 4618 - DNA, 412 bp, Triticum aestivum
  Clone ID: LIB103-062-Q1-E1-A12
tcattcaaccttgcaggtatgccgagtggatttctaacattgtcccagtatagaataaaggatctggcaagttgagggtgtgcattgatttcagagatttgaatagggctacacccaaagatgagtatcctatgccaatagccgatatgcttattaatgatgcttctggacataaggttattagctttctagatggtaatgccggatacactcaaatttttatggccgaacaggacatgtacaagacagctttttgatgccctgatttccttggtttattcgagtggacaatgatgacattcagattaaaaaatgctggcgccacatatcacagcgctatgaatttgatttttcatgatttactcggtgtcatacttgaagtctatattgatgatactgatgtcaaatcgga

SEQ ID NO: 4619 - DNA, 438 bp, Triticum aestivum
  Clone ID: LIB103-062-Q1-E1-A2
gtcgaccggccaagaaaagggagaaacttttcgaaaatcattttacaagtgggggaggggaaaacgagaggcaaatggcgaagaatgtaatgcaagggaagagagtttatgatgggtacttggtgtgtttgacttggcgtagatctccccggcaacggcgccagaaattcttcctactacttcttgagcttgcgttggtttttcccttgaagaggaaagggtgatgcatcacagtagagataggtatttccctcgattagagaaccaaggtatcaatccagtaggagaagaacgcacaaataacctaatacctgcgcaaacaattaaacacctgccgcccaacgcaataaaaggggtgtcaatcccttcacggtcacttgcaaagatgagatctgatagagatagataaattaaaccacaacaaagatcaattttttt

SEQ ID NO: 4620 - DNA, 445 bp, Triticum aestivum
  Clone ID: LIB103-062-Q1-E1-A4
ggtcgaccgggcgccggggaagacgcaacagtggaagcccgcgcggagaggagtacgagggttcactggttcggctgcggtgtgaggctgtcgtcgctgcagggcctggccagcgatgggaatagtaggggcggtgaggcctccgcggcagcacagccggccacgggaggcaggagcatgtggcacgaccggcgctgctttgggcacctggagcgagaagaccagaggttgaagaagcactacggtcgttggatagacatcgtacggtcattggagctagaatcatgcatattgactaatttgacaaagccctccgtcccgtcaacttattaggcccacaattcatcctgccactatactgggtcccagctaacagggggagtattcatttttttgtgcgtaataacgaggcacttccttgcgtgcgaagatatagctggtgggt

SEQ ID NO: 4621 - DNA, 470 bp, Triticum aestivum
  Clone ID: LIB103-062-Q1-E1-A5
tgtccctcccccatcttcttcctccccgcaactcgctgctcctcccagaaccgaagctcagtcccgtggccacgcagaacaaaatgcagcgagcaattcaagctatcggatcacatggcagtgtgctcaaatctgctgtcctgcaacacatcagtgttgtgaagcctgctatgctgcctgctgtgttcccgcgcttcatgtcagtatcacctgctcaaatagaggagagtggatttgagagcagcactgttgcggacattttgaagtccaaagggaagagtgctgatggatcatggctctggtgcaccactgatgacagtgtctatgatgctgtcaaatcgatgacacagcacaatgtgggagctttggtggttgttaaacccggggaagataaatcaattgctggcatcgtcacagagagagattatctccggaaaatcatagtgcagggtcgatcctccaagtcaacc

SEQ ID NO: 4622 - DNA, 462 bp, Triticum aestivum
  Clone ID: LIB103-062-Q1-E1-A7
ggggagaacattgcattgagatccaaaaagagaaaagaagctatctagctactagctatggacccgaaggtctgaagtaaactactcacacttcattggaggggctatggtgatgatgtagaagccctccatggtggatgccccctccggtggacctccggaacaggccccaagatgggatctcgtggatacagaaagttgcagcggtggaattaggtttttggctcctgttctgatcgttcggggatacgtaggtatatataggaggaaggagtacgtcggtggagctctgagggccccacgaggtagggggacgcgccctccaccctcgtgaccgcctctggcgcttcttggagtagggtccaagtctcctgggtcacgttcggttggaaaatcacgatcccgaaggtttcattccgtttggactccgtttgatattctgtttcttcgaaatactaaaaa

SEQ ID NO: 4623 - DNA, 475 bp, Triticum aestivum
  Clone ID: LIB103-062-Q1-E1-A8
gggccgacggggaggtggagaaatcgcaggcggagggggtgcacacgtcgacgcagatgggcagcgggcacttcccggaggaggggttcggcaaggcgagctacttcaagaacatccaggtggtggacagcaccaacaacctcaaggcgccccatgggatgggcaccttcacggagcagtccaactgctacgacgtgcagaacggcaacaacgccgactggggctcctacttctactacggcggccccggccggagcgccaactaccagtgatgacaagaacaccaccatgactgacgagtgagtgaagtgtagtgtggtgcaccatctgcattgttaggcctagatgatgataggtgtcatgtgaatgggtcctggtgttgtctcctgatttttttcttttttgattttctcccgtgtgtcaatcaagccttctgaagagaagcatggcatgtggtgtggtctgtggtggtgca

SEQ ID NO: 4624 - DNA, 417 bp, Triticum aestivum
  unsure at all n locations
  Clone ID: LIB103-062-Q1-E1-A9
gactaacacatataaatggccatttgtattccaggtaacagtcctgaaaagaaagaggacgatggacctgagggggaacggaggcangagagcattctggatggctatgctgaggcggctgtttatttgatccatggtgtangaagcgccggtcaacacggtggagctgcgccgtgggagggtgctggtttggagatccgcgtgactatccgagcgctagtccacctcagaatggaagcaagtggtgccttgcgggtgcctcgccatgccatggcagtgccctgtacgaaaccaatgcacattacgtttttcatgaccatgaaaagataaacgtgaaggtcgggcatacgctataacttgatgatgcatataaaatatgatgtctaagaaagattcggtacacatgtttctgaatgt

SEQ ID NO: 4625 - DNA, 444 bp, Triticum aestivum
  Clone ID: LIB103-062-Q1-E1-B12
ccggtcgacgtgtttgtgtaagaaacgtccggacatccccagtgttcccaggaaagtaatcgagcaccatcttgcagtctgtcctcatgcgcggcccgtcaagcagaaagtcaggaaacaggcattggaccgccaaaagttcatcgcagaagaaatcaagaaattggaagcagcaggccttgtcagaggagtgctccatcctacgtggttggccaaccctgtagtcgtgcgcaaggcaaacgggaaatggaggctttgtatcgactttaccgatgtcaataaagcttgtcccaaagacccacttcccttgccgcgcattgaccagattgttgactccacggccggatgtgacttgctttcatttcttgatgcatactcaggataccattagatcttcatggcagaagaggatgaggagaagacgcattcaatcacccatgtgtc

SEQ ID NO: 4626 - DNA, 334 bp, Triticum aestivum
  Clone ID: LIB103-062-Q1-E1-B3
cattgtttaccgaggatcggggtgatatagattgttaggtccgcagtttgccactttgtaatgttcctccctacatagcgttgtcatgccatgtgtgccttgctctcagcagggaagttgagttgttgtatgttgtgtagcataacgatgctttctgcctgtggaattaaaccataaagattgccaaaaaaaaaaaatgacaaaaaaaaaaatcaatgggcacataaacatggtgctcacgtgttgaaatatgttctgtgacgcggaaaagctaagtgtgctgtcacgaaaaaattgggcccaccaagaggttcaagcctaacttggactggaa

SEQ ID NO: 4627 - DNA, 118 bp, Triticum aestivum
  Clone ID: LIB103-062-Q1-E1-B4
ctacaaaacgttgtcaagccatgtgttccttgctctcagcaaggaaattgagttggtggacgttgtgtagcaaaacgatgctttctgcctggggcagttaaacaataagattgccaac

SEQ ID NO: 4628 - DNA, 476 bp, Triticum aestivum
  Clone ID: LIB103-062-Q1-E1-B5
ttgcaggaaccgtcgtcggattttgctacgactgatgagatttttgctacatccatcatgatggagcttcgaccgatgacgatggtgatggagtttttgctgcaaccgccgtcaagttttgctacgactgggcgagaaatttgttacatccattctttttttacggcaaagaccggtggccgtcgttcatggcgaaacccgtgcgacgagcgtcaatggcgagggatggtaggcggtgcactgggaccatagcgcgtccaccgcgggggttggaacagatcggcggggttggattgaaaccagcgatgtcggagctgcaaccgaaattaatggtgaccggggaagaggtctttggcaaacatcggggaagagcagcgcagcaaggcggcgagatgcgagcagccggcggtcgttcgcctcgccggagccgcggacatggacggaatcatgcggataaggagggaagggcctctttt

SEQ ID NO: 4629 - DNA, 501 bp, Triticum aestivum
  Clone ID: LIB103-062-Q1-E1-B6
ccgggtcgaccggaagatttaaagtatttgggtaaagatttgatggattatggaataaggagtgccaagagcctaagattggggatgtccaaggaaacccaaggtaaaattcaaggacaaccaaaagcctaagctcggggatgccccggaaggcatcccctctttcgtcttcgtccatcggtaactttacttgaggctatatttttattcaccacatgatatgtgttttgcttggagcgtcttgtatgatatgagtctttaatttttagtttaccacaatcatccttgctgtacacaccttttgggacagactcacatgaatcggaatttattagaatactctatgtgcttcacttatatcttttgagctagacaattttgctctagtgcttcatttatatctttttagagcacggcggtggttttattttgtacaaattattgatctcttatgcttcacttatattattttgagagttttttagaacagcatggtatttg

SEQ ID NO: 4630 - DNA, 485 bp, Triticum aestivum
  Clone ID: LIB103-062-Q1-E1-B8
ccgggtcgacgtacatcatttccctagacatcaatccgatcacaatcgcccgaaacttcttggcaggtatgtactgggtcggcatgaactcccattggatggctgccttcagagaagacggtaaaaagttggtgctcatgaacttccagacctcccatgagattatccttcctccgttggattatatagagtattaccatcgcggtccaagtcatctagattactacgtcagttggacggaccttgttttgcagaagattgtaatctgccaagtacccacacgatatgcgaattacatagacttcaagctaattgccttgttcaaccgcggactcgcctatctttataccggtgccttttttagccggagacaactcggctcacaatggatcatcgtcaaggccgatacacacttctgtgatgctattgaacacaatggcatcatctacgcgatcgacaaagcagatggcaccatgtattgctgg

SEQ ID NO: 4631 - DNA, 430 bp, Triticum aestivum
  Clone ID: LIB103-062-Q1-E1-B9
cggaacggctacatgcaagtctgatcaatcgatgatcgtcggaagcaagtgcagtgcagtgcagtcagccagaggaagacgaaggcgtttcgatcagtccgatcccctgttcttttcatccagacaagtcgggagggggtttcttgtcagctagtcggtttctggcttgtcagtagctgcggtgcgtgtcgtgtggatcgagttagttgtactaccagaaattcggaatgacatggaacccatgcgtatcatagcagatggtacgggctgcctgcccttttcctgggtgttcggttgggtttggttcatggtggagtgacagtgtgacaatgtatgcctggcgatgccactacagggcgtgtatctgtaggcatattccgagctggctttatccctgtggatctgttttgtccgcttattttgacactgc

SEQ ID NO: 4632 - DNA, 458 bp, Triticum aestivum
  Clone ID: LIB103-062-Q1-E1-C1
tagtgcaacatctcagcaatgctaatataattggatcatacaaccacccctcaaagtgcgatgaagaatcactccaaagttactatctagcggagaacataagaataaattgtttgtagggtacgaaaccacctcacaactattctttctgttcgatctattcaagagttcatattaaaataacacaaagctattttttccgttcgatctatcctagagttcgtactaagataccacgaaagaaaattcatattcataatactcaatccaacacaaagaactttaaagagttccccaagatttctaccggataaacaaagacaagaacgtgcatcaacccctatgcatagattaccccaatgtcacctcgggaatccacgagttgagtgtcaaaacatatatcaagtgaatccatacgatgccccattgtcaacacgagtattcaattgcaagacatg

SEQ ID NO: 4633 - DNA, 429 bp, Triticum aestivum
  unsure at all n locations
  Clone ID: LIB103-062-Q1-E1-C12
ccgggtcgacgggctcaatcaagttatgacgaccgactcacagcccctcaaattaagacctacagttcccatccagaggtggagtcgtggacttcccccgacctcagcgcaggaggtctcggccagtctgtcaagccttcccgtcttcgatcgtacgtcatgtcgtttgattcagacacgttacaaacttacgcgacaatccggtcgaaggtggcgtttggcatcatcgagaagcacacggaggcgctattcgggaagccggagatcgtgatcaccccggaaggaacggtcgattcttccaaggatgagtatgtcaggataagcttctccgggttgagaaggctcatcttanaggctgtcaccttcggatccttcctctgggacgtcgagagctatgtggactccaggtacaatttttgtcacaactaa

SEQ ID NO: 4634 - DNA, 436 bp, Triticum aestivum
  Clone ID: LIB103-062-Q1-E1-C2
ggtcgacggcgttcttttgataaagttgagtccatggattatacgcacttttacctttccatcattgctagcctcttcggttccgtccattgcactttctcaccttgagagttggtgcaaacttcaccggtacatccaaaccccgtgatatgatatgctctatcacacataaacctccttatatttttctcaaaacagccaccatacctacctattatggcatttccatagccattccgagatatattgccatgcaactttccaccgttccatttatcatcatgacacgcattacttttatcatattgccattgcatgatcatgcagttgacgtcgtatttgtggcaaggccactttgcataatttttcatacatgtcactcttgattcattgcccatctcggtacatcgtcggaggcattcatatagagtcatat

SEQ ID NO: 4635 - DNA, 342 bp, Triticum aestivum
  Clone ID: LIB103-062-Q1-E1-C3
tcgaccggggcggctcgagcagaggaaaggaagctttctaccctagcagagaaaaaaaaagcagaggagaggaagcggaggcgacgatgtcggcgatgactgcggcggtgcccttctggcgcgcggcggggatgacctacatcggctactccaacgtctgcgcggcgttggtgcggagctgcctcaaggagcccttcaggaccgaggtctcctcccgcgagaaggtccacttctccctctccaagtggaccgacgagaagcagcagaagcccactgtgcgcacagatgatgaatgaagatcaggtgccatggtgatgttttgagaaattgttggtttatggt

SEQ ID NO: 4636 - DNA, 364 bp, Triticum aestivum
  Clone ID: LIB103-062-Q1-E1-C4
ggtcgaccggtcggagcgtcttatataatatgattctttgctttttagtttgccacaatcatccttgttgtacacaccttttgagagggacacacattaatcatgaatttattagaatactctatgtgcttcacttatatcttttgagctaggtagttgctctagtgcttcacttatatctttttagagcacggcggtgcttttattttgaataaattgatgaaccctcatgcttcactaatattattttgatagtctcgaaaatagtatggcaattttcttagcttatgaatttagtcctaatatgatgggtatttaagaggggtataataaaaactttcatgaagatcattgaatatatgag

SEQ ID NO: 4637 - DNA, 416 bp, Triticum aestivum
  Clone ID: LIB103-062-Q1-E1-C6
ccgggccgacgggcgggatcatgatactgaggaatatataggataataaggtggtgtattaccaccatgcccgttgagctgatgtttgtttcagctagagaaatcgttacgcccgctcataattcctttttcgacgctctggagaataataactactggtatatcattctatatcaaagccggcttgtgaaataaatgatccgccgtcttgccttcaaaataaaaaaaaaaaacataaaaaatagaatctggaccagtagcttgaagcatccattttctggaatacgaattaattccgcttcatgggggtctcactgattcatgtcacatggagttcgtatataatggtggatgttgagttaacgttctattagtgcatactaatcgccttgcaggagataccccttttgcaaaag

SEQ ID NO: 4638 - DNA, 464 bp, Triticum aestivum
  Clone ID: LIB103-062-Q1-E1-C8
ccgggtcgacctggctgttcttgaaattgtagtatataggtttacctatgcctcatgagtgatgttcaaatcatgtcaaataaaaatgatggttcagatgataataactattattgttgttgttgtaataaacttgccattttgtaacagaagcatattgttatgtacaggttgccttggtggtgagagccgcaaaggaagtttgagatgtacaggtgaagttgatgattaagagggcctgtgcaatgttgtatacttgttgatgtaatctggtgtagttgttattgaggtcaggtgaattgatgttggatgtgttctttgacacattttaaaaggcctttactcaatgaaacaattgaatagaaatttgtgaaatggaatagaatatggtctattcaatggaaactgtgaaagcatgtttgattatctgtaatgggtcgtgccacaactgtttggatgaatat

SEQ ID NO: 4639 - DNA, 408 bp, Triticum aestivum
  Clone ID: LIB103-062-Q1-E1-D1
ggtcgacgggcgatgagcctcaagcgatcgcaggaggacaccgggaggcatgtcaggatgctcatccatgagatcagtagcacgcttgacaggcacatcatcctcaagactactctggttgagctcgggaggacgctgggtctggaggaatgtgctttctggatgccgtcaaggaccggttcgagccttgagctaattcataccatgcgccacaacatccccacgggctcttctgtggagattaatctccctgttgtcaaccaagtcttaagtaccaaccgtgcgatcatagtgccacatacttctcctttggcgaggatccaccctgttcaagggcggcatgtctcacccgaggtggctgctgtgagattcctctgctgcatctttcaaactttcatcccgaagctt

SEQ ID NO: 4640 - DNA, 419 bp, Triticum aestivum
  Clone ID: LIB103-062-Q1-E1-D12
cggtcgacgccaagaaagacttatgtcaaatatatcatcagtatcaatcactatatgacaccacacaacagatatgctgctgtcagcagtgctctctaaatagacactgcaattatcttatacatcattactgttgtcagcaatgctctctaaatagacactgcaattatcatgtacatcattgctgctgcaataaaccactaagaattattcaatatctagcctagcgccttcgttatcatcaaccgagggttgaggcggagttacaaaatctgaatgagaaaccaagggattgtccaagtcagcgacatctttgttatcttcagagctgttagaagcagctgagatggcgtcacccgattctgaatgtgttctgtccacatatgcttcgggtaaggagctctcggccacatcagcat

SEQ ID NO: 4641 - DNA, 414 bp, Triticum aestivum
  Clone ID: LIB103-062-Q1-E1-D2
ggtcgaccggtcacctttgaaagacaccgttggtacttttcttataaagtcctccctcatggaccttgtaggccttcgatcgccagactatgcagcgggcctcattttggtcttcgggaagttcctgcctaagtaagtaggctaggaaaggttctgtcaacgcggcgattactgcaattatgacgtgggcggaggatgttatgtcgtctgccgaatcaccggttggtgcggttttctccggtttgtcgctaccgggctcctcttcccatagtacggatggcttgaagagccgttccaggaagatatttggagggacagcatcacgtttcgcaccgatgcgtgccaggacgtcggccgcttggttattatctcgggctatgtgatggaattcgagtccttcaaaccgagctgaca

SEQ ID NO: 4642 - DNA, 435 bp, Triticum aestivum
  Clone ID: LIB103-062-Q1-E1-D3
ttgacatgacatacgggactgactcctgtctgcaaatgttcagtggtggtacatatggtaaatgtgaagttatgaaagacaccactgttggcataaaatcctatgcaggtattgctgcggagggtatcggaaacggagcgctcttgatggcaatgaattaccatgtcaatacatcaaataccgctttgtgggattacatgccaatggttttcaacatctgaccttctccgaaatttttgcaccgtacttccgccatgttacgccgcgtttcatcttttgcttgttatgatagtatttcaacacttttttgtgggaaaagctgataatggttagatgttgggtatacagaagcatagaaggaaactaacaacgacattttcggcagcacggtcatttcttgcaaattgccctgccgtttggtgcactgtgttatta

SEQ ID NO: 4643 - DNA, 467 bp, Triticum aestivum
  Clone ID: LIB103-062-Q1-E1-D4
acttgttagtgaaccatttgctgtttggggccttgcttctctgggaccttttccttcgtctactgggtatacacatattctagttgttgttgattatgttactaagtgggtacaagctattccaactagtactgttggtcataacacttctattaagatgcttaaagaagttatttttccgatgtttggagtccctagatatttaatgactgatggtggttcacattttattcatggtgcttttcgtaaaatgcttgctaagtatgatgttaaccatataattgcatctccatatcatcctcaatctagtcgtcaagtaaaattgtttattatagagattaaattgatattgcaccagactgttaatagatctatacagaattggtccacgaaacttgatgatgcactatgggcatttataactgcttattaaaatcctatgtgtatgtctccgtgtaaactggttt

SEQ ID NO: 4644 - DNA, 367 bp, Triticum aestivum
  Clone ID: LIB103-062-Q1-E1-D6
gtttatcctttgcgctatggcttcacatttatcttttagagcacggtggtggttctatctttattgatgtttctaatctctcatacttcacatcttccaatttgctcgtctttggactcatcgggtatatttactttgcatgcatcggtttaaagcatgtcgcatcattgcgtcacttcttcttgtgttgcaatagcctggtcgacctctatcaggtgtgcacattgagtactttcccctatttcctctcgattgtcttcagcttgggttctagattatcattggcggtcgatcacctctgtgtcggaccttcgattcttggggtgttgcacctgtgctttgattacagttgttcgccattggcttt

SEQ ID NO: 4645 - DNA, 369 bp, Triticum aestivum
  Clone ID: LIB103-062-Q1-E1-D7
aagatcggccatgcccccaagttgcactctttgggatatttggattcagaaaatcatgtccaagagttcggcaacactgtcatcaatgttgggacaaaggtgagcccacgcaccatggcgccaagtgtgacgatcctggctttggatgtgcgttgtggaatccgcagttatgccaagatgatccctactgtcatcagatgctttccaaacgttgagacgctccacatcatgtctggagaaactggtcaaccctctggcaagcacaaccttgatttccggaatgagtctggtaccatagcatgcatctgctcgtgcatcattctgctggttttccatgatttccgaagggatcgacatgagcttgctttc

SEQ ID NO: 4646 - DNA, 398 bp, Triticum aestivum
  Clone ID: LIB103-062-Q1-E1-E1
gtcgacgggcggctgctctatagtgacatatacagatatgctcatgtagttatgtgtgctgcagatttattggatctgtggactgtggccaaccattttgattctaactgaacattttcgagctactggttgctggtgctatttttcttgcagctggccatgctcggctgcgggtggttgctggtataccggtgctcggtgaatggcattgttgcggtgtggttctttggttcttgctgtcgttgcgtcctgtgttaatgccgggatcaataatagcaatagtggtactggcagcgaagtgaaccactgatggtttgtggtaggcctgaatggatgggtataatagtatggtagtagtataatggcagtatatgcagattcaactacttatatttttc

SEQ ID NO: 4647 - DNA, 436 bp, Triticum aestivum
  unsure at all n locations
  Clone ID: LIB103-062-Q1-E1-E2
gtcgaccgggacggatatcaaaaccatggcactatgtataacaaacaacgtacgggtaagataattatacgagtaactatatatccaaatcacacaaacatcaatttggtaatgtaaaacattcatgaacaagaggctcaccacaaggtggtgccggcgatggaacggtgtgggcgattgactatggttacgacggagatttagaaggcactaagtaaaccacacctacatatgcaaactaagtgttatttttgacctcaaattgcgtacaaatcaaatactagcacatatatttcctcccaaattactaaactcataaattaatcactatacanagcattgcaagagctaatctagcaatgagagatgaaaggacaaagttgctaacctttgtgatcaattgaatggatgggggcctcanatcttgacaaatttt

SEQ ID NO: 4648 - DNA, 471 bp, Triticum aestivum
  Clone ID: LIB103-062-Q1-E1-E3
ggtcgaccggacaaattctgcaatgcatgtgaggatgaccgagtgttagaatgcgagattcactaaagcatatacagggtaatgatttgggtgcgggatggattgatcaccataccaacttactcttattattcgccttgctatatgggatggtaaatctgagtgacttacctatagtagacaaatgacgatcaaaaccttgtttaagccttagaatggtataggtattttttcttccttgtacaaggaagtttttgccaaccgtaggttatacggtgaggatcaacccagacccatttcctgcaggagaaaccataaatggttgaccaccatgagatatcaatagttgtttagtattgggccaaaacccatcagctaagaggacccattctcaaaaaaaccttacctagatgaaggacagacgaattgtggtaaaggttatgccactaccggaaaaccccggataaggaa

SEQ ID NO: 4649 - DNA, 321 bp, Triticum aestivum
  Clone ID: LIB103-062-Q1-E1-E4
cgagattcactgttgcatctccagggtaatgatttgggtgcgggagggctggttcacaatgcaacttaatcctaatcatccccctgccaatagggaagggtaatcctggttaccttgcctgggttgaccaatggcgattcagaccttggttaagccttaaaatgggccaagtaatttttcctccttgtaccaggaagtttttgccaaatcgtccgttaaacggtgaggattaacccagacccatttcctgcatggtaaaccataaatggttcgacaccatgggctatctttttttgtttagtactggggccagacccatca

SEQ ID NO: 4650 - DNA, 437 bp, Triticum aestivum
  Clone ID: LIB103-062-Q1-E1-E5
ccgggtcgactccttctatggatgaacgtattgctggcctagtccagtcatcgctacaaacggctgctacagcagtatgttactttcctatgatatcatgatggcttgcttatattaatgtcaacatttactggaaaaatattcatgctcataacatgctgttcttaagattgactacattaagagcccttttttatttgactccaacttgatatgatgttgtaggccgcctggtgtccctacccttactaatcccagaaactttcaaagaaaagcggcctggcagttgcaggtggttcctggctcgatgagacgatggcgaatgattgatgatcgttcgcacgtaccggacgtgttgtttcgcggaatacaatcacaatcactgcaaggtctttgagcaagattccagcttctctgggccttcaagaatttttgac

SEQ ID NO: 4651 - DNA, 381 bp, Triticum aestivum
  Clone ID: LIB103-062-Q1-E1-E6
cttctatgactgaacgtattgctggcctagtccagtcatcgctacaaacggctgctacagcagtatgttactttcctatgatatcatgatggcttgcttatattaatgtcaacatttactggaaaaatattcatgctcataacatgctgttcttaagattgactacattaagagcccttttttatttgactccaacttgatatgatgttgtaggccgcctggtgtccctacccttactaatcccagaaactttcacagaaaagcggcctggcagttgcaggtggttcctggctcgatgacacgatggcgaatgattgatgatcgttcgcatgtatctgacgtgttgtttcgctgaatacaatcacaatcactgcaaggtct

SEQ ID NO: 4652 - DNA, 433 bp, Triticum aestivum
  Clone ID: LIB103-062-Q1-E1-E9
ccgggtcgacggggggtggaagaactaaaatagaggattctgaaaaaaaaaaggaccttcgaaatccaattttatgtgtagcgcaaaggagttgcgatttcttcttattcctatagaacatctagtaacaagaatatgaaatcgtaaatagcgaaaaattcttgtcttgcgcggtctaagtctaaggaaataaaaaaaattcgcttatacaatttcatctacatcgaatttatatatcagaatagcggatagaggcatcattaaaggagtcaggtctacttactttatgcttctttccaattttatggtggatttgataagaaccctttttgctttcttgataaataatcgacaaaaaaagcgttttttttatataacctgcttgttttattataattataacaagtcctatatggaaatgcccgctaaagag

SEQ ID NO: 4653 - DNA, 340 bp, Triticum aestivum
  Clone ID: LIB103-062-Q1-E1-F1
ggtcggaaacacgggtcgaccgcgttttaacagacagtccacctaccgcatcaggagccatagtgtgcatggcacataccaagggcaatgcatttgtttttcctattgctaaagctggagctcctccaggaggaggagaaaacaccaggccactgatcataacccacaatggtgcaattggcgtcttctcagacagcacggaccttgcctaccaacaagcggtgaaagatggcgcggatataataaattgctgggtccggatgtcgaaagacggggtcgccttctgcctgggctctacagatctcaacagcagcacgacaagcagccacaacttcttggg

SEQ ID NO: 4654 - DNA, 366 bp, Triticum aestivum
  Clone ID: LIB103-062-Q1-E1-F10
cgggtcgacctcaggtataaattcgtaatggtaggcctgcaccaccacctcaggtacgcgatgatgtccatattcctaaactgaaattgaaaattcaaccatttgagggtaaaaaggtcccggaaataaatctaacttggaagttagaaacggaaaaacaatttaaatgtttacaatatcctgaggagagacgagttgctactgccgtttgtgctttcactagttttgcatgtgtatggtggtctgaacattgtagattatatcctattccaactacttgggctgctttgaaaactgctatgcgtacgcgttgggttccaccatattatcaacgtgaattgcttcaaaaattgcagcgtttaagac

SEQ ID NO: 4655 - DNA, 442 bp, Triticum aestivum
  Clone ID: LIB103-062-Q1-E1-F11
acggtctaaaatcccgggtcgacagacagatatagagacagaaatatggggagataatgagttcgaataagaaagtgttgcacttgcttcatgggctaaaagcattccctgatgcaaatgtgagcaccaatgacatcattctgcaagaccaaactccctatgttttgaagctacacaacagaagtccagaagacagggcttgttttgagataactggccaagcaccaagttcctctggctcagattctgctggtttccctacttggctcaaggtttctccaacagctggtataatctgccctggacagacggtagaggtcactttgcagcatggagtcctgcgtggaacatcgtggaataatttgtctggggctaaccatgaaaatgcagcacagttatcggtgaaaataactggggcgtgttctaccgttgccaaatgtta

SEQ ID NO: 4656 - DNA, 247 bp, Triticum aestivum
  Clone ID: LIB103-062-Q1-E1-F12
gtaccgatctatcactggccgaccggcatatggaagcagttgaattgggggaaccttaagcaaaccgggattctggtgtgggttaccgttaggaccgactggaacaaagaagtggcccaagccaagaaaagattgaacaaatgggaaaggaacaagatgcctccaataacaaggcaagaatgaaacaatggattctggaaaagattaaccggaatgttggccgttcccaaattgattcccccaaaat

SEQ ID NO: 4657 - DNA, 370 bp, Triticum aestivum
  Clone ID: LIB103-062-Q1-E1-F2
ccgggctggccatgtcacgcacgttcggcgactactgcgtcaaggactacggcgtgatctcggcgccggaggtgacgcagaggaggatcacctcccgggaccagttcgtcatcttggccaccgacggggtttgggacgtggtctccaacgaagaggcggtgcagatcgtggctgacacgccggagagggagaaggcggcgaagcggctcgtccagtgcgccgtccgcgcctggaggcgcaagcggcggggctacgccgtcgatgattgctcggcgatctgcctcttcctccacccgccgccatcgtagacgggcgcgcattgccatgtggaccaggaagagagagagagaccagaatggcggatcactgc

SEQ ID NO: 4658 - DNA, 174 bp, Triticum aestivum
  Clone ID: LIB103-062-Q1-E1-F3
ggtcgaccggacgaagaagatgaggcagatgaagaagaggaagacgaagaagaggaagacgaagaacaagaggaagaagaagacgaagaggtagaccacgacgaggaagatgacgacgaagaagatgacgacgaagattaggaagatgaagacgaagaagacgaagattgaaga

SEQ ID NO: 4659 - DNA, 388 bp, Triticum aestivum
  unsure at all n locations
  Clone ID: LIB103-062-Q1-E1-F4
ttgtggtgagttgatcttagcctgtaaatgcattttcagaacctctgatggatgtgatgcggcttcataatgacctgacagtaaaccacagtttcagttcctcggttttctttctttcttctgtctttctttcttgaaacttaaatatgtatttctttctttctttcttgaaacataaatatgtacatatttctttctttctaaatgtcgaaggaattatttctaacctgcatcatgtgcattcaatcttcggctgttctggctgtgcattgccattgtaaattatcgccatttatcctgngagctcatagcttcccacatgcggtgaaccgatgaaatccatccagcaaatggtctggttttcagaagaactcgtttcaagatttgt

SEQ ID NO: 4660 - DNA, 398 bp, Triticum aestivum
  unsure at all n locations
  Clone ID: LIB103-062-Q1-E1-F7
cggtcatgtagtccgggtcgacgggggttgcgcgcacaggaagccacttctggggattcgaagggcagggtgtcatccctgatatagtcactatggcaaagggcatagggaacggaataccgataggagcggtcgttaccacacctgagattgctaaggtgttaacccgcagaagctacttcaacaccttcggtggtaaccctgtcagcacagctgccggccacgctgttctcaaggtactggagaaggagaagctgcaggagaatgcgttcgttgttggctcctacctgaaggagaaacttaacgctctgaaagagaagcatgacattatcggcgacgttagggggaaagggctccttctcggngttgagctggtgaccgatcgccagaagaaaact

SEQ ID NO: 4661 - DNA, 448 bp, Triticum aestivum
  Clone ID: LIB103-062-Q1-E1-F9
accggtcaaactagtccgggtcgacggggtccgggagagaccggtgctgaacgtgacatccatcggcaccagcgtggtgaacatgctgagccacctgctctgcgactgcggcgagaaggccggcaagcagcagagcaggggcttcggagtgcgctgctgggtaaccagatagtagtactagcagttgtactacaagttaagcgcactcgttaattactgattgattgtccgcttgtcgccactgttgcttgtaagtaagtactaagatggaaagatgaatcaatccatgtgaatcgtgaccgattgatggattgctttgtgcatgcatgggatgggaggagggcccttttggttgtgtcgttggttagtggcagagcatgtggtcttgtggggaggaaagaaagaccattggtcccgacccacatgagagaccgacggagtgcatggc

SEQ ID NO: 4662 - DNA, 355 bp, Triticum aestivum
  Clone ID: LIB103-062-Q1-E1-G1
ggtcgacgggggtagaaatcaaaaaatagcatcaagtgttgatggttaacaaggccactagtttcaagaaaagggcaaagggaaagaaagaggaacttcaaaaaagaatagcaagcaagttgctgctcccatgaagaagcccaaagctagacccaagcctggaactaagtgcttctactgtgaatgaaatggtcactggaagcagaactgcccaaatacttggcggataagaaggatggcaaagtgaacaaaagtatatatgatatacatgttattgatgtttactttactagtgttcttagtagccctagggtatttgatataggttcggttgctatgattagtaactcgaaac

SEQ ID NO: 4663 - DNA, 325 bp, Triticum aestivum
  Clone ID: LIB103-062-Q1-E1-G10
ggtcgacgggtccataaagccatcggcaacataaaagtgcgtacgtggtgggcagtctcacgaatgtctcgatgatgtgaagaacatcctgttgtttggttcagatcgaagctgtagcacctggatgatgcatgttcctttatctgtaaaatgtgatgttgtgaagttggtggggtttgagaattcttcagttgagtttccttatgcgattcaataagaacatcattgtttagtgcatccaagacctcgctgtgatccttctctgtttgtgctttttttctccttaaaaaaaaaaaaaaataaaagaaaaaaaagcggccgctct

SEQ ID NO: 4664 - DNA, 438 bp, Triticum aestivum
  Clone ID: LIB103-062-Q1-E1-G11
ggtcgacgacgactcctactacactggaggtgcctactactacgtgcagcccgctgacaacgaccaggagtagtttaggaggatcccaggcaggaggcctgcgcctctttcgatttgtatcccagtttgtgctagtcttcttaaggcaaacttgtttaacttatgtctgtactcagatattgttgcttccgctgactcgtctatgatcgagcacttgtattcgagccctcgaggccctggcttgtattatgatgcttgtatgacttattttatttgtagagttgtgttgtgatatcttccagtgagtccctgatcttgatcgtacacatttgcgtgcatgattagtgtacaattgaatcgggggcgtcacactatctatacagtatattatgaacctatcatctgctagctatccttacttctggagcctattttttg

SEQ ID NO: 4665 - DNA, 401 bp, Triticum aestivum
  unsure at all n locations
  Clone ID: LIB103-062-Q1-E1-G12
catccctaaaaccattcaccggtgtcatgcaccggtgaccaatcccgtcatgttcattcagactcagtacttcattgaaatcaccgaaacacacccatggcagaccgtcatcctcagcgagagatctcaacacgtcccaagtcttgcctctatcactgacttgtgcttcaccgtacatcactgtgagccgccatggagaagcaccaggcaaagtaacatgagcatctatgtgataagcagagtaaccaaaattttcaatctttatttcattattccaaaaaataccgagaccaccactcctaccagagctactaacagcanatgaattatcataacctagggtgcttgctaagttttccactctatctctcgggagttgagtttcaacantacaaagcacc

SEQ ID NO: 4666 - DNA, 247 bp, Triticum aestivum
  Clone ID: LIB103-062-Q1-E1-G2
cgaaggcaataaaacatctaaataaacttttcccgaacaaaatttccatccagcttccacaggatgaagcattacttaccagttggaagcaacaattggatcgtgatgttgaaacccttaaagcaaaatctaacatcggtagaattcgtacgtttttgaaccgcattgcaatcgaatgcaatgaccttgatgaattattcattaaggatcagtcactgactaatgaaaatgtggccaaaattgtcgg

SEQ ID NO: 4667 - DNA, 262 bp, Triticum aestivum
  Clone ID: LIB103-062-Q1-E1-G3
tacatacgcttttcacgaacaaggtttccatccagcttacacaggatgaagcattacatagcagttgggagcaacaagtggcttgtgatgttgaaacccataaagctggagtctacatcggtagcaatcggacgtttttgaatcgcattgcaatcgaatggactgaccttgatgcaatactcactacagatcagtcactgactaatggaaatgtgggcaagattgtcgggtacgctgtcaatgatcatcttaaggaaaaata

SEQ ID NO: 4668 - DNA, 132 bp, Triticum aestivum
  Clone ID: LIB103-062-Q1-E1-G4
cggaggccgttgcgtagtggcgctcagcacggccaacctatcacagttgaacgacgtcggccctggcgccaagctgatgaagatcggcagccgctccatgtactcaccgggattcacgtgctactcggcgta

SEQ ID NO: 4669 - DNA, 394 bp, Triticum aestivum
  Clone ID: LIB103-062-Q1-E1-G6
ggtgcggagtcgacggcaacacggaggtgaaaggagttccatgtccgagtcggcgacaacgtgcgtcatcgtcggcaacatggaggcgagtcaacggcaaggtgcggcaccggtgacgaacatggaggcgagtcaccgacgagttgcggcaccggtggcaaacaggcggcagcgagcgtgccacggcagtgcactcatggtgaaggcgcacgaggtgcggctctcactgaagctagcggcgacggcggcaatcgatgtgacaagatggcattggcggccatctccgtgttgcaccgacgacatcgacgaccacgggcttcaagagagaaataagttaacaagattatggaggtgaatgttagaactaatcttgttattagcgctagttttagat

SEQ ID NO: 4670 - DNA, 498 bp, Triticum aestivum
  Clone ID: LIB103-062-Q1-E1-G7
gggtcgacggggatacagacaaaaacatcaagagacagattatctcgcattgaagcagaattgtcacttttgaaagaaaggcagaagggactgactgagcagtgggagcgtgagaagtcggtgatgacaaagatccaatctattaaggaagagattgacaggttaaatgtggagatccagcaggccgagcgtgagtatgatctcaatcgtgctgctgaactgaagtatggtagtctgaatgcattgcagcgggaccttcaaaaaactgaggatgagctaaatgaatatcaaagttctgggaaatccatgctaagagaagaggtgacccaagatgatattgcagagattgtgagcaagtggacaggtattccagtttccaagttaaagcaatccgacagagaaaagctactgtatcttgaggacgaactgcacaagcgtgtagtggggcaggatcctgcagtcaaagcagttgcagaggccattcagagatccagagct

SEQ ID NO: 4671 - DNA, 458 bp, Triticum aestivum
  unsure at all n locations
  Clone ID: LIB103-062-Q1-E1-G8
cgggacagaaaggataatgcatatgtcacaaaactcagtaagtggtatttgatggttttcagcatataaatcaaagctcactttagggggattatttgtaggcaagaaagtaaagctctgaacagagatgtttgtgaggatttggtgctggccacactcatctgcgatgaagttggtgaggccggcattagaaatatattgcatgaactcctcatgaattccagcctcttgcaggaatggggtgtgcggccatccgcacggacgtacctccgccaacccccgagggtggagatcactgtcagaagactccccgataacacccttggagttcttcttcgagccaaacttcctgaagatattcatgttcgcgtacaattttttgaaaataaaaaaatttggggtgatgaaaaatcgtcaacnaaactttataagattgatagcaactactcatagggata

SEQ ID NO: 4672 - DNA, 413 bp, Triticum aestivum
  Clone ID: LIB103-062-Q1-E1-G9
ccgggtcgaccgttgaagtcaaggacatgggttccgacaaggaggagtagggcatggaagacagccggtggcgcctcatgtctcatgtgggccagtccatgtcccatgtcgtactcatccttgccggctccgattcttcactttgcgggtctcacggccgacagacatgggcacggaagggaacaaccaaggatgggcatcaacgaagattagactaatttttaccttgcaatgtaattgtatggatttgatgatttgctagtaatgtccctagatgtgaaagaggacatttcggaggagcctgtggaggataccaaagaggatgccgctgtgtgaatccgccagaaacctggcgccaacatttaccaagtcgttgtagctggagcaccattgtttgggagctctcgttgtac

SEQ ID NO: 4673 - DNA, 373 bp, Triticum aestivum
  Clone ID: LIB103-062-Q1-E1-H10
tacggcaaattattagcaacgggagatagccggagatgaaacggcgagtattaagtcagcttcgtcggtcaggtcggtccttgtttatcccgtgtcctgctggccctgaacaaacccaacagctcgagtaacgtgactttgtactctaataaatagtgtcacggtctctggaaacaaaacttctatttagatggctcagcatttttttttttgcgaagaatggctcagcattcatgacgaatggataacaacttgactgtcaatttctgtcacaaactcacaacccttggatgaataaaaatatcttaaatgaaatagaaaaatagggggcgcctacttttcgcgcaactgaaaaaggttgacctcagccgat

SEQ ID NO: 4674 - DNA, 349 bp, Triticum aestivum
  Clone ID: LIB103-062-Q1-E1-H12
aaggatggaggtaaaggcggttcacatcgggctcaggcttcaagcttcggcgggttccaaccaagcaaaagtcccaaaggccacaaaaaccaaggacaatccccggcaaacaatcaatgccgaaaagccaactctcaaccaaccctcgagtaaaaacgatcggagctcttgtctcgagccaaggtaatggaggaggcgatgcaactatacagggaagcttgcgccggccgcgggaccgaaggcttcctgtaggttgcagctttgaactctcctgcctgtggctgcgtggtaagtcgctcggtggcggtgcctggcacggaaacatgtcctttgttacctgcacggtgac

SEQ ID NO: 4675 - DNA, 351 bp, Triticum aestivum
  Clone ID: LIB103-062-Q1-E1-H2
gttgggaggcaacccaattttatttttgttccttactttttgattatgtttagtaataaataattcatctatcctgtgttaaaatgtggtttaaggctttaaattagggttggtgccaattaaaaccttttggaggacttggggaaattctttgcaatttggcggtaaaaaacagaaactttacggcccacaaaatttgctgccgttttttacgggaaattgcaattaggttgatcctttttgcagatgattaatagataaattcctcacgtcaaaaaatttatttcagaatttttggggtacgaaagtattcgaaacctacagattactacagactgttctgtttttgac

SEQ ID NO: 4676 - DNA, 463 bp, Triticum aestivum
  Clone ID: LIB103-062-Q1-E1-H4
gatggcgaacggataaggaggccagcagcgtcgcccacatcgagcacttgtttgccgagctctcctcggtcggtcagaaggtgcttcaattcaatatgctgtccacgtctggtgggcaggatgccctcaaggaatccgtggacaagcatggcggctgccccggcaacaagacggtctatctatattctgcccaatgcagcgcggactgcaacgaggcatgctctaaccactgcgacatggactgcccctacatagccgcaagatttggctacatcatggctacacctgccaataagaaagccatcgaccaagacatggaatgcttcaagcgttgctcaaaggaaaaggatgccacaaatgacaaatgccgcgttgcatgcaagctggctgcctcgctcccttgaaaatgcatactctctctttttttaacccatgcttcattcaactctcctttttttttttt

SEQ ID NO: 4677 - DNA, 481 bp, Triticum aestivum
  Clone ID: LIB103-062-Q1-E1-H5
tccgggtcgacgggtagacgattctgatggtgtatacctcgtccatttgaaagagcttgaactccggatctggctccataagggggacgattggttgctggtccacaacatttgtctgcgtggcaagtttgctggtttgagtatgctagatggcaatgcttttctccaaataaaacaggtgggggacaatgccgagtatgtgttgctggagatgatgtgtcaatgcgcactctacttggatatcaagtgcaggacactgcatacagtgtatgaggtgacaaacgaggatcgatatttgggcgatatacatcctttcatgatgatatggcctccaaagttccctgcgctcaaggatgatcctgcaacggcaagaaatgccatgtgaagaacaagcctataactgggagttgctggatggtatgtacatatgtcagtggtaagctttggcgggtgcaatcaaagatgagctgagctgcatttc

SEQ ID NO: 4678 - DNA, 486 bp, Triticum aestivum
  Clone ID: LIB103-062-Q1-E1-H6
ggggcgaaaaaaaactagcctcccttggcctcgcgagagacacatgggaacgggtacgggaacgggtgtgtatttactgaaaatacaaatacgtaaaatgtggggtatatggcccttctttttctcgtcgcaaacattttccagaccgggaacttgtgggcggggggcgcagagatagagtaccacacgcatcacatgcccctgtggaaattgcaagtagcaaaaaaggaaaaaagaagataagagccgagccccgcccggtcaagaaaaaaagagcctgccggatgcagcaaccgacccgaggctggccgactattttgccccggcatatgtcgtcggtctgatgctctcgaatctctggattatttgcggaatatcctttgccatcattaaacaccgtcgaaagagacaagcaagcgagctcgtctctgatcacaaccagctcgcccaaggggcgaaacgcactactagtctgctacagtacat

SEQ ID NO: 4679 - DNA, 492 bp, Triticum aestivum
  unsure at all n locations
  Clone ID: LIB103-062-Q1-E1-H7
gggccgacctttcgcataaacttagggatcgatcgatgccctaggccggcccattaatgggttgcagcgttttcggctttgggaaccttctagagtttcccagcaggtttttctggtattgggaaccttctagaaggttccaaccggttttcctgtttctttttttttcctttttagtgtttctgtttattctcttgtttcttttttatttatttttccttatgctgtttcttcatttcctcttttcttttatttttgccttttttcctttttcatgttgatttcatgttgatatttgtcttttttctaaaattaaaaaaatcagattttaaaataagctccactctattaaatatgttcataaatccgaaaaattgttaatgtaaatttgttcacaaatttagaaaatgttcatatttcanaaatacttctggaattttaaaaaatgttcacggttgcaaaatttggtccgtgattcaaaaaatgttcccg

SEQ ID NO: 4680 - DNA, 402 bp, Triticum aestivum
  Clone ID: LIB103-062-Q1-E1-H8
gatggcgaagggatggcctgagacggtgaagcacgagctgcacgagcacgagctcgtgctgatccgccgccccaggccatacggctgcgacgggtgcgaagagatgggcacctcctggtcctacaactgcgcggagtgcgacttcgatctgcacgccaagtgcgcgctgggtgaggagaagaagggagaggaggtgaatgggcaggagcatgccgctgccccagctgggtacgtgtgcgagggagacgtctgcaggaaggcctaggtagcgttagcgttgtgtgtgttccttgccagctgaagcgtgtctgaatcatgtcctgtgtggtgtgatgataaataaatcttgcatccgatgatttggcttgggaagtatttgtcgtggtgacatttatgtgcaag

SEQ ID NO: 4681 - DNA, 434 bp, Triticum aestivum
  Clone ID: LIB103-062-Q1-E1-H9
acggtctactattccgggtcgacggggaaaacgaccaacccatggacgaggagtatgaggaggagcaggttccagattactcgagagcctattctggtggattgagaccccttgcccatgtcatgatggatgatgagaccgaggatgatgatgaagatgctgaaggggacggagagggtgacgaggaagaatatgacgtgaaccatgcttccgccgatgttgatgatgagatggacgaggatgatgatataggtgatgatggggatgatggtggtgatggagttgaggtgaatgcagatgaagatgaaggcgcgacctcatactcgtcagagtacagtgaataagagcttctgtctccggtgaccatttatgcaggtagtgatactggtggacaataataagccttttgcccctttttgggggcatagtgggct

SEQ ID NO: 4682 - DNA, 390 bp, Triticum aestivum
  Clone ID: LIB103-063-Q1-E1-A1
ccgggtcgacgggcaaaccgaagggaacttgcaaagggtggcgcacaagggaacgccgaccaaccgacggattgcagccaccattagacctttgtggatgcagttgtggcattatttttcccattgaactgcccagggggaatgagctttaatgctggttgtgttgtgcacgggtgaaacgtttggtgtggatatttaccgtaggcatggttttgtaccaggtgccttggtaattgtcctggtgtggaatggatggtttggaattttggaacggccatgtaagcgtgtaatcctaattagggcctcaacctatatccattcgaaggacaccctaagacggtaattaaatttgaacccctaataaagccttttaatataattttttggtcc

SEQ ID NO: 4683 - DNA, 416 bp, Triticum aestivum
  unsure at all n locations
  Clone ID: LIB103-063-Q1-E1-A11
gtaaatgaactattcgagcatgcaagacagaatgtttatttgaaggtttagagtttggcacatacaaatttacttggaacggcaggtaaataccgcatataggtaggtatagtggactcatatggaacaactttggggtttaaggagtttggatgcacaagcagtattctcgcttagtacaggtgaaggctagcaaaagactgggaagcgaccaactgagagagtgacaacagtcgtaaacatgcattaaaattaatttgcaccaaatacaagcatgagtaggatataatctaccatgaacataaatatcatgaaggctatgttgatttgattcaactacatgcgtgaacatgtgccanatatagtcactcaattcatttaaagganggatacatcccatcnatacacatcataat

SEQ ID NO: 4684 - DNA, 456 bp, Triticum aestivum
  Clone ID: LIB103-063-Q1-E1-A12
gtaccgtactagaattcgcgggccgacgggctaacatatgagtgtttaatttttttttgtttgccacaatcatccttgctgtacacacctttcgagtgggacacgcatgaattgtgaattattagaatactctatgtgcttcacttgtatcttttgagctaggcaattttgctctagcgcttcgcttatatcttttagagcacaatagtggttttagtttgttgaaattattgaactctcatgcttcacttatatcattttgagaatctttttaaacaacacagtaatttgctttggttataaatttagtcctattatgatagacatccaagagggatataagaaaaactttcatataacgtgcattgaattccatgagaactttgattccttataattgttttgagatataaagatggtgatattagagtcatgctagtgagtaattgtgaattg

SEQ ID NO: 4685 - DNA, 239 bp, Triticum aestivum
  Clone ID: LIB103-063-Q1-E1-A2
ggtcgaccgggctcggaggctgatcaagctgaagccccccgtggagccatgatttttgcagttgaaaaatggttccttgcggtgtaggtaccccttggtaaaacccttgatgataccccacaacaacggggaacttgtgtgatcctccggtcctgccggtacggtgtacaaaaatttctttgatggaaatgtgatttggccaaatggtttcagtttcaaaaaagaaaatgaaccggaaa

SEQ ID NO: 4686 - DNA, 314 bp, Triticum aestivum
  unsure at all n locations
  Clone ID: LIB103-063-Q1-E1-A3
tgatcgccgtcggcacgctacctctacatttacccacgggattattttaaaccctaaaaaatggtaattaatggccagtttggacaaggacaatggaaccggattctggttaataccaaaatggtaacccattaaatcccggaacaataagtggtccaattaaaatgagaaataggtttaagggcatggccccatgggcaatgggttattcctaatgaatctcgaacgtantgttacacatattcatagtgtgaataccaaaagatgtaaagttgataacgatagtcccacatacttgtggcactgccgccttg

SEQ ID NO: 4687 - DNA, 295 bp, Triticum aestivum
  unsure at all n locations
  Clone ID: LIB103-063-Q1-E1-A5
gaaaccagatgatgggaaaatgaaaggcatcgcattcatcaaggatcctgatggttactggattganatatttgacctgaagaaaatcggggaagtgactgctgcngcatcatgatgaagtgttgaaactccaatgccggtaaaatggcttcgcgccttcagaaatgatatgaactcagttatacggaccatgcttacattcttgcaccgctagttacagcgtcatgagcaaagatatcatgtgaccgatgtttgagcatagatctggcgttgtaaccattcagtaatgtaagct

SEQ ID NO: 4688 - DNA, 342 bp, Triticum aestivum
  Clone ID: LIB103-063-Q1-E1-A6
tccgggtcgacgggcctgtaaatcagttatagcggagctatagcgggctaaagcggactatttgtgaaggcgaccatttagcggcaccttgctgaaaaggctatagcgggctatagcggagctatagccggctatttaaaactatgattagagagtgatgttattttcttcctatgttgtacaagccagaaacgtttggtgaacggaaacaccatcatggcctttaataaagctacaattgaatctttaccattgtttttctgtaggcatttgtttgctctgcttaaaactgtaaaaggtttaggttggactgcagttcatttgggctgaggaaatccatgc

SEQ ID NO: 4689 - DNA, 356 bp, Triticum aestivum
  Clone ID: LIB103-063-Q1-E1-A7
gctaaaggacgccaaggtactgcggcggcgacgggctcgtgaccccctccacatccacgcatccaaactacaggccggcgcggacgcgagctagatggctttggaaaccgaagcggtggcgtgctcgtgatcccctcccatgcgtgtttgaggagcgtgaatccaggggcagcatacgcggcgagatcccatcctaggcgtccttccgtggtggaagatgatggctggtagtggatctggtggatcctagcctaataagctcgaagccgtgatgttgtactctgctttcatatgaatacgactacgctctctcaagaaaaatcaacgtgcttacttggctgtgatttgggtttttg

SEQ ID NO: 4690 - DNA, 421 bp, Triticum aestivum
  Clone ID: LIB103-063-Q1-E1-A9
ggaaattgaagctgggaaatcctttatgttgcggaggaagttcggagatccacggtatgcctctctagatcggctatggagtttggaggatgtgtatatggatttggcggcgagcgctgccgatgcggccaagtacttccagggtcagacggaccatgaagtggaccatctattttggacacaattccattctcccgagcgtccgctttcattgattgaccaattatccgaatgggccgaactgaataggttgtccggacttgccatgaggtctgttgtggatcagctatggccggaaaggccaaaactgaacagctattttagcttggtgcatcagctccttgacgtggtgccgcgcattaatgcgatgaagaggttggcgtgcatagagggctcacggatggcctttgcccgtgttaaa

SEQ ID NO: 4691 - DNA, 319 bp, Triticum aestivum
  Clone ID: LIB103-063-Q1-E1-B1
ggcggtgcttagtgaacttagtcaatatgaacgattctagctccagtgaccgtacgatgtccatccaacggccgttgtgcttcttcaactccgggcctcctggctcaagcggccaaaagaaccttcggccttgccccttgtcctggcttcccttggccggttgtaatccaatggaggcttaacggccccaatttctccaacggctggcaaggccttgcggcaacggaagcctcaaacggctgccaaaccattgaaaacccgtattcttctccgcttgggcatcaactgctgcttcttccccggctccgcgtcttcccct

SEQ ID NO: 4692 - DNA, 238 bp, Triticum aestivum
  Clone ID: LIB103-063-Q1-E1-B11
tgtggtgaaaatccctggtacttcaattatttcgtttgaccttgccggattctgcgcaagtgtctcgattctatctatttgttcacggtggatgatgtggtttgtggatactgctctgatcgcaaggttccgctcttggattcactgagtgtttgccaaccacatcggatttgcaacctccacggaaatcatcctagtcgggagatcacccaaatagattgattctacgatgaatgcc

SEQ ID NO: 4693 - DNA, 435 bp, Triticum aestivum
  Clone ID: LIB103-063-Q1-E1-B12
attcgccggtcgacgggcaggcttagaggtacgtttttagataacgaacatttagtgtttattacgcataataacatgcatcctatgtagatagtagcccctgagactctgtgtggcgcaaagatgtgcgacatgtagaggatcttaatcccaggtacctaagatggtgccctgtatatacaggcggctgattgtccggggtcaagccggacttatgaatatgccgaaatgaaacagcaacttgacgaggcagaaaccgacatcgcgctggttaaccaacggcttgatgaggctcaaggtattcatacttcttggcgagtattagtaagaggagttataggttaatatcttaccttgtgtatgcttgatgcagatggtgcggcagccgttgaaggacttaaggccgaacttgccaaggcgaagagccaagcagag

SEQ ID NO: 4694 - DNA, 306 bp, Triticum aestivum
  Clone ID: LIB103-063-Q1-E1-B3
agcccaaagcggagaagcgggcgccggcgtccaaggaggccggcggcaaggcgaagcagcggggcacgaagaaggcagcagggcaaaaaaaaccttgaaaacttacagattcaaaacctccacggtgttgaagcaggtgcacccggacttgggaatctcctcaaaggcaatgtcaatcatgaaccccttcatcaacaacatcttcaaaaacctcgccggggattcggccaatctggcccgctacaaaatgaagcccaccatcacgtcccgggagatcaagacctccgtccgcctcgtcctccccgg

SEQ ID NO: 4695 - DNA, 448 bp, Triticum aestivum
  Clone ID: LIB103-063-Q1-E1-B4
ggtcggtatcacgggtcgaccggccattaactctgaataaattaaaggcacgaagtgcgtaccatggtatcggcttggtcaaattaatgggaaaaagcattggttccattgcaaggcaggcttcccttccaagtgggcaggttgagtccggcttaataccagagggcccatttgcgctcgatggagaatatggtgttttacagcacctcgagcagttaataaagaacaagggattctgtgtggtttgtgttgctgaagctgcaggacaagagttactgcaaaactcaggtgcaactgatgcatcaggaaatgcaatacttaacgacattggtgttcacatgcaacaaaagatcaagacgcatttcaagggcatcggtgtccatgctgatataaaatacatcgacccgacgtaaatggtccgggcttgtcgtgccaatgcatccgatgc

SEQ ID NO: 4696 - DNA, 341 bp, Triticum aestivum
  Clone ID: LIB103-063-Q1-E1-B5
cctcctcgacaaaatggaggacaccgaccccaagtccagtgcctctgctccggctgctgtccagtacgtgttcttgtttttcctgttagaggtctttccacagttccttgttctagtgtttgccctacacatgttaggatctacctcatatatgcatcttgatctactgtgtgctcgatagatgatcggttctagctcctatatgcacatgttatttaccttcactttgtcagatcgcatgacttgttttatcactgctatactagtcatgatttatctagtaattctgttatcatgatcactcgataaaattgctcatatttccaacatactcactccgt

SEQ ID NO: 4697 - DNA, 170 bp, Triticum aestivum
  Clone ID: LIB103-063-Q1-E1-B8
ggggcatcaattaatctttgggttttgtttagattgaatgttcgctatagctgcatcttcgcgtacttcggttgggttcatcgagtatacagccgtgtcacagaacccgatcctgatcattgctgctttcatcttatgttcgcaatatccagattgcactcctacattct

SEQ ID NO: 4698 - DNA, 409 bp, Triticum aestivum
  Clone ID: LIB103-063-Q1-E1-B9
gccgacgggaaaattgatcctcttgatgtggacgcctgccctcgtccctctcttcgatcgcactgtgctgataatgcgatcgagggcctcgatcaactgcacaaacactatgcttcccttgtactagtacactacagtctcagatgatgataacgcgacagatatggactgtgcttgtagtaacaaaatatgggtgctggggctgcacttaagctttacgagagtacgactgaccctatatgatgcaggtgtgctctcttcgaaaatatcttgtctcctccaatgcttttgggatggatgggaacatccggggccagtggtgctgcctcatcgcgtttggctgcttcccacacttggctatctccatgaccctgtttcaagaatggggatgtacctagtcagaagtcac

SEQ ID NO: 4699 - DNA, 426 bp, Triticum aestivum
  Clone ID: LIB103-063-Q1-E1-C11
attcgccggccgacggggtcaccaacctgcggtccgagaaggtcaaggacgagatcgtcctcgacggcaacgacaccgagctcgtctcccgctccgccgccctcatcaaccagaaatgccatgtcaagaacaaggatatcaggaagttcttggacggcatctacgtcagcgacaagggcgccatcaaggaggagtagagagccggaaaccgtcccgcccaccagaagccgtgtttctgcctgccgtgtttgtttcatcgtgtttgtgtctgtctgtcgtcgtcgtcttcgtgattttgaactttctctagactgaattttgtagcggagttaaatttttagggatgtgccgtggaacatgctatctttattgttatcctgcgtatcgtcgccgccgcgagaaccggtgcgacgcttatctagccct

SEQ ID NO: 4700 - DNA, 410 bp, Triticum aestivum
  unsure at all n locations
  Clone ID: LIB103-063-Q1-E1-C2
gtcgaccgggacgaatctgaaaaacagggcaattcaaggcctcccaaaacaatgttgggcgccatgcatgcaatgtggaacaaggaaggcatccaagggttcttcaaaggattgcatgctcagatactaaagacagttctaagctccgcattactgctgatgataaaagagaagatttcaaagttcacttggatctcgctgcttgcgctgcggcgatacctctttgtttctcggaagagaatcaagagtgcataattgtattatatatttcagacctgagaaaaccagtctaatcgaccactggtatttcaagatctcatactaccaaataacagaagtacagaagcggaacaacacgattatcttgagagcgccatggaatgttctgaataaatttacttggntttttc

SEQ ID NO: 4701 - DNA, 281 bp, Triticum aestivum
  Clone ID: LIB103-063-Q1-E1-C3
cgaccggcacgtcggccaaaatcgaccgctacaacaagaagcccaccatcacgtcaagggagatcagaacctcgttcggcctcgtcttcccgggcaagctcgcaaaccacgccttctccaagggcacaaaggccttcacaaatttaacctctcccaaggcttaacctccgtttctcaacccgttggattcggtaggtattaacctgcaggattgtgtcctgaatgtgtaaccttgtgctgctggtgggtctgaagaaatattcatgggactgcttaatcaa

SEQ ID NO: 4702 - DNA, 369 bp, Triticum aestivum
  Clone ID: LIB103-063-Q1-E1-C4
ggtcgaccggtcgagctttataaacaagacgaagcagagcaagcccggcaagacgcagtcgacctcctagaggaggagagggaaatggcgatgatcagatcgaccatctatcagcaagacttgcgtcaattcaatgctaaaaatgtgaaaagccgagccttcaagaaaggaaatttggccctccgagtggttcaacagaaaccacacaaacttgccccaacttgggaaggtcccttcatcgtcaccagagtcctccacaatggagcatatcacctctacaaggttgatcgccagatcgacgagccacgagcttggaatgcggaactattccgccccttttaaacttgagttctcccttggacgggatgt

SEQ ID NO: 4703 - DNA, 476 bp, Triticum aestivum
  unsure at all n locations
  Clone ID: LIB103-063-Q1-E1-C5
gggccgacgggcagcaggaacccgttctaaggattctttttagattaagaccctgcataaaccttttttactatctcttgttgatacacatcccccggattctcagtacaattgataaggatgctgacgtattggcatgtggccacgtcagaatgttgcacatacctggacaccaggggcttattacaaagggcactgtttatgcccgatttacgccatanagaccgaataccttaaggagtgttcggcgttgcgagtttggccttatatgcatcagctccgaatcatgtcattggtcaaattttgggtttgcccggatcctgtgttttgctaccttatgttccactctattggctaaggcggcaccaggagaactactgccaatgttgcctggttcatttcgacgagcacctcagtagaaaaaaccgaaaactgactgtcatgatatagcgtgagactagtcaaacactcgatga

SEQ ID NO: 4704 - DNA, 325 bp, Triticum aestivum
  Clone ID: LIB103-063-Q1-E1-C7
ccggctcgacgggggtatccggtcacctaaatattttcctccctgtcgccctccctccttcctttcctccactcgcgcttcgctctcagatcccttctcctccgtctcgcccgcgtgttggggtaggagccatggcggaccagctcaccgacgaccagatcgccgagttcaaggaggccttcagcctcttcgacaaggacggagacggctgcatcaccaccaaggagcttggaactgtgatgcgctcgctggggcagaaccccactgaggcagagcttcaggatatgatcaatgaagtggatgctgatggcaatggaccgattga

SEQ ID NO: 4705 - DNA, 381 bp, Triticum aestivum
  Clone ID: LIB103-063-Q1-E1-C9
ctgtggtgaaattcacggacaattccatgattttgttgagcttttccggattggcgggaagtgtcctgatactaattatttgtttatgggggattatgtggatcgtggatactactctgttgagactgtttcgctcttggtagcactgaaggttcgccacccacatcggattacaatcctccgcggaaaccatgatagtcggcagatcacacaagtatatggattctactatgaatgcctacgaaagtacggcaatgcaaatgtatggaagatattcacagatctttttgattatttcccattaacagccctggtggaatctgaaattttctgcttgcattgtggtttatctccatcgagtgagaatcttgatagtgtgcg

SEQ ID NO: 4706 - DNA, 440 bp, Triticum aestivum
  Clone ID: LIB103-063-Q1-E1-D10
attcgcgggccgacggggctcaccaaaccccagacgaaaccctaacctgcctcccaggagcgccgagtccctccgtccccaacagatctacgcgcgaggttcggttcggtcttcggagctcgagacatggcggaggagaatgccccagttgaggttgctgctccggttgcggcccctaccccagttcttggagagcccatggacttgatgactgctctgcagcttgtgatgaagaagtcaagcgctcatgatggacttgtcaagggactccgtgaagctgcgaaagcgattgagaagcgtgctgctcagatctgtgtgcttgctgaggactgcgaccagcctgattacgtgaagctggtgaaggcactgtgtgctgagcacaatgttcacttggtcactgtgcctagtgccaagactcttggcgagtgggctgggctttg

SEQ ID NO: 4707 - DNA, 431 bp, Triticum aestivum
  Clone ID: LIB103-063-Q1-E1-D11
gacaacctaatctatgccggggaggccacgagcgtccagtacacgggcacggtgcacggcgccttctccacaggggagatggcggcggaggagtgccggatgagggtcctggagaagttcagggagctggacatgctggagatgtgccacccgatggccgagcaaacggccaccgtctccgtcccgctgctcatctcccggctgtaaacagtcgccccctaaactacctacctattgtcgcggcaggttcgccggccgttcattccagtgattgctcggagaaggcagcgtgggagcaatctatccttgctcttcctcgtggcatgaggcgtgtggtcgtgtgaccctgtggtttgctgaataaaattactgctgggtaataaaagattgtgggcgtctggtatgtatactgtcagcgtgatgcgggggtt

SEQ ID NO: 4708 - DNA, 129 bp, Triticum aestivum
  Clone ID: LIB103-063-Q1-E1-D2
gtcgacgggcaagtgtgatgaataaattattagaacattgcccaaagaaaaaaaaagaaaggccaaaaagaaaaaaaagaaaaaaaaggcctaaaaaaaaaaaaaaaaaaaaaaaaaaaaaaccggccg

SEQ ID NO: 4709 - DNA, 213 bp, Triticum aestivum
  Clone ID: LIB103-063-Q1-E1-D4
gtcgaccggcccccaggatcaagacagcctccccgatgccggcgcgccggtcgcccaggttaaaaaccttgaaccaattaaaaaaggtgaaaatttccaaaaaaaaggaaaaggtccttaaggtggaaaggccttccccaatgaagaaaggtgcaaaggaaaaatttaaaccgaaaaacaataaaaacctttaaggacaagttggaaaacccg

SEQ ID NO: 4710 - DNA, 470 bp, Triticum aestivum
  unsure at all n locations
  Clone ID: LIB103-063-Q1-E1-D6
gggccgaccggacaggccaaancagtctcttataataagcaaagtgttcctgagggtacacgggaatttcatctagtcactttcatcatgttggtttgatttgtgttcgctactttgataatttgatatgtgggtggaccgtgcttaggtgttgttcttacttgaacaagcctcctacttatgattaaccctcccgcaagcatccgcaactacgagaaaagtattatgaataaattcaaaccatagcattaaactctaggatccaatcggtcccttatggaatagtgcataaactggggtttaagtttctgtcactcacgtaacccaccatctatttactattccacaatgcattcccttacgcccaaatatggtgaagtgtcatgtaatcgatgttcagatgacaccactaagggaatcacaacatacatactatcaaaacaatcaacacatatcagactcacattaat

SEQ ID NO: 4711 - DNA, 375 bp, Triticum aestivum
  Clone ID: LIB103-063-Q1-E1-D7
gggaaaccagccaccggcaactcatattctcggtccgccgccggcttcccatctgctcccccgcgcagctcgcgggcaaggaggggttcgatccaatctttctttccacttcctcctgagtcctgaactaccaacgcggctgtaaatctctgccatcgccgtccgcgttcttcctcatcgcaacatcgtgcccctccgcaatatttgcccagtgggttctaaggtcaaagaccagagtataaaataaaggtgggttactgttaatatttcatacaatggagtccttgtggaagctgtcctatttgcttgagccggcgtcacttgctctcatcgtgacggctgtttcagttgcctatgcatcagcgtctcgtgctc

SEQ ID NO: 4712 - DNA, 478 bp, Triticum aestivum
  Clone ID: LIB103-063-Q1-E1-D8
ccgggccgacgggattgcttaaatagggctaaagataatggttatgtttggagagttaaacaaccgaaacaaaatccagaaaaatctccactgttgattcccacgcccaccacgagtcagcatcctactccctcgcctagggactcctcgggtatagagacgacccacgcatcggtgcagacgagtcccatcacgtcttcacctcttcccgtgcaacaccagcctgctccacctccaccagagcaagacatggcaaactttcccctagatcctctcgagtttcttccgccggggttcgagatcatcgatggaggtccaacccgtctgcctcggaccttctactctccggccattgcacctgagcgccgacacgagtagttcgccattggctttgtcgagcctccgccgccacctggacagattcatcccttctattaactggttagtgattttgtgatgacccagctgcaccgtgacg

SEQ ID NO: 4713 - DNA, 109 bp, Triticum aestivum
  Clone ID: LIB103-063-Q1-E1-E1
ggtcgaccggacgaggttcagcacggagttccagctcgtcttccgtctgatcaaggggctgatattcataacattcatctccatcatcataatcttaacagcaatcgcc

SEQ ID NO: 4714 - DNA, 431 bp, Triticum aestivum
  Clone ID: LIB103-063-Q1-E1-E11
ggccgacgggtcaaaaaatcatccccctagcatttacattatttgccatttgcctctcgttttcctctcccccacttcacccttgtcgttttattttccctctccttcccaatctcctctcttttccatttgccttcccgttgccatggctgagtcaaaaagaactaagggatctctccctagttttagtgccttggatagcccctctgtcctctctaatctcttaaataatgatgctatgggaagacctaccggggttatcaatgagatttttaattaattgtgatgaagatgactccataatttttcgttatttgcttgatgagtctttaaaagatgcttgggataggttattaaggattcgggctagctatgtgccacaatatcaaattgaagtttacttaaagagtttttatgttggcttgcccgct

SEQ ID NO: 4715 - DNA, 417 bp, Triticum aestivum
  Clone ID: LIB103-063-Q1-E1-E2
ggtcgaccggacttcagatctaagtccatggttgcatgcttaggtcccatgcaataaatgagaatgaatgtcaaacaccctgccaccgtcactcggccgcaaacattgagatacctggttttaaattctagtagatcgaaagctcgtctgaaattcatgaaacttggcatgttgtcatggagcaccatcaaccggggtaaattttttgtcccatttgaggcaggtttgggatatgcttctcacaaaccagagcttctcacaaaaagcccgatggtttcggtagggaaggtttcacctttctggacgaaacgatatccattgcctcttctcgatttcaattttttcctaatgtcaacatagaacaacatgagtgttgtgtcaatttttgtgatttttgggggttcgcttggacatttt

SEQ ID NO: 4716 - DNA, 382 bp, Triticum aestivum
  unsure at all n locations
  Clone ID: LIB103-063-Q1-E1-E3
ggtcgaccggccaagaggaagcagncaatgtgcttagaaaaattgcatacatcagtacatgacagtttagtaaaactgaaaaaagataacagaggaagacagatgttgtagtaaggtgcccaaccaaccaaaaggcaccaaaagaccttttaattttttgcaaaaaggcaccaaaggaattattacaggagaaaccatggaatatagaccaaatgttatacctaaccaaaccaaatggtaaaagccccaggatgtgtacgggtaatgaaatcaagggccctcaatgcaattatcaccatcccaatatggcaccactgtattcaagccaaaggtgagttgaaaatacaaaaagggaattccaaaaaaaaaaaaattaattttt

SEQ ID NO: 4717 - DNA, 372 bp, Triticum aestivum
  Clone ID: LIB103-063-Q1-E1-E5
ccgggccgacgggtatttgaatttcatatgatactcccactattccgaatgagaagaattttccttatgtggagagtaataaaatttctatgcttgtagatcatgaaaacaatgctttatgtgatggttatattgttgaattcattcatgatgctactgaaaattattatgagggaggaatatatgcttgtaggagttgcaataatatcaagtttcctctctacatgttgaaaatcttgaagtgttgcttgctttacctcctatgcaagttgattcttgttcacataagttgtttgctcacaaaatccctattcataggaagtgggttagacttaaatgtgctagtcatattcttcatgatgctctctttat

SEQ ID NO: 4718 - DNA, 413 bp, Triticum aestivum
  Clone ID: LIB103-063-Q1-E1-E6
acggggagattgaataagtggtggatgccgccaacagcacgaaggtgaataataagaccaagggtaggagcatacccatcaaacgggccaagatgaaggaacaagaggtcctcagagccaataggcctctactggaccagtacaatgaaatcggtgggcatcccgacaagagacagcgggtctgcgacaatgccgagctgccaaaggccctgcagcggtttgccaagaacaagcaatcatgatcttgtttatctagcagtttgtgctgtactatcatctatcatgtatctggcaggtagtatttgagtccatgtggacatgccacatgagacatcggtgggaaaggatgcaacaaatttttgtctcgaaataacttgatgttctagttgatatttagctcataaatcaacatg

SEQ ID NO: 4719 - DNA, 343 bp, Triticum aestivum
  Clone ID: LIB103-063-Q1-E1-E7
gggccgacgggcgaagttactgacttgccattatagttgacctgaagctccgttgtttaggaccattgctgctgctgtaggttagggagaaggctcgaggcagccacgaattccgtcctgcactacttcaacaccgacctattctagcatgaatcttctgccgtgaggatttgatgcagcaagggccatttgtttgacagaaacagagtggttaccgcaagagaggtacaaatcaaggaccgaggagggacgagggcggctttgatctaagttgggtcactttctatgaatagatgatgtgattgctttgttattttgtttaattaatagaaaaattgatgag

SEQ ID NO: 4720 - DNA, 392 bp, Triticum aestivum
  Clone ID: LIB103-063-Q1-E1-E9
gacggggatagggagcaggcaagtttacagcaagctgttgatcggggttggcctgcatctctacacctgataggaaaggacatattgcggtttcatgcaatttattggccaacaatgttaatgtcagcagggataagcgttcctgatgcagtttttggccatggaatcttgacagaggatggcatgattctgggaaactcattaagcaacatacttgttacatatgatctggtaggcaaatttgatccggatgcgattcaggactacttcctgcaagcatcataccatgtgaatgatggggacgattcaaaacaattttgcatccatacagtcaatgcacatctttgctccacaattggaaaccttctgaatcgattacttggactcctaca

SEQ ID NO: 4721 - DNA, 171 bp, Triticum aestivum
  Clone ID: LIB103-063-Q1-E1-F1
gtcgaccggctgtcccaacagattccaagccaggaggaggtggtccttggaggcaccgcaaggcgacctcccggactccaggcgcaaaggggataaaacccccaagggctccgagtccggccttgacccggaaaccttgccggaacctcaaagggtcccggatccaattag

SEQ ID NO: 4722 - DNA, 375 bp, Triticum aestivum
  Clone ID: LIB103-063-Q1-E1-F12
gggccgacgggctcaaggaccttgatgcccctgagatgaatgtgggcagcttggatgatcatgtcgagatagacatcaacagtgacgacgacgacctggagtacacgatgaacaagatgtctataaccccgcaccactctttcttacaccagatggccatggacagcgacggcggcctcagcatgccagcgaggatcagaccatcgacaagccctccgtcgcggtgggccatgtcaggagaatcaccatagatggaagaaacagctggatacttggggctgtacaaggagggtatgactgtcaaactgatacggggagcttagtttgtagtggggtcaaagaacccattcatttgcagtgtattcagcccaagta

SEQ ID NO: 4723 - DNA, 382 bp, Triticum aestivum
  Clone ID: LIB103-063-Q1-E1-F2
gtcgaccgggcgaagtattggaccttattgggccatacgggaatagaggagagaggccaaaaggaaggaggcgcgcaccccccctctggtccgaattggacaaggggtgcagcccccttttccttctccctctccccctccttccttctctcctactcaaacaaggaaaggaggagtcctactcccggtgggattaggactccccccttggcgtgccctcctccttggtcggccgcctccccccttgctcctttatatacgggggcaagggagcaccccatagacacaacaattgatcattgatctcttaaccgtgtgcggtgcccccctccgccatattacacctcgataatatcgtaacggtgcttaagcgaaaaccctg

SEQ ID NO: 4724 - DNA, 482 bp, Triticum aestivum
  Clone ID: LIB103-063-Q1-E1-F6
ccggctcgacgggggaggagtgtaaaaagatcgcggaaggaatcgccggaaaagtttctctcctgaagggggctgatttggggcaagggcaataaggtcattttaagtatgtcaaaccatagtgaaaatgttaccaatatttagggcttgatgagacgaagaagtgggctttggattcaccttaaaccgagttgcgcgcaagaagttgtgatagtttttctgccagggacctatctgtgaaatgttttctgcaaacaagcccctgactgagaaaactgaaaacgcattcgggaataatacgctttctgcgtaagaaaacatactttctgccgtagtacatcaaaaatatgcttttcagtgaggaaaacacatttgttcctgaagaacaactgaaatgcgcttttaggagggagagacgtatcttacggagtacgcttccacttaaatgacgtggcagtggcggggccgtctcctgtctggct

SEQ ID NO: 4725 - DNA, 198 bp, Triticum aestivum
  Clone ID: LIB103-063-Q1-E1-F7
gttatcataatgaaacgctctacgaatgtcacattgccattgcatgatcatgtagtgtgacatcatatttgtggcaaagccaccaggcttaatttttcatacatgtcactcttgattcattgcacatcccagtacatcgctggagggattcatatacattcatatcatgttctagttccgagttgtcattcacgagtt

SEQ ID NO: 4726 - DNA, 482 bp, Triticum aestivum
  Clone ID: LIB103-063-Q1-E1-F8
ggctggacgggactaatcaataaaagattcttcacaaacaggcccctggctagaaaaacaaaaaacacattatctgagaatacgctttcagaactgagaaatcatattttgggctgaagtgtaaagaaaatacgctttctccaaatgactacgtatttgaccaaaaaccatcttgatcttggcaatctccagcaagccttggccagtagggacgctaccactgtctgtgcataagtgagggtataaaatacccatgttttgtacactgacaggagccccatacacattgtcgaagcatcgttgggctaggcccaaacaatgacacaaatgtggcaggaaactaatgttgcaattttagtcatgatgatttttctgacgcacgtccagtccactcattaaatgtgggtcgttggaacttggactattgtggttattccacggtagtgcgcctgtaaaagagcttgccgaggtaagtgatacat

SEQ ID NO: 4727 - DNA, 89 bp, Triticum aestivum
  Clone ID: LIB103-063-Q1-E1-G1
ggtcgaccggcgcttgcacaggaatacaagcgaatggttaaggatcccacacagggcatttcttgacatgctcctagcacaccttgggc

SEQ ID NO: 4728 - DNA, 405 bp, Triticum aestivum
  Clone ID: LIB103-063-Q1-E1-G2
gtcgaccgggcgcacggtggaagatatgttttatagaaactattgatatctcatgcttcacttagattattttgaaagtccttaaaagcatggtaatttgcttaaagtctaaaaaggcttggaaaataagattaataataaaactttcttatgagtgtgttgaatactatgataagtttgatacttgataattgttttgagatataaagatggtgatattaaagttgtgctagttgagtagttgtgaatttgagaaatacttgtgttgaagtttgtgattcccgtagcatgcacgtatggtgaaccgttatgtgatgaagtcagagcatgctttattttttgattgccttccttatgagtggcggtcggggacgagcgatggtcttttcctaccaatctatcccc

SEQ ID NO: 4729 - DNA, 215 bp, Triticum aestivum
  Clone ID: LIB103-063-Q1-E1-G4
ccggctcgacggaacccaaagcgaagaagcgggcgccggcgaccaaggaggccggcggcgaggggaagacgaggggcacgaagaagggcagcaaggccaagaagggcgtggagacgtacaagatctacatcttcaaggtgctcaagcaggtgcacccggacatcggcatctcctccaaggccatgtccatcatgaactccttcatcaacgacatc

SEQ ID NO: 4730 - DNA, 354 bp, Triticum aestivum
  Clone ID: LIB103-063-Q1-E1-G5
cgggtcgacgggatatccgcattagatcggtgtgcaaaatatagctgttacatctgaacagagaactgtgctatccattatgcctataatcaaatattagttcttatgtagttccatcacatcatatacaccaggtttctcaagctctacagttagtgctttatgaaagattgccagtgacactaaggtcagggatttgaggtccctgcagacatctactcgatctacttcaagtttcgattgtacacattcgttgagtcattcatcggaattatcatgctcttctctaatatcactacgatctaccatatcttctaagactactccagaactgtttagcactgagactgaata

SEQ ID NO: 4731 - DNA, 476 bp, Triticum aestivum
  Clone ID: LIB103-063-Q1-E1-G6
ggctagccaccgagtccatccatccgcccctcgctgccgctgcgtctcgcctccaccaccccacttgcccccggactcaggaggatcgtcggagatgtcggacaccgatgagcaccacttcgagtccaaggccgactccggcgcctccaagacctacccgcagcaggctggcgccatccgcaagggtggacacatcgtcatcaaggcccgtccctgcaaggttgttgaggtctccacctccaagactgggaagcatggtcacgcaaagtgtcactttgttgccattgacatctttaatggaaagaagcttgaggatatcgttccttcatcccacaactgtgacgtcccccatgttgaccgccaagattatcagctgattgacataactgatgatggatatgtcagccttctcactgagagtggtaacactaaggatgacctgaagcttcccactgatgatgttctgcttggccaga

SEQ ID NO: 4732 - DNA, 486 bp, Triticum aestivum
  Clone ID: LIB103-063-Q1-E1-G7
gggccgacgggcacttactatttacaatgagatgcaggctaccgaggtgaacccgaatgacgtaaccatggtcagtgtgctctctgcctgtgctgtcctgggtgcacttgagatgggcaagtgggtgcattcatacataaggagaaaggccttgccccttacagttgttctcggcactgcgctggtggacttctatgcaaagtgtggatgcattgaagatgcagtcaaggcatttgagtcgatgcctgtgaggaattcttggacgtggacagccttgataaagggcatggcaagcaacggaagaggcagagaagcgctggagctcttctcttccatgcgggaggccaatattgagcctacagatgtcacattcattggtgttctcctagcttgcagccacaactgcttagttgaggaaggtcgccggcattttgatagtatgacccaggattatggcatccatccaaggattgagcactatggctg

SEQ ID NO: 4733 - DNA, 480 bp, Triticum aestivum
  Clone ID: LIB103-063-Q1-E1-G8
gcctcaaaagacgaagccaagccagggaaagagggtatctcatccacaccaggatattttgagcccatccccgtttcagaaaccggttcctcgtcgtcgcacgaagaagccggacgaaacccgctcgaagagaaacgaggaccgtaccgctaagaggagcaggagcaagtgaccactcgtgttggtgatgtcgtttagtgcaactagttgtgagcaagaacttgtatgctatgctagtgatgtctatttggtactttcaagctttgttggtgatgtcgaattgctactttcaaactatgttcaaattatttgaaatgttaatttgctatctacaatgtatgcgatcatcctattttgaattacaaacaatatttgttgtgatgttttttttttgattgataagaccaagaaccaatttagaagttaactggcacataccctactgccggacggcacggaggtaggtgtagacagcctacc

SEQ ID NO: 4734 - DNA, 445 bp, Triticum aestivum
  Clone ID: LIB103-063-Q1-E1-G9
attcgcgggtcgacttaattttgaatcacaacgttgataaacacatagtaagtattcttgatgctggtaaaccggaattgagatcttcatctcattattcgggttacataaaccagaagcatacttgaaggcttgtaagtatgcaatcatggttacatcaaagacataattgagggccagtctttagtgactttggttcatattccgggttatatatataaggtctatgattcccggtgcggtaagccgcctagaggcttgtgacttgttttctatgcaggatggttaaagacagctattcgagcttaaggaaaataactaatcaattataacccggaggaataagaagaagaagcttcaatggagttaagcattcaacacgtgcacgacggcacgaaaaaattaagtgtttatcctactgtattacaagactccctgagtccaa

SEQ ID NO: 4735 - DNA, 320 bp, Triticum aestivum
  Clone ID: LIB103-063-Q1-E1-H1
ggtcggaaataaagggtcgaccggaccctgatgcgcaactaattaacaacccaacttaagggcccaactgcacattttaagttatccaagctcgttctgcggaaggatataaagaaccatgggaaccctacaagtcataacccaaatttggtgttgaacaattttacaacgtgccttgggaatcctgttgggaggatgatacaatctcttttccctcaagacccaaatttccgtggccgccaatttgtaaccttcaacattcagcgagactataaatttttccgtcatcaaaggtacacctttgaggaaaaagaaaagaa

SEQ ID NO: 4736 - DNA, 412 bp, Triticum aestivum
  Clone ID: LIB103-063-Q1-E1-H10
cggggcacataattgatggttcggtagtgctactcgtagcgtgcatgcatgctggttctgtgggcgctatacgccgcgcgtacgtacgtttggagaactcgatttgtttgttgtgtttgtcgcttaattacgtcgttaggtccatctctgtcggtcggtcgtgttaagttcttggttatctgtagtagtggtgcatgttcttgaggcatatgaataatgctagatgtacgtgtcagcttgtgccgtggtatgcaatgatgaaatgaatgaagtattattgtaaaaaaaaaaacataacccaaaatacatcatagaaaatagaccataacagtaataaaaaaaatcagacaaataagtttatagacagacagaaaaaaaaaaacaggccgcataaaaaaaagcgggcccccca

SEQ ID NO: 4737 - DNA, 425 bp, Triticum aestivum
  Clone ID: LIB103-063-Q1-E1-H12
catggctctcgaaaaagtgaaaaacgtttttttttcatccacaagaggcatagatttaggccccgtttggattctctcctactcccagcttctttgtttcagcgcatggagttgtcctgaacgcgacatctcctagaagccagcttcgcggagcaaacaacccctgtagtgcaaaaacgagaggcaggtcgaatgcaacttcaaaaatcgaaagaggcggagttggacgtaattacttgatatgccactgccaagtgactctagggcaccgtacccgttcaatcaatgtgtttatctccccgatacattctctcccatacgagaaaccactctaatgggcttcatgcttgcttactgggctgccggccgacgcagacgagagcaggagcagccgccgttgccgaacgcatcactagctccaacaa

SEQ ID NO: 4738 - DNA, 412 bp, Triticum aestivum
  Clone ID: LIB103-063-Q1-E1-H3
ggtcgaccggactgcggatgacaatcgatgttggttcacgtgtgggggaagcgcatggaaatccggttgttcgacgtttgtgattgatgtcaatattcttaaaagggaactcttgggttgcatatggaatagttgtcatgtctttctcggactattcttttgcttgataagggatctgtccgaattcagctgactgtctaaaaattgcactggtttatcacatattaatgtcgatctttaccaaaatattagtccttagaagttaagggggagttttcggtgaaacattgtggaaagtccgatttgattatatggctgagactgttcagggttgtggccactcaagataactcacacctgtgcaatgccatccccgtaatggacagagctttgggggaataattcggaattc

SEQ ID NO: 4739 - DNA, 147 bp, Triticum aestivum
  Clone ID: LIB103-063-Q1-E1-H4
tgaaaaatggaaattcgtcggtttaagcccccatgcaacaattgctggggtgttcgggataaactcaaccgctcttgttcccatttttgggtcaagctagggaggcgctcgacacagcgaacaaggcaaccggacttataatgcttg

SEQ ID NO: 4740 - DNA, 491 bp, Triticum aestivum
  Clone ID: LIB103-063-Q1-E1-H5
ccgggtcgacgggtccttcaaggtaacataccacgcccgtggggcctgcttgaggccatagagggccttgttgagtctgaagactttgtcaggattctttggatcttcaaaacctgggggttgagcaacatatacttcttcctcaagcttaccattgaggaatgcacttttcacatccatttgatataaagtgatatcatgatggttagtataagcaagtaatatgcgaatagcctcaagtctagcaacaggtgcaaaagtttcatcgaaatcaattccttcaacctgtgtgtagccttgagctacaagccatgccttattcctcaccacaaggccgttttcatattgcttgttgcggtagaatcaactttgtgccaatgatattgtgcttgagaagatctggacgtttgaccagttcccagacattgttgagctcaaactgatgtaattcttcttgcatggcctgaatccactcaagctccagaaatgct

SEQ ID NO: 4741 - DNA, 467 bp, Triticum aestivum
  Clone ID: LIB103-063-Q1-E1-H6
ttaagatgtctgacgctggttagagattaatcatgtgttccgtaagtgttagtttgtagtttctactactattttctcgcggttgatgagagagactcggaagtgaatttgtataccggaagatttttgtcagccgtgcaactcgttgcgcctcttgatagaaaaagtagaaattttgtcaaagtcattctatatgcttagcagcagagatgatgtacgataccattaaaaacccttctgaatgtttgttgatgctgtgtaaaaaaaaaaaaaaaaaaaaaaaaaaaaaaaaaaaaaaaaaaaaaaaaaaaaaaaaaaaaaaaaaaaaaaaaaaaaaaaaaaaaaaaaaaaaaaaaaaaaaaaaaaaaaaaaaaaaaaaaaaagggccgcccaaagggttcaaagttaaaaaaaaacgggggggcccctaaagggtccccctaaaggttccccgaaattcaattcaa

SEQ ID NO: 4742 - DNA, 370 bp, Triticum aestivum
  Clone ID: LIB103-063-Q1-E1-H7
accggtcaggtcagtccgggtcgaccggatccagtacgtcggcgcgcagaggctgctgattctcctcgctctcgtgattgaacctgtaaacaacggcgcaattatcttcactgaataccaccatgaaattatcaagcaatttggcataatcatatccgatactgttcctgataacaaagacgcagggtctgatgacgatcatgacgatgatgaagatgaggatgatgaaactggtgatgctcatgatgatgatgccgatgctggagaggacttctcgggtgaacactgcgatgacgatgacgaggatgatgaccctgacgctaactgtgatgatgctggagcggggagccatgatgatgatggtgactac

SEQ ID NO: 4743 - DNA, 452 bp, Triticum aestivum
  Clone ID: LIB103-063-Q1-E1-H8
ggggacgagcgatggtcttttcctaccaatctatccccctaggagcatgcgcgtaatactttgctttgataacttctagatttttgcaataagtatatgagttctttatgactaatgttgagtccatggattatacgcactctcacccttccacctttgctagcctctctaataccgcgcacttttcgccggtatcatacacctaccatataccttcctcaaaacagccaccatacctacctattatagcatttccatagccattccgagatatattgccatgcaactttccaccatctagttcatcatgacacattcatcattgtcatattgcttagcatgatcatgtagttgacataagtatttgtggcaaagccaccgttcataatttcttcatacttgtcactcttgattcattgcatatcccggtacaacgccggaggcatccatat

SEQ ID NO: 4744 - DNA, 375 bp, Triticum aestivum
  Clone ID: LIB104-001-Q1-E1-A11
tcccgggtcaacggggacgaccacgtggatgtggaaaagtcggatagaaagctcttagatgatgaaaagaaacccgatatcacgaaacgaccacacactcctattggagatgaggtggaatgcaagaagccaaagatagcagaaggctcaaggtgccaaggagaagaacctgaggctggagggataaagaattcctcctgggtctgatgacaggggaatgcagtaaacaccagaagcatcaaaactatgatctggaacagtatcctgaataaactattttctggattatgaatgaattctgaagcatggggctataagtgaattatgtaacatggatttgtaactatggtggatgttaagttaacgttctatcag

SEQ ID NO: 4745 - DNA, 312 bp, Triticum aestivum
  unsure at all n locations
  Clone ID: LIB104-001-Q1-E1-A9
taccggtccgacattcncgggtcgacgggcgggcatgcatgcgccatcccgccggtcggccaataaatcagggagcgtttgggtggcctacagtgcgtacgtttcggatattgatttcttcgtggagtctagtgttcgtgcgtgtgtggttggtggtagttgtttggttttgttagtgtgagtgcgtcgtgggtgccgtgtactcctgtgtgtgtgtcaagtgttgccacctgcgattccattttcattccgtgcgatgaataaattaagaaggggtcttctggacgcgtctagcgggcgcacggccgccta

SEQ ID NO: 4746 - DNA, 428 bp, Triticum aestivum
  unsure at all n locations
  Clone ID: LIB104-001-Q1-E1-D10
cggtcctaaattcncgggtcaacgacgacccctactacactggaggtgcctactactacgtgctgcccgctgatgacgacctggagtagtttaggaggatcccaggcaggaggcctgcgcctctttcgatctgtatcccagtttgtgctagccttcttaaggcaaacttgtttaacttatgtctgtactcagatattgttgcttccgctgactcgtctatgatcgagcacttgtattcgagccctcgaggcccctggcttgtattatgatgcttgtatgacttatttatgttttagagttgtgttgtgatatcttcccgtgagtccctgatcttgatcgtacacgtttgcgtgcctgattagtgtacgattgaatcgggggcgtcacaagttggtatcagagccgactgcctgtaggaatcccccttc

SEQ ID NO: 4747 - DNA, 399 bp, Triticum aestivum
  Clone ID: LIB104-001-Q1-E1-E10
acgcctgcagtatcggtccgagacttcccgggtcgacggggttaatcctaagtaggaggtttgttcaagtaagaacagtagctaagcaccggtccacccacatatcaaattatcaacgtagcgaacacaaatcatatcaacatgatgaaagtgactggatgaaatgcccgtgtaccctcaagaacgctttgcgtaatgtaagagatcgttttggcctgtcccttgcctcaaaaggattgggctaccttgctgcacgtctgttacgagtaacagtacgtgctcgtgacaaaatatcttgctatcgaaccacgatgttaccgacaacttcagcacttgcatacattcccttgctgaagaccacgtgtcactaccgtttgctcctcactgggttccacactc

SEQ ID NO: 4748 - DNA, 454 bp, Triticum aestivum
  Clone ID: LIB104-001-Q1-E1-F10
ggtcccaaattcccgggtagacgggaggggttgttttcttctctaagtcctttttcctcataacatatgcccttgttcagcgcatcgtaactttgcacccgtagctccgttttgggcgtgtagcatatcaaattgttcatctggatatgcacttcatttcattccattgtaccatattcatttgaggtcatcttgatgccctaaatgctgttgcaagagtgctatgtaatgttagtttcagattcttaccagattatcgacatttgtcatttttgccatgtttaatgatgaggacatgactaccttggatatgaccaaaaatattgcatatatgcatatttgtcaggtgatttctagtgcaaactattcaataatctatttatgttatccagaacaaaaatacttcacacacttttgtgttttgtctaattgcaggtgtatgggacatttgtac

SEQ ID NO: 4749 - DNA, 384 bp, Triticum aestivum
  unsure at all n locations
  Clone ID: LIB104-001-Q1-E1-F11
acgcctgcctgttccggtcggcaattcncgggtcaacgggacgggtcgtattcttctctaaatccattttcctcataacagatgcccttgttcaccgcatcgtaacattgcacccgtcgctccgtgttgggcgtgtagcataccaaattgttcatctggagatgcacggcagttcggtccattgtaccagattcatttgaggtcagcttgatgtcctagatgctgttccaagagtgctacgtggcgtcattttcatattcttaccagagtaacgacatattgtcacttctgccatgtttactgacgatgacatgacgaacttggatataatcacacatagggcatacatgcatatttgccacgtgatttctagtgcacactatt

SEQ ID NO: 4750 - DNA, 462 bp, Triticum aestivum
  Clone ID: LIB104-001-Q1-E1-F9
acgcctgccggtatcggtccgaaattcccgggtcaacgggtacttgactattgttatgataattatgcttctaatgcctatgttaaaccatatattgagaaattcaacgctgacgaagaagagactaatattttgcaggacgctatggaagaagaaattgatgagactgtgagctcattggatgaaagagatgatgaggagagcgaagaacaatggatgaagagcggattagctacccgtgtccaccttctaatgagagtaaccctccaactcatacattatttaattccccttcgttcttaccgaaggatgattgcgatgatgattgctatgatcccttgaatttgtttgaaatatccctttttgatgatgctttctatgcatgtggccatgatgccaatatagattatgcttatggacatgaacttgctataatccttaggtgaaacatgaaattgttgc

SEQ ID NO: 4751 - DNA, 314 bp, Triticum aestivum
  Clone ID: LIB104-001-Q1-E1-G10
tggtacgcctgcagtatcggtccgagattcccgggtcaacggggtctacagcaacggcggtgttgttctcccacacaaggagatcaagtcaagcatcctgaagcctgagatcgtcatgtgagctcaccgctcacaaatgcttttaggaacgatgttgtgtggcgtctttgttctagtgcatactgtaaacagcttaatatatgtggaacttgcgagacttgttaaactgatgagagtgtatgtgcaaaaaaaaaaaataatttaaaaatatactatgaataaaaagtacctcaaaggtatctaaaaaagaacaa

SEQ ID NO: 4752 - DNA, 442 bp, Triticum aestivum
  unsure at all n locations
  Clone ID: LIB104-001-Q1-E1-G11
acgcctgcccgtatccggtccgcagattcncgggtcgacgggacgtatagtattctgcgagtcctaaacaacatggaaatttgctttggttatgaatttaatcctaatatgatgggcatccatcagggatatactagtaactttcatatgaagtgcactgaatactaagagaagtttgatacatgataattgttttgagagatgacgatggtcagtggcggagccaactcaagtttagagccggggcaagatctacatgctgccaaattacttactttctacccaaacaaacgtccacttcacccaattttctctactaaagcttcatggacttgcaccaagggaacccgggcaagtgccccagcgtgccaagttctgtcaccgccactgaagatggtgatattaaaattgtgctagtttagtagttgtgaatttgagaaat

SEQ ID NO: 4753 - DNA, 458 bp, Triticum aestivum
  Clone ID: LIB104-001-Q1-E1-G12
cgcctgccggtatcggtcggaaattcccgggtcaacgggacttatattattttgagagtcctaaacaacatggtaatttgctttggttatgaatttagtcctaatatgatgggcatccaagagggatataataaaaactttcatatgaagtgcattgaatactaagagaagtttgatacttgataattgttttgagatatgaagatggtcagtggcggagccaactcaagtttagagccggggcaagatctaagtgctgccaaattacttagtttctacccaaacaaacttccacttcacccaattttctctactagagcttcatggacttgcaccaagggagcccgggcaagtgccccagctcgccaggtgctgtcaccgccactgaagatggtgatattaaagttgtgctagttgagtaattgtgaatttgagaaatacctgtggtaaagtttgtg

SEQ ID NO: 4754 - DNA, 469 bp, Triticum aestivum
  unsure at all n locations
  Clone ID: LIB104-001-Q1-E1-H11
cgcctgcangtatcggtccgaaattcncgggtcgacggggagattcacttaatgacgagctgaggaaaaaggagaataatcgtttgattttggccaaacatacctctcttttgaagaacatgaagagaaaactcattttggcgaaaacaaaggttgcaaaagcagagatggctttggcgaaagttcaggaatatctctctccagcagagcttccaacggatctggaaactgttacagacgaggagcgtttcctattccgcagaattggcctgaaaatgaaggcctttttgatgcttggcaggcgggaagtttttgatggtactgtgcaaaacatgcacttccattggaagcatcgagaattggtcaaaattgttgtgaaggggaagacctttgaacaagttaaacatattgctatctctctagaagctgagagtggaggcgtgctcattgcactcgacaagacaacaaa

SEQ ID NO: 4755 - DNA, 462 bp, Triticum aestivum
  Clone ID: LIB104-001-Q1-E1-H9
acgcctgccggtatcggtccgaaattcccgggtcaacggggcggcaactgttgcagccacaatgttcccaccatttgctagccagacacagctaaatgccagagctagctagcgcataatagtgcactagtagtagtacacttgtatcatcttcagcaaactactccctattcccaagaaattgcacgtatagggagagttgaggcaaaaaacctgcttcagcagtctccctaaacccaaaaaattatctcctcaaatagtggagagttgcaaccctccccataaattttcaatgcttgccatgtcagtgcgccgcctccattgaccgccgcgccactggaccactgccgcctgctggaacaccaccgctgccgccggacttctgtgctgccgttgctggaaatccgcgccgccgccacctgccaccgcaaccttgacgaaaagatgcaaatgagagagatg

SEQ ID NO: 4756 - DNA, 370 bp, Triticum aestivum
  Clone ID: LIB104-001-Q1-E2-A1
cgcctgcccgtaccggtccagaattcccgggtcgacggggagatttcttggagggattcccagatcaattcaactagcagcgtcatcgtcaaggagtaccttctcaatgtcacttctggtaaactgggcattgagttcacccccgatgaaggatccttcgccttcatcaatgccatggaggttctacctgtgtctggcacctcaatttttgattcagtcaacaaggtggacggtcatgggttgaaaggcccttttagcctctacggcatcgggatcgagaccatgtacaggctgtgtgtgggattcatcgatgtactggctaggaaagatgatccaggattgtggaggaggtgggataaagatgaccatt

SEQ ID NO: 4757 - DNA, 429 bp, Triticum aestivum
  Clone ID: LIB104-001-Q1-E2-A4
cggtccgaaatcccgggtcgacgggggaaaaaacaatgttgctttcctctgtctctttatgcttggtaaattggaagattgcatacaattgcttgtagacagcaaccgtatacctgaagctgcattaatggcgcgttcttatcttcccagcaaagtttcagagattgtagcaatttggagaaaagacctcagcaaagttaatccaaaagctgcagattctctggcagatcctgctgagtatccaaatttatttgaagactggcaggttgcacttactgtagagcagaatgttgcttcccagaggggccactatccttctgcagatgagtacttgaaccatgctgagaagtcagacactactcttgtggaagctttcaaaaggatgcgggtcattgaagaagaggaaccagtggaagcactggatgaaaa

SEQ ID NO: 4758 - DNA, 324 bp, Triticum aestivum
  Clone ID: LIB104-001-Q1-E2-A5
aattcccgggtcgacgggtgactggagctggtagcgggccactgcctcatcaaggggggcgacgacggcgatgtctcacacatgcttacagacagcaaccgtgggacgtagactaccggcctcagccttcacgacacccacatccgacttacaaagactggctgagctaggagctcccaacacacactcaatacgcccgggtctgcagattctcaggcagatcgagcagagtaccccagtaacgtgtgtgactggcaagttccccttacgctgtagcatctgctgacatcctacaggggcagaccatccttgcgcagatgagta

SEQ ID NO: 4759 - DNA, 423 bp, Triticum aestivum
  unsure at all n locations
  Clone ID: LIB104-001-Q1-E2-A6
taccggtacagaattcccgggtcgacggggggactacgcacacaactaggagcaggagaattaaaccataacttagcatcaccctttaacgagaaaggaaacaacttaagaatcaagtaatagcgaattttttccacatgagcaaatagggtggctatatcatccaatttagtaagatgtgccacaacagtttcagattcataaccatagaaaggatcagattcaaccaaagtaatcaacttaggatcgacagagaattcataatccttatcagtaacaaagataggtgaagtagaaaacttaggatcataccgcattctagcattcaaagacttttctttcagcttagctaaccgtttcttaagatcatctctatcattacaagcannagagtctctagcagtttcttcatccataatataa

SEQ ID NO: 4760 - DNA, 423 bp, Triticum aestivum
  Clone ID: LIB104-001-Q1-E2-A7
gtaccggaccagaattcccgggtcgacgggcagcagaagctcagaccatatatatgatcagggtggtagaaaacggtggtagggttgcagatcagcaacgcaagctgcaatccgcaagctgcagtggcagcgtccgaaagagatgcgcggaatgtacataagtagtgcgggcgcgtggaacttttgtctgaagagatgattttttcgtatgtaattgcaggatttgactctcaaaaaaaaaaaaaaaaaaaaaaaaaaaaaaaaaaaaaaaaaaaaaaaaaaaaaaagaagaacaaaaagaataaagctaaaaataaaaatccataagacatcaaaaaacttcaaaaaatgtcgccaaaattcacataagggagccatcaaataacggggccccccaaggggaaaaaccttgcgttacccaag

SEQ ID NO: 4761 - DNA, 406 bp, Triticum aestivum
  Clone ID: LIB104-001-Q1-E2-A8
gtaccggaacagaattcccgggtcgacggggaggagctgaacaaggtgctggtggccatgaacgagcgcaagcacatcgacccgctgctggagtgcctcaaggagtggaacggcgagcccctgccgctctgctgagcagccgacgagccaaggtaacaccaaaggaaaagaaaacacgtacacacaaagtgaatatagaagtggttcaagactgtgaagcgggaggttcctggtatatctacgtttcattgtacttagttaagttgatactactgttgttttttctcgctgccgccatgccatgagcaggcgaggcaggcagcttctcaaacttgtgttgttgtaacttgtatgatgggagcttaagtacattactttgtttcataatacaccgtgttatcgccat

SEQ ID NO: 4762 - DNA, 382 bp, Triticum aestivum
  Clone ID: LIB104-001-Q1-E2-A9
tcccgggtcgacgggcggccatgcatgcgccatcccgccggccggccaataaatcagggagcgtttgggtggcctacagtgcgtacgtttcggatattgatttcttcgtggagtctagtgttcgtgcgtgtgtggttggtggtagttgtttggttttgttagtgtgagtgcgtcgtgggtgccgtgtactcctgtgtgtgtgtcaagtgttgccacctgcgattccattttcattccgtgcgatgaataaattaagaaggggtcttctggacgcgtctagcgggcgcacggccgcctaggatgcttagcgagcggcccgacacttcagataatttcttgtctctccttttaactagaatagtcatctagtagtccctttttc

SEQ ID NO: 4763 - DNA, 465 bp, Triticum aestivum
  unsure at all n locations
  Clone ID: LIB104-001-Q1-E2-B4
tcctgcggcacggtcgagaattcncgggtcgacgggtacgcactctctcccttccaccattgctagcctctcctgtgccccgcaacttcgccggtaccatacacctaccatataccttcctgaaaatagccaccatacctacctattatggcatttccatggccattctgagatatattgccatgcaactttccaccgttccgtttatatgacacacattacttttgtcatattgctttttgcatgatcatgtagttcacatcgtatttgtggcaaggccaccatcataattttcatacatgtcgctcttgattcattgcatatcatggtacacccccggaggtattcatagagagtcatatcttgttctagttttgagttgtaaatcaatagaagtgtgatgattttcattattagagcattgtcctagtgaggaaaggatgatggagactatgattcccccac

SEQ ID NO: 4764 - DNA, 447 bp, Triticum aestivum
  Clone ID: LIB104-001-Q1-E2-B5
gtaccggaccagaattcccgggtcgacgggtgactgatgcaaactgtgagattagctttaccgctcccgtctcctgctactctttagttacttagtactactaccggtagtggttatccgtctccattttttcaccatcatttttttaatcagaaacatagtactacagtacatgtttgtatttgtgtttgatttgaaaaaaaaaaaaaaaaaaaaaaaaaaaaaaaaaaaaataaaaaaaaaaaaaaaaaaaaaaaaaaaaaaaaaaaaagaaacacaaaaagaggaaaaaaaaaaaaaaaaaaaaaaaaaaaaagggggccccccaaagggttcaaacttaatttacgctgaaaggcaagttaaaacccctccaaaggggtccccaaattaaattccaggggcgttcttttaaaacgttggaacggggaaaaccccggggtttcc

SEQ ID NO: 4765 - DNA, 233 bp, Triticum aestivum
  Clone ID: LIB104-001-Q1-E2-B7
gtaccggaccagaattcccgggtcgacggggttccaaaaaaaaaaaaaaaaaaaaaaaaaaaaaaaaaaaaaaaaaaaaaaaaaaaaaaaaaaaaaaaaaaaaaaaaaaaaaaaaaaaaaccaaaaaaaaaaaaaaaaaaaaaaaaaaaaagcgggccgcccaaaaggatcaaacctaacttacccttgcatgcaacttcaaacccctccaaaagtgcccccaaatttcaatt

SEQ ID NO: 4766 - DNA, 418 bp, Triticum aestivum
  Clone ID: LIB104-001-Q1-E2-B8
taccggaccagaattcccgggtcgacgggatagaaagcgtgaagatagggatgtttcatcaagcagggtagatgacatggatagggacaaaggtaatactatgaaggaagatagtgaccctaatagtgcatccaaacggcgaaaaattaagagagatcagtctgctttagaagctggggaatatgcaccttctgctccacagcctccgagccttggagctggtaactcgcaatttgaaatacgagagagagaaagaaagggtgttatttcacagcatcggccgtcacatgctgatgacctccctaggatgcatgccaaggattcaataagcaagacaagtcgtagagagactgaccaaacgcatgatagagaacgggaagaggaaaagaggccaagaactgaagcaagaagaaagcat

SEQ ID NO: 4767 - DNA, 422 bp, Triticum aestivum
  Clone ID: LIB104-001-Q1-E2-C1
ccgggtcgacggggtcccgaaatgaaaaatggatttactttatgttgtcaaataataaattccttggaaagtgttgggatggaaggcacccgtggatacgattagccatggaaagtgaaagtatatggtggaaaaaggaataaactttattttctgcttgggaacctcctatgatatatctagcatggaaggtgttgggaactctaagtcgttttcgttggtgggaaggacacacctcccaaaatgtttttatctctaagttttttgctttgagctctggaacctctacaaatccgtacttccctctacgaagggcctttctattactttgtgaaatttttatttttaaatttgagtctccatcttctcttataaaagcaccaactttggaggcactatgatcgtacttgagcattgtgtgt

SEQ ID NO: 4768 - DNA, 432 bp, Triticum aestivum
  unsure at all n locations
  Clone ID: LIB104-001-Q1-E2-C10
ggtccgaaatatcncgggtcgacggggccagagatcatcaccaccccgtatgactggcgcatccacgtcggcgatggcgagtcggcgccgcgagaccgcagtgagcgcatctgccaccctgccgctcctcctgtagccggcgtgatgacgacgaagatgaccaccgtcgggaggaccaagaccgagatcgtcggggccgtgacggctccaggaacggcaggggctggggggagagggtgcgtcgcagcctctcccgcgccccccgggacgacaaccgcgaccgtggtcgagagcagcaaggaggtcgtgatggcggtcggcgatgccatgaggaagtggccccttcgctgctgctacgtggctccggctcctccagcgtggtggccgcacacgatgcggagatggtgccagtgctcctcggccgcctgcccg

SEQ ID NO: 4769 - DNA, 457 bp, Triticum aestivum
  Clone ID: LIB104-001-Q1-E2-C5
gtaccggaccagaattcccgggtcgacgggtgtatttgatgcggcaataaaggtggtacttgcgccaccaaaggcgaagaagaagaaaaaggcgcagaggggggcttgctccatcttgtgatctaatcatcggtagacaaagaacaagggcgaagttgccgccatgctatattattgttacgtcttgcttcagcggagctgcactctcatggtcgtcgtccctcccccctaccccaccctaggttacccaccggcagctgcagcaaggtctctttgtcgaggcatcgggcgatccatttgtttgatttctcttcttcctgccttgtgattatctcgtgtgactgacaagtcgtggcaatttaggtaacttgcttagtagacggtatttcccgtgtttgagaccccgtaaaaaaaaagtatctcgttgttatctcggttccataagtagagacatgat

SEQ ID NO: 4770 - DNA, 469 bp, Triticum aestivum
  Clone ID: LIB104-001-Q1-E2-C6
tacggtacgagaattcccgggtcgacggggcatcaaattgatcatagcatccaattcactttctatgatagtttttattatacgcaacttggatgctcatcattctaggaccaaatttgtaaccatagcaaataccgtgatgttctaaaataacctcaaaataatataagtgaagcatgagagactagaaatttcttcaaattaagtcaccaccgtgctctaaaatatataagtgaagcactagagcaaaaactatcaagctcaaaagatataagtgaagcacatagagtattctagcaaattctaatctagtgggcttctcccaaaaggtgtgtacagcagggatgattgtggtaaactaaaaatgaaagactaatataatacatgatgctccaagcaaaacacatatcatgtggtgaataaaaatatagctccaagtaaagttaccaatgaacgaagacgacagagg

SEQ ID NO: 4771 - DNA, 316 bp, Triticum aestivum
  Clone ID: LIB104-001-Q1-E2-C7
agtgagtcgtattaagctcactttctatgatagtgtttattagacgcaacttggatgctcatcattctaggaccaaatttgttagcatagcagataccgtgatgttctggaatagtctcagagtggtataagtgaagcatgagagactataaatttcttcaaattaagtcaccagcgtgctctaaaatatataagtgaagcactagagcacagactatcaacgctcacgagatataagtgaagcgcagagagtatgctagcagattctaatctagtgggcttcgcccagaaggtgtgtacagcagggatgattgtg

SEQ ID NO: 4772 - DNA, 412 bp, Triticum aestivum
  Clone ID: LIB104-001-Q1-E2-D10
gggtcgacgacgacccctactacactggaggtgcctactactacgtgctgcccgctgatgacgacctggagtagtttaggaggatcccaggcaggaggcctgcgcctctttcgatctgtatcccagtttgtgctagccttcttaaggcaaacttgtttaacttatgtctgtactcagatattgttgcttccgctgactcgtctatgatcgagcacttgtattcgagccctcgaggcccctggcttgtattatgatgcttgtatgacttatttatgttttagagttgtgttgtgatatcttcccgtgagtccctgatcttgatcgtacacgtttgcgtgcctgattagtgtacgattgaatccggggcgtcacaggttggtatcagagcccactgcttgtaggaacccccctt

SEQ ID NO: 4773 - DNA, 193 bp, Triticum aestivum
  Clone ID: LIB104-001-Q1-E2-D4
gggtcgaccggggaggacgacaacgacgacaatgaggaatacaagcacaactacgccttcaacatagatcatcactcttctataatgacacccaatactctatgcagtttgccatcattttaatacgtcctaaatgtgaatatccctgtacttacacaacattatcttctttcatcacatttcccatttttca

SEQ ID NO: 4774 - DNA, 393 bp, Triticum aestivum
  Clone ID: LIB104-001-Q1-E2-D5
gtaccggaccagaattcccgggtcgacgggggagctcgaagacgcgtacatgctgtcaagaattgttagcttgtgattaaccttacagacaccgtatattatgtaaaatgtcctccactcacacccagtcaatttaaccaattttcctgtgatctatttaaagtttgcggtgaggtccgacgagcagagatccggccggcgcgccatttgttgtaattgttgatgtaaacaggagttgccttttgattgagcaaccatcctgctataagcaacatgtttctcattcttcccttctggtgccccccaacccggcgggctagcttatagttgttggcaaaggtgtacacaccaatcaacctcctcacagttataataagcaggcgcagtttgccc

SEQ ID NO: 4775 - DNA, 441 bp, Triticum aestivum
  Clone ID: LIB104-001-Q1-E2-D7
gtaccggaccagaattcccgggtcgacgggcttcttcaaccatgagaatggaaggaacgggatcatcgacctcttcttccaggacaggtacctcaatgctatccagaccaacgctccccatcttctgaggtaccttgctgctgcagttgttgtcaacaagaggagaaggaacatgcttaaggaactcatcaaggtcatccagcaggagcagaacagctacaaggatcccatcattgagttcctggagtgcctgtatgtcaagtatgattttgatggcgctcagcagaagctcgtcgagtgcgagcaggttatactgaatgatcctttcctggggaagcgcgtcgaagagaggaatggcattgctgttcctctgagagacgagttccttgagaatgctcgcttgttcatctttgagacctactgccgtatacatcgctgcat

SEQ ID NO: 4776 - DNA, 463 bp, Triticum aestivum
  Clone ID: LIB104-001-Q1-E2-D8
gtaccggtaccagaattcccgggtcgacggggttctgtttttgacagattctgctttacgtatgttgtttgcctattttgatgcatctatggctagtattaagtggtatgaaccatagagaacttggaatacagtatgttcaacacaaatataaataaataatgagttcattacagtaccttatgtggtggtttttctttctttcactaacggagcttatgagatttcctgttgagttttgtgttgtgaagttttcaagttttgggtaaagatttgatggactatggaataaggagtggcaaaagcctaagcttggggatgaccatggcaccccaagacattcaagaatagccaaaatcctaatcttggggatgcccccagaaggcatcccctctttcgtcttcatttattggtaacttaacttgcagctatattttaattcgccacatcatatgtgttttgt

SEQ ID NO: 4777 - DNA, 442 bp, Triticum aestivum
  Clone ID: LIB104-001-Q1-E2-E5
gtaccggaccagaattcccgggtcgacgggtgccctggcaatactgtgctagtttgctataagggtgcgtctaggttgctactactggttgactgttcgtgcagttttcctagagttagctgttcgtgcatcattttttcctttgtgaattagctgttcgtgcgtcagttactcaaaaaaaaactgttcatgcatcattgatgattgtggtgaatcggctgaggtaagattagctcttcgtgcagcttctgcttgttggtgtcgagttctccttttttttaagtcttattttctttttccttgtatttctctgttccttcaaaatagaaatgccgggcatgtcattgcgcatggtcgatgaacatgcgatagacacatatataatcattggcattatgtttttaaaagcaaaaaatcttaagttgcgcattgacagtggacg

SEQ ID NO: 4778 - DNA, 434 bp, Triticum aestivum
  Clone ID: LIB104-001-Q1-E2-F5
gtaccggtacgagaattcccgggtcgacggggagttccaacggtgcccggactgcaacgagaacggcctcatcggatgccccgtctgctgctgctgatgctactgtttttttccgttacagtctaccgtaggctaaagttctcctgctgttttagatgcttctactttgtacaatgtgaagagcatttacagaagactcctaatatatcacggcaagaggttttgcttacgatcctacagtaataattatcaccctcacgaataagttcagtagtagatccatgatgtcaggttttgttggtgaagactgaatacaaccatagaaatataaactgagttaatactgacgctaataagcatagttgcggcggcattgcatcgatgatttacgacgtttcactttttttccaagcatttttcatatcgctgttcac

SEQ ID NO: 4779 - DNA, 377 bp, Triticum aestivum
  Clone ID: LIB104-001-Q1-E2-F6
attcccgcgtcgacgggacttatataattttgagagtcctaaacaacatggtaatttgctttggttatgaatttagtcctaatatgatgggcatccaagagggatataataaaaactttcatatgaagtgcattgaatactaagagaagtttgatacttgataattgttttgagatatgaagatggtcagtggcggagccaactcaagtttagagccggggcaagatctaagtgctgccaaattacttagtttctacccaaataaacttcgacttcacccaattttctcgactagagcttcatggacttgcaccaagggagcccgggcaagtgccccagctcgccacgtgctgtcaccgccactgaagatggtgatc

SEQ ID NO: 4780 - DNA, 417 bp, Triticum aestivum
  Clone ID: LIB104-001-Q1-E2-F7
attcccgggtcgacgggaagttacagaatgaggacggttcatggttcggatcatggggtatttgcttcacatacggcacgtggtttgctatagagggcctatcggcagttggacagtgttacaataatagcacctacatccggaagggttgccagtttctattatcaaagcagctaaggaatggtggatggggtgagagtcatctttcatccacaaccaaggcatacacgaacctagacggggagaaatcacatgtagtcaacaccgcatgggcaatgttggcactaatgaaagctggacaggccgaacgagatccgtctcctttgcacgaagctgcaagacttaccatgagcatgcaacttggcaatggtgacttcccacacgaggaaatgattggaagtttcttgaaaaatggtc

SEQ ID NO: 4781 - DNA, 418 bp, Triticum aestivum
  Clone ID: LIB104-001-Q1-E2-G5
taccggaccagaattcccgggtcgacggacctgctgctatacatactggaccaattactagagctcgtgcacgccaactaaattaccaggtactttcgtttcttggtaatggttctaatgttcatgagaatatgatgctgcctaaattggatacatttgttttgcttacaaatgaagggcctagcttggagaaggatgaacattggagcaagaacaagcatggagatgatggcatgtgcaaggggaacaagaacggagttacaagtgatgatttcaggactttgaagccaccataatgggtgcatgaagccttggacgaaatatacaagatgccacttcataaatttcgttccgaggctattttaggtgctgcgtcaccttattattgggccaggcccatgtaatttcgaaatacata

SEQ ID NO: 4782 - DNA, 443 bp, Triticum aestivum
  Clone ID: LIB104-001-Q1-E2-G6
taccggaccagaattcccgggtcgactcctcaggagacggctcttcgccctggggtcttgaggggcgcagcctgccccgatgtcttgaaaggttatgggactcgggttggcctacccgtggtccattactccgacaaatactaagagaagtttgatacttgatgattgttttgagatatgaggatggtaatattagagtcgtgctagttgagtagttgtgaatttgagaaatgcttgtgttgaagtttgcaagtcccgtagcatgcacgtatggtaaacgttgtgtaacaaaaatgaaacatgaggtgttatttgattgtcctccttatgagtggcggtcggggacgagcgatggtcttttcctaccaatctatccccctaggagcatgcgcgtagtactttggtttttgatggattgtagatttttgcaataagtatatgag

SEQ ID NO: 4783 - DNA, 421 bp, Triticum aestivum
  Clone ID: LIB104-001-Q1-E2-G7
taccggtaccagaattcccgggtcgacggacctgctgctatacatactggaccaattactagagctcgtgcacgccaactaaattaccaggtactttcgtttcttggtaatggttctaatgttcatgagaatatgatgctgcctaaattggatacatttgttttgcttacaaatgaagggcctagcttggagaaggatgaacattggagcaagaacaagcatggagatgatggcatgtgcaaggggaacaagaacggagttacaagtgatgatttcaggactttgaagccaccataatgggtgcatgaagccttggacgaaatatacaagatgccacttcataaatttcgttccgaggctattttaggtgctgcgtcaccttattattgggccaggcccatgtaatttcgaaatacataag

SEQ ID NO: 4784 - DNA, 394 bp, Triticum aestivum
  Clone ID: LIB104-002-Q1-E1-A10
taccggtcctaaattcccgggtcgacggggagtccgcatggctcgcgaggtggggccacaagttaacgtgtctctgtcagtacgcagtgtcaggggcaaggcatgttgcgctcttttttttcctagaccgaagcaacagctttgcctttgctaacaactagtaaataaaatttggacagaaaatcccttttggaggcagagctccatggagaccggtttttgaaaaattcagagtccatatttttacatgtcaaaaactgagataatacatacatatgaacgcataatgcataagtgtgtaaattttcacgatgaaataagttgatacgaggagtgtgccaaaaaacacagatgatgacaggttaacccatgaaacggttcagcctttcaggcc

SEQ ID NO: 4785 - DNA, 439 bp, Triticum aestivum
  Clone ID: LIB104-002-Q1-E1-A11
cccgggtccacgggcagcaacaaaggcagctaacagcaacatcaacagcaacaacagcaacaacaacagcagcaacagcaacagcaacagcagcaacaacagcaacagcaacagcaacagcaacaagcagcaacaacggcaacagcaacaacaacaacaacatcaacagcaacaacaacaacagcaacaacaacaacaacaacaacaacaacaacaacaacaacaacaacaacaacaacagcaacagcaacagcaacaacagcaacaacagcaacaacaacaacaacaacaacatcaacaacagcaacaacagcaacaacagcaacaacaacaacaacattaacggcaacaacagcaacaacagcaacagcaacagcagcaacagcaacaacaacaacagcaagcagcaacaagagcaacgacaacaacagcagcaacg

SEQ ID NO: 4786 - DNA, 451 bp, Triticum aestivum
  Clone ID: LIB104-002-Q1-E1-A2
gtaccggtcctacattcccgggtcgactatcacgatgtacggggtcttgtcgcgaatgatccgcatctccatactcagcgaaaatagccgaacgaagatgtagtgcagcggatgaaggttaaacatagcaaagacgtcatcaaaccgcaggacgatcgtacccccgatgtcgccatccacaaagcccttgccctctggcaccttggccacgaaaaccgggtatgccacatccttctctctgagacgccgcttctccaaagaaagaacactgtcgtgcagactccgcatagcaccggttgcagcattgagcatatttggtggtagcatcgccctacccgccacatgcaccctcctcgagatatcctgcggtgaacgtggcccgtcctgagcacggatcgtacacggtgccggctggctcgcacccttcttaatctttcctttgcgtgccttc

SEQ ID NO: 4787 - DNA, 434 bp, Triticum aestivum
  Clone ID: LIB104-002-Q1-E1-A7
ggtccagaattcccgggtcgacggggagtttaaccaggttcgggccgcaagtgacgcgtaataccctactcttactggtttgtgtgtacctggtgttcttggactagctacaaagtgtgccgggtccaaaaagttcgaatccgcctccagtacgcctcgggcctccttttaaagccaaaggggtcgccacagtggcacacaggaggtggaaagtttgtactgtatacaagtctatcgcctggcaccgtacgacaaaacacatttaatgcgctgccgacgtgccctcttactttactggggacgacaaggaagctcgtcgcatccgccgccgcttcgtctcgctctgacgcgcgtccagcctgactacgcatgcagcgccatgctggttggttgctgagttggcgcggtggcagagtcttcatggagatctgcat

SEQ ID NO: 4788 - DNA, 98 bp, Triticum aestivum
  Clone ID: LIB104-002-Q1-E1-A8
cgcctgcacgtaccggtccagaactcccgggtcgacggagtacacgaatacagctctggttgatatcaacctgtgtctacaaactgaggtactcagca

SEQ ID NO: 4789 - DNA, 456 bp, Triticum aestivum
  Clone ID: LIB104-002-Q1-E1-A9
taccggtccagaattcccgggtcgacgggttggatacatttgttttgcttacaaatgaagggcctagcttggagaaggatgaacattggagcaagaacaagcatggagatgatggcatgcgcaaggggaacaagaacggagttacaagtgatgatttcaggactttgaagccaccataatgggtgcatgaagccttggacgaaatatacaagatgccacttcataaatttcgtcccgaggctattttaggtgttgcgtcaccttattattgggccaggcccatgtaatttcgaaatacataagtataggctatttttagagtccgtatgtgtggggaaacaagagatagggttgatttcggacccctccaccaagggccacgaaattcccccctcttcctccatatatacaacccttagggcatcgtttagactttgggttttgtttacattaaaa

SEQ ID NO: 4790 - DNA, 322 bp, Triticum aestivum
  Clone ID: LIB104-002-Q1-E1-B2
attcccaggtcgacgggcactagaatgtactcgcgctatctcaagaagatctactcggtctaagcttctttttgcggtgtgtttgctgacacagatgaatattgggtttacgaataaatctaactaagaccaatagttacagtcactctgaaggcatgaatgctagagcaggtctaggtttgaaggtctctgcgacgtattaaattgatttgggataatatataggtttttcatggcaaataaatactgcctagcgttgaggttaatcgaggggtgtccattcacaatgacagtaagggcagtagggcatacagcgtgttgt

SEQ ID NO: 4791 - DNA, 472 bp, Triticum aestivum
  Clone ID: LIB104-002-Q1-E1-B4
acgcctgctggtaccgctccgagaattcccaggtcgacggggtctcactggtccatatctctttctttagcaacattgaaatcctcttgaacctttagggaatgccgctgcagtctactaaagaaatcaaacagacccaactgctcaactacaaatttcttaggattaatctgtcgcacacatgcacctcataccgaggttaaataattcaaaatgattgacgaagctaaaatctaaagacaacttaagattactgaaaactgcccaaaacaataatatgactgaattgttagatggaaccaaaaaggaaattgtatttatcaagtttattaatctgcatgaactaagacagtctccgatattcaagaatgtagtggctcttgatttttaatcagagataacaaatgaccagatgcgtacaatagagggaaggagaagatactcacgtgtgtagcgcgcttgaatttgctgc

SEQ ID NO: 4792 - DNA, 415 bp, Triticum aestivum
  Clone ID: LIB104-002-Q1-E1-B5
gggtccgacgggtctcactggtccatatctctttctttagcaacattgaaatcctcttgaacctttagggaatgccgctgcagtctactaaagaaatcaaacagacccaactgctcaactacaaatttcttaggattaatctgtcgcacacatgcacctcataccgaggttaaataattcaaaatgattgacgaagctaaaatctaaagacaacttaagattactgaaaactgcccaaaacaataatatgactgaattgttagatggaaccaaaaaggaaattgtatttatcaagtttattaatctgcatgaactaagacagtctccgatattcaagaatgtagtggctcttgatttttaatcagagattacaaatgaccagatgcgtacaatagaaggaaggagaagatactca

SEQ ID NO: 4793 - DNA, 469 bp, Triticum aestivum
  unsure at all n locations
  Clone ID: LIB104-002-Q1-E1-C1
cgcctgctggtaccggcccgagaattcncgaggtcgacgggagctatatttttattcaccacatgatatgtgttttgcttggattttcatttcattttattttgtttttctttttgtttgaataaataccaagatcttaaattcttaaatgttagagagtcttcacatagttgcataattattcaactactcattgatcttcacttatatcttttggagtagtttgtcatttgctcttgtgcttcacttatatctttttagagcacggcggtggttttattttgaagaaattgttgaaatctcatgcttcacttatattatttttagagtctttagaacagcatggtaatttgcttgggttataaaattagtcctactatgatgggcattcaagatgggtataataaaaactttcatgtagagtgcattgaatactatgaaaagtttgatacttgatgattgttttgag

SEQ ID NO: 4794 - DNA, 117 bp, Triticum aestivum
  Clone ID: LIB104-002-Q1-E1-C11
taccggtcaggaattcccgggtcgacgggattgatacccgaagtcaagataccaacctaatgtgttcgtagctggtgtgggtactgatgtcttttgggatcacttccataaacaaaa

SEQ ID NO: 4795 - DNA, 413 bp, Triticum aestivum
  Clone ID: LIB104-002-Q1-E1-C3
cgcctgctcgtaccggcccagaattccctagtcgacggggtctcactggtccataactctttctttagcaacattgaaatcctcttgaacctttagggaatgccgctgcagtctactaaagaaatcaaacagacccaactgctcaactacaaatttcttaggaggaatctgtcgcacacatgcacctcataccgaggttaaataattcaaaatgattgacgaagctaaaatctaaagacaacttaagattactgaaaactgcccaaaacaataatatgactgaattgttagatggaaccaaaaaggaaattgtatttatcaagtttattaatctgcatgaactaagacagtctccgatattcaacaatgtagtggctcgtgatttttaatcacagatagcagatgaccagatg

SEQ ID NO: 4796 - DNA, 471 bp, Triticum aestivum
  unsure at all n locations
  Clone ID: LIB104-002-Q1-E1-C4
cgcctgtcggtaccggtccgagaattcccaggtcgacgggcgcgggcggcgacggcggcggcgcccacatcaacctcaaggtcaagggccaggatggcaatgaggtgttctttcgcatcaagagatctacccagctgaagaagctgatgaatgcctactgcgaccgccagtctgtggatatgaaagctattgcattcctgtttgacggtcgcaggctccgtgccgagcagacccctgatgagcttgagatggaagatggcgacgagatcgatgccatgctccaccagaccggaggccgcctccctccacgcgcctagaagaagccgttgagagtcctgcttgttgtcggtctacaagactctgatccatcattagagagcacatgaacgaatgaaagtctaaaaagaacttgtgaggctctggccccaagccatagctgaaggacattangggaggttttgtttagtgccg

SEQ ID NO: 4797 - DNA, 397 bp, Triticum aestivum
  Clone ID: LIB104-002-Q1-E1-C9
taccggtcctaaattcccgggtcgacgggtcagggcaacacactaggggtttgttgcaccaacaggagccctcgggcctggactgatcgtgtttccgagcgtagtcgcggtaggcccttccaagtacacaggcgaggaggctgccataagtcgtcccttgaggtcttctttgcttcttcataatctgagcttggatcagtttctggtcttcccgtgcatcacgcaacgccaattgtagtggggccatatttgtaatggcccatgaacgactttaacgcatgggggagtaactgccaattcactcttcccaccacgttcttctcccctaccacgtatgttgcatgcattgaatggggtaagtaaaagaagcgcgtggtgccggagagtgtcaacgcaa

SEQ ID NO: 4798 - DNA, 458 bp, Triticum aestivum
  unsure at all n locations
  Clone ID: LIB104-002-Q1-E1-D4
cgcctgtccgtaccgctccagaattcncaggtcgacgggcagtaccttatgtggtggttttgttttctttcactaacggagcttataagatttcatgttgagttttgtgttgtgaagttctcaagttttgagtaaagcttttatggactatggaataaggagtggcaagagcctaaacttggggatgaccatggcaccccaagatattcaagattagccaagatcctaagcttggggatgccccgggaaggcatcccctgtttcgtcttcgttcattggtaactttacttggagctatatttttattcgccacatgatatgtattttgcttggagcggtgtgtattatattagtctttgctttttagtttaccacaatcatccttgctgtacacaccttttgggagaagcctatttgattagaatttatttgttttttctccagtgcctcacttatat

SEQ ID NO: 4799 - DNA, 403 bp, Triticum aestivum
  Clone ID: LIB104-002-Q1-E1-D6
taccggtccagaattcccgggtcgacggggagcacaaggagggcatgatggagaagatcaaggacaagatcagcggcgacggccacggcgacggcaagaaggacggcgagcacaaggagaagaaggacaagaagaagaagaaggacaagaagcacggcgagggccacaaggacgacgacccaccacaacaccatcatcgcatcccattagcatcgccagtttccttggagagaagtagctagaaacagcagcgccatggccggcatcatgcacaagatcgaggagaagctccacatgggcggcggcagcgacgagcacaagaaggacgaggagcacaagaagaatgacggggagcacaagaatgacggcgagcacaagaaggacggggagcacaaggagggca

SEQ ID NO: 4800 - DNA, 459 bp, Triticum aestivum
  Clone ID: LIB104-002-Q1-E1-D9
cgccgcccggtaccggtcctaaattcccgggtcgacgggaccaacatagacaaaacatacacttaagtaaagcacttacaaaacagctactcaaacccgcacaaggaaaagccaattccaacacagcgggagacatagtcaggccaatgtcgattagaaccagacacacctacgaatccatatatggcccatccacaacaccaaaacaacttcgcaatccccacatggaccaaacatccaaccaacagaccaccggcaccctctccctgcacaaagtccaaccccccttcccccaaaaaatcacatccaccgcccccccaagcacacaatattattacagaaataatggaataatcaacatagaaaggaactaaaagaggaagagaagaaattgctaccttcccgcagcagatccacaacaccaaaacagcctcgcaatgcccacatgggacaaacact

SEQ ID NO: 4801 - DNA, 442 bp, Triticum aestivum
  unsure at all n locations
  Clone ID: LIB104-002-Q1-E1-E1
cgcctgctggtaccggctcgaaattcncgagtcgacggggtcttgtaatatttgtgtctttgtgtcttagtattccacaatcatccttgctgtacacaccttttgagagagccatacatgaattaaaatttgatagaatactctatgtgcttcacttacatcttttgagctaagtagttttgctctatgtgcttcacttatatcttttgagctagataattttgctccatgtgcttcacttatatcttttgagcagtataattttgctctatgttcttcacttagatcttttagagcacggtggtggatttgttttaaagaaactattgatctctcatgcttcacttaaattactttgagagtctcttaatagcatgggaatttgcttaataagaatatgcttgggattcaagatttgtgaaacgttcgtttgagtgtgttg

SEQ ID NO: 4802 - DNA, 426 bp, Triticum aestivum
  Clone ID: LIB104-002-Q1-E1-F1
attcccgagtcgacgggtacaactatattcaaattacttggaattattaatatccggaatacctcattgtgaaattacaaatgtgatttcaacacccattgcaacgcacgaggccttttgctaataataataaatatgataataataataatataatactcttcccattcctaaatataagtctttttagagatttcaacacagaatacatacgaagcaaaatgagtgaatctacacactaaaatatgtccatatacatccgttatgtgactataaattaagaaatatctaaaaagacttatatttagaaacatagggagtataaagcaaaagcttgctgattgttatgttcatataggttggctagtattactacaaattcctcacgcaactgcctcctccccaaaagtccagggtttctttgtg

SEQ ID NO: 4803 - DNA, 374 bp, Triticum aestivum
  Clone ID: LIB104-002-Q1-E1-F2
tcgacgggtacgcaattgctctagtacttccattatatcttttagagcatggcggtggttataaatagttgcactctcatgcttcacttatatctttttgagagttgataatagtaatgacaattagtgtgggttataaatttggtcctaatgtgataggtattcaagtgggatataatacaaactttcatgtagatcactgaaaatgataagtttgattccttgcaatagtttgcgatataaatgtggtaatatgcgggttgtgctagtgagtaattgtggtttagtaagaatattggtgttaacgttcgtgattccccgaacatgcacgtatggtctctcgttatgctatgaagtttcatcatgatttaata

SEQ ID NO: 4804 - DNA, 433 bp, Triticum aestivum
  unsure at all n locations
  Clone ID: LIB104-002-Q1-E1-F3
attcncaggtcgacgggggctcaacaatactatggaacttcccgacaaggtgaagccagtgcaggaaatcagggaatgcaatcaccctacagatccagttcgtttcctgcacctcagtatgcactgcagagagagaatgtttttcctgagagacctgatcaaccggaatgcatatactacataaagactggagattgtaaatttggtgcagtttgcaaattccatcatccccgtgtgcgttcacagcctcccccagactgtatcttgagcccaatgggtcttccattacgcccaggggaagagctctgcaagttctattctcgctatggcatctgcaagttcggcgtaaactgcaagttcgaccacccgatggcggctccgatgggggtctacgcgtacggctactccgcctcggcgtcgcccaacgcgccca

SEQ ID NO: 4805 - DNA, 451 bp, Triticum aestivum
  Clone ID: LIB104-002-Q1-E1-F4
acgcctgctggtaccgctccgagaattcccaggtcgactgcccggatgccgaagccttagcggccttcaagcacagtgtctgagatgaatggctcgccaaacacctcggccaggaaaagccgaggacaatggcagccttaacaagcctcatgacccgcttttgcgcgggcgaggatagttggctagcccatagcggcaccagtgacccaggaacatccgaagtcagagatggcaacggaaatccgtgacgcaataaaaacaagcgtcgaaacaatgaaaacagcccagataacacgacagtcagtgccggattcaggggctctcgacccggtcaacggaagaagccatttaaaggcagtagagatggaccgtccagcctgaataagattctagacaagttatgtcagattcatggcaccccccgaaaaacctgcaaatcaacaccatagtg

SEQ ID NO: 4806 - DNA, 449 bp, Triticum aestivum
  Clone ID: LIB104-002-Q1-E1-F7
ggtccagaattcccgggtcgacggggcagtcgcagccaggatgctgattgtgatgagcattaagctgaagctcgctcttctcggcgttcgcaagagacggcgtgacctgtgaatacatcgagtgcggcatgtaacataggcaaatagcctgcctgaagagtgagggagagaaaacctgcatagattttgttctggcgtttttgtgtgtgtttctagtgattgtttgggtttattttccgcgcttatggatgtacattacaggtatataagacagcatagtgatgatgtcttcttcatggttatggaagtgaaagtaatgttatggaagtgaaagtaatggtatgaatgctgtcttcatggttatcagacagcatagtgaaaaataagtgcgggggcgggacggtcgagagacaaagcggccgctctagaagatccaagcctacgtacgc

SEQ ID NO: 4807 - DNA, 387 bp, Triticum aestivum
  Clone ID: LIB104-002-Q1-E1-F8
ggtccagaattcccgggtcgacgggcactgagagagcttccgaagaaggctggccaacagttagtaatattatctcaggtcctaatggatgatattaatgttggttatgaaaggctggctgaactccaggtaaagaaggtgaatggtgttgaggttgagaatttgaagcatttgtgcagtatcgtggagaactgcactgaagaaaacttgagaattgatttggacgatgagcgggagatcgtcctgaaatttcagaacgcgaggcttgccacgtctcggatcctcaagcggcacaggattccatcagccatgtcgagtgaccttgtcgatgaacaagcgagcaaaggtgagactgacgcgtcatgcacaaactgacacattttcgta

SEQ ID NO: 4808 - DNA, 457 bp, Triticum aestivum
  Clone ID: LIB104-002-Q1-E1-G3
ggtacgcctgctggtaccggctcgaaattcccaggtcgacgggttcattgtgctggacgaagatcggcgcttcagcattaagctcgaggagaccttcgatgttcatacggtacgcaaccgacgataatagtttttttcgtaattactcatgacttcaactattttaatcatgacaatatttttcatcttttccaattcgactagcttatcccatgctttgcaagacgctatgtcttggagaggatgggttttgaagaccatgaaagtttcgaaaccaaagaaattatcctaagtacccatcatggtgtggattttcaaataaagttgtacaatgctcagagtgtaacccattttggttgcaaaaattgggaagcactttgcaagatgtatggttttgatgagggtatgcttgttaccatggatcttggtgatcctacaatcgagcaagagagaccta

SEQ ID NO: 4809 - DNA, 319 bp, Triticum aestivum
  unsure at all n locations
  Clone ID: LIB104-002-Q1-E1-G4
cgcctgcccgtaccggtcgtagaattcncgggtcgacggggtatccttttgattcttcattttgagccaaaaaaattcaccgtttgtcaaaaaaaatatctttcttgcggaaaaaggggatgcacccaaatcaaaacacatggatgggctcctagcctagtggcaagagcgcggtgatgtctctcggccgactcgggtttgaactgcctaggcaagcacttggtaaagttacgttacctgatctctgagtgtgggcactccatgatggacaacatattgtgcgtccacgatgccaaattgctcttcagggtcctgccag

SEQ ID NO: 4810 - DNA, 455 bp, Triticum aestivum
  Clone ID: LIB104-002-Q1-E1-G5
ggtccagaattcccgggtcgacgggctatttgaaactgctcgacgggagcttaatcttccttctgctaatgaattgattagttctcagtcaaacaatgaggcaaatggaaatctggaaagcacacaggaagtgcaggtgaacccaacgagcttatctcaatacagggacatccagagaaagattgttgagtttatcagaaagagataccatattctggaaaaatgcttggacattgaatatgccgtgataaaaacaaatactcctgttcctgatgatcttactgaacaaaatgttcctatgggacatagcccagctgttccagatatcagtgaagtgttgagagaacttccccctcttgtaccaatttctgccaaagaagtggcttctgatggctcaactgaccaggcacacctttcccatctttacaacaagatgtgcggtgtgcttgaggaca

SEQ ID NO: 4811 - DNA, 432 bp, Triticum aestivum
  Clone ID: LIB104-002-Q1-E1-G7
ggtccagaattcccgggtcgacggggtcgcaaacaagttggggtaggctatctcaagacatagaaagccaagaagaaatttgtattttgggttttagatttgcaaattgtggtatagctatcgctacctagaatcgatagaagctctgtttttttcaataaagcccagaaagccatacttacactcattctccagcaaataactccactggtaagctattccttcgctagactcctttgaagcatcggaagtaaacacaagcaacctgtggttctttgcaaccagatctgtgacggtgggccactcctgcccactcgttggcatttctgagatagggtaccaatacttcatcaagtcagcagcagtaaacaatttgctcaatctcatcggggcatgtacgtaatcctcgatgaatattgtaacaatctccgt

SEQ ID NO: 4812 - DNA, 387 bp, Triticum aestivum
  Clone ID: LIB104-002-Q1-E1-G8
ggtccaggactcccgggtcgacggagagcacaagaaggacggcgagcacaagaaggacggggagcacaaggaaggcatgatggagaagatcaaggacaagattagcggcgacggccacggctacggcaagaaggacggcgaccacaaggagaagaaagacaagaagaagaagaaggacaagaagcacggcgatggccacaaagacgacgactggcaccgcagcagcagcaacgacagcgacagcgactgagccaactcccgccgcgctccggcaacagcgttcactgtatgcgagatctatgaacgcttgtgaaaaatgtggcatacatatatgtttcacagtttttagcgtctggtaccatatgtatgttatgcgtgacatgtctc

SEQ ID NO: 4813 - DNA, 393 bp, Triticum aestivum
  unsure at all n locations
  Clone ID: LIB104-002-Q1-E1-H1
acgcctgcttgtaccggccctaaattcncgagtcgacgggtacggattatccggaattgttgtttgttcttccggtctcatttaaacttgcctagttaggtagtttcattatgcttcaccccttgccatgtttaacaacatttaatattgatcagtagcaataccgagagagaactaactaattgttgtggtgtttcgtcaatatgcaacttgttacatattgagctccacttaactttagcgttgtttgtgcactttgccatgccatgcctcattacactggacatgcatcatacttgattgtgcatcatgacatgattatgcctgtgtgtttaccatgttgtttgcttcattccggtttgcttctctcgttagcttcggtttcattccgga

SEQ ID NO: 4814 - DNA, 226 bp, Triticum aestivum
  Clone ID: LIB104-002-Q1-E1-H2
acgcctgccgggtacggcccgaaattcccaggtcgacgggttttgctcatgtttagtaataaataatttatctagcctctgttttggttgtgttttttgtgtttaattagtgtttgtgccaagtagaaccgttgggaagacttggggaaagtctttttgatcttgctgtaaaaaacagaaactttagcgctcacgagaatctatgccatttttatttggaaggtga

SEQ ID NO: 4815 - DNA, 359 bp, Triticum aestivum
  unsure at all n locations
  Clone ID: LIB104-002-Q1-E1-H4
cgcctgccggtaccgctcctaaattcncaggtcgacgggggtagtcgagtgaatcctcacaatcgcaacattaccggaactaagaagcaacaccggaaagaaacaaacaatatggtaaatgcacaagcataaacatggcatgatgcacaaacaagtatgatgcatgtccggtttaatgaggcatggcatggcaaagtgcaacaaacaacactacaaattaagtggagctcaatatgcaacgagttgcatattgacaaaacttcacaacatttatttagtttgctctcttttaagtacgcaataatattaaatgttgttaaacatggcaagacgggaagcaagagagaactacctatcta

SEQ ID NO: 4816 - DNA, 267 bp, Triticum aestivum
  Clone ID: LIB104-002-Q1-E1-H9
taccggtcctatattcccgggtccacgggaagcgaccaaggacgatagacagggtgtcgtactctcctcgctaaactccactgaagcttgctgatctccacaaccttacacgggtctacaaaacagaccttcccacagtgccaagcaatgcaccaccaatgatggcttcatctgttacggaagcgtcctacaagggcctcctccacaatggcttccagaacaattaaaccgttgttcacaccttccaatcggatggttaatcaatcc

SEQ ID NO: 4817 - DNA, 387 bp, Triticum aestivum
  Clone ID: LIB104-002-Q1-E2-A9
cccgggtcgacgggttggatacatttgttttgcttacaaatgaagggcctagcttggagaaagatgaacattggagcaagaacaagcatggagatgatggcatgcgcaaggggaacaagaacggagttacaagtgatgatttcaggactttgaagccaccataatgggtgcatgaagccttggacgaaatatacaagatgccacttcataaatttcgtcccgaggctattttaggtgttgcgtcaccttattattgggccaggcccatgtaatttcgaaatacataattagaggctatttttacagtccgtatgtgtggggaaacaaaagatatggttgatttcggacccctccacgaggggccactaaattcccccctcttcctcc

SEQ ID NO: 4818 - DNA, 403 bp, Triticum aestivum
  Clone ID: LIB104-002-Q1-E2-B2
cgcctgccagtaccggtcctaaattcacgggtcgacgggcactagaggatactgccgctatctcaagaagatctactcggtctaagcttctttttgcggtgtgtgtgtctgacacagctgaattttgggttaacgatcaagtctaacgatgaccaatagttaaagtcactctgaagtcattaaagctatgagcaggctaggtttgcaggtctctgcgaagtactaattaggtttgggataagctagtgattgatcatggcaaagagatcgatgctagccttaggtataatcatgccgtgtcctttcacactgatagaaggggcagtagagaatatagcgtattgttggtatccaggactctgatatagggttattaaccaaatgcatgaatgtaactctgtac

SEQ ID NO: 4819 - DNA, 419 bp, Triticum aestivum
  Clone ID: LIB104-002-Q1-E2-B5
attcccgggtcgacggggtctcactggtccatatctctttctttagcaacattgaaatcctcttgaacctttagggaatgccgctgcagtctactaaagaaatcaaacagacccaactgctcaactacaaatttcttaggattaatctgtcgcacacatgcacctcataccgaggttaaataattcaaaatgattgacgaagctaaaatctaaagacaacttaagattactgaaaactgcccaaaacaataatatgactgaattgttagatggaaccaaaaaggaaattgtatttatcaagtttattaatctgcatgaactaagacagtctccgatattcaagaatgtagtggctcttgatttttaatcagagataacaaatgaccagatgcgtacaatagagggaaggagaagatact

SEQ ID NO: 4820 - DNA, 451 bp, Triticum aestivum
  unsure at all n locations
  Clone ID: LIB104-002-Q1-E2-B6
gtaccggtccggaattcccgggtcgacggggagccataataataaaactcggatgacaacactttctcaaaataatcataacatgatattacaaaatggtatctcgctagccctttctaagaccgcaaaacataaatgcagagcacctttaaagatcaaggactgactaaacattgtgattcatggtaaaagagatccagtcaagtcataccaaatatanacaaaagtaatgaatcaaaataacagtgttctctcaagcgggtgctttaaataagaagggtgatgactcaacatagaagtaaatagatacgccctttgtagagggaagcagggatttgtagaggtgccagagctcgattttgaaatacagatagaataacattttgagcggcatactttcgctgtcaatgcaacaactatgagatggctgtatcttccatactacatgcat

SEQ ID NO: 4821 - DNA, 152 bp, Triticum aestivum
  Clone ID: LIB104-002-Q1-E2-C10
ctatagtgagtcgtattagtcgcagcagcatgagccctcgggcctggaatgatccagtttccgagcgtactcgcggtaggctcttccaagtacagacgccaggaggctgcgataggtcgtcgcttgaggtcatcgttgcgtcgtcataatct

SEQ ID NO: 4822 - DNA, 70 bp, Triticum aestivum
  Clone ID: LIB104-002-Q1-E2-C6
ggggcaccctatagtgagtcgtattacgttctgctgcttgcaggcttcgtagaagactccgcttgggtgc

SEQ ID NO: 4823 - DNA, 446 bp, Triticum aestivum
  Clone ID: LIB104-002-Q1-E2-C8
gtacaggtcctaaattcccgggtcgacgggtcagggcaacacactaggggtttgttgcaccaacaggagccctcgggcctggactgatcgtgtttccgagcgtagtcgcggtaggcccttccaagtacacaggcgaggaggctgccataagtcgtcccttgaggtcttctttgcttcttcataatctgagcttggatcagtttctggtcttcccgtgcatcacgcaacgccaattgtagtggggccatatttgtaatggcccatgaacgactttaacgcatgggggagtaactgccaattcactcttcccaccacgttcttctcccctaccacgtatgttgcatgcattgagtggggtaagtaaaggaagcgcgtggtgcgggagagtgtcaacgcaagggcctggccttctcgcattggttgagaaggacggccgtcacccatcg

SEQ ID NO: 4824 - DNA, 452 bp, Triticum aestivum
  unsure at all n locations
  Clone ID: LIB104-002-Q1-E2-C9
tacaagtccgaaattcccgggtcgacgggtcagggcaacacactaggggtttgttgcaccaacaggagccctcgggcctggactgatcgtgtttccgagcgtagtcgcggtaggcccttccaagtacacaggcgaggaggctgccataagtcgtcccttgaggtcttctttgcttcttcataatctgagcttggatcagtttctggtcttcccgtgcatcacgcaacgccaattgtagtggggccatatttgtaatggcccatgaacgactttaacgcatgggggagtaactgccaattcactcttcccaccacgttcttctcccctaccacgtatgttgcatgcattgagtggggtaagtaaaggaggcgcgtggtgcgggagagtgtcaacgcaagggcctggccttctcgcattggttgagaaggacngccgtcacccatcgacggatt

SEQ ID NO: 4825 - DNA, 445 bp, Triticum aestivum
  unsure at all n locations
  Clone ID: LIB104-002-Q1-E2-D10
taccagtccgagattcncgggtcgacggggccatcggaaccttcatctccggcgccaccgtctatggctacagaggaaagagcattaagtctgccctcatcggtggttctagcctgacattcacatctgccattcaggacgttggcggtaacactaccacagtggaccatggcaaagcctaccatgcatacacaacggaaaagaagcccgagcctgcgcattgatcaaggttgtctacttgtagcacaaatcatgcaaaccagctcggttaatttttgagctgatgtgtgctgttatgtctgttttgccgaagcacctagttcatttgcaaaactgtaataacttgttttgctcgacggcaatacaacatacctggaataaatatcttgctttactttgcttcatcaattggtacgatcataatcacatgtgacacaatattgtt

SEQ ID NO: 4826 - DNA, 423 bp, Triticum aestivum
  Clone ID: LIB104-002-Q1-E2-D4
gtccgaaattcacgggtcgacgggcagtaccttatgtggaggttttgttttctttcactaacggagcttataagatttcatgttgagttttgtgttgtgaagttctcaagttttgagtaaagcttttatggactatggaataaggagtggcaagagcctaaacttggggatgaccatggcaccccaagatattcaagattagccaagatcctaagcttggggatgccccgggaaggcatcccctgtttcgtcttcgttcattggtaactttacttggagctatatttttattcgccacatgatatgtattttgcttggagcggtgtgtattatattaatctttgctttttagtttaccacagtcatccttgctgtacacaccttttgggagaagcctatttgattagaatttaattgtttttt

SEQ ID NO: 4827 - DNA, 411 bp, Triticum aestivum
  Clone ID: LIB104-002-Q1-E2-D5
tccagaattcccgggtcgacggggaacgtgctgaccatcttcgaggaggaaggcgggcggccggacgccatcatgatcctgacggtgaagcgcgacaacatctgcagcttcatctcggagaccaaccccgggcacgtgcggtcgtgggagaccaaggacagccagctgacgatggtggcggacgacctgaagccgcgggcggtgctgacgtgcccggagaagaagatgatccagcaggtggtgttcgccagctacgggaacccgctggggatctgcggcaactacacgtttggcaactgccacacgcccaaggccaaggagattgtggagaaggcgtgcgtggggaagaggagctgcgtgctggccgtgtcgcacgaggtgtacggcggggacctcaactgcccggggcac

SEQ ID NO: 4828 - DNA, 428 bp, Triticum aestivum
  Clone ID: LIB104-002-Q1-E2-D6
gtaccggtcctaaattcccgggtcgacggggagcacaaagagggcatgatggagaagatcaaggacaagatcagcggcgacggccacggcgacggcaagaaggacggcgagcacaaggagaagaaggacaagaagaagaagaaggacaagaagcacggcgagggccacaaggacgacgacccaccacaacaccatcatcgcatcccattagcatcgccagtttccttggagagaagtagctagaaacagcagcgccatggccggcatcatgcacaagatcgaggagaagctccacatgggcggcggcagcgacgagcacaagaaggacgaggagcacaagaagaaggacggggagcacaagaaggacggcgagcacaagaaggacggggagcacaaggagggcatgatggagaagatcaaggacaaga

SEQ ID NO: 4829 - DNA, 435 bp, Triticum aestivum
  Clone ID: LIB104-002-Q1-E2-D7
attcccgggtcgacgggtgcattgcactttctcacctcgagagttggtgcaaacttcgccggtgtatccaaaccccgtgatatgatacgctctatcacacataagcctctttatatcttcctcaaaacaggcaccatacctacctattatggcatttccatagccattccgagatatattgccatgcaactttccaccgttccgtttattatgacacgctccatcattgtcatattgctttacatgatcatgtagttgacatcgtatttgtggcaaagccaccttcataattctttcatacatgtcactcttgattcattgcacatcccggtacaccgccggaggcattcacatagattcatattttgttctaagtatcgagttgtaattcgtgagttgtaagtacataatagtgtgatgattttcattattaga

SEQ ID NO: 4830 - DNA, 441 bp, Triticum aestivum
  Clone ID: LIB104-002-Q1-E2-E1
tccgaaattcaagggtcgacggggtcttgtaatatttgtgtctttgtgtcttagtattccacaatcatccttgctgtacacaccttttgagagagccatacatgaattaaaatttgatagaatactctatgtgcttcacttacatcttttgagctaagtagttttgctctatgtgcttcacttatatcttttgagctagataattttgctccatgtgcttcacttatatcttttgagcattataattttgctctatgttcttcacttagatcttttagagcacggtggtggatttgttttaaagaaactattgatctctcatgcttcacttaaattattttgagagtctcttaatagcatggtaatttgcttaataataatatgcttggtattcaagatttgtgaaactttcttttgagtgtgttgaatactaaggaaaga

SEQ ID NO: 4831 - DNA, 446 bp, Triticum aestivum
  Clone ID: LIB104-002-Q1-E2-E10
cgcctgcaggtaccggtccgtaccattccgggtcgacgggatgccctctttgaagattgaggtgttgtgcatgttggggtgcaaagaagcacaagcgagagtggtcgccgtataaccttggatggggatgaattgtgtgctcggggagtgtgtgtgtgtgtgttgtgctgcgtgtgtctctgtgtgtgtgtgtcagatattgagagatcacaaacctaaggagagaaatgggtattcacgaagagattgtgcgggccttgaggtgggcatgggccggttaagggtgtcaaaatgtgcccgttgatgcatgtgttgcatgcaaccgtgcaagggatggacgaatcgagagatatggttgttgtgttacggatgctcctctctctctctctctctctctatctctctctctctctctctcgctctctcacacacacacacacatgtac

SEQ ID NO: 4832 - DNA, 453 bp, Triticum aestivum
  Clone ID: LIB104-002-Q1-E2-E5
cctgcagtacaggtcctaaattcccgggtcgaccgtgacggcaccttcacctacggcggctactccagcatggtggtggtgcacgagcgcttcgtggtccggttcccggacgccatgccgctggacaagggcgcgcccctgctgtgcgccggcatcaccgtgtacagccccatgaagtaccacgggctgaacgctcccgggatgcacctcggcgtgctgggactgggcgggctgggccacgtcgccgtcaagttcggcaaggccttcgggatgaaggtgacagcgatcagctcgtcgccagggaagaagcaagaggccctcgaaaggcttggcgccgacgccttcgttgtcaacaagaacgccgacgagatgaaggctgcgattagcaccatggatggcatcataaacaccgtgtctgcaaacatccccatgggccctctcttccggctgctc

SEQ ID NO: 4833 - DNA, 418 bp, Triticum aestivum
  unsure at all n locations
  Clone ID: LIB104-002-Q1-E2-F1
gtcgacgggtacaactatattcaaattacttggaattattaatatccggaatacctcattgtgaaattacaaatgtgatttcaacacccattgcaacgcacgaggccttttgctaataataataaatatgataataataataatataatactcttcccattcctaaatataagtctttttagagatttcaacacagaatacatacgaagcaaaatgagtgaatctacacactaaaatatgtccatatacatccgttatgtgactataaattaagaaatatctaaaaagacttatatttagaaacatagggagtataaagcaaaagcttgctgattgttaggttcatatangttggctagtattactacaaatgcctcacgcaactgcctcctcncccaaaagtccaaagtttctttgt

SEQ ID NO: 4834 - DNA, 409 bp, Triticum aestivum
  Clone ID: LIB104-002-Q1-E2-F10
taccggtcctaaattcccgggtcgacgggtgttttacatagaacaacgcagcatggcgcctaaattactgcgttggtgctgaggtcaccactatgtatcacttggatcgccctatgtacttgatgggatagcgtgcgattcaaactcgattttatcctactgacatcgagttcaatgtcagtgggtatagaatacgtcgcagtttgatcgactaccatacgcgtgtgatgcgcagggatttggaaagtgcaactgagatgtgaccgtccataccatagacacaatatcgtagtggctctcatttcgtggaatcgagaggaatgttggacgaggctcgttaaatagccactgatgctgaagatcactttgaattcgctgtgcagcgtggacaactacaaatcgcaaacgc

SEQ ID NO: 4835 - DNA, 421 bp, Triticum aestivum
  Clone ID: LIB104-002-Q1-E2-F5
tacaggtcctaaattcccgggtcgacgggcgtgaagatgaccagatcgagtctgtagcgtgtgtgtcccccggcgtgagcccgtggttgcgttcgtggagtgaaggagctgcatgcgcagagccgttgcgatctgttggagtcaggtgcgatgtgcgcgcggctggagggagttagttgcaagctagctagatggttggccgggtcatgctagtgcatgcatgggctagcccggcgggtcatgtggtcatgcatggatatggatcgtgcatgtagtggttagcttagtgcgtgagttagttgccgggtgtgcaggccgtgtggtgtgtgtgcacgggtataaaaacccctcctccatgtactgatcgagttgagccggtgtgtagccatgtagccactgtaaggaagaaaaggattggggc

SEQ ID NO: 4836 - DNA, 417 bp, Triticum aestivum
  Clone ID: LIB104-002-Q1-E2-F6
attcccgggtcgacggggcagtcgctgccaggatgctgattgtgatgagcattaagctgaagctcgctcttctcggcgttcgcaagagacggcgtgacctgtgaatacatcgagtgcggcatgtaacataggcaaatagcctgcctgaagagtgagggagagaaaacctgcatagattttgttctggcgtttttgtgtgtgtttctagtgattgtttgggtttattttccgcgcttatggatgtacattacaggtatataagacagcatagtgatgatgtcttcttcatggttatggaagtgaaagtaatgttatggaagtgaaagtaatggtatgaatgctgtcttcatggttataagacagcatagtgaaaaataaaagggaaagggaaagaaaaaaaaaaaaagcggccgctct

SEQ ID NO: 4837 - DNA, 331 bp, Triticum aestivum
  Clone ID: LIB104-002-Q1-E2-F7
ttcccgggtcgacggggcagtcgctgccaggatgctgattgtgatgagcattaagctgaagctcgctcttctcggcgttcgcaagagacggcgtgacctgtgaatacatcgagtgcggcatgtaacataggcaaatagcctgcctgaagagtgagggaaagaaaacctgcatagattttgttctggcgtttttgtgtgtgtttctagtgattgtttgggttaattttccgcccttatggatgtacattacaggtatataagacaccatattgataatttctccttcagggtaatgaaattaaaattaagttaatgaaattgaaattaatgg

SEQ ID NO: 4838 - DNA, 425 bp, Triticum aestivum
  Clone ID: LIB104-002-Q1-E2-F8
aattcccgggtcgacgggcactgagagagcttccgaagaaggctggccaacagttagtaatattatctcaggtcctaatggatgatattaatgttggttatgaaaggctggctgaactccaggtaaagaaggtgaatggtgttgaggttgagaatttgaagcatttgtgcagtatcgtggagaactgcactgaagaaaacttgagaattgatttggacgatgagcgggagatcgtcctgaaatttcagaacgcgaggcttgccacgtctcggatcctcaagcggcacaggattccatcagccatgtcgagtgaccttgtcgatgaacaagcgagcaaaggtgagactgaggcgtcatgcacaaactgacacattttcgtaggcgtagctacacagtttctgtggaagcaccgatgttaactcggt

SEQ ID NO: 4839 - DNA, 451 bp, Triticum aestivum
  Clone ID: LIB104-002-Q1-E2-G1
ggtacgcctgccagtagcggtccgaaattcacgggtcgacgggaaggtcactcagaatatggccctcaagctaaggaacaccgacactggcgagctcatcatgcacctggagtgggttaacctccccccaggcatgtcgcggtgatttgatttgatttgcagagggaggccagctattgtctgccttttgtgatcgtaatgttgcttcctctatatatgagctatgaaaataattaagcgatgcctatctcattctttacataacacccaccgtaatgatttgtggatctcaccaggatggtgcgtatataatatgagcaacgtcgtggtgagatccgcagatcatcacagtgggtgctacgtaaggcatgtgatagacttatgctgctgggggtaatgcttgctttcagttttggttctgcatatgttgtatggctattttaatacaaaa

SEQ ID NO: 4840 - DNA, 343 bp, Triticum aestivum
  Clone ID: LIB104-002-Q1-E2-G10
taccggtcctagattcccgggtcgacgggaagcacctacgtaggcaggcactgaagtggcactcagccttcattccaggtgaggataaggagtgtcttgtcccatctaatcagagtctcctgccacacctcaaccttaagaagaaccgttcatatagcatctgtggcaacgtcgaattgctggccttcacgaatcaatggtcgatttatagtttgctgccactgtagatctacgtcatatacgtaccttacctcattaatgtgagtgtcacgttctgatacgtgtccccgtttgtgcttccagatcctgttatggttcgcattgcccactgaggctcggtaag

SEQ ID NO: 4841 - DNA, 458 bp, Triticum aestivum
  unsure at all n locations
  Clone ID: LIB104-002-Q1-E2-G3
ggtacgcctgccngtagcggtccgaaattcacgggtcgacgggttcattgtgctggacgaagatcggcgcttcagcattaagctcgaggagaccttcgatgttcatacggtacgcaaccgacgataatagtttttttcgtaattactcatgacttcaactattttaatcatgacaatatttttcatcttttccaattcgactagcttatcccatgctttgcaagacgctatgtcttggagaggatgggttttgaagaccatgaaagtttcgaaaccaaaaaaattatcctaagtacccatcatggtgtggattttcaaataaagttgtacaatgctcagagtgtaacccattttggttgcaaaaattgggaagcactttgcaagatgtatggttttgatgagggtatgcttgttaccatggatcttggtgatcctacaatcgagcaagagagacctac

SEQ ID NO: 4842 - DNA, 448 bp, Triticum aestivum
  Clone ID: LIB104-002-Q1-E2-G5
gtacaggtcctaaattcccgggtcgacgggctatttgaaactgctcgacgggagcttaatcttccttctgctaatgaattgattagttctcagtcaaacaatgaggcaaatggaaatctggaaagcacacaggaagtgcaggtgaacccaacgagcttatctcaatacagggacatccagagaaagattgttgagtttatcagaaagagataccatattctggaaaaatgcttggacattgaatatgccgtgataaaaacaaatactcctgttcctgatgatcttactgaacaaaatgttcctatgggacatagcccagctgttccagatatcagtgaagtgttgagagaacttccccctcttgtaccaatttctgccaaagaagtggcttctgatggctcaactgaccaggcacacctttcccatctttacaacaagatgtgcggtg

SEQ ID NO: 4843 - DNA, 434 bp, Triticum aestivum
  Clone ID: LIB104-002-Q1-E2-G6
attcccgggtcgacggtggtgtgataccatcgtcgtcatgaagttatcctcggtggtgtgatgccgtccccaagatgagtcgctgtgacgccggcggcaagacatacatgaccaggtgcgttgccggtgcaagtggagatccatgccgcggtgacaggcgctgtgacggcgtcatccacagcgagatgccctgtgtggtcttggtgctgcgaaggcaaagttcatggcaagaggtctgcatgtgatctgcatcaagattagaggagttgacatgacaagattacggacgtgaatgttacgattaatcttgtctagccgagctgagagagtcagttagtttgttagctgcgtgagggtcgtgtgcctagagtgattctaggaggaagaagtggtcaagataagattagatgggtgcatgtaaagtggcgttagtg

SEQ ID NO: 4844 - DNA, 452 bp, Triticum aestivum
  Clone ID: LIB104-002-Q1-E2-G7
gtacaggtcctaaattcccgggtcgacggggtcccaaacaagttggggtaggctatctcaagacatagaaagccaagaagaaatttgtattttgggttttagatttgcaaattgtggtatagctatcgctacctagaatcgatagaacctctgtttttttcaataaagcccagaaagccatacttacactcattctccagcaaataactccactggtaagctattccttcgctagactcctttgaagcatcggaagtaaacacaagcaacctgtggttctttgcaaccatatctgtgacggtgggccactcctgcccactcgttggcatttctgagatagggtaccaatacttcatcaagtcagcagcagtaaacaatttgctcaatctcatcggggcatgtacgtaatcctcgatgaatattgtaacaatctccgtgggattctcggataa

SEQ ID NO: 4845 - DNA, 387 bp, Triticum aestivum
  Clone ID: LIB104-002-Q1-E2-G9
tacggtcctaaattcccgggtcgacggggaccaagcaggcaggcaggcgcaccaggctagcgttgcctgatcagcagctgcacatatagtcagtcgagtcgagtcgaatcgaggcagtatagtttagctggagcttgagagggtcagatcatggagctcgtcgggagttggaggaaggtgatgccttacatggccatggtcttcctgcagttcggctacgccgggctcttcctcctctccgtcgcgtcgctgcgccagggcatgagccactacgtcctcgtcgtctaccggaacgccatcgccgccgctgccatggctcccttcgcgctatggtttgagaggaaaacaaggcgcaaaatgaccctctccctgttctacaagatcgtt

SEQ ID NO: 4846 - DNA, 441 bp, Triticum aestivum
  Clone ID: LIB104-002-Q1-E2-H1
acgcctgtcggtaccggtccgaaattcacgggtccacgggtagggatttatccggaattgttgtttgttcttccggtctcatttaaacttgcctagttaggtagtttcattatgcttcaccccttgccatgtttaacaacatttaatattgatcagtagcaataccgagagagaactaactaattgttgtggtgtttcgtcaatatgcaacttgttacatattgagctccacttaactttagtgttgtttgtgcactttgccatgccatgcctcattacactggacatgcatcatacttgattgtgcatcatgacatgattatgcttgtgtgtttaccatgttgtttgcttctttccggtttgcttctctcgttagcttcggtttcattccggatttgtgaggattcgttcgactacgttcgtttgacctcttcagggact

SEQ ID NO: 4847 - DNA, 430 bp, Triticum aestivum
  unsure at all n locations
  Clone ID: LIB104-002-Q1-E2-H11
acgcctgcaggtaccggtcctacnattccgggtcgacgggatgatccaggaggccgacctcgacggcgacggcctcgtcaacttcgacgagttcgtcaggatgatgatgctctccgacgccgaccagcagcagcagcagcagcattgagagtttgtccgagactaggaaatatagtccgtccgtccgtcgtcgatttcttcggtggacggacggacacctctctaatccgcccggggattaagttagctaagctagccatgcatgtgtggatgaatggatcttgaattcttgattgattagttacaactgttattggaaaagctagagattagataactaactagagaaaagaaaaaactaactgaacgtggtgattctgttccgtcggcgccagcggtgcatataattaaataattttcaccagtgact

SEQ ID NO: 4848 - DNA, 428 bp, Triticum aestivum
  Clone ID: LIB104-002-Q1-E2-H3
taccggtcctaaattcacgggtccacgggcaccgtcgaactggaggagctgacgtctttcttgacggtaccaccgcggtatctacatggggctggggcgtccaaggagttgcctctccacgttcgcatcgacaagatcacctcctgatctcttccactactcttaatcttccagtgggcatatgcctaagaagtgatgtattttggttacttggttgtactcccttggtcgcaaaattcttgtcttaatttttttaaataaggatgtattaagtcatattttagtattagatacatcctatctagactaatataagacaagaattttgagatggagggagtgcgtaatacatgtcttgtggcaggtattttggttgtagtactttgagatcagacgaggtacttcgctagttccgacagtggaagggt

SEQ ID NO: 4849 - DNA, 428 bp, Triticum aestivum
  Clone ID: LIB104-002-Q1-E2-H5
ttcccgggtcgacgggttttttttacggcacggagtgctatgtccggatcactggtgatagtgataattctgttgtgcccgggcattttgagcttcatataccgtaatggggtacggcttggaagcatgtgaatgtgtctcaccccagcaaaccatgataccctctgttgagtgatgacacatggaagagaaactcttcggacctatagttctccggcgtgctgaataccacgtcgagtttgatttttcccgagcatctggcttcccgactagggataatactgtgaaaggttgtgttactttggtcaatgcgactcatgtccatttgcattctattgagtgtgtcctcatagatgaggttcagtccgctatgctaccgccgtccttgagaactttagtgagccaaaacccgtctttgggtttaggac

SEQ ID NO: 4850 - DNA, 448 bp, Triticum aestivum
  Clone ID: LIB104-002-Q1-E2-H7
gcctgccggtacaggtcctaaattcccgggtcgacgggggggttcaacgcggtgccgtacgtggtggcgctcttcagctgcatgctgtggatcttctacgcgctggtcaagaccaactccagcccgctgctcaccatcaacgccttcggctgcgtcgtcgagggcttctacatcctgctctacgtggtgtacgcgcccagggccgccaggcaccgcgccctcgccttcttcctcctcctcgacgtcgccgccttcgccctcattgtctccgtcaccgtgctcctcgtgccccagcccagccgcgtcaaggtcctcggcagcgtctgcctcgccttctccatggccgtcttcgtcgccccgctcagcgtcatcttcgtggtgatcaagaccaagagcgccgagtacatgcccttctcgctctccttcttcctcaccctcagcgccgtcg

SEQ ID NO: 4851 - DNA, 446 bp, Triticum aestivum
  Clone ID: LIB104-003-Q1-E1-A10
ggtaccagtccagaattcccgggtcgacggggccacgggacgacggagatgtgggccgccgcgacgtgggcaagatggagcacgggtgcgagcattaccggcggagatgcaagatcgtagcgccgtgctgcaaggaggtgttcccctgccgccattgccacaacgacgccacggctttgggtgatcggcataatatatgtcgccaggatgttgaaaaagtagtgtgtgtactctgtgatactgaacaaccggtgtcacaagtgtgtgtaagatgtggagtcaatatgggagaatacttctgtgatgtatgcaagttttatgatgatgacacagagaaagggcagtaccattgccatgattgcggcatatgcagggttggtggcaaggaaaactacttccactgtgcaaagtgtgggtcatgttatgctgttgcgttgcgtgataac

SEQ ID NO: 4852 - DNA, 423 bp, Triticum aestivum
  unsure at all n locations
  Clone ID: LIB104-003-Q1-E1-A2
gggtcgacggggatggacaccttctactcgacctcgtcggcggcggcgagcggatggggctacgactcgctcaagaacttccgcgagatctcccccgccgcgcagtcccacctcaagctcgtttacctgaccctatgctttgccctggcctcatctgccgtgggtgcttacctgcacattgccctgaacatcggtgggatgctgacaatgcttgcgtgtatcggaaccattgcctggatgttctctgtgccagtctatgaggagaggaagaggtttgggctgctgatgggtgcagccctcctggaaggggcttcggttggacctctgattgagcttgccatagactttgacccaagcatcctcgtgacagggttttgttgganccgcatcgcctttgggtgcttctctggcgccgcatcatcg

SEQ ID NO: 4853 - DNA, 348 bp, Triticum aestivum
  Clone ID: LIB104-003-Q1-E1-A6
gggtcgacgggctgccagaaacgcctgggcggaggaaaataggcgcggaacacgcgaggatggatgctgtataaaccatgagttggagaaaaaaaatgattcttcagtttgagaaccggcgccgagagagagagggagagccgagaagaggaaggccgggatatttattatattaattaaagaaaaaaagggcaagttagttagttggtgccacagaatgcaatgcatgctcccttcatcatcatcatcatcatcatcataatgtgatcagagctgagacctgatcgatggcaaatattagtacttagatcagtactcctgcttaaaaaataaaaagtgcaatataaa

SEQ ID NO: 4854 - DNA, 395 bp, Triticum aestivum
  Clone ID: LIB104-003-Q1-E1-A8
attcgcgggtcgacggggaggaccatgatgagctgtagatggtttaaaaggggaaccaatttttgtaatgggttagtaggggggaggagacatggataattggtgctctacttactttgtgttgtggtcgggggtggtcgggtttgttcgcggagactgctgttattagtctgttggccgagttgtagagaactctctttgctgctgctgctgttacttccttctgatgttttttcgttttgttattatatagccggatgaagaaaagatgatgcagttttatctaaaaaaaaaaatcaaaaaaaaaaaaaaacaaaaaaaaacaaaaaaaaaaaaaaaaataaaaaaaaaaaagcggccgctctaaaggatccaagcttacttacgcgtgcatg

SEQ ID NO: 4855 - DNA, 446 bp, Triticum aestivum
  Clone ID: LIB104-003-Q1-E1-B10
gtaccagtccagaattcccgggtcgacggggacgccattgaccaggccatccagtggctggacggcaaccagcttgctgaggcagatgagtttgacgacaagatgaaggagctggagggcctctgcaaccccataatcgccaagatgtaccagggtgccggagctaacatggcgggtggcatggacgaggacgatgcacctccggctgctggcggcgctggccccaagatcgaggaggtcgactaagcgagcacttgtaccagtcttaccctaaagttattccgttcgttatgttggatgctactgcagtacgtggtgttggatgtgatgtgtgtgaactgcgtttgctgctgcttttctgttaatgttagttgcatctggtgatatgctgcaaaaaaaaaaaaaaaaaaaaaaaaaaaaaagcggccgctctagaggatccaagc

SEQ ID NO: 4856 - DNA, 429 bp, Triticum aestivum
  Clone ID: LIB104-003-Q1-E1-B12
attcccgggtcgacgggaggccatccagcggctcgaggcgatggggttcaaccgtgagcttgtgttggaggtcttctttgcatgcaacagggatgaagaactggctgccaactatcttttggatcatggccacgagtttgaggaacaacaatagatgttagattggtgttaccgtcgaaagacagaagagtcagtgacataagcagtacagtttggtgtcgttcttatatcttgctgctgaatatcactactagtacttgtcattagtgcgatgctgctgactttaaatttcttgtatcctggaaattctttctaagtacatatcaatatcaatattcaaaccttaaaaaaaaaaaaaaaaaaaaaaaaaaaaaaaaaaaaaaaaaaaaaaaaaaaaaaaaagcggccgctctacaggatccaagctta

SEQ ID NO: 4857 - DNA, 378 bp, Triticum aestivum
  Clone ID: LIB104-003-Q1-E1-B6
ggtaccgatccagaattcgcgggtcgacgggaggcgacagtggaacttttggcgatcgtggtggctttgtccctgctcggtcgccgcatttgacgtgcagtacatcatcgacgagtgatgtcaccgttgatctgtatgaataatttgtgtcaaataaaaggggggaagtgactagtgaagtaaaacgacctgtaacttgttaccctattcttttgcaaatgttcatgctaatcatgccataaacacgaactgttcgcttcaaaaaaaaaaaaaaaaaaaaaaaaaaaaaaaaaaaaaaaaaaaaaaaaaaaaaaaaaaaaaaaaaaaaaaaaaaaaaaaaaaaaaaaaaaccaaatcaaacaaatcaaaactaaaaat

SEQ ID NO: 4858 - DNA, 309 bp, Triticum aestivum
  Clone ID: LIB104-003-Q1-E1-B7
aattcgcgggtcgacgggggaggagggcagggagctcctgaagaagtacacggtgctcatgaagaagaggatggggatcgagagacgcctggtggagaagatcgggcgtgcgtagatatactataggacatttcatatggcactggggccatatgagcatagggattatataggaaatataataaagtcattgtatcaactgttgacgctagctggtgtcgtgcgcgtcagccgtgaagaatgtgccgcggtcctgtgaacgaataatttgtgatgcattcgttatgaaaaactgtcacatgtttctac

SEQ ID NO: 4859 - DNA, 393 bp, Triticum aestivum
  Clone ID: LIB104-003-Q1-E1-B8
gacggaagtaaccaactggacagcacatcattgttcacattatccctgtttcttctttttcttctttctttttctgttctttttatttatatttttcgttttttattttttgttaaattcatggacatcttagtagggaataccaaaggaaaaaaaaaactccgtgaacaatttttccaaaaggaaaaaaaggcccaattttttaaaaaaaattttaacggtttaagaattaatttcaatggttttaaaaggaatttaaaaattttccaaaggaaaagttcccggaattttgaaaaaatttgtaaaattgaaaaaatttcttggatttgaaaaaattcaacggtttcaaaaaaattcaacaatttcggtaaaaattttcacgcattagttaaa

SEQ ID NO: 4860 - DNA, 445 bp, Triticum aestivum
  unsure at all n locations
  Clone ID: LIB104-003-Q1-E1-C10
ggtaccagtccagaattcccgggtcgacgggacgacggatggtggtggcgccagagggatgcacggggtaaagctcatccgagctgtcacatcggtggagtaccatccgtgtacgggtgtgccaaagatcgacactagcggcgaaggcggcgggacgacgggtggtggtggcgccagagggatgcacggggtaaagctcatccgagctgtcacatcggtggagtaccatccgtgtacgggcgtccttcacagaaaagccgatatcgtcaaattcaacagtgataggattctcacgagcaaggcggcgaacagaaactagattagtgactaagtcaggagacacaagaacattagatatgttaacgggagtagaagtagaagggaatgacgtttgaccgacatgtgtaatgggtangaaggaaccgttaccaacggtgatgcgagt

SEQ ID NO: 4861 - DNA, 417 bp, Triticum aestivum
  Clone ID: LIB104-003-Q1-E1-C11
gacgggatcattccggggatgtccgtcgaatgatgtggaatggggaactgatgggtttggctaatctcagtattaattattactgagtagtatcatcgtactgcagggtgcgcgcgcgtgtggattacttactttagttaatttattattactggattgtactgcgtggcgttagttaaattattaccttcaggtgtgtgcctcgatctctcttaatcagtagtagtccgcgttggtgcggtgacaataataaaacacgacctactacttgtgcatgttgtgatgcatgcatgtgtactggtcattcatgctgtaaaaaaaaaaaaaaaaaaaaaaaaaaataacaaaaaaaaaaattaaaaaaaaaacaaaaaaaaaaaaaaaaagcggccgctctaaaggatccaagcttactta

SEQ ID NO: 4862 - DNA, 384 bp, Triticum aestivum
  Clone ID: LIB104-003-Q1-E1-C2
gggtcgacggggcctctccgcgccggcgccggcatgcccaccacgttaggcccggtgctcgccgaccttccttcatccgagccggacccagatgacgcctttccttcatccgagccggatccagatgacgcccttccttcatccgagccggatccagatgatgcggtgcgtgcgtcgtcagaggcgcccgaacatgaggcgatggggccacgtccaccgttttcggagatccacgctgctcctccggcgtccgcgtgacaagaatacctcggcgtacggccgtgacagttagcattggccgaccaatcgatatgtaagcgcgattcacaagtgcggaaggattagcgcatcgaccaaaaagccgcgtgctaatgggtgtacacg

SEQ ID NO: 4863 - DNA, 380 bp, Triticum aestivum
  Clone ID: LIB104-003-Q1-E1-C4
gccgtcggactccctaaagagagtcgtattagggctgatggcagggaatcgtgctcccaagagggtgaataactatgctcggatcgttggccgcatctgggcgcagatcccattcatgtgcggaagcagcatgcacatcaacaatcgactactcactggtcaccatccatacgacggcagtggggctcagcatgttcgcgtcggggacgtgcataacgcggaagtcgctgttcgtcgcgtgcggctacacgatcgcgtctgtgtctatggtgctcacgttcctgataggcctcgtggtgatgctgctcgcgtcgctcgccatctgcatgcacggtaccctgctgcacattgctgttgtacatgccgtactagccctatct

SEQ ID NO: 4864 - DNA, 460 bp, Triticum aestivum
  Clone ID: LIB104-003-Q1-E1-C6
gtaccgatcaagaattcgcgggtcgacggcgccgtcgatgacgcacatcgcgttgatggcagggaagaaggttctcaagattccgaatacctatgccagcttccttggcctcatctgggccctgatcgcattcaagtgcggaatcaagatgccaaaaataatcgacgactcactgttcaccatccagacgacggcggtggggctcagcatgttcgcgtcggggacgttcatagcgcggcagtcgcggttcgtcccgtgcggctacgcgatcgcgtcggtgtcgatggtgctcaagttcctggtaggcccggtggtgatgctgctcgcgtcgctcgccatcggcatgcacggcaccctgctgcacattgctgttgtacaggcggcactacccctagctgtgacttcatttgtgtacgctgaagaatacaaggtcatgcagacatcatgagcacaggggtaa

SEQ ID NO: 4865 - DNA, 437 bp, Triticum aestivum
  unsure at all n locations
  Clone ID: LIB104-003-Q1-E1-C7
aattcccgggtcgacgggaactttgggagccggagacactggtcgaacatataaagtttgatcatggttatacctcgaagagtccagcaattgtcaatctacttgagatcatgacggaatttactccggagcaacaacatgcattctgccagtttgtgactggtgctcctcggcttccacctggtggcttagcctccctaatcctaagctgactatagttaggaagcactcttcgactgcggcgaatacttcaaatgcagctggagcagcagagtctgcagatgatgatctgcctagtgtcatgacttgtgccaactatcttaaacttccgccatactcgacaaaggaggttatgcacaagaagctgctttatgctatcaacgaaggccaagggtcgtttgatcnttcatagtgggttcaaaactaacatacatgca

SEQ ID NO: 4866 - DNA, 444 bp, Triticum aestivum
  unsure at all n locations
  Clone ID: LIB104-003-Q1-E1-D1
ggtccagaatacncgggtcgacggggccatggaggccgccgtgaagccgatgaggagggaagacaaaggttgttgccaggagggaattatgctgctgctgctgctgctgctgctgggagatgctgccagtggctttgttggcgtctagaagcttctaggtgaggcggcaccgccttctagggtcatggctgccgtgccgcgctgcgccgcccgtcggaattcatttcagtcgctccatcaaatccgttccgttcctatgggtgacattttctattttctgcgttcgtttgtagtagtagtagtgataataatatgatgatggtcctcctccctgcggtgcaagagagtggagagccctagccaggcaggctcctcttcttcttctgtgtaaaaggcttgaacttgaagttggtactactanataaatanaacccagctcctctc

SEQ ID NO: 4867 - DNA, 427 bp, Triticum aestivum
  Clone ID: LIB104-003-Q1-E1-D10
aattcccgggtcgacggggacgaccggatctgcctcgccacctttgtttctgccttgcctagcagcaccgcgcatatgccccacctccccagccagcgcagccgcccctccgtgtcgagtcctgtgctggccacgcccgccgtctgcccagcaccgctctcccgttgccttaaacaatccagctccaccactaatccatgcccctgccctccgactcaagaggatcagctgctagcatagcggtgtgcagggggaggccttgagcagacaggtgactgcgtcgctggggcggatatgaggcacatctgcaggcagcggactgtaggcaagaggcacatggcagtgtggcgagatggtcggtggcttgctgctgttgcgagtgggctacctagaagatggacacgaagaatatggtgccagaaatggc

SEQ ID NO: 4868 - DNA, 427 bp, Triticum aestivum
  unsure at all n locations
  Clone ID: LIB104-003-Q1-E1-D2
cggtccagaaatcncgggtcgacgggtatcagcacctccggcaagttctgcagggccacaagaggccgatggtgatggcaacgtgatcagccagccagcagcttgctggatcctcctctctctggatgcctaaagtcagtatgtcaatgtaatgtaaacatccctttccccttcccctttcttcatgtaacttcggtctactccttaagagtcttggtaaagcttgtgctctgtagttgcttcagctactggtaccgtctattgtgtgtgatgtaatatattttggaccattatgccattcctttttcaatcaatctgcccgttgttgccgtgagtctgaagatgattgctgtgtttgttccttcaaatcctgatgaactttaattgctacaaaaaaaaaaaaaanaaaaaaaaaaaaagcggccgc

SEQ ID NO: 4869 - DNA, 413 bp, Triticum aestivum
  unsure at all n locations
  Clone ID: LIB104-003-Q1-E1-D9
gtaccagtctacaattcccgggtcgacggggagaatcaacacaacggactgcatctgcccagacgatttttgcaacggccacgacgaagtgcatctctcaattccaggatcagcatgctggatgaatcctccttgcctgttaagttgcaatggtgcaaccaaacaccatggaggcttttgtattanggacggtgaatctgcatcgatagtgatggatggaaattgctcgccctccttcctccataaaccatggggaccttgtatagttgtattagcctccccatctatccgtcaggaagccctgactttccctgctattgctgtcgaaaacgctacccttgcagaacatgaaccgaacttaagtatcgcacatggagcttcaggtaacaaatctgaaagaaccaaaattaatg

SEQ ID NO: 4870 - DNA, 457 bp, Triticum aestivum
  Clone ID: LIB104-003-Q1-E1-E12
ggtaccagtccagaattcccgggccgacggggagcacaagaaggcggaggagcacaagaagaaggacggggagcacaagaaggacggcgagcacaaggagggcatgatggagaagatcaaggacaagatcagcggcgacggccacggcgacggcaagaaggacggcgaccacaaggagaagaaggacaagaagaagaagaaggacaagaagcacggcgagggccacaaggacgacgacggccacggcagcagcagcgacagcgacagcgactgagccagctccggccgcgctccggcagcagcgtgcagtgtaggcgagatcgatgaacgcttgggagaagtgtggcatacatatatgttgcaaggtttggagcgtgtggtagcatatgtatgtaatgcgtgacatgtctcatggatcttgtgatgtataataattagccggctgcactgcactgca

SEQ ID NO: 4871 - DNA, 433 bp, Triticum aestivum
  Clone ID: LIB104-003-Q1-E1-E5
aattcgcgggtcgacgggggggcgtaaaacgatagcgcttattgggaggcaacccaattttatttttagtttttttgcttctgtttaggaatcaataatccatctagcctctgtttagatgtggttttatcttttaattagtgtttttgccaagttaaacctattagatcttcttgggagatagtcatttgatcttgctgtaatttccagaatctttgcgctcagtgcccgaattgttaaaaatcaccagaatgtgataaatagtgattccaattgctgctgatcaataaagaaattttccaggtcgtctaattttggtagaattgtttgggttccagaagttggtgttagttacagattactacaaactgttctgtttttgatagattctgttttgcgtgtgttgtttgcttaatttgatgaatctatgact

SEQ ID NO: 4872 - DNA, 437 bp, Triticum aestivum
  Clone ID: LIB104-003-Q1-E1-E6
aattcgcgggtcgacctaccattgactgaaatgaacgattactgccagaaacttaatcatagataacctgacatgatctggtctgatccgattggcttattcagagaaaccactttcaccgacctgtgcatgcatgtgaggatcgtcggaggagtgtgcagagacctagccgtgtgtatacacgtctgcataccctcaggtgcaccggcagtacagcgatgcttctcgaccgaccatgtcgtgcttgtcatcagcccagctggtgtgcattgttccttgcttgtacgacagcattggggaaacagaatctgatgcgtttggcatgggtggttcagttgagcgctgaaacaagatcaggacggagcagtggatcgcgcatgagcctgcttgtgatagccttttgttcacagccagctgtcccatgaaccgggaagggc

SEQ ID NO: 4873 - DNA, 413 bp, Triticum aestivum
  Clone ID: LIB104-003-Q1-E1-E7
attcgcgggtcgacgggaagaccaacatcctgtacaagctcaagctcggcgagatcgtcaccaccatccccaccatcgggttcaacgtggagacagtagagtataagaacatcagcttcactgtttgggatgttggtggccatgacaagataaggcctttgtggaggcactacttccagaacactcagggccttatctttgttgttgacagcaacgacagacaccgtattgctgaggcaagagatgatctccacaggatgctgaatgaggatgagctgcgcaatgctgtattgcttgtttttgctaacaagcaagatcttcccaatgccatgaatgctgctgaaataacagattagcttggtctacactctctgcgtcagcgacactggtatatccagagtgcttgcgccaca

SEQ ID NO: 4874 - DNA, 462 bp, Triticum aestivum
  unsure at all n locations
  Clone ID: LIB104-003-Q1-E1-F1
ggtccagaatacncgggtcgacgggtccgcaataaggctcttcagcttgcatcttcgacacggacatcttatctccgtctcgttcttttgaagcatctcggccttcgcggaccttaaaaacctattcacgatgccttcggtcatcgtgcggaccatggtcgcctgcggggtagagcaaaacgatattttagaaccaaacaaaaatttggcatgaccttccctaaaaataggaccaaaaagaatgcttaatgccaaaattctcgccgaaacggaaatgaatcaacattccggcaaaatattggcaactatcgcatatcaaataccggtacacctccaaacacaaacacatatgcaacaccacaaacatatgcaacaccacanacatacatagatctagctaggccgtaaaaagtgcatgtgcacattgttgtaaggagaacaacctaaatatagctttccccc

SEQ ID NO: 4875 - DNA, 438 bp, Triticum aestivum
  unsure at all n locations
  Clone ID: LIB104-003-Q1-E1-F11
gtaccagtccagaattcccgggtcgactcggcggaggacgcctgcttgaccagatgggccatgtttgggactaggctccgtcgggctggtactgggaggcgctacctactgggggcgcatcttggtgaggagttagcctgtcattgacccgaaccttctttggtggcggttgcttgggccagtgacggtccagaggcttgagcaccccgcggaggtggtacgtcaccatgtcagcgaggaggacgtgcacgtccgtcgctacttggttacgttggagcataggttctccaatacctgngaggtttctcanggatctcactggagctatgatcctgtgatggttccttctctttgggtgtcaaacgcccttcgctanggttttagttgtattagtgatgttatatgtatgatactattcgggatgtattagtgataata

SEQ ID NO: 4876 - DNA, 301 bp, Triticum aestivum
  Clone ID: LIB104-003-Q1-E1-F12
attcccgggtcgacctctacagtcaacgtgcaacgcatgatgggtgctatcgacaccgcaggtgaccgcttcatcaacttcagccaattcagtctccttctgcaactccagcccggcgctcataaatgacgtcgacatcgtcctctgagtcacttcatttcacctcagcagtccgatccatgagccgtctccatcaacttccggcttcatacatcaatttcatgcaactatctattccggtcacgatccagcctcaacttcacctggcgccaggcctaaatttgtttgatcaatttttttg

SEQ ID NO: 4877 - DNA, 465 bp, Triticum aestivum
  Clone ID: LIB104-003-Q1-E1-F2
ggtccagaatatccgggtcgacggggtagccatgggcgacagccagtactccttctccctcaccaccttcagcccatcggggaagctggtgcagattgaacatgcactcacagcggtcggatcaggccaaacctcccttggcatcaaagctgccaatggtgtagttatcgccaccgagaagaaactgccttctattttagtggacgaaacatctgtgcaaaagattcagtcgttaactccaaatattggagttgtctacagtgggatgggtccagattttcgtgttcttgtcagaaaaagtcggaagcaggcacagcagtattatcggttgtacaaggaaaccatccctgtttaccagcttgtccgagagactgctgctgttatgcaggagttcactcaatcctggtggcgtaggacaatttggtgtatcactgttgattgctggttatgatgacaatgacccgc

SEQ ID NO: 4878 - DNA, 430 bp, Triticum aestivum
  Clone ID: LIB104-003-Q1-E1-F5
gtaccgagtcaagaattcccgggccgacggggagaattaaaatagtagctgctattaataatccgtggtacgatgaagaaaaaaataaaaaagaaaaatggatgatcaacgatcttagcacaaggaataaaaaatgatgatcaacgaccttagcggcattgaataaaagagaagagagaaaaaaaagacttacttcactggttagctagaccaatgaacgctttttttcctcggcagacctgataggccaagcttagctaggataagctggctcatttctgcgtcgtgggagtcgcctcagcaaactcgatcgaccagcgaccaactagcatggctggtccgcgaatgcctcctaagccgatacagagctcagtaacgggctaattaagctggccagattgcttgcacgggagcgatgtgggactacaca

SEQ ID NO: 4879 - DNA, 417 bp, Triticum aestivum
  Clone ID: LIB104-003-Q1-E1-F6
aattcgcgggtcgacgggcatgccaagttgttttgggctttgctacaagtttgttttttttggtgttttctgagtcaaaaagggcgataaatggtcttgataggcgagggaggctccatctgagagcacgttgtttctcgatatccttgaagtggcccaattttttttccatggccttgtctgaccaattcaaggtaccatgccaagttgttttgatgttcaatgaattttgcattttctcgagttttctcagtcaaaaaggttgataaatggctggacatgtcacaacttgcgtatggtgacaaaaattgttcaaacctgacatggatgcctaccattggcatgcccacccacttgcataagttggggtcatttcaaggatgtacaatcatagaccatactgaatggatggtgttc

SEQ ID NO: 4880 - DNA, 471 bp, Triticum aestivum
  Clone ID: LIB104-003-Q1-E1-F8
agtacggtcaagaattcccgggtcgacgggtacatcaagaccctcgcccaggtcgtcggaagtgaagacgaagcaaggatgaagatctactctgtgtcaactaggcattattttgcttttggtgccctagtatctgaggaactctcctacaaactcaaagagttgcctaaagtccgttgggttcttcctgattcatacctggatgtcagaaataaggactatggaggagaaccatttatagatggacaagctgttccttacgaccccaaataccatgaggagtgggtgagaaacaatgcccgtgccaatgaaagatcccggcgcaatgacaggcctcgcaactttgacaggtcgaggaactttgaaaggagaagggagaacacacaggcctaccagagtgggcctccaaaccaaatgccaccccaagatgctggctctccaattcgcggtgcacagggcccgccgccgcct

SEQ ID NO: 4881 - DNA, 397 bp, Triticum aestivum
  Clone ID: LIB104-003-Q1-E1-F9
gtaccagtccagaattcccgggtcgacgggatcgaagacgaaggagtagtgtagttagctcagctgtgttcatctgcctctgttgcagaactgaattcctgctcgtatggttggactgatggatcaggggtgtagtaatccttgtttttcgaatctatagaggttggattacctgattgttcttggcaaacaacatttatccgccttcttcagtcaaaaatacgtcgggaacaggtaaaaacaggcaaaataaaaaaaaaaaaaaaaaaaaaaaaaaaaaaaaaaaaaaaaaaaaaaaaaagaaaaaaaaaaaaataaaaaaaaaaaaaaaaaaaaaaaaaaaacaaaaacaaaaaacaaaaaaaaaaaaaaaaaaaaaaaaaaaaactcctctaaa

SEQ ID NO: 4882 - DNA, 459 bp, Triticum aestivum
  unsure at all n locations
  Clone ID: LIB104-003-Q1-E1-G1
ggtccagaatacncgggtcgacgggtatccccctaggagcatgcgcgtagtacttgatttttgatgacttctaaatttttgcaataagtatatgagttcttttgactaatgttgagtccatggattatacgcactctcacctttccgcctttgctagcctcttcggtaccgtgcattgccctttctcaccttgagagttggtgcaaacttcaccggtgcatccaaaccccgtgatacgatacgctctatcacacatgaacctccttatatcttcctcaaaacagccaccatacctacctattatggcatttccatagccattccgagatatattgccatgcaacttccatcatcatcatcacgacatacattacttttgtcatattgccattgcatgatcatgtagttgacatttgtatttgtggtaangggcacacgcatttatttttcatacatgtc

SEQ ID NO: 4883 - DNA, 442 bp, Triticum aestivum
  Clone ID: LIB104-003-Q1-E1-G10
tacaagtctagaattcccgggtcgacggggaggaagagcccgaggaggagctaggaactgaatatctggtgcagccgcttggccgtgctgaagacgaagagcattccagtgacttcgagccagaagaaaatggtgatggtgctgaggacgaggagattgaggatgacgatgctgaggatggtgaggatcctgtcaaggcgcaatcctcatcaaagaggaagaggtctggtggggaggatgaagatgatgacgacggtgatgatgatggtgatgatgatgagaagcctccatcaaagcgatagtcaatttgttcgtgctgatctgtgatcttctctgcttgggccaagaaggaaaataatcctcatggagaggattgttggtaaatgctgtagctttaggacatctgtggtaggtgtagcagctcaaacttgagtctacccat

SEQ ID NO: 4884 - DNA, 154 bp, Triticum aestivum
  Clone ID: LIB104-003-Q1-E1-G2
gggtcgacgggctagctttcggcttcacctagtctgaggtacacatccggatgacccggcagtaacaatcgcagaggtgctccctttatgccctagccgaactaatgggaacgtagggcataagcacaggagccatgcaaccaactttggcaaa

SEQ ID NO: 4885 - DNA, 451 bp, Triticum aestivum
  Clone ID: LIB104-003-Q1-E1-G5
ggtaccgagtccagaattcccgggtcgacgggcgtaccaaggagatgcagagccgtgccacggtcctcctttggcacgccggctccaccatcgcctatgtcgttgacgacctctcgtcatcttcgacggggagctatagcctgctgtggagcggcaggatgcagctggtcggcacgtgcaacggcctgctatgcctctgcgacgacggcggcagcatcaccctggtcaacgcagcaacaagggagacgctgcctgtcccacggcggccgccatgcgccggccaactattcggcgaggacaggaggtggcacagggagtacaacttcgcgtaccatccgacaacggggcgctacaaggtggtgcacgtcccctgcagcttcaaccgggtccgcgacgcggtacacgtgctcacgctaggggaggaggcgtggcgagaggtgccagcccccgg

SEQ ID NO: 4886 - DNA, 421 bp, Triticum aestivum
  unsure at all n locations
  Clone ID: LIB104-003-Q1-E1-G6
aattcncgggtcgacggggaatgcggttacattgctgctaatctttatgccaagagtgtgttcggagaagatgctttggtgaacatcagcattgagaagcaagtcgatggcaagcttagtggtcacatcagaataaggagcaagacacaaggaatcgcgcttagcttgggagataagattaccctcaagcagaagggaggcagttaattctgatgttgcctgctcacaaacaccggattgtatgacatgttttcttcaagagatccacttgccagtgtcatactagaggcacaatgggattgattgaattaattacaggaagcttttgtgtacaaaatatcaaagagaagaatgataaaagaagaggatcgtagggaagttagtcttgggagctgaaaaacgatcttgacacttcctttcg

SEQ ID NO: 4887 - DNA, 445 bp, Triticum aestivum
  Clone ID: LIB104-003-Q1-E1-G9
gtaccagatccagaattcccgggtcgacgggagaacaggtgctggatcgaatcaagaatgatctcattgattggacgttggcaggcaagcataaggtggccctaatgatccacagacctagggaaccagattaatttttgtgctgttggtaggctagtaatggggttcagactgtaattcggtggctggatactagctttgtatcctgggtaacttgctagttgctatacccctgtaaaactcttttctaatttcaatgaaatgctgcatcatgcagtcttttcgtcaaaaaaaaaaacaaaataaaaaagaacaaaaaataaagaaaaaaaaaaaaaagacaaaattaaaatgaatacaccctaaaaaacaaataaatacaaaatcaaaaaactacaaaaaatgaccccaaactttaaattaaaaaaaaactgcggccccccca

SEQ ID NO: 4888 - DNA, 418 bp, Triticum aestivum
  Clone ID: LIB104-003-Q1-E1-H10
aattcccgggtcgacgggtatgatgagaaattatctggtgtttgttaacccggcctggctttggacaataagtcgccagtatctatttggattgcgcccttggaatcatgcgcttataaatcattgggtatattgttcaaatctttaatagccaacatggctggatttttattatggttatcaataaccagtattatgattaaggttttcaaagtcgctttaacgcaatggatatcgtattatcaatggatatgatttattctacagttgaaggaatagtcccaagttgctgcaggcttacgacccggcacttgggggctacattatttcaagttgagattacatcaaatatgcaagtctcatgtcactgcaagcatgcaccatgacacttgggggctaatgcaaagtcattttttgc

SEQ ID NO: 4889 - DNA, 377 bp, Triticum aestivum
  unsure at all n locations
  Clone ID: LIB104-003-Q1-E1-H11
gtaccagtccagaattcccgggtcgacgggtcagatgagattgtccgggtggaaagcccgcttgacatgaaaatagtagacctggtgattttgggcaaactagtgaattgagatagctgtgcaggcgagatcagttaacctggtaagcgtcctagcccgcataattagacaaaataggtgttttttggtcaacttagcaaaattagatctctgacangtcagatagattgttcttaatcccacttgtcangtattatgtgaactattggaccacgttgtagatattcgtaaatgctgtccggagatatactcgtccactcgggaaaaaaaannaaaaaaaaaaaaaaaaaaaaaaaaaaaaaaaaaagaacaaaaag

SEQ ID NO: 4890 - DNA, 397 bp, Triticum aestivum
  Clone ID: LIB104-003-Q1-E1-H2
gggtcgacgggtgatctgttcaagagcccgtctgttgttgctgctgacctcaggcaagaaatggtggactacgttacacaaagaagtgaaacgttcatagctgatactctcattgaatcggaggtggaacaaaacgctgagaatcaaatgccagatgacccttatgaggtcatatcaatcttcatggatgatttcagtcgcacgaagaggaacatcattggccatgtctctgggtggttgttgagcgacagccgcgaagataagatcgatgattttgtccaggaaatggatatgacccgcttctggccactagaaaggagagaagggatcgccgaggtcctcctcaagaatgtggacattaaaactaagtttcactgccctgagaaatatgaaaacg

SEQ ID NO: 4891 - DNA, 430 bp, Triticum aestivum
  unsure at all n locations
  Clone ID: LIB104-003-Q1-E1-H3
gggtcgacggggtgaacgtggtcaccgaagtttgggctgttaaggataaaatcaagcaatttccctgaaaacttcaaaaattggtcaatggtttggggcaccgggaaaacctttgcaaatggtggcccaatttggaattgggggaacctcccttggcctccggtttgtgcaaacggtccccaaaactgaccaaaaagcacaaaatgtgccaaaaggcgacaactgagattttcttgcaatgttgatccagttgatggtgcacggggcatccaagatttagaccctgcaactactcttgttgtggttgtctcaaagaacttcacgacagctgaaacaatgttgaatgctcgaactatcaaagagtggattgtctctgctcttggacctcaggctgtntccaaacacatgattgctgtcagtactaatctta

SEQ ID NO: 4892 - DNA, 440 bp, Triticum aestivum
  Clone ID: LIB104-003-Q1-E1-H7
gtaccgatccagaattcgcgggtcgacgggttgcacccacgcatgatagtcctattatctttttgaattctcccaactacactatatcggagaagtttgcacttattaaggattatattgatgggcttccttttaccgttgtacatgatgattctgatagatataatatgcatgtgcttgctgctcctacttacaattattatgagagaggaactatacctccacctctctatgtttccaatacgataaaattgcaagaaactgtttatactatgcattagcctttactacgtgtgcatgaattgttcttttatgacatgccgatgcataggaagagagttagactttgtcattgctttatatatgtctctttgtgctcactactaaattacaaatcattgttaattaaaattggctttgatataccttgggattccggt

SEQ ID NO: 4893 - DNA, 466 bp, Triticum aestivum
  unsure at all n locations
  Clone ID: LIB104-003-Q1-E1-H8
attcncgggtcgacggggttcatgtgattaggcatgatgcaaagaagcctgctggggcagccaaggaaatagagagttattttgactgctcagcttcagatcttgtgctggttggtgatagatactttactgatgttatctatggaaataggaatggttttcttactgtatttacagaaccattgagttttgtcggtgaatcttacattgtcagaaaggttagaaaactggaagcgtacattatcaattattggtacaagaaagggcacagaccactcaagcaccctttgctccctgatgcaagaacgattgtgaagtttgatccgtgtgaaggcccagtctcacctagagcatagcacagtcatgtactccctccgttcggaattacttgtcacagaaatgggtgtaaccaaaatgtatttaagttatagatacatcaatttccgagacaagtaattccgaacgg

SEQ ID NO: 4894 - DNA, 432 bp, Triticum aestivum
  Clone ID: LIB104-003-Q1-E1-H9
gtaccgagtccagaattcccgggtcgacatcatgcgtaagcacgggatgcacgccaccgtcagttcgattcacgtcaacggctggttcggcaagcacgacaagctgagcgccagcgtgtcgctcgcgcgccgcgcattcggtctcgacctgcatgccgagcgcgaacgctgggtgttcgtgggagactccgccaacgatgcggcaatgttcgagttcttcccgctctcggtgggtgtggccaatgtgctggacgtgatcgatacgctgcccgtgccccccgcgtacctcaccgaggccgaaggcggcggcggttttgccgaagtcgccgagcgcatcctggaagcgcgttccctagccctccccgcgccgcgcgactgacacggcattcctgcaccgcaacacgcgctggagacccagcgtcgcttgccgca

SEQ ID NO: 4895 - DNA, 367 bp, Triticum aestivum
  unsure at all n locations
  Clone ID: LIB104-004-Q1-E1-A2
cggtccagaattcncgggtcgacggggaccactaagaacagcaactacacacatacagacacagcggagctctatttgattcaatcttaggtacgcctgcatgataggttcatcctctacgatactgacagctaaattcaattcagtggtcgtcgtttgagaaatttgtgactggaagatccctgtggttatgcaaattgggccccttgcagcaaatctgcctttcaccatctaggataatagccaagaggacagcatgtataggtcttcccaccagttgcacagccagaatgagtaatgggattcaccatgtagcggcacatttagcacggctcgtgttctagttaaccgcatcgtgactgcaaca

SEQ ID NO: 4896 - DNA, 437 bp, Triticum aestivum
  unsure at all n locations
  Clone ID: LIB104-004-Q1-E1-A4
gaccgggatcgaaattccatcttacaacatgaggaaacacgctctcgccctcttcctcttgctcctcacctttgcctcccatggggcatggtgcgcagcagcagcgcgaagcgccatggctgaggatgcggctcgtcatcatctgaggcctcatcaccatggcaagaggctcctggagatacagactcccaggaaggtcgggcacgcgacaggcggatccgganggggcagcagcggagcctgcatgagcggtggcggcggcacggacacaaggccacacaacagcaagaatggcggcgccatggcgctgccagctccagcgacctccctcctggcgctggttctcaccgctaccattcttctctcggcgcacagcttctgaagcactccctccgttcctttctacaaggcgttttggacagctgacattgaactgt

SEQ ID NO: 4897 - DNA, 441 bp, Triticum aestivum
  Clone ID: LIB104-004-Q1-E1-A6
aattcccgggtcgacggggaggttgagaagctgattggcaggatagtgaagtggctgaagcccggtgggcatattttcatcagggagtcctgcttccaccagtctggggattccaagaggaaagtgaacccgacgcactaccgggagccaaggttttacaccaaggtgtttaaggaatgccactcctatgaccaagatgggaattcctttgagctttctctggtaacttccaagtgcattggagcttatgtgaagagcaagaagaaccagaaccagatatgttggctatgggagaaggtcaagtgcacagaagacaaaggctttcagagattcctggacaatgtgcagtacaaatccactggaatcctgcgttatgagcgcgtgtttggggagggttatgtcagcaccggtggatttcgagacacaaaagaatttgtggac

SEQ ID NO: 4898 - DNA, 452 bp, Triticum aestivum
  Clone ID: LIB104-004-Q1-E1-B5
aattcccgggtcgacggggtaaacttttgctatatgatagacctgattgctagatttctacaagctgttggaaagtaagaggtttgagccaagctattctcagaataaagcttaagaccgaccttgttgttggttggtattgtaataagaagaaaataaagaggcatgaaaagatgttatctaccacatatggtgaacttggatgcagtttaccacatcttttcggtcttgaagatcaatgcatcaatatagatgtcatgtatttatcattataatcatgttgttccgggaatattggttcttgtatttagtcattgatggcaacagattgaaactattactcaaaagtacaagcatatatcatgtcgtcgccaaatgtcatgcgtatacccattttggctgtgccgtaaagtttcctttgttacattcacggatgaaataaagtttgtttt

SEQ ID NO: 4899 - DNA, 426 bp, Triticum aestivum
  unsure at all n locations
  Clone ID: LIB104-004-Q1-E1-B6
gtaccgatctagaattcccgggtcgacgggctatgcgcttttctatcaattgctcgacagtaatttgttcacccaccgtaatactaatgctatcttgagagaagccactagtgaaacctatggcccccgggtctatctcttatcatatttgctttctatctacttttatttgcatctttactttttgcatctatattataaaataccaaaaatatatctatcttatcatactatctttattagatctcactttcgctagtggccgtgaagggattgacaacccctttattgcgttggttgcgatttctcagtttgtttgtgtangtgcgtgggacttttgaggagcctcctactggattgataccttggttctcaaaaactgagggaaatacttacgctactattgctgcatcaccctctcctctt

SEQ ID NO: 4900 - DNA, 435 bp, Triticum aestivum
  unsure at all n locations
  Clone ID: LIB104-004-Q1-E1-B7
gtaccagtcaagaattcncgggccgacgggtccttggacgccaccccttgctcctatataagtagatccatctagtagctttttcctggggatttgtttagttaaaagttagccattgcaacttcgtgtacttcgtttgtgtccaacgaccagaccaagaccgcttacggatccccacctttatcaatacttcatatatactcgcaatattcggattgcttttatcatattcttgcttgttcttcgattgcttgcaggaatagaccttcgtggtcaggttgattgtgctccggcgtggtcaataacctctcggggttggtttagcgattgctaaggcacaacgtcgtgcacgtttgtagtcggatcgtcaaagtcatctccaccaaatcgatagttatcatcccatcgaaagatcgggacacctcgcctctatca

SEQ ID NO: 4901 - DNA, 456 bp, Triticum aestivum
  Clone ID: LIB104-004-Q1-E1-B8
taccagtccagaattcgcgggtcgacggggttgatcataagtttttgcttcttcacatgatgtttgccattcttagaatgccattttattttgctttgcttgctgtttgaataaaataccaagatctgaaattattaaatgttagagattcttcgcatagttgcataattattcgactactcattgatcttcacttatatctttcggagtagtttgtcatttgctctagtacttcacttatatcttttagagcatggtggtagttttattttgaataaatagatgaactctcatgcttcacttatattattttgagagtcttaaatagcatggtaaattgcttaaaatcctaagatgttaggtatacaagattagtaaaaaacttcctatgagtggtttcaatactaagagaagtctgatgcatgatgattgttttgagacatggaggtaataata

SEQ ID NO: 4902 - DNA, 415 bp, Triticum aestivum
  Clone ID: LIB104-004-Q1-E1-C5
gtaccagtcaagaattcccgggtcgacctccgcggacgaggtgcagcgcatgatggcagagatcgacaccgacggtgacggcttcatcgacttcagcgagttcatctccttctgcaacgccaacccggggctcatgaaggacgtcgccaaggtcttctgaatcagttcatttcacctcagccgtccgttccaggagccgatccatctacgtacggcttcgtatatcaatttcatgcaactacctactccggtcccgatccagcctcagcttcacctgaggccggccctaaatttgtttgatcaattcttttgctactagtagtaactagtgatgatcactgttgcatcatttatttatttattttatatatcatcacaagtttcctgtgattcttttctttctatacctttttgt

SEQ ID NO: 4903 - DNA, 462 bp, Triticum aestivum
  Clone ID: LIB104-004-Q1-E1-C6
taccagtcaagaatgcccgggtcgacggggcagcaaacagatgcgctacccacgattagcagacaggttcatatgcatgctccaacttgatcaaggaggagagctacacatgttttatgttattttacctaagatagagcagcagcagtgattagctagctagaaatgagtttgaggatgatgatgtgctacgctattactatgatgataaaatagcgagtgttggtagtaatgactatgatgattattattagctagtgttagtggtgattaaataaatattgttgatggtaatggctatgatgatgattaaatagcttgtgctggcgcattagattcaagtggaggtaacatgtggtgcacattgaaagtactactagtccaaactgatcacgtttggattagtagtatacttttgacatgcaccacatattgcctccacttgaacctaatccaccttca

SEQ ID NO: 4904 - DNA, 385 bp, Triticum aestivum
  Clone ID: LIB104-004-Q1-E1-C7
gtaccgagtcagaattcccgggtcgacgggaacggcttcatgcaagtctgatcgattcgaagcaggttgagttcagttcagctagaggaagacgaaggcgtttcgatcagtccgatctcctgctccttttacatgatgattactattatcttaatcttagtgcatgtgtatgtaatatgcaccatgaattggtagtgcagtgcagtgcagcacagcacatctctgaacctgggaaggtactactagctttcttttcactcagacaagtcgggagggggtttcttgtcagttagtcggtttctggcttgtcagttactgtggtgcgtgtcgtgtggatcgagttagttgtactaccagaaattcgggatgacagggaaccatgcat

SEQ ID NO: 4905 - DNA, 219 bp, Triticum aestivum
  Clone ID: LIB104-004-Q1-E1-C8
gtaccagtcaagaattcccgggtcgacggggaacgccaggagtttctgagtcgagccaaggatggatgcttgagccaagtgtggttgtgtgtaattatggtccttatgtcgacgtgttaattgtcgtgatttgccgattggtactctatatgtttgccaaataagctgtgcaccgtgtgcacctttggaacagtgaagtagtaattattttgtgagctt

SEQ ID NO: 4906 - DNA, 398 bp, Triticum aestivum
  Clone ID: LIB104-004-Q1-E1-D10
gggtcgaccgggagatcactgcacggtgatccccagggaaaacttggcgctgggcaaggaggaggtggtggccttctgccggaagaacctggcggcgttcaaggtgcccaagaaggtgtacatcgccgccgacctgcccaagacggccaccggcaagatccagcgccgcatcgtcgcgcagcacttcttcgtcgtgcccgccgccgccgccaaggcctataagagctcgtcggtccgtcgatcgatcacgtcgccgtcttttgtcccttttttttacgtgccagacagaacaggggattgataatgaaattgcgcgccacatgacattggagagcggtaaaagttgtggttgatttgattgatgaagattaaaaaaagacaaccaacaaaaaacaaaa

SEQ ID NO: 4907 - DNA, 329 bp, Triticum aestivum
  Clone ID: LIB104-004-Q1-E1-D5
gtaccagtcaagaattcccgggtcgacggggaagacgaggacgaagaataagactaggaagaagaagacgacgaatatgactaggatgacgatgatgaagaatactatgactaagaagaagaagtagattatgaagaggaggaatatgaagaataagattgagattaagaagatgaatattaataattattcgaagattatgaagaagaataagaagaagaagatgatgatgaagtagatcgaatatcaagacgactgataataataataatgagaagatcgtgacttcgaagatgaagacgaagattaggattgataagaagacgaac

SEQ ID NO: 4908 - DNA, 394 bp, Triticum aestivum
  Clone ID: LIB104-004-Q1-E1-D7
gtaccagtccagaattcccgggtcgacggggacctgaagaagttcaggaagatggcgctcggcaccagcagcttccagagcagccagctaacaccgtccagcggcgagcacgagcaggagcaccagaacccgtccgtcccgagcagcgacggccatcagcagacgcaggaggtggagttggggactagtacgaagcgagacgacggcgacgtcgagagccaggcttccatgagatgaccactttccctttccttggagagagttaacctcaggacatcatttgtaaatccacagcatagctgaattcacataagctgccagctgacttggttgcaacgaacaaaaatgatattttgttcttgagatatatatatatagttcttttgttagacac

SEQ ID NO: 4909 - DNA, 371 bp, Triticum aestivum
  unsure at all n locations
  Clone ID: LIB104-004-Q1-E1-E1
gggtcgaccgggcatcccagttgagggtccctacaagcctgcggcgtaccggtactatggtgtttgtccagcatgactagcggctggcctgagcctgagcggcggcactctgccacggcgacctatgaacctgttttcctttgcattgtctatctagatctaggcatgtgttcacttaggccgaggatttgtcatggttatgtttttagatcggtgagggtgtggtggacggaggtggcgtttgcttttgcccagaaataatggtgttattattttggatttaaatgaggaggtgtgatttgacggatatagtgttgcctttttgattctacatgtctgatgctccctacgccacaatttactanggatgc

SEQ ID NO: 4910 - DNA, 398 bp, Triticum aestivum
  Clone ID: LIB104-004-Q1-E1-E5
ggtaccagtcaagaattcccgggtcgacgggtggagcgagaagctgaagcggagctccgccggcgagcagaagtgggggctgttcatcgcgaccaagtgatctggccgctgagcagcgacgccatggacgcgatgattcgggagcagagcagcttctgttaagaaataaataaagaggatcggtgctcgacaatgttgtggccgtgtgttgggtgtgattgtttgtttgttgcagtggctgcattcactggctgggcaccaggatctataagataatgtgtacgtacgtacgtactgtattcctgaacttgtactgtgacgagcgagactcgctttgtaacgtgctattctgttgccaaaaaaaaaaaaaaaaaaaaaaaaaaaaaagcggccgctct

SEQ ID NO: 4911 - DNA, 406 bp, Triticum aestivum
  Clone ID: LIB104-004-Q1-E1-E6
aattcccgggtcgacgggaagggggttgacaacaaggggtggctgcgtggcaacgcaaagctaccaaagcaggttcctgctactgaggagcagaagtggctcattgagcccacgggaaaagagtaagtggttcattattttgcttgtcacatgcttattccggttgttatttattttgcttgtcacatgctaatagttcattcttttgcagaaactggatatattctaaaggggtccgtattcccaacggcctcatcaccgtcttgctgaagttatattggccggggttgtactgtccggattcagtcaggcagctggactgtcgggttttggccacgagctgggaacactgggaagcggcccgccacgcagaacatgagaaccatgccaaggccgtgatcactac

SEQ ID NO: 4912 - DNA, 471 bp, Triticum aestivum
  unsure at all n locations
  Clone ID: LIB104-004-Q1-E1-F2
ggtccagaattcncgggtcgacgggcgcggggtaaaaatggatctgggagccctgccatcctatttatagacagggtaaatacccaagcatcacggtcaaaccctaggtggcgtagtaactttttgctaagaaggcgcctcggttctctctttgacgtgatttggcctagattgggagtaccaaaagagaacgggcaaaaataaaagataagtatgaaagaagtattcatgaccagtgaaatggccgagaggtggaataagagacatcttagctcgaagcatgggccaaagctgactcttgctggtgagacccgtattttggtccttgatacttttaactgactctcattttcagggaaagcttagcaggaataaatccaatctaacttgagggataatgttggggatactccccacgggcgagacatanagatctatatattggaagcctatgtttggacatcagaatgg

SEQ ID NO: 4913 - DNA, 447 bp, Triticum aestivum
  Clone ID: LIB104-004-Q1-E1-F3
cgggtcgaccgggagatatgaggatggtgatattagagtcatgctagtggagtaattatgaatttgaggaatacttgtgtggaagtttgtgattcccgtagcatgcacgtatggtgaaccgctttgtgatgaagttggagcataatttatttattgattgtcttccttatgagtggcggtcggggacgagcgatggtcttttcctaccaatctatccccctatgagcatgcgcgtagtactttgttttcaatggcttgtagatttttgcaataagtatatgacttctttatgactactgttgagtcgctggagtatacgcacgctcacccttccaccattgctagcctctcttgtgccgcgcaactttcgccgggtacatacacccaccatataccttcctcaaaacagccaccgtacctacctattagggcatttccatagccatt

SEQ ID NO: 4914 - DNA, 295 bp, Triticum aestivum
  Clone ID: LIB104-004-Q1-E1-F5
taccgagtccagaattccgggtcgacggatgagtataagcggggatcatatgtgtactttgattttcatctcgcagatgacggcaatgggtggtgccaaaggatcaagaacgacttcacatttgagtacaacttccttgaggatgaactgtcagtacagccatactaaggcaccattgcggatcaccgtgttcgatcaaatacgactcgtgtaattttcacaatggaactgctggtatccggaaccaattcgaactccacaattgtaagttgtaaccttgttggctaatttacat

SEQ ID NO: 4915 - DNA, 464 bp, Triticum aestivum
  unsure at all n locations
  Clone ID: LIB104-004-Q1-E1-F7
gtaccagtccagaattcccgggtcgacgggaatgtggagaggctcaagctgcaaggagcatgcggggtgtgcccgagctcggtgatgaccatgaggatgggcattcagcggcgtttgatggatgaaataccagagattgctgcagttgaagctatcacggacaaggacgctgggcttaagctgaacgaagagaatgttgagaaggtactcgatgagatcaggccatacctcaccggtgcaggaggcggtaatctcaggtttgtcgcgatcaacaaattcttcgtgaaagtccaactcaagggccctgcagcaagtgtggcggccgtccgagttgctatagcacagaagctcaaagagaagatcccatccatcgcagctgtccggctactgccgtaaacttcaactgcanaacattgctgtgaatatctggttatccaggagaatgctatgaatgcgctaactga

SEQ ID NO: 4916 - DNA, 461 bp, Triticum aestivum
  Clone ID: LIB104-004-Q1-E1-F8
tctagaattcccgggtcgacgggggggttcagcgcggtgccgtacgtggtggcgctcttcagctgcatgctgtggatcttctacgcgctggtcaagaccaactccagcccgctgctcaccatcaacgccttcggctgcgtcgtcgagggcttctacatcctgctctacgtggtgtacgcgcccagggccgccaggcaccgcgccctcgccttcttcctcctcctcgacgtcgccgccttcgccctcattgtctccgtcaccgtgctcctcgtgccccagcccagccgcgtcaaggtcctcggcagcgtctgcctcgccttctccatggccgtcttcgtcgccccgctcagcgtcatcttcgtggtgattaagaccaagagcgccgagtacatgcccttctcgctctccttcgtcctcaccctcagcgccgtcgcctggttcttctacggcctcttcaccaa

SEQ ID NO: 4917 - DNA, 469 bp, Triticum aestivum
  unsure at all n locations
  Clone ID: LIB104-004-Q1-E1-G1
gtaccggtccagaattcccgggtcgacaacatggaggcgagtcaccggcgagttgtgtcatcggtggcgagcatggaggcgagtcaccggcgagttgcggcaccggtggcaaacatgcggcagcgagcgtgccacggcggtgcgctcgtggtgaaggcgcgggaggtgtggctctcatcgaggccaacgacgacgacggcagtcggcgtgacaagatggcatttgcggccgtctgcgtgttgcatcgatgacgtgaacaatcattggcttcaagagagaaataagttaacaagattagggaggtgaatgttagaactaatcttgttattagtgcgtacgattagatatgtttatatcatgcttgtagttgagctgcggctgtgtgcacacgtcaggttgtgttcagtgcacaaggcanagctaattatgcatggtagttagatgcatgcgttaaagctccgcgagtccg

SEQ ID NO: 4918 - DNA, 437 bp, Triticum aestivum
  Clone ID: LIB104-004-Q1-E1-G5
gtaccggatcagaattcccgggtcgacgggctagaggcaataataaagatattatttatttccttatatcatgataaatgtttattattcatgctagaattgtattaaccggaaacataatacctgtgtgaatacatagacaaactaaacgtcactagtatgcctctacttgactagctcgttaatcaaagatggttatgtttcctaaccatagacatgtgttgtcatttgattaacgggatcacatcattaggagaatgatgtgattgacatgacccattccattagcttagcacccgatcgtttagtatgttgctattgctttcttcatgacttatacatgttttttttgactgtgaactgtggggaaaacccccacagcatatcaaaactttattattaaagccagacaacagttacaacaacatgattacaag

SEQ ID NO: 4919 - DNA, 419 bp, Triticum aestivum
  Clone ID: LIB104-004-Q1-E1-G6
gtaccagtcaagaattcccgggtcgacgggcaatggaagatgtaggtgtgatatgtcaagtagtggacagataagccaaccactggatgtggttttgagggatttttgcagtggggtttgtagggtgctatgccgcgctgggtttgggatttgaaataaaacgaagggagatgtgccacgctcttaaaaaaaaaaaaaaaaaaaaaaaaaaaaaaaaaaaaaaaaaaaaaaaaaaaaaaaaaataaaaaaaaaaaaaaaaaaaaaaaaaaaaaaatttaaaaaaaaaaaaaaaaaaaaaaaaaaaaaagggggccccccaaaaggttcaaacttaattaccccttcaagcaaatttaaaacccctcaaaaggggcccccaaattcaattcaagggccctccttttaaaaacttctaaac

SEQ ID NO: 4920 - DNA, 457 bp, Triticum aestivum
  unsure at all n locations
  Clone ID: LIB104-004-Q1-E1-G7
gtaccagtccagaattcncgggtcgacggggaagaagaagatcaaaagagagatcaaaatactacagaatctctgtggaggtccaaatattgtgaagctgcttgatattgtcagggatcagcattcaaaaacaccaagcttgatctttgaatacatcaataacacagatttcaaagtgctatatccgacattgacagattatgacattcgctactatatctatgagttactgaaggctttggattactgccattcacaaggcattatgcaccgagatgtgaagcctcacaatgttatgatagatcatgagcttcgaaaactccggttaatagactggggccttgctgaattctaccatcctggaaaggagtataacgttcgtgttgcatcaaggtacttcaagggacctgagcttcttgttgactttcaagattacgactactctttggacatgtgg

SEQ ID NO: 4921 - DNA, 450 bp, Triticum aestivum
  unsure at all n locations
  Clone ID: LIB104-004-Q1-E1-H3
ccgggtcgacgggaagatggacgccttctactcgacctcgtcggcggcggcaaccggctggggctacaactccctcaagaacttccgcgagatctcccccgccgtgcagtcccacctcaagctcgtttacctgaccctatgctttgccctggcctcatctgccgtgggtgcttacctgcacattgccctgaacatcggtgggatgctgacaatgctcgcgtgtgttggaaccatcgcctggatgttctctgtgccagtctatgaggagaggaagaggtttgggctgctgatgggtgcagccctcctggaaggggcttcggttggacctctgattgagcttgccatagacttttgaccaagtatcctcgtgacagggtttgtcggaaccngcatcgccttcgggtgcttctctggcgccgccatcatcgctaagcgcagggagtacctgta

SEQ ID NO: 4922 - DNA, 467 bp, Triticum aestivum
  Clone ID: LIB104-004-Q1-E1-H5
gtaccgagtcaggaattccgggtcgacgggtggactactcgtagctacccgaaccgcaactcaaagaattctgacaagacatccatcttccttgatacggacgctccaccactagggaacctggaggtaaagagaataataaagaaacagagctcgcatgaatgtattttttccttacttctacgtatatcctgtacgcatgaaggacaagcttgacgacgtgtcgccgttcgtgcctatgagccgcggtatggaacaactcctagacgaggtgatggaaaacatggaccaagatgagccgtccaccaaatccgcacctctggccaagtctagttcggtggcgatgcacacgcccccggcaatgagtgatccagctgcgaattcttcaactgtggcagggagcaatctcgtcgcaaaacccgcctccctggtgaccaagcccgctttctttaacacatcaacaggca

SEQ ID NO: 4923 - DNA, 455 bp, Triticum aestivum
  Clone ID: LIB104-004-Q1-E1-H6
ttcccgggtcgacgggcgggtaactttagcaaagaacaccacaataagtgaagcgagaaaatagatgacgacttaccaagtttgggggattgtacacggagaatccgtcccgcggtttgatatggaggaagtctttctcttctcctttgtacaggtcggatagtatccttgccagagcggtgggggagtccggacccttacggccacagcgcgtggcatcgtctgtcccgttgtagtgccacatgggattgctccgatattgaagtggttgcactccccgcattatgcatattgccatcacctcgactatcgtcagtcaggatttggccagtaattttatcctgctcatcaggaaatgtacttccttgcaatcctcctcttgggggcctcgggggtgccagcttagacgtgccctcggcggggtgttacagaacttggggagtcctatccggact

SEQ ID NO: 4924 - DNA, 465 bp, Triticum aestivum
  unsure at all n locations
  Clone ID: LIB104-004-Q1-E1-H7
ggtaccgagtcagaattcccgggtcgacgggtcatcataaggacatggtctatcaacctggcgaaaaggcttatcttcgcgttacaccaatgaagggtgctcaccgcttcgggatcaagggcaaactagctcctcgctatattggccctttcactattctggaaaggcgtggaaaagtggcttatcagctggagcttccgccgaacctttctcaggttcacgatgtgttccacgtgtcacaactccgacgctgcttcaaggacccaatccgagcagtggaccatgaagtgctcgaattgcaacaggacctctcctataaagagcatccggtccgcattctcgaccaagctgaacgccgcacacgtcagaaggcgatcaagttcctcaaagtccagtggtcgaatcactctgaagacgaagccacctgngaacgcgaggatcgtctacgagatgaatatcccgcac

SEQ ID NO: 4925 - DNA, 439 bp, Triticum aestivum
  unsure at all n locations
  Clone ID: LIB104-004-Q1-E1-H9
ggtcgagaatacccgggtcgacgggagttggaggagaggacgacanagatgatggaggaggaaaggccacggaatgacatgcaagcaagggccatgtacgagctccttatggtaagtttcttctgcagattagccaaaacattcatgtagtgtttgtctcattactaagtagtatgactgagtcgtcaaaaccaaatgtgcagtctgtgtgcgagaagacaggtcagaccgctccgccgatgccagtgattgttcctgggaccacggtgagttttatttgaatggaaattacttgctagtcttaacatttgagtgtcatcatgctaacaagacattggaaatgatccttggtgcagcgtaactccagacaagcatcgcacgagccttctccagcttacgacatgagccaccccgctcctacacctcctggatcttggta

SEQ ID NO: 4926 - DNA, 253 bp, Triticum aestivum
  Clone ID: LIB104-005-Q1-E1-A1
tccctatagtgagtcgtattaaatcgtgctttgggcgtgatgtcctgtgtggagcaccaccgcgccagaaaagcttaccgcactggacgctgctcgacggctgaactaagtttagcattgttgaagcatatctagtcctcatccgtgactagtgtgcaagcagactgtggcagtttggctccagttgtgaaagtcatttttgtttgtctgagacatcttggaaagaacagtgtaggaatgaagtatttctgtt

SEQ ID NO: 4927 - DNA, 228 bp, Triticum aestivum
  Clone ID: LIB104-005-Q1-E1-A12
ttccctaaagtgagtcgtagtattccttctaatttgcttttactttttactttgcatctctatactatcatatattatttatcatctcagtcagatctcactttcgtacgttaccgatattggattgacaacccctaagcacgttggttgcgttaatctactgaactttgtgtacgtacgagggactccagcgttgcctcctactgggttgttactttggctcacaga

SEQ ID NO: 4928 - DNA, 425 bp, Triticum aestivum
  Clone ID: LIB104-005-Q1-E1-A7
aattcccgggtcgacgggtagagaaattggaatacagtagtttaacaccaatataaataaagaatgagttcattacagtacattaaagtagtcttttgttttctttctctaacggagctcacgagatttctatcgagttttgtgttgtggagttttcaagttttgggtgaattcttttgatggattatggaacaaggagtggaaagagcctaagcttggggatgcccatgtcacccacaagataatccaaggacaccaaaaattcaaagcttggggatgccccggaaggcatcccctctttcgtctacttccatcggtaatttacttggagctatatttttattcaccacatgatatgtgttttgcttggagcgtcttgtattatttgtgtctttgcttgttaatttaccacaatcatcctttct

SEQ ID NO: 4929 - DNA, 420 bp, Triticum aestivum
  Clone ID: LIB104-005-Q1-E1-A9
gtaccggtccagaattcacgggtcgactggatcatgtcatgctaccacccggaatctggtgggttcggggggaacgtggggcacgacccgcatgtcctctacacgctcagcgccgtgcaggtcctctgcctcttcgatcggctcgatgttcatgatgcagacaaaattgctgactatattactggacttcaaaatgaggatggatcattttctggtgatatttggggtgaagttgatactaggttctcgtacatttccatatgcaccttgtcattactgcatcgtctgcacaaaattaatgtggaaaatgctgtacaatatattgttagctgtaagaacatggacggcggatttggagctatgccaggaggggagtctcacgctgggcagatattctgctgtgttggtgctctcgcaatc

SEQ ID NO: 4930 - DNA, 394 bp, Triticum aestivum
  Clone ID: LIB104-005-Q1-E1-B3
ggtctagaattaccgggtcgacgggatcatgtagctcatgggaagtgggaagaagcattagacattgatgcgacgctctacactggtcttgttgtatggtagtcagtgctaagtttcttaatgtcatttcatatatttatcctttccattttgagtcgctgaaactgctgagtgatgtgcagtttgctctgttggtcgctctgtcactttcacgtttcatattctttgttgtgtagttcctcatactgctctttcttcctgagtctcggaaagaataataaagagccatgtgtaattctattgcactgttctcccaaaattgtcattattttaagcagtaataatataaataactctgtaccaagtctcagtaatacctgaagttgatcgaatc

SEQ ID NO: 4931 - DNA, 252 bp, Triticum aestivum
  Clone ID: LIB104-005-Q1-E1-B5
aattcccgggtcgacggggaacaaacttggtctctgtgtgcttaggatggagtcccgcatttgctttgagaactgtaagcgtgtttaacctgacagcgcctgtaattgtaggccctttccgcatacttcacagcttgttgtcttatgaggtgctgcagggcagcaggctggtttatgccgcctcggtcattattatcatttgtaacttgttagagtgcacattaatctcaggaggacatagacataatactt

SEQ ID NO: 4932 - DNA, 398 bp, Triticum aestivum
  Clone ID: LIB104-005-Q1-E1-B8
attcccgggtcgacgggtagtaccattagctgagaaaactatggcggatcccttggtgtatcatcatcttgtactaccaccagccagcagtaataaagtggcgcctatgaagaataaaggttgtgccatctccaagaattgttatccttgtatcatgtttgctgctgcaatgcaatgcagatgtagtggtaacttgcctgcttctttttcatgctcccatccgtgcttcctcatacatggcctcttgaaagaaaataagccccggtcccattccctgaaaatcaggggatgattagattagaaaagaaaaagaaaaaagaacagccgtaagatgaagtgagagcacggatgcatacatggcttgatttgattggaagaaaataaagtccggcaacact

SEQ ID NO: 4933 - DNA, 427 bp, Triticum aestivum
  Clone ID: LIB104-005-Q1-E1-C1
gggtcgaccggtggcagcggcggagcgaaggtggaggtcgggatggaacaggtgaagagcgccttggagaagctcatggacggaggagccgaaggggaagataggattaggaaggttcaggagctgaaggcgaaagcgaaggctgctttggagaacggcgggtcgtcgtgcatgaatctggacaagctggtccaatccgtcgtctgaaaattagcgcagcatgtcggccctgaataaattctgctgctttcgctcattgatgaacagattggggttgtttcttgcttgcttggaagatcgagagtgaaaaacatatcctatgttgtaagttgcaactgtatctcatgccaactcagtctacaagtctcttgttaggcgctgcctgcttcgtaaaaaaagataacgaagctggcagctgctctaacac

SEQ ID NO: 4934 - DNA, 307 bp, Triticum aestivum
  Clone ID: LIB104-005-Q1-E1-C10
gggtcgacggcccaggggaagatgatgcttatggggacgaccgcgctgattacaggaaatctgaacccactacctacatcaatgctcccttggtaggggttcttgcctacttcgttggcaacccaaacccaggccatatcagacactgagcataagcactttgccatgtagatagagaagagtgacagaagctataaataggtacacaggaagcaaataggcttgtgattggatggcactacatgttcataggagtggattgcagagcatgtgttctaccaataatgagagcttatctttcatgatt

SEQ ID NO: 4935 - DNA, 417 bp, Triticum aestivum
  Clone ID: LIB104-005-Q1-E1-C2
ggtccagaattaccgggtcgacgggtgacatagtcaacggcgacggcggtagccgcgccactgctggtgctggtggtagcggcggcggtggtggtggctgcggtggtcgcgttccaccggaggccaaccgcagaactcgtgtcgccccttacccgcagccttcgcgaaggtgatggacgcgccggtgctcgtgacgtgcacgcaccgctgcgcttgtaggagagagatcagagcaagaagagagcaaccagcgtgaaaaaaaacattagcaaatcagaattgttgctcgatccccttgttggggtggttacaacttagtgtttagatcatcgttgatgacaattgacgccgtcgatctgtttaattgtgttcctttggctggttggtgcttcagtcgcagccaagaattggcgtgga

SEQ ID NO: 4936 - DNA, 448 bp, Triticum aestivum
  unsure at all n locations
  Clone ID: LIB104-005-Q1-E1-C6
gtaccagtctagaattcccgggtcgacggggagcacaagaaggacggcgagcacaagaaggacggggagcacaaggagggcatgatggagaagatcaaggacaagatcagcggcgacggccacggcgacggcaagaaggacggcgaccacaaggagaagaaggacaagaagaagaaggacaagaagcacggcgagggccacaaggacgacgacggccacggcagcagcagcagcgacagcgacagcgactgagccagctccggcccgcgctccggcagcgtgcaggcgagatcgatgatgaacacttgggagaagtgtgacagacatatatgttgcagggtttggagcgtgtggtagcatatgtatgtaatgcgtgacatgcctcatggatcntgtgatgtataataattagccggccgcactgcactgaacngtgccttgtaataat

SEQ ID NO: 4937 - DNA, 405 bp, Triticum aestivum
  Clone ID: LIB104-005-Q1-E1-C7
aattcccgggccgacggggcaggatatacatcgatgatgcaggatggggtcctgaggccgattcaattgagtatggttaccgggtcccctttggcagcgtacatgtcttcatcggcaagatcggtgagcctgggactgagccggacatctacaccgaccccgtcgagacggctcagcgtgcgagatttactcaggttaaaccggccatgaagtgtgccttcgttggagtcatctacggaggagagcgcgaggacgaatcagagcacgacaacgagaccgtcgtctattctggcgacgagtcctcgaccggagagaccgagtcgctataccggatgcaagacgatcaggttaggggttgttccgatggcgatagtattccggaccccccaggccagatcaaccggg

SEQ ID NO: 4938 - DNA, 438 bp, Triticum aestivum
  Clone ID: LIB104-005-Q1-E1-D10
cggtccagaattaccgggtcgacggggagcaggcgagcaaagcagagatggaggcgttcaggaagcaggcgagcaagttcaaggagcaggtcgccaagcagcagcaggctgtgataaaacaattcagcactactggttacgagcgttcagattctgttgtcattgatgaagttgaattacagcaacatcaaaggcttgagaaattgtacagttctactcgttctggaagggatttccaaaaggacatagttcgagcagctgaaggcttggtgtctattggaagcaagcatattgaagtgggaacaaaattttctgaggattgctatagatatggaggtgaaaataatgctgatggtgaagctcttacaaaagccgcatcactgtatggaggtgctttgagaaatgttgaaaaagagtatgaagatttcaatagaactt

SEQ ID NO: 4939 - DNA, 414 bp, Triticum aestivum
  Clone ID: LIB104-005-Q1-E1-D11
gggtcgacgggaaggcgagacataagggcgccccgctgaaggcgttgattcagagctcccccaactagaaacgaaaaatattttaaattagattgtttttttgagacaatctcgcgaaactttatttaaaccaaaccaatgttcagaggtacaaaagaaagatcaccagggtgtcctaatcaaacatggcggcccatccttaactttaaactatgcttcgctagattatgagccttgaaattcgaactcctaaactcataaacaaagctacatctactaaaagaagagttttgatctattatttcatgtaagatcccacatgctggcgtccaactgggctgacccattagcgtgaagttcacacgtagtgcacagtagctactcgggtcatgctgattggaaatatcactatag

SEQ ID NO: 4940 - DNA, 444 bp, Triticum aestivum
  unsure at all n locations
  Clone ID: LIB104-005-Q1-E1-D2
ggtccagaatatccgggtcgaccgggaagggtttctcatttaaatctatttatatctatttatatatcaagtatactccatatatagatatatggtatggaagcctatcccccatataagataagacggggggataaaaagaagggaaaatgaaaatagttaattaagttcagaatggtattccataaaggaaaggaattccaatcaaaacaaaaaatactgagtctcttaaacaagacattctaaaacttaggtaatttatagtcattaggattttagttctatatgaagtaaggactattcgataatttcttataaacataggttttcattggaattcactcaatcagttaattatggaacaagagagctgtttcatctttgttttaaagaaatataaaaatgaattatgaatagaaagtanaatgattcaacttttttttt

SEQ ID NO: 4941 - DNA, 422 bp, Triticum aestivum
  Clone ID: LIB104-005-Q1-E1-D5
aattcccgggccgacggggtagggtattacctccatcgagagggcccgaacctgggtaaaaacatcgtgtcccttgtctcctgttaccatccgcctagacgcacagttcgggacccctacccgagatccgccggttttcacaccgacaaagatctaaaacttattgatgtgtcccctattaaatctttgttttgcaatatgaatcttgatgaaactgaatatgatcttcctttacctagaaggcattctaagaattcggagtttctagatcttgatgatgaaattgatgaaagtgggattgaaaaacaataaaaacctagatgttgctaaacccactattttggatctcaaggaatttaattatgaaaattgctctttgattggttgtatttccttgttgcaatccgtgctagattctcctc

SEQ ID NO: 4942 - DNA, 455 bp, Triticum aestivum
  unsure at all n locations
  Clone ID: LIB104-005-Q1-E1-D6
gtaccagtccagaattcncgggtcgacggggcgactaaagggctggttctgctcgatgtaggcatctcgatgacgagggcgtggctgctgcgttcgttctgggtcaacaggtaagtgctctagcccatttagtgatccataggtatataggcttatcagaaatcccagggtgggccgcggcccaccctggccaccctgtagctccgcccctgacgggatacatgggtagggacttcatggaaggcggactccatttaatcctttctagctgcttactgaacaccaagccctatttgatatgttgaatgattgttatataggtgaaggaatcgacgaagaagcttccgttcagcatgctatgtcaatggaagaatatctgaagcagacctctgctacttctctattctctttcattcgtcgtgggcagccgaattggttgaaataattatgggcag

SEQ ID NO: 4943 - DNA, 312 bp, Triticum aestivum
  Clone ID: LIB104-005-Q1-E1-D7
aattcccgggtcgacgggagacagtatgtttgtcccaccgtgagaccacatagaaacagttgtgctagaactgatctagataacatagcatttggtctcaatcagagggagcagataaatgtgaaatatggggcttgacgcatcaatgcgatcaaaccctacgtagaatgacatgagactctcatagctcgtcatacaagctcaccacatcacagatcagaggacgtcattgaacgaactgacaactgtgatggaacgcgagttaccccatatgatcaccatgcataacttggctcattcaccacgtgacat

SEQ ID NO: 4944 - DNA, 429 bp, Triticum aestivum
  unsure at all n locations
  Clone ID: LIB104-005-Q1-E1-D8
gtaccagtcaagaattcccgggtcgacggggacaggaattagaaaatgagatgtggagctccatttttaatccgctgctttattttgttttcatgaaattaagaggcaactttatatttatcctggctaggttggtttattcagttgctaaaacgagaatgtacaacttagttatttttctagatggctagaaaatagtggtatcaataaatcttattaggaatttccatcatacttaatagacgtacaaacaatttgatttttttttttgtgaagtacacattgtttccaatgtttggattaccgcccgtanatggggggcctacccgttggtcttggagaaaaaacgagacatttcttaactactctttttgtagaactaattttgtgcaatctttcatttttaaacggaatgcattacacattttg

SEQ ID NO: 4945 - DNA, 446 bp, Triticum aestivum
  unsure at all n locations
  Clone ID: LIB104-005-Q1-E1-E10
ggtccagaattcacgggtcgacgggttaaacttggatgatgacggtgatgatgatgagtcggaggtagagcttgactctctcggttcattttttatacatctcattgacaatgattgttattaggaggaagccaaggccagccgtgcgggtgacgacgaggtaattgttctttcctccggctcagagtctgtgccaaaacagaaaactcgtcaggcaagccggaaagtaaggttttctcatcctttggcttatttggatcccaactttattttgaaaaagcagcaacatgaagcttgccgcacgacccggaatagggaaagcgggatcctttcctccggcttaccgaacaccccagcccctcacaaacgtcgtccagaggtctcaacaaactctgacttaacttatcccaaggccggtctnttacgacaacctcttaaccccttca

SEQ ID NO: 4946 - DNA, 421 bp, Triticum aestivum
  Clone ID: LIB104-005-Q1-E1-E11
ccggtccagaatttacgggtcgacggccaagctcacaccaaagaggttagcaagggcaaaccactagattggatttcaggacaaccagtcgcagatgagcatgaacgcctccagattataaagaatgatgacctcgaagagctccaagaactcggttctggaacttttggaactgtatatcatggtaaatggaggggctctgatgttgcaataaaaagaatcaatgacagatgttttgctgggaagccatctgagcaagaaaaaatgcggaatgacttctggaatgaagcatctaacctcgctgatctgcaccaccccaatgttgtggccttttacggcgttgttctagatgggcctgggggatccattgcaacggttacagaatatatggttaatggctcacttaggacggctttgctga

SEQ ID NO: 4947 - DNA, 427 bp, Triticum aestivum
  Clone ID: LIB104-005-Q1-E1-E5
attcccgggtcgacggggactcgcaggtgatcaatccccatcactcgccggcgattggtctggacgcgaccaatggcagaaaccgcatcgatagcaccaccaccacaaccaatggcaccaccgcaaccagtggaggacaacgcaacggcggcaccgtcacaaccaatggcaccacctcaaccattggcggaaaacgcaacggcagcaccaccgcaaccaatggcgcgaaagcgcatctgtcgttgtggtggtgccaccaccaccgccagacggcaccacgacattcctctgcctcatcctcgccttcttcatccctcccctcggcgttttcctcaagtacaaatgtgagattgaattctggatctgcctcatcctaacattcttggcctacgcgccgggcatcatctacgccgtctgggtgatcctg

SEQ ID NO: 4948 - DNA, 446 bp, Triticum aestivum
  Clone ID: LIB104-005-Q1-E1-E8
gtaccagtctagaattcccgggtcgacgggtcaggggaggatgatgcttatggggacgaccgcgctgattacaggaaacctgaacccactacctacatcaatgctcccttggtaggggttcttgcctacttcgttggcaacccaaacccaggccatatcagacactgagcataagcactttgccatgtagatagagaagagtgacagaagctataaataggtacacaggaagcaaataggtttgtgattggatggcactacatgttcataggagtggattgcagagcatgtgttctaccaataatgagagcttatctttcatgatttttcttttgtttgggtttgcactgaattttgttttgtgtgaaggtgtgcacagtgcagtttaactgcactggtgtagtcatgagtgaagaaagcttgcattttgcagaaatatttggtat

SEQ ID NO: 4949 - DNA, 428 bp, Triticum aestivum
  Clone ID: LIB104-005-Q1-E1-F5
ggtaccagtcaagaattcccgggtcgacggggaggacgatccggagacccaggaggcagagtgagctatgcgcgggcgaaggggttttggagaaatttccagaattttgcccgtgagtatatatagcccaaccctgtcggtgtgaccgagtggaacaactcggtggcaccgagattcataactgcaagcagttactgaaacttggtgtgaccgaaaggttcaaatcggttgcaccaagattgagaacctagatcgacttagtgatctcggtatgaccgaattggatgaatcggtcagaccgataagcacaaagaagttttggaagtttaagtctatgacgaatcggagactccgagtgctcctcacacagagtggttcgaatcttacttgatcaaattttgtgatgtagcatgaatagagtttgagac

SEQ ID NO: 4950 - DNA, 439 bp, Triticum aestivum
  Clone ID: LIB104-005-Q1-E1-F7
ggtaccagtcaagaattcccgggtcgacggggaagtgaacggcgccgcaggtggaagaagctctcagatggatctccaagaagcatgccaacgcatcgagcaacgtgatgcccctggggatatctttggtgctgtccttgaggccgctgcccaggcttatggcaacgacgagagcatcgaggtcatgcttgaagagcttgccagtgacccagagctcgctgatgagtacatgaagcttctgctggagcaggtcggcgagagggtggagtccgaatccgaggccaagacgcagtcgtgaagcgtggcccgggagtcggtccggtcggtcaagtgggcggtacatttcaggcgcggcgtggttgacaatgtggtgaaaacatatatacagaactcatgacttgtggatgtaattgtgtctcctgactgtggatggtattgt

SEQ ID NO: 4951 - DNA, 448 bp, Triticum aestivum
  Clone ID: LIB104-005-Q1-E1-F8
ggtactagtcaagaattcccgggtcgacggggaagtacactgcacatttcagaggccagtctcacttcttcgggtaagtatatattgttgcattttcacattttccaaattaacaaacatgctctcatgcttttgcttcataatttgcagatatgaaggaagatgcggcctccctaccaattttgattccagctattgctatgcattaggctatggtgctggtgctcttctccaatttggcaagacaggacttatttcgtcggtatgctcactatatttttctacttgatagatgtttggcattgcttaaccatcggagtcatatttactctgtttacctcctaacttctgaccagttctccatcatgcgaacattgtcatatgttctcttccagtttccacgccatattcattattggataaaacattaaatttcacaaaacaaaca

SEQ ID NO: 4952 - DNA, 440 bp, Triticum aestivum
  Clone ID: LIB104-005-Q1-E1-G5
attcccgggtcgacgggatggccaaatatactatgatatatcttttgagaatgggacccagggtgtattagatggatttatgattcagtttaacaagaacacatttggtcttgcagccggtggaccacttcaggttcctccactccaacctgggtcctcagccaggacgctcctagctatggttttctcccagaatgtctcccctgtagcaccaaacttgctactgcaggttgcagtgaagaataatcagcaacctgtgtggtatttcagtgacaaaggttcgctccatgtcttctttggtgaagatggcaaaatggagcgaacgggttttctcgaggcctggaaatctttacctgatgacaatgaattttcagaagaataccccaattctgtcatcagcagcatagatgccaccgttgaacaccttgcagcatcaaatg

SEQ ID NO: 4953 - DNA, 424 bp, Triticum aestivum
  Clone ID: LIB104-005-Q1-E1-G7
attcccgggtcgacgggatggtctatggcgactcttgctcgaactcgtgggagcttttgctttgatcggggtggaacatcttcttcatcttgtccttcttcttggccttcttcattgttgacgttgtcgttctcttgtcatggtggagaaggaggttgttgatgttcatcttggtgtacttcctcattttcttcgtcttggtgtgtcccacttgtggatgcttccgtattaactcttggttcaccttgtcgtgaggtagaagcttccacttggacagacgaggtactctccttcacctccgttggacgaaccttgccaatagacaagtcttggattgcttctgaagggtctttgtctcctacatcaattggcaattgctctatttgcgagccgttagattcgtcaaacttcacatctactgtct

SEQ ID NO: 4954 - DNA, 399 bp, Triticum aestivum
  unsure at all n locations
  Clone ID: LIB104-005-Q1-E1-H5
attcccgggccgacgggccgaatcagatatgggccataattgagcccaaagcctcttaaagggccggacctgatctgggccgtaatttggcccagaacatggtaggcttttaacgggtggatctcatatgggccactattaggcccggagcatggcaggccattaatggaccggatcaaatatgggtcggcatttggcccaaaacatggtagccagttaatgggccggattactagggtcctcaaaatcttgtgggcctacagctgggccggcccattaatgtcggtgaaatctcgtgggcctttagctaggccggcccattatgatccgcaagaatcttgtgggcctttacctgngccggcccattatggcacacaaaaatcttgtgggcctttacct

SEQ ID NO: 4955 - DNA, 432 bp, Triticum aestivum
  Clone ID: LIB104-005-Q1-E1-H7
tcccgggtcgacgggtgatccgaatgatgattgtgatatcaagattaggagggtgaatgttagagctaatcttgatatttgtattagcatgtttgagttttgcatgtagtctagtctagtgtggtgttcgtccgacgaaggctttaggtgagcgcgccaaagaggtgagatgccaggatgccgtgtgaggcggcgagcatggcgagatgccgatggtgctgcgtgagaagcggcaagacgtatcagaggctggagccgtgatggactgcatcaaattgggtcgggtgaaccggccggtcgttctgtttgttggactagctgttcatgcgtgagttcgtttagtcctagccgagagtatcgttgctagtagttgatgcatgcatgtagttggcctggtcacaagtggttaccgagtcgtgtgcaacgctggag

SEQ ID NO: 4956 - DNA, 459 bp, Triticum aestivum
  Clone ID: LIB104-006-Q1-E1-A1
taccggtccagaattaccgggtcgacgggcttgaaaagatgggagcaaaggtcacatggactgacactagtgtaactgttactggcccaccgcgtcagccatttggaaggaaacacctaaaagctgttgatgtcaacatgaacaaaatgccagatgtcgcgatgactctagccgttgttgccctgtttgccgatggtccaaccgctatcagagatgttgcctcctggagagtgaaggaaactgaaagaatggtcgcgatccggaccgagctgacgaagctgggagcaacggtggaggaaggcccggactactgcatcatcacgccgccggagaagctgaacatcacggcgatcgacacctacgatgaccaccggatggcgatggccttctccctggcggcctgtgctgaggtgccagttcacatcagggaccctggatgcaacccgaaagaaccttccc

SEQ ID NO: 4957 - DNA, 404 bp, Triticum aestivum
  Clone ID: LIB104-006-Q1-E1-A10
attcccgggtcgacgggtgggctcatgttggcaaccaatggatgtatcttttttattcgtcttgcaaaactatgtgagactattttacttttattcggcttgtaaaactatgttatttttatttggttgaaactatgctatttatttggttgtggactatatgtttgcttgtgaaataatgcaaaatttgtgtatgaagtagtgcaaaatttgtgctatttgttgaaaaagggcggtcagccgaccatgccggcatatatgggtcggcgcgttgggcacactgccgacccaaatctcaaatgggacggacgccgagcgggtgaccacccaaacggataaaaaacggacaaaaacaccgtccgtttggtcggcgcgttggagtaactagttcaacttctccgaag

SEQ ID NO: 4958 - DNA, 429 bp, Triticum aestivum
  unsure at all n locations
  Clone ID: LIB104-006-Q1-E1-A12
attcccgggtcgacgggaccatggaattttaattccaaaaaattaaaaaatgatcagaaaaacatgaaaccttgcttgatgtaatgtcatgccaccaagatgatgtggtaaacaattggcatgtttgacgaaagtttggacacacacccctcacaaaccggagcaactcactagaaggctcgtggttccgaaagggaacaatgcatgtttgatgacgaacaggagataggttcctcttacggccttcaaaatttattctactctaacgttcactattacaactgtactgtgaaaatttggaaaattctaagggtcatttgaccttttaaagacatttaagtgattttcaagccatttaatgaccacaattcanatttgaactacatctacatgcaacgcctaaacataacggtttgaaaaatcatattt

SEQ ID NO: 4959 - DNA, 436 bp, Triticum aestivum
  Clone ID: LIB104-006-Q1-E1-A2
gggtcgacgggagctagcaggaatgcatagcttgttagcacggaacacaaatccatcattaacgacaaacttgttccaggttcttccttctttacaattctacaatacatctttaaaatcagcatcatgcacatattgatctttgatggtctccaaaccaaatattttgaagtcaagttgtgaaagcatagtatagcgacgagacaatgcatcagcaataacattttctttacccttcttgtgtttaatgacataagggaaagtttcaatgaattcaacccatttagcatgtctacgattcagtttagcttgacttttaatatgtttcaaagattcatgatcagaatgtataacaaattctttgggccataaataatgttgccatgtttctaaagtccgaacaagagcataaagttctttatcaaaagtagaataa

SEQ ID NO: 4960 - DNA, 432 bp, Triticum aestivum
  unsure at all n locations
  Clone ID: LIB104-006-Q1-E1-A6
gacggggaatcatagtcctgcacataccaaagtgattgttttttgacaaaaaacaatatgcgctaataaaataatcttagatggatatcacctgatttgttcggatgaccgatgatccattcaacgcaacagaaaacagctcaggtagaccggcaacccaaaatagcccggcggcttatcatagcagtggcggctcaatgcggccccggtgaattaatacagcagaggggctcaatgttgcgcattttttaacttcgtccgttttttttaaatctccagacacgtatttttgcaccatagtttcgtgtagccttctgatgtccatcttgagccggacagataaatagtagtaacaaagtattgccagtaatggcagcgcacactgacggagctgactgctgacgcgaccgcagtccagagtggncaacgttt

SEQ ID NO: 4961 - DNA, 397 bp, Triticum aestivum
  Clone ID: LIB104-006-Q1-E1-A8
gacgggcatattccaaattggctacacctaatgatgtggccgttgaaagatgaattacatatgccacgcacgtcattttgcgtggttctgtatttttagctgtgggcgttgctaaacattcaccatcatgttggtgccatctactgtaagctgtattggcagctcggatattctaaggttgcctgaatttatgtttagtatgacaacaaacaatttccagtatgcatgcctacccatataatgttaatgggctgtgggccgattaccggtaacatgcttggtcttgtgcgacctgagaatccctgcctcacacactcgacgaatttagcccatgcatctggtatctagatacaattactcctacaaatattgtttctatagttgtgatctaaatgct

SEQ ID NO: 4962 - DNA, 420 bp, Triticum aestivum
  Clone ID: LIB104-006-Q1-E1-B10
attcccgggtcgacgggagttcacaagattcctattgagttttgtgttgtgaagttttcaagttttggatgaattcttttgatggattatggaacaaagagtggcaagagcctaagcttggggatgcccatggcacccccaagataatccaaggacaccaaaaagtcaaagcttggggaagccccggaaggcatcccctctttcgtctacttccatcggtaatttacttggagttgtatttttattcactacatgtcatgtgttttgcttggagcgtcttgtattattcgcgtctttgcttgttcgttttccacaatcatccttgctgtacacacctttttagagagccatacatgatttggaatttgctagaatactctatgtgcttcacttatatcttttgagcttgatagttttgct

SEQ ID NO: 4963 - DNA, 403 bp, Triticum aestivum
  Clone ID: LIB104-006-Q1-E1-B11
attcccgggtcgacggggcgacggaggcgatggactgccggccgttcggcggcggcgagagcaagctcaaggcggaggcgacgacggacaacaaggggtggtacaagatcgagatcgatcaggaccaccaggacgagatctgcgaggtggtgctgaccaagagccccgacgcgtcgtgcgccgagatcgaggagttccgcgaccgcgcgcgcgtcccgctcaccagcaacaacggcatgaagcagcagggcacccgcttcgccaaccccatcgccttcttccccaaggagccgcgcaaggagtgcggcggcatcctccaggcttacgacctcaaggacgcacccgagaacccatgaacccccatcccatccatatagtctcgctcagttgcttcccatcatca

SEQ ID NO: 4964 - DNA, 402 bp, Triticum aestivum
  Clone ID: LIB104-006-Q1-E1-B12
attcccgggtcgacctccgcggacaaggtgcagcgcatgatggcagagatcgacaccgacggtgacggcctcatcgacttcagcgagttcatctccttctgcaacgccaacccggggctcatgaaggacgtcgccaaggtcttctgaatcagttcatttcacctcagccgtccgttccaggagccgatccatctacgtacggcttcgtatatcaatttcatgcaactacctactccggtcccgatccagcctcagcttcacctgaggccggccctaaatttgtttgatcaattcttttgctactagtagtaactagtgatgatcactgttgcatcatttatttatttattttatatatcatcacaagtttcctgtgattcttttctttctatacctttttgt

SEQ ID NO: 4965 - DNA, 423 bp, Triticum aestivum
  Clone ID: LIB104-006-Q1-E1-C3
gggtcgaggggtacatgcacagtaaactgttttactgacctgaatttgttttttttgccgagagttgctcagttgtccaaatgatttgaaaattagagcggacctcatgcatcaaattgtctgccattggaaaaatttgtaactttttgaatgtttctagtatttgttttgatttgttttttatttaacacgggtgcagatgagctcgggctcacaaaagcatttctcaaagtctggtctctaaatctgggcagtgtttgcgttattgccgctctaggactttgcttccctatctctgtcttcctttcgttttcgtttcttcaaagtcagagaaagagactgggtaaacaaaccaaaaattttgcgcttttgactggaattgtgataggcacgtttcaacaagcagggcataaacaaaacgaa

SEQ ID NO: 4966 - DNA, 404 bp, Triticum aestivum
  unsure at all n locations
  Clone ID: LIB104-006-Q1-E1-C5
attcccgggccgacctcctcaaccagaacaacaccttcaagcccttcgccgaatacaagtcggactacgtgtaccagcccttccccaagcccgtgtgggagcagatcttcggctggctcacgaagcccggtggggggatgatgatcatggacccatacggcgccaccatcagcgccacccccgaagcggcgacgccgttccctcaccgccagggcgttctcttcaacatccagtacgtcaactactggttcgccgaggcagccgccgccgcgccgctgcagtggagcaaggacatgtacaatttcatggagccgtacgtgagcaagaaccccaggcaggcgtacgccaactacanggacattgacctcggcaagaacgacgtggtgaacgacatctcaacctat

SEQ ID NO: 4967 - DNA, 442 bp, Triticum aestivum
  Clone ID: LIB104-006-Q1-E1-C7
attcccgggtcgacgggctcgtgtacatttttcacagaaggggtcgagtagcaaatgttcatatatataccgtgggattgggaatcgaaaatgttcgtacgctgtcgggcgctcatcttcttcttctctggttctgctggttcccttgacttgtaagaaggtaaacataatttaattaatttggaatttttaacccgaaattggataacggttcaaggcttggaatgtataaggaaggtaccttaattgaccaacaaagtgtgttttgaacgtctctctcgcttacaaaaaaaaaaaaaaaaaagaaaaaaaaagagaaaaaaaaaaaaaagaaaaaaaatataaaagaaaaaaacaccaaaagaaaaaaatttaaccacggtaaaaaaaaactcgttttaagaaaaaaaaaaggggggccccaaaaagttttaaatttttt

SEQ ID NO: 4968 - DNA, 406 bp, Triticum aestivum
  Clone ID: LIB104-006-Q1-E1-C8
aattcgcgggtcgacggggcgaaggaagaagacggcagaagaggtggaagaagcccttctagccatccatgttgcatcaaatggctcacatgagtggattgacccaaattgctcctttagattgcaggatacacgtggcattcaaggtctcgaaggtagattccgcgtccgcacccggtttgcgggctcgacgcgcgcgcaaccggcttccgccgcgacagccaccatgcgcgccttctctgcgcgggcagagacgacaatgacacgctagttcctccttgccggcgtgctggagcacgcgctcatcctcctcttcgtacgctgcgtgcatagacacgactcaaccagctgctcgcgtgcttggcagcgcggcggcatcgtgagcagggactgtagacgacgtgag

SEQ ID NO: 4969 - DNA, 429 bp, Triticum aestivum
  Clone ID: LIB104-006-Q1-E1-C9
aattcccgggtcgacgggggaagggaagtggctctgtactccgcatgcttctataggattttgggcgtggcgaatctgtgtcgtggcaattgcattcatcgtttgaatttttgcaggtcttaagtttgtgtccctgagcggctagcgttccttggcctctcaaactgaggttgcgaaacctttttcttgagtcaatttatatactgtataagaaaggttgacaagtcaggcatctaatattgtttcgtcgccgacgtgaactgctagtgaattgcatttttcaagctcctgtgattcgggagcatttctattagttacatctgcaaagccaagcaaaaaaaaaaaaaaaaaaaaaaaaaaaaaaaaaaaaaaaaaaaaaaaaagaaaaaaaaaaaaaaaaaaaaaaaaaaaaaaaaaaaagcgggcgcc

SEQ ID NO: 4970 - DNA, 439 bp, Triticum aestivum
  Clone ID: LIB104-006-Q1-E1-D10
gtacaggtccagaattcccgggtcgacgggggatgaggagtaaaaagaatcctactctccgacatatataatcctaagactcaaaatagttttcttctagactcaacaatggccaacaatcaagggggctcctaaggtcggtcgaggctctgataccaaattttcacgcccaagatgtgaccctatcctaaaggaactcgaaggtcccaccaaggatagaagcgcatcttgaagacgcttttgcaagatggatatcattacatcaacactacataatagatggggatacatacaaaaggcatacaatgccacatgaatacaacatcacaatacataagagcaacatccgactatggatgaaacacaaacagaaactcaaatgacatccaccctgctagcccaggctgccgacctggaacctatcccctgattaaagaag

SEQ ID NO: 4971 - DNA, 414 bp, Triticum aestivum
  Clone ID: LIB104-006-Q1-E1-D11
attcccgggtcgacggggtgaagaaggagaacgacaacatgcagatcgagctcaggcatatgaaaggcgaggatgtgaactccctgcagcccaaggaactgatcgccattgaggaagctctcacgaacggccagaccaacctcagggacaagatgatggaccactggaagatgcacaggaggaatgagaagatgctggaggaggagcacaagctgctggctctgaggatgcaccagcaggacgacctgagcagcggcatgagggagatggagctcgggtaccatcagggtagggatttcacttcccagatgccgttcaccttccggctgcagcccagccaccccaacttgcaggaagacaagtaggccaccgaatcctgccacggcctgtgtcaactgaagctcctctacctgc

SEQ ID NO: 4972 - DNA, 426 bp, Triticum aestivum
  Clone ID: LIB104-006-Q1-E1-D3
ggtccagaatatccgggtcgacggggcagttgtgagtgtgaggctgatcggcaagttggacgacggcactgtgttcacgaagaaaggacatgaaggcgacgaaccattcgagttcaggacggatgaggagcaggtcatcgaagggctggacacgacggtgctcaccatgaagaaaggagaggtcgcgtcagctagaataccacctgaacatgcgttcggatccaccgagacgaagcttgatcttgctgtggttcctcccaactccaccgtcttctatgaagtggagattgtttccttcgacaaggagaaagaatcttgggacttgaagagtaatgctgagaagatcgaagcagctgctaaaaagaaagatgaaggaaatgcgtggtttaagatgggcaagtacgccaaggcttccaagagatatga

SEQ ID NO: 4973 - DNA, 423 bp, Triticum aestivum
  Clone ID: LIB104-006-Q1-E1-D4
cgggtcgaccggcatcccctctttcgtcttcgttcattggtaactttacttggagctatatttttattcgccacatgttatgtgttttgcttggagcatcgtgtattatattagtctttgctttttagtttaccacaatcatccttgttgtacacaccttttgggagaagactacttgattataatttgctagaatactctatgtgcttcactcatatcttttgagcgtgatagtttttgttctagtgcttcacttatatcttttagagcacggcggtggcttaattttgaagaaattgctagtctctcatgcttcacttatatctttttgagagtcttttagaacagcatggtatttgctatggttacaaatttggtcctagaatgatgagcatccaagttgggtataataaaaactatcat

SEQ ID NO: 4974 - DNA, 453 bp, Triticum aestivum
  Clone ID: LIB104-006-Q1-E1-D5
gtaccagtcaacaattcccgggtcgacgggaacgagaagtgatggagcgctaaaccttgacaaatctcggggaaaatggagctcgaaagtcgagtttcgagaggagaaagattaactagtgtggctcggacatttcatcgaacacctcatgtgcataggaggtgagatagagcacccaaatgccctctcctcgccggccaaaaaaaacagagcactgtggagtgctctgccgcggtgatgggtatatataggcaatttatttgtcccggttcatgccacgaaccgggactaaagctcccccttctacaccggttcaaggcatgaaccggtaccaatggctgtgggccaggagcgaggaccattggtcccggttcgtgcctagaaccgggacaaatgggtccagacaaaccgggaccaatgctcacgaggccccggccgggcccctgggctcat

SEQ ID NO: 4975 - DNA, 433 bp, Triticum aestivum
  Clone ID: LIB104-006-Q1-E1-D8
gggtcgacgggagcctctacggtaccgtgcattgccctttctcaccttgagagttggtgcaaacttcgccggtgcatccaaaccccatgatatgatacgctctatcacacataaacctccttatatcttccttaaaacagccaccatacctaccaattatggcatttccatagccattccgagatatattgccatggaactttccaccgttccgttcatcatgacatgtttcatcattgtcatattggttttgcatgatcatgtagttgacatcgtatttgtggcaaagccaccttcataatttttcatacatgtcgctcttgattcattgcatatctcggtacaccgccataggcattcatatagagtcatattttgttctagtatcgagttgtaattcatgaattgtaaataaaataaagtgtgatgaaca

SEQ ID NO: 4976 - DNA, 434 bp, Triticum aestivum
  Clone ID: LIB104-006-Q1-E1-E10
tacaggtctagaattcccgggtcgacgggtatcataaataacaataggaaaacatgatgcaaaatgaacgtatcaactcccccaagcttagacctcgcttgtccgcaaacaaaaaccgaaatcgaaaaacatgtccacatgcttagagagagagaggtgtcgataaaaacaaaatacggacatagaagcatgatgtttattattatagcagcaacaaacttaaacaaaatacatatctttgtcataaataacagtaagtgattacatacggagcaaaataagtgaatctacactctaaaatgtctaaaaacaagtgagtctacatatatccgtatgttacagttcatttgaaatgtctaaaatgacttatatttaaaaacgaagggagtagatgggttggctatgacaatactaatgtgaccggaagtcctgag

SEQ ID NO: 4977 - DNA, 390 bp, Triticum aestivum
  unsure at all n locations
  Clone ID: LIB104-006-Q1-E1-E12
ttcccgggtcgacgggagtgtgaattttctatcataacttttggatttagggaagtatgatgaatcttacattctttacagactatactgttttggcagattgctgttatgtttgcattgtttgcatatgtttgcttgtttaatgattctatttgaggatangagtgttaaatatgcagatacatttagtattcaatgttgaacaataatttatgtgattttttacaatataaaatgataagtttttgcattggtttatactaacctatctcacgagtttttgttgagtttggtgtggatgaagcttttgataaaaagagaaaccatgatatgagaggaattaatgagacacaaaagttcaagcttggggatgcccaaggcacccaaaga

SEQ ID NO: 4978 - DNA, 212 bp, Triticum aestivum
  Clone ID: LIB104-006-Q1-E1-E6
taccagtccagaattcccgggtcgacggggtaaggaattgtaaatatccattgttgtgacgcgacctgaataaaataaacgatctaatgctctagtccaaaaaaagtcaaaagcatgtaaaaaaaaaatcggccgctcgataggatctacgcttacatagtcgtgcatgcgacatcatacctcttctgtaatgtcagctaaattcaattcag

SEQ ID NO: 4979 - DNA, 404 bp, Triticum aestivum
  Clone ID: LIB104-006-Q1-E1-F10
aattcccgggtcgacggggcattgcatgcgtatggttgcttctttaatgattctttttgaggataggactattaaatatgcagaggcatttagtatgaaatgttgaataataattttagtgattttctacagtagagtatgataaggtttttgcaatggtttatactaactcatctcacgagtccttgttgagttttgtgtggatgaagcttttgagatttagggagaccgtgatatgagaggaattaaggagacacaaaatctcaatcttggggatgcccaaggcatcccaagataatatttcaagaagtctctagcttctaagcttggggatgccccggctggcatcccacctttcttcttcaataaactatcggttaatattggttgatcctaagtttttg

SEQ ID NO: 4980 - DNA, 399 bp, Triticum aestivum
  Clone ID: LIB104-006-Q1-E1-F11
aattcccgggtcgacgggacgctggactgcgacgagttcgtgacggtgtcgctgcacctcaagaagatgaccaacgagaagtacctggcggcggcgttccgctacttcgacaaggacggcagcggcttcatcgagatcgacgagctccggcaggagctggggcccaacgagcaggccatcctcgagatcatccgcgacgtcgacaccgaccgggacggacgcatcagctaccaggagttcgagctgatgatgaagtccggggcggactggaggacccgccagttctcgcgggccaacttcagcaccctcagccggaaactatgcaaagaagaaacttcctcctcgtgaattcaatttgttctactgctagatgtgattctttttgtgcatgtaagctgc

SEQ ID NO: 4981 - DNA, 410 bp, Triticum aestivum
  Clone ID: LIB104-006-Q1-E1-F12
ttcccgggtcgacgaggacgacgacgtggatgtggacgagtcggatagaaagctcttagatgatgaaaagaaacccgatatcacgaaacgaccacacactcctattggagatgatgtggaatgcaagaagccaaagatagcagaaggctcaaggtgccaaggagaagaacctgaggctggagggataaagaattcctcctgggtctgatgacaggggaatgcagtaaacaccagaagcatcaaaactatgatctggtacagtatcctgaatacactattttctggattatgaatgaattctgaagcatggggctataagtgaattatgtaacatggatttgtaactatggtggatgttaagttaatgttctatcacgtacatgccgccgcagcactactacgttccgaac

SEQ ID NO: 4982 - DNA, 435 bp, Triticum aestivum
  Clone ID: LIB104-006-Q1-E1-F4
gggtcgaccgggagcgcaagatcggggtggccatggactactcggcgagcagcaagcgagcgctggagtgggccgtccggaacctgctccgccggggcgacaccgtcgtcgtcctccacgtccagcgccacggcggggaggaggccaagcacgccgtttgggccaagtccggatccccactcatccctctgtccgagtaccgggagccggaggtgatgaagaactacggcgtgacctgcgacgccgaggtgctcgacatgctcgacaccgccgcgcgccagctcgagctgaaggtggtggcgaaggtgtactggggcgacgccagggagaagctctgcgacgcggtggaggagcagaagatcgacaccatcgtcatgggcagccgcggcctcggtaccatccagaggattcttctgggaagtgtgaccaactacg

SEQ ID NO: 4983 - DNA, 423 bp, Triticum aestivum
  Clone ID: LIB104-006-Q1-E1-F6
aattcccgggtcgacgggcaatggaagatgtaggtgtgatatgtcaagtagtggacagataagccaaccactggatgtggttttcagggatttttgcagtgggatttgtagggtactatgctgcgctgtgtttgggatttgaaataaaacgatgggagatgtgccacgctcttaaatgccagtcttctgctctaatcttgctaaattacttgttgcattttgcagcttgtctacctttacagtgactaccttcttttggctgtgctcatttggcaaaacagtttgtctaattcacatctacttcgtgtctttttagacatttcaaatagacaacaacatacggatgtatgtagacatattttatagtgtagatccattcattttgctccgtatgttgtcacttgttggaatctctagaaagac

SEQ ID NO: 4984 - DNA, 389 bp, Triticum aestivum
  Clone ID: LIB104-006-Q1-E1-F7
aattcccgggtcgacgggggcggtgaggcgaacggcggggatgacctacatcggctactccaggctctgcgcgtccattgtgcggagctgcctcaaggagccctacaagtccgaggccgccgaagtcgagaaggtccactactcccgctccaagtggaccgacggaaagcagcccaagcccaccatctgcgaagatgataaatgaaagatccggtgccatggtgacagagtccttcctacggacgttttcaaaagctactgtgtttcgtgctggccattctacctaaaactcgttatctgttagatttatgtttcacgctcaagaataaattatttacgtgacattggatctgttccgacaccattttattttaacttttaatcgctac

SEQ ID NO: 4985 - DNA, 418 bp, Triticum aestivum
  Clone ID: LIB104-006-Q1-E1-F8
aattcccgggtcgacgggagagaggaggagcttggaggtggttcatagcacggtgctcccctcccttgctctgcgttttcgttgtggtgaagatggcgatatcgatggagcgcaggaagatgaagcccgtccttgctctcgtgctgctgctgtcgtgccatcttcttcttccgctggtctcctccgtgcctgtgtcgagtaagtgtttgacctccaaccccatgcacgcatgcatggaccttacttaatatcagttcatcttctttcttggcatgtgtatgtgcatgcatgcatcttaattttgagccttgctctcggatgtaggaagcgtggccttgggaaatcatctagcctcagcttctagtctaactctggaggcggcgcctgttcaggtcaatctctcactctacctgatgcc

SEQ ID NO: 4986 - DNA, 396 bp, Triticum aestivum
  Clone ID: LIB104-006-Q1-E1-F9
attcccgggtcgacgggggcatggacattggcatgggtgttgtggccgtgagcggtgatggtaaaggggatcaggggggcgaggctggccaggatgagcaggtgaagaaaaagcgcgggaggccaaggaagtataagcctgatgggtcagtgacgttggggctctcgccatctccatccacgcctcattcgtcgagcccaggaatgggcgcgatggttaccacacctggctcaggatttgggccggggacagggtcagggggttctggttcaggcgcactgacggagaaacgtggcagagggcggccacctgggtccgggaagatgcagcagctggcttcgcttggaaaatggtttcttggctctgttggaacagggtttactcctcacgtgatta

SEQ ID NO: 4987 - DNA, 412 bp, Triticum aestivum
  Clone ID: LIB104-006-Q1-E1-G11
tcccgggtcgacgggatgtcaaaatgggaatgcaggctgtgccgctgacctctgccgcactaactgcggaggtgaatgcactaaagcagagcctcgaacggtccgagaatgagctcggccttgccaagaagtagctcgaggataaggaaggtaagtaataccttatgaaagtagtaccttatagaaaaggatttggttgcaaaaaatgacaagaataacgtgggtattgcaggggccacgaatgaggtggcgaccctgaaggaggcggtgtccaaggtcgaaagcagtgcggccttggagcgcaccgagcgagagaagcaagaggcgcgggtggcggaggtgcggcaagagctccaggctctcgtggaaaaacatgagagtttggagggtgactcgagggcccgagagtccg

SEQ ID NO: 4988 - DNA, 445 bp, Triticum aestivum
  Clone ID: LIB104-006-Q1-E1-G3
ggtccagaatatccgggtcgacgggttccctttgtcatcggtatgttacttgcccgagattcgatcatcggtatctcaatacctagttcaatctcattaccggcaagtctctttactcgttccgtaatgcatcatcccgcaactaactcattagtcacattgcatgcaaggcttatagtgatgtacattaccgagagggcccagagatacctattcgacaatcggagtgacaaatcctaatctcgatctatgccaactcaacaaacaccatcggagacacctgtagagcacctttataatcacccagttacgttgtgacgtttggtagcacacaaagtgttcctccggtattcgggagttgcataatctcatagttataggaacatgtataagtcatgaagaaagcaatagcaacatactaaacgatcaagtgctaagctaacag

SEQ ID NO: 4989 - DNA, 421 bp, Triticum aestivum
  unsure at all n locations
  Clone ID: LIB104-006-Q1-E1-G6
aattgccgggtcgacgggcgacggtgagaggcgcccacatcaacctcaaggtcaaggggcaggatggcaatgaggttttcttccgcatcaagagatccacacagctgaagaagctgatgaacgcttactgcgaccgtcagtctgtggatctcaactccattgctttcctttttgatggtcgtaggctccgtggtgagcagacccctgatgagcttgagatggaggaaggcgacgagatcgacgccatgcttcaccagaccggagggtgctttcctggcccttagaaggagcttgctgcagcctggctgttctatgtcgtatgctacctttagaactagagtaaaatgtaagaagtgaaagaacttgtgaggctatggttctgtgccatagcctganggggggtctggaggtgaaacaacat

SEQ ID NO: 4990 - DNA, 422 bp, Triticum aestivum
  Clone ID: LIB104-006-Q1-E1-G8
gggtcgacgggctactactattgatcattttgttctgtacatatcaatgcgcattagaatgtgcagcttacaaatggtgaaatggccggagcgatgatgtggagatctttgtaaagaagacaagacaatggaatagtaagaaatacaaaatagggctactggtgaaatacatgagctgagaagccgcaaaatagcgctttgctggttaaccgggttaaaatatgttcccattgcctgtgggatggggctgaatgcggagactggttgtacttcatagggagtagtgtaagtttcactggtagcacctagctagctgagatttcacaattactaatattgatttttgaacatgttgactggattatattgatttcgtatcttgctaagagcctaagatgctaaggggcaaccttttgatggtc

SEQ ID NO: 4991 - DNA, 408 bp, Triticum aestivum
  Clone ID: LIB104-006-Q1-E1-G9
attcccgggtcgacggggcgctctgctacggctgccagtcgtgcaaggccggcgtggtggccacgctcaagcgcaactggaagcgctccgccatcatcaacatcgtcttcctcgtcttcatcgtcatcgtctactccgtcggctgctgcgccttcaggaacaaccgccgcgaccaccgcaacggcggcgggtacaagcagcagggcgcgtacgcttgatcgcgcgcttggctcggttatttattgcttggattggatggatgcgatcgtctcgtcgtgtcatgcatcttcgtcgtcgtgtttctcttaggatggcctgatctagctttgtacaggcgagatgtgctctgatcacctactagttaggttttactccgtggtcatgaggagggatgtgtatatatatttt

SEQ ID NO: 4992 - DNA, 422 bp, Triticum aestivum
  Clone ID: LIB104-006-Q1-E1-H11
attcccgggtcgacggggatccacagaaagaaaaaaagagttgttttggtgaacatcaaagaaaaaacttgctcttcttccataaaaaattcttctaaaaatgccgaacccaaccgttgcataaaagttcgtaccgtgcttttatgtttacgagctaaagttctagcgcatgaaagtcgaagtatatactttagtcgatacaaagtccgttttttcgaagatccactatgataatgaaaaagatttctacatatccgaccaaatcgatcaagaatatcccaatctgataaatctgtccaaatgggtttactaataggatgccccgatccagtacaaaattgagcttttgataagtatcctatgaggagagtagcggggactatggtatcgaatttttttcattcgagtatctattagaaatg

SEQ ID NO: 4993 - DNA, 452 bp, Triticum aestivum
  Clone ID: LIB104-006-Q1-E1-H7
gtaccagtctagaattcccgggtcgacggggacgatcctgttgtccttgacatgacttctatgtgcaagggtatgatatacgtgaacggtgaaggcatgggtcgctactggacgtcattcataactcctggcaaagtcgcttcccaggcagtgtaccatattccacggccatttttgaaatccaagaacaacctattggttgtatttgaggaggagcttggcaagccggaaggcatactcatccagacagtgaggagagatgacatctgcgtgtttatctcggagcacaaccctgcgcagataaagccatgggacgagcatggaggccagatcaagctcatagccgaagaccacaacactcggggattcttgaactgccccccgaagaagaccatccaggaggtagtctttgccagcttcggcaacccggtggggtcatgcgccaacttcac

SEQ ID NO: 4994 - DNA, 413 bp, Triticum aestivum
  Clone ID: LIB104-006-Q1-E1-H8
aattcccgggccgacgggtataacaatccaccatgaacttctgcagggatttcattggcgaccaagcgattcataatattcacctggaggacgacagttctctggcgccatattaccttcacgacatattacatctcaaggggaacaatacaaggaggccacatcagttcatcgagtctatcgacgaatgataaaggatacagtttcaagcgaatatgagggtgtaacaaactgatgtatcttgggggcattctttgcctgagactgtttctgttggagcaaagtgtttgtaccataatgatctagattatctatgtggacctatatattattgtcagcacaacatggaatgaatttgaatgtcaagtacaaaccacggtattcgggcatgaccgatctaaaaaaaaaaataa

SEQ ID NO: 4995 - DNA, 371 bp, Triticum aestivum
  Clone ID: LIB104-006-Q1-E1-H9
ggtcgacgggctagtgcagatcgggcacgagctcctcaggaagaacgtgtcccgggtggacctggagaccggccgcaacgtggagatgcctggccagggcaccaacgcggagcagctcgccaggttcgcaaagcagctctccgacgagcgccgccgccgcaaaaaggcgcttcaggttaactagcagctggccgccggctcgctcgactgtgttgaatcttgctcgtttggtggatgttttccattcagttctttttcttggtacagcgatgtacagtaatattgtacagttatgtgagagtattgtgccacggttggaaaatatactaagggtgtacctgttttgctggagcgagtgttgatcaagatcg

SEQ ID NO: 4996 - DNA, 405 bp, Triticum aestivum
  Clone ID: LIB104-007-Q1-E1-A1
cggtccagaactcgcgggtcgacgggcccagctacggccgcaagaagaatgatgacgacgatgacgaggataggcagcggcgatacaagaagcgcgacgacgacgacgatgatgagaggaagccacggcacaagaagcacgacgatgatgacgacgacgatggcgagaggaagccgcggtacaagaaacgtgacgacgacgatgatgatgaggatgacaggaagccgcgttacaagaagcgtgacgacgacgacgacgatgatagaaagccacgttacaagaagcacgacgacgatgacgacgacgacgatgagaggaagcagcgtcgcgggaacaaccgccgccgccatgattacgatgactgatcaaggcatcctgacatgagtttagctgacgctaaataag

SEQ ID NO: 4997 - DNA, 444 bp, Triticum aestivum
  Clone ID: LIB104-007-Q1-E1-A7
tcccgggtcgacggggtatgacagataatatcgatataggttattctacaagattactctatagatccatcagctctaagtaaactgcgtataaatcatgtatgtataaggtatgtgttactgatgttagaagttgattccttgtgtgagggtgcggatgtaacacaacatgtaattcttaatatccacatgcctcaccaaaacaatgtacggctaacccacaattatgacgttatcaagctcattataaatatgcatgtaataaaaaaaaaaaaaaaaaaaaaaaaaaaaaaaaaaaaaaaaaaaaaaaaaaaaaaaaaaattaaaaaaaaaaaaaaaaaaaaaaaaaaaaaagcggccgcccaaaaggttcaaaccttacttacccttgaatgcaacttcaaaccccttcaaaagtgtcaccaaaattcaattcaagggccg

SEQ ID NO: 4998 - DNA, 233 bp, Triticum aestivum
  Clone ID: LIB104-007-Q1-E1-B6
gtaccgatccagaattcgcgggtcgacgggcgggatcatgatcatgaggaatatataggataataaggtggtgtattaccaccatgcccgttgagctgatgtttgtttcagctagagaaatcgttacgcccgctcataattcctttttcgacgctctggagaataataactactggtatatcattctatatcaaagccggcttgtgaaataaatgatccgccgtcttgccttc

SEQ ID NO: 4999 - DNA, 464 bp, Triticum aestivum
  Clone ID: LIB104-007-Q1-E1-B8
taccgatccagaattcgcgggtcgacgggcagactgttctgtttttgacagattctgtttttcgtgtgttgtttgcttatttcgatgcatctatggctagtaaattagtttataaaccatagagaacttggattacagtaggtttaaaaccaaaataaataaataatgagttcattgcagtaccttatgtggtggttttgttttctttcactaacggagcttataagatttcctgttgagttttgtgttgtgaagttttcaagttttgggtaaagcttttatggactatggaataaagggtggcaagagcctaagcttggggatgcccaaggtaccccaagatattcaagaatagccaaaatcctaagcttgggggatgccccgggaaggcatcccctctttcgtcctcgttcattggtaactttatttggagctatatttttattcgccacatgatatgtgtt

SEQ ID NO: 5000 - DNA, 469 bp, Triticum aestivum
  unsure at all n locations
  Clone ID: LIB104-007-Q1-E1-C2
cggtccagaaatcncgggtcgacggggctgacgcgtggatgcctattggtcccggttgatgccaccaaccgggaccaaagggtctcctgactgggctctgcacactgcccacgtggatgggctttagtcccggttctggattgaaccgggactaaaggtgggaggtattagtaccgacactttagtcccggttcaggaaccgggactaaaggcccttacgaatcgggactataggccctttttctaccagtgcagccacacatgacggccaccgtcgagagataaagcatgatttgctaagttgtgagcttcaaaattcaagctcctaaattcatggctagatttacagaaatcaaaagtggcatattatttcatgtatggtagctccataaacagatgagttttccttcttcaagtctaccancaccactttgcaatccgaaggcaacttggaaatcacacacataaa

SEQ ID NO: 5001 - DNA, 416 bp, Triticum aestivum
  unsure at all n locations
  Clone ID: LIB104-007-Q1-E1-C5
taccagtccagaattcncgggtcgacggggaccacaaggagaagaaggacaagaagaagaaggacaagaagcacggcgagggccacaaggacgacgacggccacggcagcagcagcagcgacagcgacagcgactgagccagctccggccgcgctccggcagcagcgtgcagtgtaggcgagatcgatgaacgcttgggagaagtgtggcatacatatatgttgcagggtttggagcgtgtggtagcatatgtatgtaatgcgtgacatgtctcatggatcttgtgatgtataataattagccggctgcactgcactgcacggtgcttgtaataataacgttaatgaatcatgttggtattgatgcaaaanaaaaaaaaaaaatcaaaaaatagcaacattaaaaaaatgttaacg

SEQ ID NO: 5002 - DNA, 346 bp, Triticum aestivum
  Clone ID: LIB104-007-Q1-E1-C6
taccgatccagaattcgcgggtcgacgggagcatccccgggatggagcctgtcaaggtggacgcggcgcggcccatcgccgtggcgccccggtccatcgtgttcgtccacatgccggattaccatgcccctgcgtgtgcttagttagggctttttggtgttcttgttggtataggtagtggtgataaaagggtggcttgctaagcatgtccatcctagctagggtagttataagatggctgaagagagtgtgtggctttgtgtgattagatgtaataagtttggagggaaaattgaattagtgaaacaagaggcaatgggaataaactctttcctggtttcttctg

SEQ ID NO: 5003 - DNA, 456 bp, Triticum aestivum
  unsure at all n locations
  Clone ID: LIB104-007-Q1-E1-C7
gtaccgatctagaattcccgggtcgacgggatctcggaatggctatggaaataccataataggtaggtatggtggattttttgaggaaggtatatggtgggtgtagtgcaccggcgaaagttgtgtggtactagagaggctagtagttgtggaagggtgagagtgcgtataatccgtggactcaacattagtcataaagaactcacatacttgttgcaaaaaattattagctatcgaaacaaagtactacacgcatgctcctaggggggtagattggtaggaaaagaccatcgctcgtccccgaccgccattcataaggaagacaatcaaagaataaatcatgctccgaatcattgggacaccttctagataaagttgactcatctccagtcncatctttatcaagatttatattagaaacaaagattcaataggagtcacaccaatcactttaag

SEQ ID NO: 5004 - DNA, 419 bp, Triticum aestivum
  Clone ID: LIB104-007-Q1-E1-D1
ggtccagaatatccgggtcgacgccaagaaaggcttctgtcaaatatatcatcagtatcaatcactatatgacaccacacaacagatatgctgctgtcagcagtgctctctaaatagacactgcaattatcttatacatcattactgttgtcagcaatgctctctaaatagacactgcaattatcatgtacatcattgctgctgcaataaaccactaagaattattcaatatctagcctagcgccttcgttatcatcaaccgagggttgaggcggagttacaaaatctgaatgagaaaccaagggattgtccaagtcagcgacatctttgttatcttcagagctgttagaagcagctgagatggcgtcacccgattctgaatgtgttctgtccacatatgcttcgggtaaggagctctc

SEQ ID NO: 5005 - DNA, 453 bp, Triticum aestivum
  Clone ID: LIB104-007-Q1-E1-D5
gtaccgatcaagaattcccgggtcgacggggaaaacggccagcccatggatgaggagtatgaggagcaggttccagattactcgagagcctattctggtgggttgagaccccatgcccatgtcatgttggatgatgagaccgaggatgatgatgaagacgctgaaggggacggagagggcgacgaggaagaatacgacgtgaaccatgcttcggctgatgttgatgatgagatggacgaggatgatgatgatataggtaatgatggggatgatggtggtgatggagttgaggtgaatgcagatgaagatgaaggcgcgacctcatactcgtcagagtacagtgaataagagcttgtctcatgtgaccatttacgcacgtagtgatactggtggacaataataagccttttgcgccttttttgggggcaaagtgggctagacgtggaacgggga

SEQ ID NO: 5006 - DNA, 402 bp, Triticum aestivum
  Clone ID: LIB104-007-Q1-E1-D8
aattcgcgggtcgacgggcacgatcacggattcgctcggcagatcagcgcgcaccagcccccaagcctccggatcctccttcgtcgtcctccccaccgcaagcttcagccatggcaggaatggcaccagagggttcccagtttgatgctaagcagtatgacagcaagatgaccgagttactgaaccaaggtgacaccggggagtttttcacctcgtatgatgaggtgcacgaaagttttgatgacatgggcctccaatagaaccttcttagaggcatctacgcttatggttttgagaagccatcagccattcagcaaagaggaattgttcccttctgcaagggtcttgatgtgattcagcaagctcagtctggaacaggaaaaactgccaccttctgttctg

SEQ ID NO: 5007 - DNA, 102 bp, Triticum aestivum
  Clone ID: LIB104-007-Q1-E1-E12
agtcgtattagtcctaaaaaaggggcggccctaaaggatcaagccttacttacccttgcaggcaagttcatacccctcctaaattgtcaccaaaattcaatt

SEQ ID NO: 5008 - DNA, 454 bp, Triticum aestivum
  Clone ID: LIB104-007-Q1-E1-E5
gtaccgatcaaaaattcccgggtcgacgggcggcgacagtgccggccacggtggcgagctgggcgctctgaagcggtcgtcgtcgtacaatgccgacaggggcagagaatccacgatgaacgctgctagcaccacgggtggtggttgcaagctggagcttgcggcggaggaggtggacggcgtccgcgcccgctgcatcccggccgggaggaaacccagcggcagcagcagcaagaagtctccgaccacccacgtccacgttagcagccggcgcggcgaccaaccggaaactaccgacgacggacggactgactgatttcacccaagaaaactcatgaaaacatactagtactagcatcaaaatgttgatcgacgtgcgtccgctgcagactgaacgaatgtcttgctacggcacgcgctcttgcatcgactaactttcctttttaaaatttcc

SEQ ID NO: 5009 - DNA, 406 bp, Triticum aestivum
  Clone ID: LIB104-007-Q1-E1-E7
gacgggttgatcaaaaaggctgcgaagaagggtcagatgccctcgcagatcggcgttctcctccgtgaccagcacggtatccccctcgtgaagagcgttacgggaagcaagatcctccgcatcctcaaggctcatggcctggctccggaaatcccagaggatctgtactttttgattaagaaggctgtcgccattaggaagcatcttgagaggaacaggaaggacaaagactccaaattcaggctcattcttgttgagagcaggatccagcgtcttgcccgttactacaagcgcaccaagaagctcccgcccacctggaagtacgagtctaccactgccagcactctggtggcttatgatggctcttcatctggtgtgctcttaccggcttcatgatggtcttgtt

SEQ ID NO: 5010 - DNA, 456 bp, Triticum aestivum
  unsure at all n locations
  Clone ID: LIB104-007-Q1-E1-E8
aattcgcgggtcgacggggagaaacatcatgagatccaactataatagcaaagctcgggatacatcaagatcgtgccatagagggaacacgagagagaacacgagagagagagagagagagatcaaacacatagctactggtacataccctcagcctcgagggtgaactactccctcctcgtcatggagagcgccgggatgatgaagatggccaccggtgatggttcccccctccggcagggtgtcgggaagggctcccgagaggtttttggtggctacagaggcttgcggcggcggaacttccgatctaggttaattcccgaaagtttcagtatttataggaattattggcgttggtttcacgtcaggggggtctcccggccgtccacgagatangggggcgcgcccttctaactcgtgggcatcccggacctcttctggcccaactccgatgct

SEQ ID NO: 5011 - DNA, 407 bp, Triticum aestivum
  unsure at all n locations
  Clone ID: LIB104-007-Q1-E1-F7
attcgcgggtcgacgggttgggcccattggccttgtacgacctagatttagttttaggctgccttgggacatcctcccacctccttggccgccaccccttgctcctatataagtagatccatctagtagcttttcctggggatttgtttagttaaaagttagccaacgcaacttcgtgtacttcgtttgtgtccaacgaccagaccaagaccgctttcggatccccacctttatcaatacttcatacatatttgcaatattcagattgcttttatcatattcttgctcgttcttcgattgcttgcaggaatagaccttcgtggtcaggttgatcgtgcnacggcgtggtcaataacctctggagattggtttagcgattgctaaggcgcaacgtcgtgcacgtttgt

SEQ ID NO: 5012 - DNA, 400 bp, Triticum aestivum
  Clone ID: LIB104-007-Q1-E1-G5
gtaccgatcaagaattcgcgggtcgacgggggaaaatacattctgcatctcccattgcccatggtagcagacgctcatggaggagtgcgcaaaagactgcggatcagaaaccctcagagccagtcaatactcggcctcgccgtactccgagcagaagtcattatcacgcagcatcccggcggactatacggctgagctgtctgatgccatcaagctgcacatcgggttgtaatcacagatagcatatgcatctatatgatgctataagcaattgacgatatagagtaaatagtatatgcatgttgctgaaatgtggcgcggatattagatatgactagcgtgcatgcggtagtttgtaaaaaatgcatcttgatgttccgtgcagggcactcgaaacgat

SEQ ID NO: 5013 - DNA, 399 bp, Triticum aestivum
  Clone ID: LIB104-007-Q1-E1-G7
gtaccgatcaagaattcgcgggtcgacggggattacgatgcacggtcaaagggaaatggttaccaaaggaggggcgggcaccaatacgacggctacgactagtctcacatttgctctgctggcgaatggtcgcatcccatttggtgctcttgatctggtgcggcctggccatatttttgtcacaacaaagcgcgattacctggagaacttgcgttttgcttagctgctattgagcatgactcgtttctgatgggactctttttagtgtttttgctacatgatcgtgtcgcctatctggtactatgaactaaacatgggaaaagaatggatcagtgttagttgatccttggtcaaaaaaaaaaaaaagaaaaaaaaaaaagaaaaggggaaggaggagag

SEQ ID NO: 5014 - DNA, 407 bp, Triticum aestivum
  Clone ID: LIB104-007-Q1-E1-H5
gggtcgacggggcaggggagagaaagagatgggatttggcgaaaactgctaagtcctaatgcccttttagtcccggttggtccaacgaaccgggaccaaagagcggcattggtaccggttggttccgtgtaactacttttttattttctgcagctatttttttgttgattcttcctgcagctgtttttttagtcccacctcgccaagcgagaggcagtcgcagttgtttataagccctgagtgcagagatgatgacgaagaggctcaatgctcctgcatattggttagcttcaagccttgaggaatacggtagactgcacagagctatgtgcagtgcagttgacactattccgaaaggcttgaagcaaatttaacgagcattgcgccccttttttatttttaatgac

SEQ ID NO: 5015 - DNA, 413 bp, Triticum aestivum
  Clone ID: LIB104-007-Q1-E1-H6
gacgggcccatcaatcgtctttgttcattggtaactttacttggagctatatttttattcgccacatgatatgtgtcttgcttggagcatcgtgtgttatattagtctttgctttttagtttatcacaatcatccttgctgtacacaccttttgggagaagcctacttgattagaatttgctagaatatgctttgtgcttcacttatatcttttgagcttgatagtttttgctctagtacttcatttatatcttttagagcacggagctgacttatctttgtagaaattgctagtctctcatgcttcacttatattagtttgagagtcttttagaacaacatggtatttgctatggttacaaaattggtcctagaatggtaggcatccaagttgggtacaattaaaactatca

SEQ ID NO: 5016 - DNA, 269 bp, Triticum aestivum
  Clone ID: LIB104-007-Q1-E1-H9
gacgcggagttgttatacacgggcatcaaaaaggaagatattattgcgttgcgcgtgttgttaaatttgtatcgacgagcgtacaaataatggaacatatcaaagattttttgtttaaaaaaaaaaaaaaaaaaaaaaaaaaaaaaaaaaaaaaaaaaaaaaaaaaaaaaaaaaaaaacaaaaagataaaaacattacctacacatgcatacgacgtcatacctcttcaataatgtcaagtaaattcaattcaatggccgtaattaaat

SEQ ID NO: 5017 - DNA, 356 bp, Triticum aestivum
  unsure at all n locations
  Clone ID: LIB104-008-Q1-E1-A1
tacggtctttaattcncgggtcgacgggtggaacaaaaaggtctcgcaccttccatttgcttggaacacaaagaattatgtattgctatgccatggttaattgtagggttattgtttggcattcatgttaagtttagttgaaactgtatcatcatgggttcagtttaaaagtagaaactgtctatcaactgacatgcttttgttgactgctatggagtaattttgatacgaacaaggctgctaattgatttggtccttggtatagcttgtttattccgagatgatgttaatttctaagtttaatctgttgaattagcatggttatgctacccttcaagttgtaattcaacggatat

SEQ ID NO: 5018 - DNA, 391 bp, Triticum aestivum
  Clone ID: LIB104-008-Q1-E1-A10
aattcccgggccgacgggggcggtatctctgtctcgatctcccccaatccaatccgccgcggaagaagcgatcgacaggcgctcgctcgcgaggatgatctaccgcaactggtcgctgctctcctccatggtcgtcatctggggcagcgtcagcgccgccggcctcgccgggatcttcctcttcggcggcaaggagaaattccagggctatctttctcgcgaaggcgagaggctaatgcagcaggacagagccatgatgggcaagaactagtgcacagcacggctcactttcgacgtgtcaacatgtgaatcagacatgaaacgacgtatctctgtggtttagaacataactttctcttcctgccaatggcaccttttgcttctgggcccc

SEQ ID NO: 5019 - DNA, 379 bp, Triticum aestivum
  Clone ID: LIB104-008-Q1-E1-A12
aattcccgggccgacggggaagcggtcgttcgatgccgagacgccgcggcggcgggagtcggcacgcagcaacgaggcggtcgaggaggcgcggatcaagctgctggagctgcggcaggtgaacaaggtgaaggcgctcgtcggcgccttcgagaccgtcatggacgacaaccaaagccccaccgccgcccgcaagccgcggctcaacctcggcgcctgaactacgagtacattcgatgagcatgaagctcgatcgcgtgcgcctcctcctttatccccgctactctttaatcacccatcaacccaatttgtcgtcgtcgcacacttatctataattacggtatcgcttatattctgcaaggaggaagatgatggaagg

SEQ ID NO: 5020 - DNA, 336 bp, Triticum aestivum
  Clone ID: LIB104-008-Q1-E1-A4
cgggtcgacgggggggttcagcgcggtgccgtacgtggtggcgctcttcagctgcatgctgtggatcttctacgcgctggtcaagaccaactccagcccgctgctgaccatcaacgccttcggctgcgtcgtcgagtccttctacatcctgctccacgtggtgtacgcgcccaggaacgccaggcaccgcgccctcgccttcttcctcctcctcgacgtcgccgccttctccctcatcgtcgtcgtcaccgtcttcctcgtgccccagcccagccgcgtcaaggtcctcggcagcgtcggcctcgccttctccatgggcggtcctccgtcgccccc

SEQ ID NO: 5021 - DNA, 295 bp, Triticum aestivum
  unsure at all n locations
  Clone ID: LIB104-008-Q1-E1-A6
aattcccgggtcgacgggatgacatagtcaacggcgacggcggtagccgcgccactgctggtgctggtggtagcggcggcggtggtggtggctgcggtggtcgcgttccaccggaggccaaccgcagaactcgtgtcgccccttacccgcagccttcgcgaaggtgatggacgcgccggtgctcgtgacgtgcacgcaccgctgcgcttgtangagagagatcagagcatgaagagagcaaccagcgtgaaaaataaacattagcacatcagaattgttgctcgatccccttgtt

SEQ ID NO: 5022 - DNA, 361 bp, Triticum aestivum
  Clone ID: LIB104-008-Q1-E1-B11
acggggaggataatgccggtggccctgcgtggaggcgcagttggcttcctgctttcacgtcatcgttcctgaaggtcgatgattctccttgtatgttcttgtatggatgcttgctttccttctgtcttctgtttgcaatgctttgctcgtcgtgaagacgaacagtacaaataacgtgttaaaacgtgaagatgaaatcgaatagagggcaccggcgggaattgatccaccgccggtggttgaagaaaaaaaaaaaaaaaaaaaaaaaaaaaaaaaaaaaaaaaaaaaaaaaaaaaaaaaaaattaaaaaaaaaaaaaaaataaaaaaaaaaaaagcggccgctcaaaaggatccaagctt

SEQ ID NO: 5023 - DNA, 391 bp, Triticum aestivum
  Clone ID: LIB104-008-Q1-E1-B12
ggtacaggtctagaattcccgggccgactttgctatggattttttacttctcaaacaaaaaaatacttgttaaaaacgtagtcaatggagtaatgagtactcacattattagcatggctgaatgtgaatgatttaatttgcgctgagcagtttccatgattaactctggtcaaaagctgcttgttgaccgcagctccttgctgtaacctgacaggcatgtgcacacattttgatgattctttctcccctttgcaagcaatttatatgtttatttaatccgtagttactagtgcaacctgtaaccatcaatgtacctaccgattcctttcacgttaatggtgacagtttaattttcctgtaatgccttgctttgttagtaacgtctgaacaa

SEQ ID NO: 5024 - DNA, 278 bp, Triticum aestivum
  unsure at all n locations
  Clone ID: LIB104-008-Q1-E1-B8
attcccgggtcgacggggtatgactgataatatcgatataggttattctacaagattactctatagatccatcagctctaagtaaactgcgtataaatcatgtatgtataaggtatgtgttactgatgttagaagttgattccttgtgtgatggtgcggatgtaacacaacatgtaattcttaatatccacatgcctcaccaaaacaatgtacggctaacccacaattatgacgttatcaagctcattataaatatacatgnttcacttgactactat

SEQ ID NO: 5025 - DNA, 389 bp, Triticum aestivum
  Clone ID: LIB104-008-Q1-E1-C10
attcccgggtcgacgggagagcaaagaacataataaatgctatcactacatgcatatatggctggtggaggctctacggttaatatgttttgcaaaaatccaattttttcctacaacaaaggaatgtaattttatttaactatcatggtagttgaacaacattgagaaagttcctccaactcaatcccaattaaaagtaattatcaacccaacaaattaaatttagagtcatgagttccatatgataatccaagaaccaaatactcaaaatgtccataaccggggacacgactaaccatgattagattgtacactctgcaaaggtttgcgcacttttccccacaagactcgatgtcctccgttggatttctcgcactacatgatgtttg

SEQ ID NO: 5026 - DNA, 332 bp, Triticum aestivum
  Clone ID: LIB104-008-Q1-E1-C5
aattcccgggtcgacgggagaaaattgtattggattgaaataatagatcgcaaataaaataaaatgcagcaaggtatttttgtatttttggtttaatagatctgaataaaaatgcaaaggagaagtagatcgcaaagcaaatatatgagaaagaagacccgggggccgtatgtttcactagtggcttctctcgagaaaaatagcaaacagtgggtagacaaattactgttgggaaatagatagaacttcaaataatcatgacgatatccaggcaatgatcattacataggcatcacgtccaagattagtagaccgattcctgcctgcatata

SEQ ID NO: 5027 - DNA, 272 bp, Triticum aestivum
  Clone ID: LIB104-008-Q1-E1-C6
attcccgggtcgacattcgcccgcaggaaagcaacgagcgcgctttcctatttggggtcaagagtggcgctgatggtgaaggtaccaccagtgccaccctccttggcggacaccttcttggtctcaggtggagctgccattgccttcttacgcttgccggtggagctcgatggtgcgtcctcgacggtagcgcagcactccaaagaggtgctcttgccggagtgggcatcagagctcttgccggacttggtcttcttcttcccccggggagt

SEQ ID NO: 5028 - DNA, 354 bp, Triticum aestivum
  unsure at all n locations
  Clone ID: LIB104-008-Q1-E1-C7
aattcccgggtcgacggcgatgccgatgtccgagacgctccagctcctgcagatggggaaggttcccccaaccgactttgacgcactcatctgcggtagtggcagtgaggtgtactacccgggctcggcacagtgcttggatgcccacgggaagctccagcctgaccaggactacctgcagcacatcaaccaccggtggtctcacgacggcgccaggcagaccatanggaagctcatggcctcacaggacggctccggcaatgtcgtcgagcctgacgtggagtcctgcaatgcgcattgcgtctccttcttcgtcaaggaccctaagaaggtccaaactatcaataaaatccg

SEQ ID NO: 5029 - DNA, 351 bp, Triticum aestivum
  Clone ID: LIB104-008-Q1-E1-C8
tcaggaattcccgggtcgacggggacgagactctgatcgaacaactggagggaagtagtttggatggggatgagcccgtgatagaactggaggaaagtaaggaacctgagacagaagtctcagcaaatgtttgatttagctgtaaaggccaagggcgccatctctgattgtagaaggtaccaatactgttcatgtaaatacaaggatggtgctattgtacttgtactcgccgtcctttgcctgatgaagcagaagagctgtccaacaccgccgttccctggggagtcagacaaaacaaaacctgtgaaaacaaaaacttgggggtaacaacctgacaatttgggtttgggg

SEQ ID NO: 5030 - DNA, 406 bp, Triticum aestivum
  Clone ID: LIB104-008-Q1-E1-D11
gtacaggtcaggaattcccgggtcgacagctggcatagattcatcggccttgacctccatggggacggcatcaaaatcttcctctgatgccttgtttttgcttttggatttcttattgtcatcgtcgtcctcgtaggactcgctcttgcttttagatttcttctcggcatcatcatcctcggacgagtcgcttttttctttggatttcttctcatcatcgtcatcatccttgttttccaatttcttttcgttcttctcatcatcatcgtcatcatccttgtttttcaatttcttctctttcttctcatcatcatcatcattgtcgtcgtcgtcgtccttgcatttagacttgttagctttcttctcatcatcatcatcatcatcatcatccttgtttttggatttc

SEQ ID NO: 5031 - DNA, 414 bp, Triticum aestivum
  Clone ID: LIB104-008-Q1-E1-D12
ggtacaggtccagaattcccgggtcgacggggccgacaagcagtacaacctccacatgccccaggagcgccaccagatcggcccggaccagatcgaggccctctaccagtacgccaagttccagtacgagtgcgggatgtactcggacgccgccgatttcctgtcccagtaccgcgctctgtgcaccaacagcgagaggagcctcagcgccctgtgggggaagctggcggcggagatactgatgcagaactgggatgtcgcgcaggaggagctcaacaggctcaaggagatgattgattccagcagcttcacctcgtcgcctgtcaaccagctccacagcaggatatggctgatgcactggagcctcttcatcttcttcaaccatgagaatggaaggaacgggatcatcgaact

SEQ ID NO: 5032 - DNA, 317 bp, Triticum aestivum
  Clone ID: LIB104-008-Q1-E1-D5
aattcccgggtcgacggggaggttgagaagctgattggcaggatagtgaagtggctgaagcccggtgggcatattttcatcagggaatcgtgcttccaccagtctggggattccaagaggaaagtgaacccgacgcactaccgggagccgaggttctacaccaaggtgtttaaggaatgccactcctatgaccaacaggggaattcctttgagctttctctggtaacttccaagtgcattggagcttatgtgaaaagcaagacgaaccagaaccagatatgttggctgtgggagaaggtcaagtgcacagaagacaa

SEQ ID NO: 5033 - DNA, 375 bp, Triticum aestivum
  Clone ID: LIB104-008-Q1-E1-E11
aattcccgggccgacggggggtgaactactccctctttgtcatggagaccgccgggatgatgaagatggcctccgatgatggtttcctcctccggcagggtgtcgaaatgggctctcggttggtttttcgtggctacagaggcttgcggcattttgggatttatcagaatttttggcgtcggattcacatcagggggttctcgagggacccacaagccagggtggcgcacccaggggtagggcgcgcctcccactctagtggttccctccggactcttctggcccaacttcgatgctcctgggcttgttgtggtccataaaaaatcaccgtaaattttcagctcgtttggactccgtttgatattccttttctgt

SEQ ID NO: 5034 - DNA, 386 bp, Triticum aestivum
  Clone ID: LIB104-008-Q1-E1-E12
aattcccgggccgacgggaatcaacaggatcaggtcctaacacatatgttgagactgagacacttgctaaatttgagctgatggatggtgccccagtcagaggagaatctattccagtaaggctattcttgactccatacgagctaaccccgacttaccgcaacataaacaacaagttctgtgtcaagtactacctcaacctggtccttgtggacgaggaagaccggagatacttcaagcagcaagagataaacatgttccgtcttgacgaaactccacagccttcatagacatctatcgctgggaacctggcctgaatcgtgtgttgcaagagttagcaatttggcatcctgttatgctgtatataactctccaggagagcatgc

SEQ ID NO: 5035 - DNA, 375 bp, Triticum aestivum
  Clone ID: LIB104-008-Q1-E1-E6
aattcccgggtcgacgggggaggagaagctggcggaggcgaacgagatcgggtacaaggtggtcggcccgctcggcgccgacgagaagcccttcaagccctacgagcccgtcttcgccgtcgtccagattggttcgcaccagttcaaggtgagcaacggcgactccatcttcacggagaggctcaagttctgcgatgtgaatgacaagttagttttagatcgagttctcatgcttggctcacaagctcaaacaataattgggagggcaattcttactgatgctaacggtcatgctgtcgtccaagaacatgctccaaaatgcaaagttaacatattccagaagaaaaggaagaaaaattaacgccgaacaagggg

SEQ ID NO: 5036 - DNA, 447 bp, Triticum aestivum
  unsure at all n locations
  Clone ID: LIB104-008-Q1-E1-E9
ggtacaggtccggaattcccgggccgacggggccatcagcgccttcgtctccggcgccaccgtttatggctacagaggaaagagcattaagtctgccctcatcggtggttctagcctggcattcacatctgccatcctggacgttggtggtaatactaccagagtggacaatggaaaagcgtaccatgcatacacaacggaaaagaagcccgagcctgcgcattgatcaaggttgtctacttgtagcacaaatcatgcaaaccagctcggtgaatttttgagctgatgcgtgctgttatgtctgttttgctgatgcacctagttcctttgcaaagctgtagtaacttgttttgctcgagggcaatacaacagacctggaataaatatcttgctttattttgcttagaaaaaaannnannnnnttanaaaaaaaaaaaaaggggccgc

SEQ ID NO: 5037 - DNA, 403 bp, Triticum aestivum
  Clone ID: LIB104-008-Q1-E1-F11
aattcccgggccgacgggaacatgtaccagtttgtgattgcttgtaaagtaaagcccataaacacccaaaacgggtaatataatagcatggaacaatcaaaaaaaaaaaaaaaaaaaaaaaaaaaaaaaaaaaaaaaaaaaaaaaaataaacaaaaaaaaaaaaacaatcaaaaaaaaaaaaaaaaaaaaaaatcaacaaaaaaaaaaaaaaaaaaataaaaaaaataaaaaaaaaaaataagggctacccaaattgactcaactttaaattcctctgattaatacatcctgcgctccttacataatactccaaatctattaacaacactgtcattgaaaaaatgtatcataggaaaacacctgcatttcgaaaacttaaacccattttaaaaaccacccttt

SEQ ID NO: 5038 - DNA, 365 bp, Triticum aestivum
  Clone ID: LIB104-008-Q1-E1-F12
ccgggccgacgggaacacaataaaaaaccaaggcttaaccgcagttcgtgtgttgcttatattatgtgttgctattatattaccattattaagtgagggaggaattgattagtgccagtgtttgtttttgttctgtttgtcgtggtacgaggaaagattaccaagtagataaggtctagtagcagtttggctgtacctaatcagtacccttatttcattccgactagtaagtaaaaacttgttttttcctcaaaaaaaaaaaaaaaaaaaaaaaaaaaaaaaaaaaaaaaaaaaaaaaaaaaaaaaaaaaaaagcgggcgctctaaaggatccaaccttaggtacccatctatgctacatcaaaa

SEQ ID NO: 5039 - DNA, 350 bp, Triticum aestivum
  Clone ID: LIB104-008-Q1-E1-F5
cgggtcgacggggacggccagatcaactacgaggagttcgtcaaggtgatgatggccaagtgatccagccgatgttcatgtccggtggtattattatttttaccggggaggaggaaattgtgcattgcatattagtagtaaggaatgcggctctcgtttccttgtctttgccccgaaccagaagaagcgtactagtagacgtagttgctgaagagcactcatggaatcctcctcccctgctgctaccctgtctctctcccgtgtgtcattgaaacatctttctttctgtgtgaaaaaacaagaaaaattaaaaggatcaaaccaagctcttcaaaagcattaaggcaaag

SEQ ID NO: 5040 - DNA, 185 bp, Triticum aestivum
  Clone ID: LIB104-008-Q1-E1-F6
gacgggttccaaaaaaataataaaaagaattcaaaaaagtaaaaaaagaaaaatgaataagcagcagctccatgtgaatgaaccatgcggcagctctagaggatcagatcgtacgtcgtcgtgcatgcgacgtaatagcgcttcaatggcgcccgttatactcattccacagggcgtcattttac

SEQ ID NO: 5041 - DNA, 402 bp, Triticum aestivum
  Clone ID: LIB104-008-Q1-E1-F9
attcccgggtcgacgggggattgatgggaccacaaaaaaaaaaaaaaaaaaaaaaaaaaaaaaaaaaaaaaaaaaaaaaaaaaaaaaaaaaaaaaaaaaaaaaaaaaaaaaaaaaaaaaaaaaaaaaaaaaaaaaaaaaaaaaaaaaaaaaaaaagcggccgcccaaaaggttcaaaccttacttacgcttgcatgcaacttcaaacctcttcaaaattgtcaccaaaattcatttcactggccttctttttaaaacttcttaacgggaaaaaccctggctttacccaatttaatccccttgcacaaaatccccttttcccaagctggcttaataccaaaaaggcccgcacctttcgcccttcccaaaatttgcccaccctaaatggcaaatgggaaccccc

SEQ ID NO: 5042 - DNA, 377 bp, Triticum aestivum
  Clone ID: LIB104-008-Q1-E1-G11
attcccgggccgacttccaccaaaacgatatccatcatctcatcgaaagacgggacacctttgcctctatcactttcaaaatggaatcaggagtcataggaagcaaagtaatatttttatccttatgaacaagagtatagtgattgtttttaccatggtgtacagaatttttatcaaatggccatggtctaccaagtaataaggaacatgcttgcataggtaccacatcacaatcaacataatcagcatatgtaaagatactaaaatgcacacgaacagtacgtgttaccttaaccttgccgctgttgttgaaccattggatgtagtaaggatgtggatgtggtcttgtggtgagagaaagcttctccaccatctcc

SEQ ID NO: 5043 - DNA, 374 bp, Triticum aestivum
  Clone ID: LIB104-008-Q1-E1-G9
aattcccgggtcgacgggaacaccatctgcgtcgccgccatcctcggctccacactcaacggcgagttcgaggacgtcaagatgctcaacgacctcctcgtcgccaagaatgcagagacagggtgggacacgccgattcacgtggacgcggccagcggcgggttcatcgcgcccttcatctacccggagctggagtgggacttccggctgccgctggtgaagagcatcaacgtcagcggccacaagtacggcctcgtctatgccggcgtcgggtggatcatttggaggaacaaggaggacctgcccgacgagctcatcttccacatcaactacctcggcgccgaccaaccaaccttcacgctcaacttctccaa

SEQ ID NO: 5044 - DNA, 373 bp, Triticum aestivum
  Clone ID: LIB104-008-Q1-E1-H11
aattcccgggccgacgggggatgaatgtggtaaactaaaaatcaaagactctaatcatacaagacgctccaagaaaaacacatatcatgtggtgaataaaaatatagcctcaagtaaagttaccgatggacgaagacgaaagaggggatgcctcccggggcatacccaagcttaggcttttcgttgtcctttaattttaccttggggtgccttgggcatctccaagcttaggctcttgccactccttattccataatccatcaaatctttacccaaaacttgaaaacttcacaacacaaaactcaacagaaaatctcatgagctccattagtataagaaaacaaaccaccacttaaggtactgttatgaactc

SEQ ID NO: 5045 - DNA, 354 bp, Triticum aestivum
  Clone ID: LIB104-008-Q1-E1-H5
aattcccgggtcgacgggatagcatacacgtatggtgaaccgttctgtaatgatgttggagcatgaggtatttattgattgtcttccttatgagtggtggcctgggacgagcgatggtcttttcctaccaatctatccccctaggagcatgcgcgtagtactttgtttcaatgactaatagatttttgcaataagtatgtcagttctttatgactaatgttgagtccatggattatacgcactctcacccttccatcattgctagcctctctagtaccgggcaactttcgccggtaccataaacccaccatataccttcctcaaaacagccactatacctacctatcacggaat

SEQ ID NO: 5046 - DNA, 412 bp, Triticum aestivum
  unsure at all n locations
  Clone ID: LIB104-009-Q1-E1-A4
gggtcgacgcggagaagaagaagaccagcgagaacgtcaaggtcatctacgcccgcgccaagcagtacgccgaggagtacgatgcccaggacaaggagttggttcagcttaagcgtgaggcccggatgaagggtgggttctatgtcagtcctgaggctaagctgctgtttgttgtcagaatcagaggtatcaatgccatgcacccaaagaccaagaagatcttgcagctgttgcgtttgagacagatattcaatggagtgttcctgaaggttaacaaggccaccatcaacatgctccgcanggtcgagccatatgttgcatatgggtacccgaacctgaagagtgtgagggagttgatctacaaaagaggttatggaaagctcaacaagcaaaggattcctctggacaacaa

SEQ ID NO: 5047 - DNA, 396 bp, Triticum aestivum
  Clone ID: LIB104-009-Q1-E1-A6
attcccgggtcgacgggggcggcaaccctggacctcgacttcgacgacatccagcgcgaccgcgagtgcgtcatgtgcctgagcgaggagatgtcggtggtgttcctcccctgtgcccaccaggtggtctgcgccaagtgcaacgacctccacgacaagcaggggatgaaggagtgcccgtcgtgccggaccctcatccagcgcagggtctgcgcccgcaccgtgggctgctgagtgagaagagagagattttgcgttcgcgtcgccgtcgctataccgtttttccttttctttttgatgattgcccagcttgaatttgatggagattggaaaaaagaataacgagtgtcggtcggacgaataacgcttggtcgagacatcgtacaccccccaaag

SEQ ID NO: 5048 - DNA, 409 bp, Triticum aestivum
  Clone ID: LIB104-009-Q1-E1-A8
attcccgggtcgacgggggacggcacagatggcgagcgacggcgcggtgaccacgcccgcgaaggtgaccccgaagaaggccaacctccttgacccccactccatcaaacacctcctcgacgagaccgtcgccgaggtcgtgaagggcaagggctatgtggagaacacgcggctgggcaactggaagctcctgatcgggacggccgtgatcgccatcgcgctcctcgcgcagttctacccgaagaagttcccgcagaaccgcgagttcctgctcggttgcatcgcgctgtatgtggtgatgaacgtggtgctactgatccttagctataccaaggaaaaggatgccatcatcttcacccaccctcctgctggttctttcaataacactggccttgttatatcttcaaag

SEQ ID NO: 5049 - DNA, 428 bp, Triticum aestivum
  unsure at all n locations
  Clone ID: LIB104-009-Q1-E1-A9
taccggtctttaattcacgggtcgacggggaatacaacttggaactcctgcaatagagaagacaacactaaaggtaattgtgtgaggtgttagttttaggtgcctcgtccttgcacaagaggaaatagtgcataacacttgatgggttctcacacacttctctcatctcatttttggtggcaaatagtactaagtttttcttgtcgctcatcatggaggcactcaattttggcttgtggcactcactctatttgtggtggctcgctttctcacttttctctccacgatgggtggcttgcttgtcggcgatcacttgacttggtgacatangtcgtagcacgtactcctttcccttcatcttgaagctatagtgattggttcgcccattgtagatgacgcattggtcaaatttccatgatcgtccaaga

SEQ ID NO: 5050 - DNA, 441 bp, Triticum aestivum
  Clone ID: LIB104-009-Q1-E1-B12
acgctgtcggtgccggtccagaattcccgggtcgacgggcggatgcgattcctcatgcaaatagttataacatagggtgatatagaactagctccaattcatcaatgtaatgtaggcatgtattccgtaaatagtcatacatgcttatggaaaagaacttgcatcacatcttttgtcctaccctcccatggcaacggggtcctagtggaaactaagggatattaagtcctacttttaatagagaactggaccaaagcattaacacatagtgaatacatgaactcctcaaactacggtcatcaccgagaagtatcccgattattgtcacttcggggttgtcggattataacacataataggtgactatagacttgcaagataggatcaagaacaaacatatattcatgaaaacataataggttcagatctgaaatcatgcca

SEQ ID NO: 5051 - DNA, 421 bp, Triticum aestivum
  unsure at all n locations
  Clone ID: LIB104-009-Q1-E1-B6
attcccgggccgaccttgaactttatgttcatgcccatggacacgatgtcgatcctatcatgaaacttcttgtaataataactattttcttgatataatatccattggtatcggtgaattgatcctttgcaattgtggttccgaccatatgttcttctttgattccatatggaacactgctacgatagcataggtatgactatcttgattctgtcataaaatcgtcatcgatgtacatgcatgatagaaaacgtgacctactgtgacaaacacgtatcatcacggaagtgtatttttttgtagtggaagaggtagcacacgtctccggggtgtgggccccctcatagacggtgccgccgcaggcacctagaggggggaaatagccgcatcaggtctacgcggagggatcntgctatgggtt

SEQ ID NO: 5052 - DNA, 384 bp, Triticum aestivum
  Clone ID: LIB104-009-Q1-E1-C3
gggtcgacgcgctcgacgagcagatccgtgatcatggcaggctcgtcagctgggcaccgcaggtggaggtgctcgcccaccctgcggtaggcgccttcatcacgcacagcggctggaactccacggtggaagccgtgtcggagggcgtgccgatgatatgcctcccgttgcacggagaccagttcagcaacgccaggtacgtgtgcgatgtctggaaggtgggagtggagatcgaagcgtcatcagcggctgggcagaacctggagagagggaagatcaaggctgccatcgacaagattgtgcacgacaaagggattagagagaggatggatgccttcaaattagctgcagatgaagcagttaactcccaaactgaggtgaaag

SEQ ID NO: 5053 - DNA, 395 bp, Triticum aestivum
  Clone ID: LIB104-009-Q1-E1-C5
aattcccgggtcgacgggttggatgctatgatcaatttgatgcttgataattgttttgagatatggatgtagtgatattaaagttatgctagttgggtgattatgaatttaaagaatgcttgtgttgaagtttgtgattcccgtagcatgcatgtatggtgaaccgctttgtgatgaagtcggagcacaattttatttattgattgtcttccttatgagtggcggtcggggacgagcgatggccttttcctaccaatctatccccctaggagcatgcgcgtagtgctttggtctttgatgacttctagatttttgcaacaagtatatgagttcttttgactaatgttgagtccatggattatacgcacttttacctttccatcattgctagcctc

SEQ ID NO: 5054 - DNA, 401 bp, Triticum aestivum
  Clone ID: LIB104-009-Q1-E1-C6
attcccgggtcgacgggagagaaaatagagtccaagtctctcacgttctggattcagattcggactgcacagacatacctgactcaaaacgccaacaactttttcatacggactccgaattgggtgattctttttttgttggaaactagatttcgtgctctttccaacacaattggattcacctttaaattcgtccggagcattgagttatggtcgaaacaatctgacgttgcaccagaatccgagtcaaactacaagtccaaaggtgttgcatcacctccacttgggcccatgtgccttgtacgacctagggttggttttaggctgccttgggacgtcctcccacctccttggacgccaccccttgttcctatataagtagatccatctagtagcttttt

SEQ ID NO: 5055 - DNA, 428 bp, Triticum aestivum
  Clone ID: LIB104-009-Q1-E1-C7
gtacaggtctagaattcccgggccgacgggggtgaagaccccatttttggaagatatgatggcaaggaatcacacctttgttgacggaagagtgctgtctttgcaggatggagtagccatcgctctgagaatcctgaactctggtgattcacccgttaccataggatcctgtattggtgtgaacgagccaactgcctcactagtaactcagagttttgttaaggctatgtttgagcgagcaatgccccatttgcgttggtcatacacttcccagaaaatggagaagatgaagcgcaagtttcacaaggtccatggcatgcccaactgctgtggtgttgtacatacaactcgcatcacatttggatcacaaaaccgtgagcatgtggagaatgaaggcatactcatgcaagccgtccttgatcctgata

SEQ ID NO: 5056 - DNA, 413 bp, Triticum aestivum
  Clone ID: LIB104-009-Q1-E1-D6
attcccgggtcgacgggcatgagaatttggagctcgactcgaagacgcgagcgtccgagctttctgtggcccttaaaactgccatatccgccaaggccgaagcccagaaggccctccaggaattggatgcggtgaaaaagacagcggcgagtaaggcattctctatggaaagcagacatataaaagtaaactacttgttacttacccgaatccggagctctccaggggcattcgcagatcttccccgcagcgtatccgatgccgccgcattctaccgagccacggaaggcaccttgacggagaaggtgttctggtctcagtacgctgaggccggacaccctgtgcccttgagcgaccagctgaagcagctggtcgagctccacaaggcggccaaacaggccctgaagggtttc

SEQ ID NO: 5057 - DNA, 428 bp, Triticum aestivum
  Clone ID: LIB104-009-Q1-E1-D7
cccgggtcgacggggaaccttggaagcagcccctcccaaaggacgatgacactattgtcattgagatctcacaccaaggccaggtgaccatgctagcaaacgaaccctgcaagtcaatgagcctcagtgacccgttgtcgtcacacggccacaacgaccacagtgacgaacacaagaacgacgtggatgacgaggagtgggaggatggcaggaggaagtttggggctgcggagaccttcaagctccctgatgagatcgacattgctcatctcagctgagctgcatatccattcttatgacaaagatcatatcttgccggttcacaatatttgtccagtaaagtgatatcactatatgcaaatagcttcatgcaaaaccctgtatagctggagtttagtgaaccaagcgcggaacaactaattttaatt

SEQ ID NO: 5058 - DNA, 305 bp, Triticum aestivum
  Clone ID: LIB104-009-Q1-E1-D8
aattcccgggccgacgggaaaaaggagaagattcaggtctcaggtgggtgagatcgacggggaagaagaagatgcaacacaattatatctgggaatatagaattgtactacgtagtagtttaccgtgctgctttcttttcttttttgtgggtagatctgatgtctctacgtatgatagataccgagtgtatggtggtggttctttccattcttttgggttcgtgggtgccatgtaaatgttggtggatcgattccttatgtttttgcctcctgcggtaaataaaagctaatgcagattcgtgatt

SEQ ID NO: 5059 - DNA, 418 bp, Triticum aestivum
  Clone ID: LIB104-009-Q1-E1-E3
gtcaagaattaccgggtcgacgcgcattgggaccttaaaagagcaattgatgtggacattggagccaatccctctgctgatggtggaggtgatgatgagggtgtccattaccaggccgtgacggtggttgacattgttgacacgttccatcttcatgatcacactgcttttgacaagaagcagtttatctctcacatgatgcgctagatcaagaagctctctgccatgcttgaaagggatgacctagatgttttcaagaagaatgttgagtctgccacatagtatcttcctatcaagctcaatgaccttcaattcattgttggcgatagcatgcatgatgatggcagcgtggtgttcgcctactacaaggagggagctgctgatccaacttacctgtactttgcacatgggctgaaag

SEQ ID NO: 5060 - DNA, 437 bp, Triticum aestivum
  Clone ID: LIB104-009-Q1-E1-E4
gggtcgaggggcttgctaactaaatggcaattggcacatacaattcgtccagttgcttctcgtgggttttcataaccctgctgcgcaaaaatgggatatgcatttgaaatagatgtccgagttattacgtatatcatgatcgatacagaaatcgatcgagttatctgttcctttacccaagaaaaagtatttctattttccatgtccaatcgcagatcccagaatttctacaataaattagataggtagctaagctaatctagttccctatacacgaatctgttgtcattctactgcaacagttgtactgcaatgatgaataccttaaagtaggtataaatagaaagaattttgctaaaatggaaaagggctttctttctaaaaaaagatgcttgctaatttgattaatattaatatcgggagatcgaatgaattta

SEQ ID NO: 5061 - DNA, 416 bp, Triticum aestivum
  Clone ID: LIB104-009-Q1-E1-E6
aattcccgggtcgacgtcgaggtaaaacgaaggaacctacactatcatcaatgctgaagaagaaagttaccgcaaaagataggatttcagggaggcttctaaatggtcgtgctggggacgcaacaataagagaagcttctaatactgaggatatgacctacagggaagcattcccaaatcagtggcagtgaaagcaccctgagtaggtctttcttcataattaacagttttgttttgctgtgctgttgcatgcttgaagtgcttgaagtacgcggggcactgaagctgcttcgaacccgtgcatggaaaatttcagaaaggaaagtcgtagaccatttgtattggcagtcggattgagaatccaaatcagaacaacgcgacagtaaataagcactcgattttgtgaacatgccaag

SEQ ID NO: 5062 - DNA, 416 bp, Triticum aestivum
  unsure at all n locations
  Clone ID: LIB104-009-Q1-E1-E7
attcccgggccgacggagtgtccctgtgctatggagttcatctacgtcgttcttccggtgccgtgtagttcgtgcgatcgaggccccgtcatgttcattaaatactgtacatactgtctagtagcaccgtgtgtgcggcttggcctcgaatctcgatgtaatataagacctatgtaattcgctagcatcaataaagcggttgtttctataccatgttgttgtgtattgccagaagacttgatctccgggctggcaatgcaaggtaaaccggttgctctgagccggggtgccacatccccataaagctaaatgtggtcgcactgagaataactcgattcagtggcaccatgactcgattaacattatattcaagtgggattattatcaggtttaacttgaaaataaaatcanccaag

SEQ ID NO: 5063 - DNA, 436 bp, Triticum aestivum
  Clone ID: LIB104-009-Q1-E1-F3
gggtcgacttccaccaaagcgataaccatcatctcatcgaaagacgggacacctttgcctctatcaagtggtatcagatttccaggttgctcggtgagattttacagtttttcatagtttagatcgagtctgttcttcatacctacagtccacgaaaaagccacaaaaaaaaattagggttagttcatcatatccgaaccaatctgagcctttgcataatctttttagggtttttgctttgttgaatttgcggttgcatcgtcgtgtcaagttgctggtcttagagtctagtcttttagagtttcgagttctggtcataagttgtcacgccgccgccgcaccatcatcatcgccttaccatctaccaccgttgcttatccaccaccgctttgaatccgtatccatataccaacaacgctgccataaaataacggca

SEQ ID NO: 5064 - DNA, 419 bp, Triticum aestivum
  Clone ID: LIB104-009-Q1-E1-F5
aattcccgggccgacgggtcggaatcggtttgactccccttgtagttttttcttttcttgattgcttcttcagatccgacttgtgctagtagcacttgatatcttcttttcacgtacatagcaagcggggatcaaactctgtagcttaccatgatgagtactagtacttcttgataatttggtatgggctagctgactagctcagtcttcacgcggccggttcagacggcgcaacagacacgggtggcttagcttggagcaggcgaccgcgacccaacatgcaacaagagtcacccgagtccgtgctcacgcccggtcccttctccaagtcgcggccggtttgaccaatccattccagtcgtggttgatctctgattttgtgcttgactgtacgcgcgtggattcgatcgacagcgtgt

SEQ ID NO: 5065 - DNA, 419 bp, Triticum aestivum
  Clone ID: LIB104-009-Q1-E1-F7
attcccgggtcgaccagctcctgcagcgtagtgacgccagcgagaatgtcgtcatcgccggcgaaggacttcaggaacgccggctcgtcgcgatggccgacgccgtgaatgcccttgtgagagccctcgcgtgcccgtgagagctcgttcgagggctctgcggcgcaccggggcatctctgctgcggctgcggcttcgtggcgggacctctctagtgcttccgcggccttgatctttgctggctggttatatgtccaccctaaactcctcctaccggtcatggtggaatgacttgacaggaaagaccagttttgtgggtgatgacgagaggaactgtgaagtaattttcgagtgggtagtttttatagcccgatgctaagtgtgaacacgtattagtttgataggtgtgaacagatttg

SEQ ID NO: 5066 - DNA, 379 bp, Triticum aestivum
  Clone ID: LIB104-009-Q1-E1-F8
tcccgggccgacgggatcatgtatgctcctgggaagtgggaagaagcattagacattgaagcgacgctctacactggtcttgttgtatggtagtcagtgctaagtttcttaatgtcatttcatatatttatcctttccattttgagtcgctgaaactgctgagtgatgtgcagtttgctctgttagtcgctctgtcactttcacttttcatattctttgttgtgtagttcctcatactgctctttcttcctgagtctcggaaagaataataaagagccatgtgtaattctaaaaaaaaaaaaaaaaaaaaaaaaaaaaaaaaaaaaaaaaaaaaaattaaaaaaaaaaaaataaaaaaaaaaaaaaaaaaagcggccgc

SEQ ID NO: 5067 - DNA, 379 bp, Triticum aestivum
  Clone ID: LIB104-009-Q1-E1-G1
gggtcgacgggacgctcaagaacgtgaccccggcgctgcacccggagatgatcctggcggcgaccaacaacggcgacatcgtggacgcctaagcaaagcaatgagccacggacaccaaggcgtacgtacgctggtgtttgggggcgcaagatcaataagatggttcggtgaaacggaggatgcttagggacgagggcttgtctttgtgatttgtcagactcgtgtttaattccgatgtttgtctttagttttcttgtgttagcgtattttgttcatgccacctgcccgccatgtgctctgccctgcctctgcctcgcggcagttccatggatgatgaatccttctggaacaagaggagggaataaaaaggttgagttcg

SEQ ID NO: 5068 - DNA, 402 bp, Triticum aestivum
  Clone ID: LIB104-009-Q1-E1-G11
attcacgggtcgacgggacggtttatactatacatctattttgctgatccgacatgccacaggtcccgaggcatcgattcgtggatgtttgtgatattcccatcgtgtgaaaaccaaaggcatgttcatctactagtactactgacgtggaggcagtacctactaaagtactatatttcatatttataaatccttcaatggctgttgagcactacatctactgatccatcaagccatcacgtcaaggcgtgtgccgatctcaacacagagatcaaggaatactacagatacaagatcagatcaacatgggtctccagaccagcgatgacccggacacggattaattaaaccaaccatgatgtggaggaagactcggattggactcggattctgacatctctg

SEQ ID NO: 5069 - DNA, 414 bp, Triticum aestivum
  Clone ID: LIB104-009-Q1-E1-G12
ccggtccagaattcccgggtcgacgggctggcggagaagttcatcgcgaggttccacgcgaagttcttgctggagaagcaggagtcgtaccggaggtaccaggagatgatcgccaggagcatatgaaccacgagatccatgacgacccatcgagggttcatccattgcgccgggcggcttggtgtccggactctgagcatccggagtactacgtgagtacgaatttgatgttgagcagtgagtaattcatggtgcagctcttcgtggccgtgcctcgaaattggagtcgttttcgctgggggcgtgtcgtgtgtcgtgtgtcgtgtgtcgtgtgtgcgtgtgatgatttaatttggtggattcatgtaaggttgggttacggtcgaagcaaaattattcttcgggaggacaaaa

SEQ ID NO: 5070 - DNA, 372 bp, Triticum aestivum
  Clone ID: LIB104-009-Q1-E1-G3
gggtcgacgggctatccgagaaggtctccaagatgcatgcctagtgcagcaacaacgacggaagtcggcaccacatttctcatttctgtcaggtacaccggatgctgatagcaaagcagtgcactgcaagttggagatggtttagcgagtgcatgttcctgtcaagcgtcgttgctgcacgcaggggctggccctgcatggattgatgtatttttacactcaagctcgcaatgtaacaccgagatttgttgttctctagcatctactactatacgtgattgcaacgaacggaccaagacatctgatgaacacttgtcatgtttccctgtcgaacatccttaatatatcaagaagcgttgctgctctgtatct

SEQ ID NO: 5071 - DNA, 396 bp, Triticum aestivum
  Clone ID: LIB104-009-Q1-E1-G6
cccgggccgacggggacgcgaggatagttagttcatcggaagtagtagtagttttcttcattggtacgttaaataaagagtttagtttcgtatttacacaatttaaaatgattgttatggagagaataagaaaaccactccactatatattagtcgtatacacgagtactatatggacgcagcttcattgactttagtgcacttgcctttgggtttatgataggtgggcccaaaatgtggctggcccacctgtcatacagccaaaagcaggtgcagttaagacactggagctcagtccgtactacagtatatatataagctggagcctcagcacttgttctctagggtttgcactctccacactctcgctgcactacatatatatatacacgctgg

SEQ ID NO: 5072 - DNA, 422 bp, Triticum aestivum
  Clone ID: LIB104-009-Q1-E1-G7
aattcccgggtcgacgggggtgcccataaggcaggcttgccggagcaaagggcagtgaactagaggcggatcgttggtcaggctggccgcgccgctgctgctgctgctaattgctctgtaagagtgtacaatatggaaagcgtccttgagttatacagaacgtgccagcttccttttgtgatcggggaaagaggggaatggggatggataacacggaagagcaacgcaatgcatgcatcctatcttcaatagtctgtaaaagtttttggtatgggcactgccggtaagcatgaaatatgttggcacttggcagtcttgtattgttttgatttcgttgtggtttgaggcgagtacttggattaccaacacgaagcaacgggcttgagggagtgcagatacttcgttgatgctcgacgaatgga

SEQ ID NO: 5073 - DNA, 445 bp, Triticum aestivum
  unsure at all n locations
  Clone ID: LIB104-009-Q1-E1-H11
cggtcgaaattcacgggtcgacctccatctcggagttgtggttccatattcatttggttgctgggcggcaggcgaccttcgaggcacggttacttcgaccactttctcctacgacaacataactggatggattactaattgcagcgcataaattatgtttcattagcataaccatcgcataaccaggcatgaatgtcccatcattatcagggtttattctcttcaactatttttgcgctcatgtgctcataaattttattattagagcaaaatcagcatattctcttttactagcacatgcccacaattttttcccattatagccaacccgcatattgtcttttattggcacgtgcaagttatctccagcaataatttgtggagtccctcattctgctcataattctcganacaacctccttattctcaaataacctccttaatt

SEQ ID NO: 5074 - DNA, 436 bp, Triticum aestivum
  Clone ID: LIB104-009-Q1-E1-H5
attcccgggtcgacggggatgacaacacttcctcaaaacaatcataatatgatataacaagatggtatctcgctagccctttctgagaccgcaaaacataaatgcagagcacctttaaagatcaaggactgactagacattgtaattcatggtaaaagagatccagacaagtcatactcaatgtaaactaacagcaatgaatgcaaatgacagtggtgctctccaattggtgctttttaataagaggatgatgaatcaacataaaactaaatagataggcccttcgcagagggaagcaggaatttgtacaggtgccagagctcgggtttgaaataggggtgaataatattttgagcggtatactttcattgtcaacataacaaccaagagatggcgatatcttccatgctatacacattatacgcagttcccaaac

SEQ ID NO: 5075 - DNA, 427 bp, Triticum aestivum
  Clone ID: LIB104-009-Q1-E1-H7
aattcccgggtcgacggggggacacagagttcttctcgcgccaggacccctacgtcatcgtcgagtacgccaacaccaagctccgcacccgcacctgcaccgatgggggaaggaacccgtccttcgacgagaagtttcatataccactcatcgaggggctccgtgagctgagtatcaacgtgtggaacagcaacacaatcaacactgatgacttcattggcagctgcagggtgccactgaacaaggtgctcacgagtggctacgatggttcctcgtggcccctccagacacgccatatgaagtctgctggggaagttaagcttatcatgcactttgatgtctcagcaatgaagaacaagatggcaggtaaaacttctggccagtacgctcctttcgcatacggcgcctcctcagcttcatacccagc

SEQ ID NO: 5076 - DNA, 431 bp, Triticum aestivum
  unsure at all n locations
  Clone ID: LIB104-009-Q1-E1-H9
gtccagaattcacgggtcgacggcgaggttgaaaagctgattggcaggatagtgaagtggctgaagcccggtgggcatattttcatcagggaatcgtgcttccaccagtctggggattccaagaggaaagtgaacccgacgcactaccgggagccgaggttctacaccaaggtgtttaaggaatgccactcctatgaccaagaggggaattcctttgagctttctctggtaacttccaagtgcattggagcttatgtgaaaagcaagaagaaccagaaccagatatgttggctgtgggagaaggtcaagtgcacagaagacaaaggctttcagagattcctgngcaatgtgcagtacaaatccactggaatcttgcgttatgagcgcgtgtttggggaaggttatgttagcaccggtggattcgagaccac

SEQ ID NO: 5077 - DNA, 404 bp, Triticum aestivum
  Clone ID: LIB104-010-Q1-E1-A12
aattcccgggtcgacggggagggccatgcgggccctacggatggtctgatacagcgctcgttgctcattcagtaagccaggatcatcggacacctatgagcaccttcgagagactgagacgacatgaaatggtaaggccacgcttgggagctctggtttgtttcacacctgtattaagatacaggtgtaatttactcgtcatcggaaacaatgcgtaaagtacaggcgtaatgaaaccgagggcccgaggtctataagtaaaaccggcaggttacgcgtgtaatttgagagaccggtgtatattttactagtcgaaatcgaccaaccaagcgcttcgcccgagaccatctgcttttatttacaagcatcagttttacatgcggttttggttgggaaacgacgat

SEQ ID NO: 5078 - DNA, 239 bp, Triticum aestivum
  Clone ID: LIB104-010-Q1-E1-B12
cctatagtgagtcgtattaaattatcgggtctcatgatgtaacaccgaatcatcattgtaatctccatatgtagatttctttgtactcataaatatatatgcttaagtcgttggacatcaactaatcacttagccgctcaggtgaatctattcgtagttcagagtacgggataggaggttagacgtttactgttgacgtggtgtactccatcacctcatgatttatacatgatgtcctc

SEQ ID NO: 5079 - DNA, 192 bp, Triticum aestivum
  Clone ID: LIB104-010-Q1-E1-B4
tagtgagtcgtattaagtgccggatgatatgctgttgtgttttatatgtctatcccatcatatatgtgttgttatttgaattgaattgatttgaacacaaacaggatagagaataactagcaaatgcaaacgatgccgacggcctagccgtctgcataaggccaacgtgagctcccagtagctcgcagttaa

SEQ ID NO: 5080 - DNA, 409 bp, Triticum aestivum
  Clone ID: LIB104-010-Q1-E1-C12
ttcccgggtcgacgggatgacatagtcaacggcgacggcggtagccgcgccactgctggtgctggtggtagcggcggcggtggtggtggctgcggtggtcgcgttccaccggaggccaaccgcagaactcgtgtcgccccttacccgcagccttcgcgaaggtgatggacgcgccggtgctcgtgacgtgcacgcaccgctgcgcttgtaggagagagatcagagcaagaagagagcaaccagcgtgaaaaaaaacattagcaaatcagaattgttgctcgatccccttgttggggtggttacaacttagtgtttagatcatctttgatgacaattgacgccgtcgatctgtttaattgtgttcctttggctggttggtgcttcagtcgcagccaagaattggcgtgga

SEQ ID NO: 5081 - DNA, 399 bp, Triticum aestivum
  Clone ID: LIB104-010-Q1-E1-C4
gagtcgtattaatagaccacgattgccggcatcgagcccgacgaggcgtcggaggtgcgacaaagatgaggaagaagctgggcacccggttccccgcggcacggatcataaagataatgcaagcagatgaggatgttggcaaaattgcactggctgtgcctgttttagtttcgagagcccttgaattgtttctgcaagatttgatcgaccactcatacaaaattactcttcaaagtggtgcaaagacactgaattccttccacctaaagcaatgtgtgaagaggtacagctcttttgacttcctaactgagattgtcaacaaggtgccagatctcggtggcggtgaatctttgtgaaaataaaagaggattacccacaataaaggaaattttcaaatgg

SEQ ID NO: 5082 - DNA, 413 bp, Triticum aestivum
  Clone ID: LIB104-010-Q1-E1-C5
gtaaaggtcaggaattcccgggtcgacgggtttatctgttaattaatgtttgtgccaagtcgaacctatgggataacctacgatgatagttgatttgattctgctgaaaaacagaaactttgcacgcacgaatataattttgttaaatcacaggaacgtaattttgcgttgattcttttttatgctgttcaataaacaaattttccaggacttcctattttggtaggatttttagatttccataagtttgcgttagttacaggttgctacagactgttctgtttttgacagattctgtttttcgtgtgttgtttgcttatttcaatgcatctatggctagtaattcagtatatgaaccataaataagttggagtaggtttaacaccaaaataaataaacaatgagttcattgc

SEQ ID NO: 5083 - DNA, 206 bp, Triticum aestivum
  Clone ID: LIB104-010-Q1-E1-C6
tagtgagtcgtattagccagatcaaaacgcagagacaaccgtggcacagatcctcaagtaattgtgtggaaagctctatggtatgcaggcaaaactacgtgtttggtaaatcagatggaagtgggatcgcgttaatgctcttctagagagtgatctgtacaactttgcgaggagttcatgatatgataagagtttacaaatttcca

SEQ ID NO: 5084 - DNA, 390 bp, Triticum aestivum
  unsure at all n locations
  Clone ID: LIB104-010-Q1-E1-C7
gaattcccgggtcgacgggcacggcaggctgtagcagtggggatcgctagtagggatgccacgctgcaagggcaggatcctgggcgtcccctggcgtcgctgccctgacgaccttgctggaagttctgtggcgtcgctgccctgacgacctcggggaaggaagcgacactgctcgcggacggtctccatgttggtcggcaacaatggcgatgacgttggcgaaccgtgattgtacggggtggatggggggtgctggaagcggaacacggtcagtcaagggaaaagggccttgtgtgatggaggcgtgcgggctgtgcgttcccctggtgaacgaatctgtatcgacnccatcgtactgaacgactcatgtggtacaaatataatactggg

SEQ ID NO: 5085 - DNA, 392 bp, Triticum aestivum
  Clone ID: LIB104-010-Q1-E1-D12
tcaagaagtcccgggtcgacggggcgacatgagctcaagttcaccggcatgcccaactacctcggattcaaggtctaaacgcgcatgcatatgcatgcatgcaacgcctgccccctgtacatgagataccgatcgaggtaaacgtaatgtgtgtacggaacgtgtgatgactgatgcttgcaagatcagcaaaccttcgctgctccgttatcaccttctgttcttttctggagttctcttttccctggtaaatgattaagtgtatgttgtgagttgtgacattgattaactggaaaatgtatcattcagatgcccattaaaaaaaaaaaaaaaaaaaaaaaaaaaaaaaaacaaaaaaacaaaaaaataaaaaaaaacggacacccaaaagg

SEQ ID NO: 5086 - DNA, 436 bp, Triticum aestivum
  unsure at all n locations
  Clone ID: LIB104-010-Q1-E1-D2
ggtcaagaatacccgggtcgacggggctgcgtctacaacaactcatcggcaacaactccagtcaacagcgtccgcctcgtcatttgcgtccacgacactcccgctgtggctgcgggagggaatagaggagaaggcaggaaggcaccagaaggggacgcagtcaccgccctaggtgccgacccatcagagacgcagttgatgatggtgcggcggagaagacgacgaaagcacaagagttcaaattcagtcgtcatcgtccgcttcactcccgctacgactgagggggaatgttagaagtataattatgtttaagttagagataggattggtttaaaccacatgtaacttgtcttgtactccaagtctctatccctcatgatgtactctatattataccctatganggtcagattcaataaaccattattatcaaccc

SEQ ID NO: 5087 - DNA, 420 bp, Triticum aestivum
  Clone ID: LIB104-010-Q1-E1-D3
ggtcaagaattaacgggtcgacgggcccggacatcgtgatagtcgaccccttctacatgcgtgccaagatcttgggcagcgctggggaccggcaagtcgcgagttcttacctcgaaggtgtcattctggcaaaccaagataaggacaacttcctcatgccttactttcccgagtaagtcctcccctcaaccgccccgtaacatatgaattcttagatttcgatcgtttttattttaacattccgtgttttctgcagtgacacacattgcacgctcatcctcctaagccccaaatattccatggccacgtatttcgacccggaccgtcagtcgaacgtagactacacaaatgtcaagaaggttcttgatgatgttctccccggctacgtcaaatatggaggcaccttcaccaggcctaatc

SEQ ID NO: 5088 - DNA, 389 bp, Triticum aestivum
  Clone ID: LIB104-010-Q1-E1-D4
ggtctagaatacccgggtcgacgggaacacggagctagctccactctgaattacgaaaccatgtgacgtgtgctatggcgctcttgggcctcacatgaatgtgtcttgcagtgcatatgtaatgaatgtgactccaaatttgtacagcaaacggtgctgactactgcacaatgacgtctgatcgtctatgtacaccatgtctgtacaatttacaccgtgattaacagcggtacactctcttttgcacatatccagcagagatcaacgaaacgaaggccggcactgttcaaaatttgtacccacttcgaaaagtatagattgattgtatcacatgaaactgtgaaatctgatatatccattcaccactcagtgtgaagtaaagtatgtcc

SEQ ID NO: 5089 - DNA, 175 bp, Triticum aestivum
  Clone ID: LIB104-010-Q1-E1-D6
cctatagtgagtcgtattagtcatgagagcgatcggcgtcatgcaggaccttttcctaaccaagacgtggtaacatcgtacggagtaccgcgcgtaatttttagtttgtttcttcttcaggtggtggatgtccatcatgtctatgagcacaggcttctgggttttgacagagtct

SEQ ID NO: 5090 - DNA, 400 bp, Triticum aestivum
  Clone ID: LIB104-010-Q1-E1-D7
gaattcccgggccgacctccgcggaaaaggtgcatcgcatgatggcggatattgacaccgatggcgacggcttcatcgacttcagcgagttcatctccttctgcaacgccaacccggggctcatgaaggacgtcgccagggtcttctgaatcagttcatttcacctcaaccgtccgatccaggagccgatccatctacgtacggcttcgtaaatcaatttcatgcaactacctactccggtcccgatccagcctcagcttcacctgaggccggccctaattttgtttgatcaattttttgctactagtagtaactagtgatgattactgttgcaccatttacttattttataacgtcacaactttccagcgtttcttttcattctctacctttttgtcga

SEQ ID NO: 5091 - DNA, 320 bp, Triticum aestivum
  Clone ID: LIB104-010-Q1-E1-D8
atagtgagtcgtattataggcagtcaagacttccagctccaccatctcaagctcctgttcccactcccaataatggtctgtgctacaagtgtggacaacgaggtcatcgtgccagggactgcaatcagaatcagaatcaacttgcccttgcagcatcgggccgtggtaacaaacagccccgcagcaacaacgctaagtcctaccgtcgtgctcatgctaaatacgttgatctcaaccaagctcactaccagccagctactgtgatcggtacactcctcgtaaattcagtaccaggaaccggtccgatgtgacacaggtgc

SEQ ID NO: 5092 - DNA, 342 bp, Triticum aestivum
  Clone ID: LIB104-010-Q1-E1-E3
atagtgagtcgtattacgtgatacatcatgatcgtgccatatcaagaacatatagagagagatcgtacagataactactggtatataatctcatccccgatcggtgaattactctctcctcgtcatgcatagcgccggcatgatgaacatggccattcatgtgaacgactccctcgccggcaaggttacttcatgggctcacgagatggtttgtggtggctacagaggcgtgcggtaacggagctcccgatctatgtgatgtcctgggggtttctgtagctcttggacgctttggcatctgaagcttgtcgtgggcgtcaccgaggctaccatgaggtacgg

SEQ ID NO: 5093 - DNA, 392 bp, Triticum aestivum
  Clone ID: LIB104-010-Q1-E1-E4
ccgggtcgacggggcatctctacaaatcttaactccagaaatattaccattctcctcggcattagctagaagagccgccagcccctctgtacatagcaagaataaatatggagagagaggatctccctgcctcaaacctctagtaggtttaaaactctcagtctcttcagtattaaagcgaacccggtactccaccgaagatacacattgcataattaaatttacccagttctcttggaatcccaatttcaacataatatccttcagaaaagaccactctacccggtcgtacgctttgtgcatatccaatttgatggcacacataccctctttaccattccttttttctttattgtatggaaacactcgtacgccactaaaatgttatctgt

SEQ ID NO: 5094 - DNA, 436 bp, Triticum aestivum
  Clone ID: LIB104-010-Q1-E1-E5
gtaaaggtcaggaattcccgggtcgacgggctatgcatatgcatcatgaaaagaatgctttatgtgatggttatatttttgaattccttcatgatgttactgaaaattattatgagagatgaacatatgcttctacatattgcaatattatcaagtttcctctctatgtattgaaaatcttgaagttttgcttattttaccttcctatgctagttgattcttgctctcataaattgtttgttcacaaaatccctatgcataggaagtgggttagacttaaatgtgctagccatatgcttaatgatgctcctgttatgtttcaattcttatcttttatgtgagcatcatcgaaatcatcatgactagctaaaaaggcattaaagaaaagctcttgttgggagacaacccaatatttacccctacttttttaaggttt

SEQ ID NO: 5095 - DNA, 418 bp, Triticum aestivum
  Clone ID: LIB104-010-Q1-E1-E6
ggtacaggtcaggaattcccgggtcgacggggggtataaaccatagagaagttggaatacagtagatattacaacaatatgaatttagaatgagttcacaacagtacctaagtggtgatttattttcttgtactaacggagcttacgagttttctgttaagttttgtgttgtgaagttttcaagtttgggtaaagattcgatggactatggagtaaggagtgccaagagcctaagcttggggatgcccaaggcaccccaaggtaatattcaaggataaccaagcgtctaagcttggggatgccccggatggcatcccctctttcgtcttcgttcatcggtaactttacttggagctatatttttattcaccacatgatatgtgttttgcttggagcgtcattttaatttaatttgttt

SEQ ID NO: 5096 - DNA, 404 bp, Triticum aestivum
  Clone ID: LIB104-010-Q1-E1-E8
aggtaccggtcaggaattcccgggtcgacgggggtgttaaattgcaacacatacgaagttgcgacagcatgtgctttggctatcgaggcggacaagcttatctgtgttgtcgatggccaaatatatgatgagcatggccgagtcaatcgtttcatgtctatcgaggaagcagatatgctcatcagaacacgcgctaagcagagtgaaactgctgcaaattatgtaaaggttgtaggggaggaggacattagttatgcccacaattttcctatcaaagaggagaaagagcaagtatgagttggaagagatttcatcagtgattacactgcatcctttcggaatggtgtgggtttcaataatggaaatggtctgtctggtgagcaagggtttgctattggcggggc

SEQ ID NO: 5097 - DNA, 379 bp, Triticum aestivum
  unsure at all n locations
  Clone ID: LIB104-010-Q1-E1-E9
gtcaagaattcccgggtcgacgggaggtggcacagacatgagtaagcttgagagagtgagaggaattgtgcggtgccactgtgctgtgaggataaggatgtatattaggtggaaaagaaaacaccttcgaattgtagcaagctcgagcttagcccatcttcttgacgtacccataactgtaggtgcttaaagagttttcagcgtgggtggacgcctcaggttgtctacaaaaactaattaggagtactcagtgttttttcgaataaaaacatctgtgttattctcacttttattttaatatattttatatgtttatataaaananaaaaaaaaaggtgagagtttaaaaaaaggaaaaagaaagataggaaaaacaaag

SEQ ID NO: 5098 - DNA, 317 bp, Triticum aestivum
  Clone ID: LIB104-010-Q1-E1-F11
cctatagtgagtcgtattataacgatgtgtgggtcaatgaactcaacatcatggatgttccttactctgcattccttaatcttcattctacatgtataatagcagacacaacagtataattaggacatatatatactgcaggcaatatgaatgacatggggtagatattaatagatcacttatagaacgtagcaactgatgatatatttatcgagctcgcgcagattgtaaagctgcaacaattcattcagttcaatttgtacatcgtaattgtttgaagtgacgctcatgtctaagttccgcataaatatactctt

SEQ ID NO: 5099 - DNA, 400 bp, Triticum aestivum
  unsure at all n locations
  Clone ID: LIB104-010-Q1-E1-F2
ggtcaggaatacccgggtcgaccgggaagcggtcgttcgatgccgagacgccgcggcggcgggagtcggcacgcagcaacgaggcggtcgaggaggcgcggatcaagctgctggagctgcggcaggtgaacaaggtgaaggcgctcgtcggcgccttcgagaccgtcatggacgacaaccaaagccccaccgccgcccgcaagccgcggctcaacctcggcgcctgaactacgagtacattcgatgagcatgaagctcgatcgcgtgcgcctcctcctttatccccgctactctttaatcacccatcaacccaatttgtcgtcgtcgcacacttatctataattacggtatcgcttatattctgcaaggangaagatgatggaggggttatcatcatgat

SEQ ID NO: 5100 - DNA, 402 bp, Triticum aestivum
  Clone ID: LIB104-010-Q1-E1-F3
ggtcaggaattaccgggtcgacgggaggcaccccaaggtaatattcaaggatgtcaaaaagcctaagcttggggatgccccgggaaggcatcccctctttcgtctttgtctatcagtaactttacttgaggctatatttttattcaccacatgatatgtattttgcttggagcatcttgtatgatttgagtcttccctttttagttttccacaatcatccttgctgtacacaccttttgagagagacacgcatgaatcgtgatttattagaatgctctatgtgcttcacttatatcttttgagctaggcaaattttgctctagtgcttcacttatatctttttagagcatggcggtgatttcattttatagaaattgatgaactctcgtacttcacttatat

SEQ ID NO: 5101 - DNA, 420 bp, Triticum aestivum
  unsure at all n locations
  Clone ID: LIB104-010-Q1-E1-F4
ggtcaggaatacccgggtcgacctccgcggacgaggtgcagcgcatgatggcggagatcgacaccgacggtgacggcttcatcgacttcagcgagttcatctccttctgcaacgccaacccggggctcatgaaggacgtcgccaaggtcttctgaatcagttcatttcacctcagccgtccgttccaggagccgatccatctacgtacggcttcgtatatcaatttcatgcaactacctactccggtcccgatccagcctcagcttcacctgaggccggccctaaatttgtttgatcaattcttttgctactagtagtaactagtgatgatcactgttgcatcatttatttatttattttatatatcatcacaagtttcctacaaaaaaaaaaaagganaaaaaaaaaaaaaaacgggcg

SEQ ID NO: 5102 - DNA, 263 bp, Triticum aestivum
  Clone ID: LIB104-010-Q1-E1-F5
cctatagtgagtcgtattacgcggcgcattaaagattgatgcgacgctctacagtggacttgttgtatgatatacagtgcaatatttcttaatgtcaattcatcgagttaacctttccattttgagtcgctgagactgaggagtgatgtgcagtttgctctgttagacgcgtctgtcactttcacttttcatatgctttgttgtgtggatccgcagagtgctctttcctcctgagtctcggcaagaatattagcaagccatgt

SEQ ID NO: 5103 - DNA, 383 bp, Triticum aestivum
  Clone ID: LIB104-010-Q1-E1-F6
gtaaaggtcaggaattcccggctcgacgggcttcctcaaaacagccaccatacctacctattatggcatttccatagccattccgagatatattgccatgcaacttccatcatcatcatatacatgacttgagaattcattgtcttattgatttgcatgatcataagatagctagcatgatgttttcatggcttgtccgttttgtcattgctatgctaaatcattgcatatcccggtacaccaccggaagcattcatatagagtcatatctttgttctagtatcgagttgtaatatcgagttgtaagtaaataaaagtgtgacgatcatcattatagagcattgccccatggaaaaattaaaaaatcaacaaaaagtttccat

SEQ ID NO: 5104 - DNA, 400 bp, Triticum aestivum
  Clone ID: LIB104-010-Q1-E1-F7
aattcccgggtcgacgggccacaatacgacgttctgctgcgtcaagcagccgcctggcggtcagaagggtgcctactacgccatccatcacatgcgggcgatcgtacgggaccatcatcaacttctgctaccgagtaaactcaaagattgggccgcgagcgtgtcggcaatccaggacgcggacctccgacaagaattctttcgcatccagtcggagtttgcggaaatcatccatcaagatgtccttcgtacctcggggcagttctacctcaaaaatcaaccgtccaacagtgacatcgacacaatgctacaaatgcaggctgacaacgaccgttatttcatgactcccacgatagacggcggcttcatccatgctccggtcccttgagtcgagtcgaaa

SEQ ID NO: 5105 - DNA, 355 bp, Triticum aestivum
  Clone ID: LIB104-010-Q1-E1-F8
attcccggctcgacggggtaacgaaccaccacatgtccattaacgaagtgtgggtcagtgaactcatcatcatggtcgttccttactctgcattcgttaagcatcactccacatgtataacagcagatacactcttcatggtaagacatagagttactgcaggcattcagatcgagatggggtagatcttaagaaagcacttacagaatgtaacacctgacgggagacttagcgaactcgcacatattaatgagctggtacacttcactcagttcaatttgtgcatattcatgcctgatctgatgctcatgtccaacttccacataaatacattctttggcgtcattagctttta

SEQ ID NO: 5106 - DNA, 416 bp, Triticum aestivum
  Clone ID: LIB104-010-Q1-E1-G10
tcaagaattcccgggtcgacgggcactataatggagaagtttgtgcttattaaggattatattgatgggttgccttttatcattgcacatgataattttgatagatataatatgcatgtgcttgctgctcctacttgcaattattatgagagaggaactacatctccgcctctttatgtttccaacacgataaaattgcaagaatctgcttatactatgcattggcctttactatgtgtgcatgaattgttcttttatgacatgccgatgcataggaatagagttggacttcgttgttgcatgatatatgtcactttgtgctcactactaaattacaaatcattgttaattaaaattggctttgatataccttgggatctcggtggattcgttacgtgagcactaaatgcctagct

SEQ ID NO: 5107 - DNA, 424 bp, Triticum aestivum
  Clone ID: LIB104-010-Q1-E1-G11
ttcccgggtcgacgggtaacatcaaacaccagaacgaggccggcgtgggcatgaccgactacggcctcgacaggggcggcggccccgggctctgagtgagtgaggctttgtgttgctttgcttgttgtgaactgggctggggggttgctgtagcttgtgtgtgcctgaagctttatgcttccaggatgtgatggtccgagcgatgcggaaacggtactgtaactgcatcatatgtttatggtgtcgatcgccttgggtgatatcatcttcggggtgtactctagaaacaatggtgcttgagctgtcatggtaaaagtaaaacattgcggtgtaatgctgcatttcacatgctggtttagttatgttactttcttgttcgtgtacgccgtggtgctagtgaggtggctcctatgttggctaagat

SEQ ID NO: 5108 - DNA, 372 bp, Triticum aestivum
  Clone ID: LIB104-010-Q1-E1-G3
ggtcaggaatacccgggtcgacgggcggcttcactcactatggtgtggtgaaggctgactacctgatgatcaaaggatgctgtgtcggccccaagaagcgcgtggtgaccctccgccagtccctgctgaagcagacctctcgtctggccctggaggagatcaagctcaagtttgtcgacacctcttccaagttcggccacggtcgcttccagaccacagacgagaagcagaggttctacggcaagctcaaggcttgagctgccgccgcgcatcatcagttatatcattttgtcaaaacgaacatgtgatacttgattacttcccctgcctaagttttgtactagttgatgttttcagaatctggctcatcag

SEQ ID NO: 5109 - DNA, 383 bp, Triticum aestivum
  Clone ID: LIB104-010-Q1-E1-G5
aattcccgggtcgacgggataagtaagcttacatccaggatgatcatgaccataacaagtgcactacattgatgttagtgtgtagagtaggcaaatttgcatgtctcttgctagttgattttactcttctccgaatcataacttgtgatgtgtgcaagtacagttaacaaagaacagcaacataaaagtgtgcaatagtttggatccttctgtgttgaatgatgaaatcatactttagatccttctgtgttgaaagatgaaatcttactttaaaaaaggtaaaaccttaaaatacagttaaagaaaaatgaaaagcccaacaaaaggtgcacaaatttcaattcaaggggcatctgttaaaaaaatccgtaactgggaaaacc

SEQ ID NO: 5110 - DNA, 399 bp, Triticum aestivum
  Clone ID: LIB104-010-Q1-E1-G7
ggtacaggtcaggaattcccgggtcgacggggcttcacaggcttggaatataccggttgcgttcatcagtgttattttacttccaattgtggggaatgctgcagaacatgctagtgcggtcatgttcgcaatgaaagataaattagatctttccctgggagttgcaatagggtcatcaacacaaatgtccatgtttgggataccattttgtgtagtgatagggtggatgatgggccagcccatggacttgaactttcatctcttcgagaccgcaagcctcttaatgacggtactggttgtcgcatttttgttgcaggatgggacttcaaattgcttaaaagggttgatgctgtttctatgctatctgatagtcgctgctagtttctatgtacattccga

SEQ ID NO: 5111 - DNA, 372 bp, Triticum aestivum
  Clone ID: LIB104-010-Q1-E1-G8
cccgggtcgacggggaacgtgctgaccatcttcgaggaggaaggcgggcggccggacgccatcatgatcctgacggtgaagcgcgacaacatctgcagcttcatctcggagaccaaccccgggcacgtacggtcgtgggagaccaaggacagccagctgacgatggtggcggacgacctgaagccgcgggcggtgctgacgtgcccggagaagaagatgatccagcaggtggtgttcgccagctacgggaacccgctggggatctgcggcaactacacgtttggcaactgccacacgcccaaggccaaggagattgtggacaatgcgtgcgtggggaagaggagctgcgtgctggccgtgtcgcacgacgtg

SEQ ID NO: 5112 - DNA, 430 bp, Triticum aestivum
  Clone ID: LIB104-010-Q1-E1-G9
gtccagaattcccgggtcgacggggacggggaggacgaggtgccggcgatgggcggagacaagctgatcctgcgggggctgcagttccacggcttccacggcgtgaagcaggaggagaagaagctgggccagaagttcgtggtcgacgtggacgcctggatggacctcgccgccgccggggactccgacgacatcgcccacaccgtcagctacaccgacatctacaggatagccaagggcgtggtggaaggcccgtcgcggaacctcctggagtcggtggcgcagtcgatcgccggcaccacgctgctcgagtttccccagatctccgccgtccgggtgaaggtcgggaagccccacgtcgcggtgcatggcgtcgtcgactacctcggggtggagatactgaggaggcgcagagaggcatgagcacaag

SEQ ID NO: 5113 - DNA, 397 bp, Triticum aestivum
  Clone ID: LIB104-010-Q1-E1-H1
ggtctagaatacccgggccgacctccgcggaaaaggtgcagcgcatgatggcggagatcgacaccgacggtgacggcttcatcgacttcagcgagttcatctccttctgcaacgccaaccccgggctcatgaaggacgtcgccaaggtcttctgaatcagttcatttcacctcagccgtccgatccaggagccgatccatctacgtacggcttcgtatatcaatttcatgcaactacctactccggtcccgatccagcctcagcttcacctgaggccggccctaattttgtttgatcatttttttgctaccagtagtaactagtgatgatcactgttccatcatttatttattttatatcatcacaagtttcttttctttctctacctttttgtcga

SEQ ID NO: 5114 - DNA, 396 bp, Triticum aestivum
  Clone ID: LIB104-010-Q1-E1-H11
gtccagaattccgggtcgacatctactcctcatccagctccatccagtcggtgcagccacgtcaggcttaccgtgactccggttaatagaccagataagacgggactccggttagtagaccagataagacgggcagcagaagctcagactatatgatcatggtggtaaacggtggtagggttgcagatcagcaacgcagactgcaacccgcaagctgcagtggcagcgtccgaaagagatgcgcggaatgtacataagtagtgcgagcgcgtggaacttttgtctgaagagatgattttttcgtatgtaattgcagaatttgactctcttttttcgtttatctctgcttagccagcagttgatccgtgatctataacggtggcagtatatttatga

SEQ ID NO: 5115 - DNA, 380 bp, Triticum aestivum
  Clone ID: LIB104-010-Q1-E1-H4
cccgggtcgacgggatctcctacagtcagggtatcaaagttatttactcaaatggccagctgggcatggtaagacaacagttatgtaatctctgttgccaactggtcaggtatgtgctggtttatgccctgatgcagtatatcactttcccgttcgtggtcagggtacgatgaaattaggcagaatggcaaaatcagcagcatctactgtgaacacaaggcgaagagaaaagggattgcttcctcgtccggtaactcaattgatttgttttgcttcctgtcttttttttctctatacatgcaaattatttgttctgaaacttttccataagaagaggtacactgtgcaacttggttacgatgtcatagaagtaatgtttg

SEQ ID NO: 5116 - DNA, 409 bp, Triticum aestivum
  Clone ID: LIB104-010-Q1-E1-H5
ggtacaggtcaggaattcccgggtcgacggggacgctgatctcaatctgcccgtccctccacgggcctgcgccgcctccctcactccccgccgcatcgccggcggcctcagctttgcacgctccgatggtgccgagattggtcacttgctagtgctggcggctcaacctgcggaatcgcggcaccgccatggagactccgctgacggtgcagattgtcgagttcaacaccaaggtgtgcctttctgggctccatttccccccggttcattttgggttttcgtgcagtgctgtgaggctgttgctctacatgctggtgttggtggacctgctttgcaggtgatgcaggaggagctgaagaagctggggctcaaggtcaaccaccatgaggccaacatcacgttcctcaag

SEQ ID NO: 5117 - DNA, 406 bp, Triticum aestivum
  Clone ID: LIB104-010-Q1-E1-H7
ggtataggtcaggaattcccgggtcgacgggtgttctacgtggtccagaacagctggagaggtttttgcaagagaacaggggatacacttactcaggacttgaacgcgagttatcattggctgagttgaacggctgcttagttgtggttcataatatttatgacatatctatggacttgtggtttttgacagattttgagaaaggtctttgggtcaagaaatacagcttgccttcacatgttgctaggcttttttggtatccttttctcatgttggatgatgggagaattttcttcagtgggatggattgtctggaaggtatattaagtggtggagagcaaggagagggatttctgcaatgttatgatccaaggaatggcacatgtactgatgaagtaaaactgag

SEQ ID NO: 5118 - DNA, 433 bp, Triticum aestivum
  Clone ID: LIB104-010-Q1-E1-H9
tccagaattcccgggtcgacgggccaggggaggatgatgcttatggggacgaccgcgctgattacaggaaatctgaaccgactacgtacatcaatgctcccttggtaggggttcttgcctacttcgttggcaacccaaaccctggccgtatcagacactgagcataagcactttgccatgtagatagagaagagtgacagaagctataaataggtacacaggaagcaaataggtttgtgtttggatggcactacatgttcataggagtggattgcagagcgtgtgttctaccagtaatgagagattagctttaatgatttctcctttgttttgggtttgcactgaattttgtgtggatgtgtgcaaagtgcaatttgactgcactggtgtagtcacgagtgaagaacacttgcatttttgcagaaatatctat

SEQ ID NO: 5119 - DNA, 398 bp, Triticum aestivum
  unsure at all n locations
  Clone ID: LIB104-011-Q1-E1-A1
taccggtcaagnattcccgggccgactactcattgatcttcgcttatatcttttggagtagtttgtcatttgctctagtgcttaagcacggcggtggttttattttgaagaaatagatgaactctcatgcttcacttatattatttttgagagtcttaaacaacatggtaatttgctttggttataaatttagtcctaatatgaactttcatataaagtgcattgaatactatgagaagtttgattctttatgattgttttgagatatgaagatggtgatattagagtcatgctagtggtgtagttgtgaatttgagagatacttgtgttaaagtttgtgattccggtagcatgcacgtatggtgaatcgttatgtgatgaagtcggagcatgattta

SEQ ID NO: 5120 - DNA, 417 bp, Triticum aestivum
  Clone ID: LIB104-011-Q1-E1-A10
ggtaccagtctagaattcccgggtcgacgggtgggaaagaaaacaactgaggacagagaaacaacttcgttgagagcgaactgaggattgaacttggcaaagatgaagaggctcgagtcaagttgacgagaaatgcaccggatgaaaagggctgaggaacaacgatcggaaaaccaactgcgtgatcctaaagaaaatttttgaaggggaagagaagtaattcaaaacacctacgtcaagattcctcaccagagcgacgaaggggctgaggagtaaaaagaattcctactctccgatatactagactccaaaaatagttttcttctagactcaacaacggccaaactacacgatcaatcaagggggctcctaaggtcggtcgaggctctgttaccaacttgtcatgcccaatatcca

SEQ ID NO: 5121 - DNA, 375 bp, Triticum aestivum
  Clone ID: LIB104-011-Q1-E1-A11
attcccgggtcgactaggggattaagattctctgacactcttagttatgatggcacaaattttgatgtttgggtaattcccatgcttaatccctttagggtcatggacccaaatttagagcgaattgtagatatgggtttttctcctccaaatgatccccaaagattatctctagaggatgataaaaactcttatctcaatgctcaacttctaatgtgctttttgatgctttgagcaatgtagttatatttcaactcatgtcgttctgggatgctcatgagttgtggacaaagcttcaagataaatatggtgtgttcaagatttgtggggatgattgttctccctccacctccggccgtgttgccttctcaactt

SEQ ID NO: 5122 - DNA, 250 bp, Triticum aestivum
  unsure at all n locations
  Clone ID: LIB104-011-Q1-E1-A12
agtgagtcgtattaaaanctataatggcacaaattttgctgtttgggtaattctcaggcttaatcccattggggtcacggcaccaaatttacagcgacttgtagataggggttatttcacatccatatgatccccaaagactatctcgagaggatgataaattctcgtaactcaatgcacaacgtccaacgcgctttctgttgctttgcacaccgtagttagacctcaactcatgtgagactgggatgct

SEQ ID NO: 5123 - DNA, 422 bp, Triticum aestivum
  unsure at all n locations
  Clone ID: LIB104-011-Q1-E1-A2
tcacggtcaagaattcncgggtcgacgggcgctctatcacacataagcctcattatatcttcctcaaaacatccaccatacctacctatcatggcatttccatagccattccgagatatattgccatgcaacttccatcatcatcatatacatgacttgagcatttattgtcatattgctttgcatgatcgtaagatagctagcatgatgttttcatggcttgtccgtttttttgatgtcattgctacgctagatcattgcacatcccggtacaccgccggaggcattcatatagagtcatatctttgttctagtatcgagttgtaatattgagttgtaagtannatanagtgtgatgatcatcattatagagcattgcccctaaaaaaaaaaaanaanaaaaaaaaaaaaaagcggccgct

SEQ ID NO: 5124 - DNA, 190 bp, Triticum aestivum
  Clone ID: LIB104-011-Q1-E1-A4
ggtccgagaattcccgggtcgacggggggcaaaggcgccgtgcagaagggttccaagggcccaaagattggcggtggcggcgggaagcgttgaaagttgattacgccatagacatagagttgtgctgcctagccttgtttcctaacctactagcatagacctttgtcaagttattaccccgccctcctga

SEQ ID NO: 5125 - DNA, 441 bp, Triticum aestivum
  Clone ID: LIB104-011-Q1-E1-B10
gtaccagtccagaattcccgggtcgacggggtcgtggggaacgtgtacagcctgaggagcaagtctgagtgagtgatggatggatcatcaggatgagctatatttgtagggcttattatacccaggctgtattaccacttgccagaatacaatagttagcaggtacaccagttccagctgagctgctgagcaaagctcatcatactatacattttcttcatctacagggttgtttcatgggtgatggctgacatgttgttggtgggcattcttgtacttttggaccagattctttgatgtattttttgatcttctgcttattcttagatatatatacatgtgtatcctgggtctactttctgatcgaggcagtgaatcaaccttggttttttctactgaggttgtgtgcctatggtatgatgaaagctgcattcagaaaat

SEQ ID NO: 5126 - DNA, 412 bp, Triticum aestivum
  Clone ID: LIB104-011-Q1-E1-B12
aattcccgggtcgacggggactctcaatgttactatgtgtcgtttcctaatgatcagtagggatgcctattcggggttcgattcagggtctagtcgcttgttgggggtcttttccattttggcaccgtagtcgggccatgagtgattgtatgatgaatgttatttatgtactttgatgtgacgtggcgagtgtaagccaactatgctattattcccctttatattatatatgtacttgggttgtgttatgattcccgacttgcgacattgctttcaatgcgcctatgtctctaagtcgtgcctcaacacgtgggagacatagccgcatcgagggcgttacaaccggtgaccccgaaactttcccgttggccaaaacaacacttcctatatattattcttcacctccggacca

SEQ ID NO: 5127 - DNA, 404 bp, Triticum aestivum
  Clone ID: LIB104-011-Q1-E1-B7
aattcccgggtcgacgggggcagccagcacaaccgacagttatgctgcgccgaagacttcccagccagagacaccagcggccgaaacaactgatgcctatgccgcgccgagaccgaggctgtggaacaagaagattggccatctccccctgccgcactaagtccaacagtttacccagtttctgagcgatcaaccaaaaaaacttcccctctcatctcacttgaggagctactatgactctatgaccggattttataccccaattttcattgtgtaaccgcttatccacaatgtaccacttatgcaactccgtttgcagtgttattgtattgctatgtaaagagaactcatgtacctgtcatgtaagaaaaaagaaaacaccaaaaaacaaaaaaaagcggccg

SEQ ID NO: 5128 - DNA, 453 bp, Triticum aestivum
  Clone ID: LIB104-011-Q1-E1-B8
gtaccggtctggaattcccgggccgacgggcaaacagtggcttaatgaaattgacaggtatgctagtgaaaatgtgaacaagcttttggtggggaacaagtgcgatctagctgagagcagagtggtttcttacgaggctggcaaggcccttgccgatgagattgggataccattcctggaaaccagtgccaaggatgcaacaaatgtggagaaggcatttatgaccatggctgcagagataaagaacaggatggcaagccaaccggctggaaatgccagcaagcctgccaccgtgcaaatgcggggtcagcctgttgcccagcaaaacggatgctgctcgtcttgatcaacactcaagatcacagtagtgttcttgcaaaactcagttggttgttcttcccctgtaaattaagtgtactactatcatgccgtctgttggaagaagtgtcatgc

SEQ ID NO: 5129 - DNA, 398 bp, Triticum aestivum
  Clone ID: LIB104-011-Q1-E1-B9
attcccgggtcgacggggagcgggtggtgatcgagcagcaggcgcagttcggcaacaagtgggcgaggatcgccacctacctgccgggcaggacggacaacgacgtcaagaacttctggagcacccgccagaagcggctcgccaggctgctgcgcgcgcctctccgcgcccggcccagcaagaccaggagcagcaacaccaaagcgcccgcatcctctctcgagtccgccatgggttcttgccatgatcatgttccgtccgtgggcaactcctccggcggccaaagcttcccggctgcaccgcccatggagcaccaggacaccgcgcgaatctcgcatgatcagatgtgctctggattcctcagtttcgagccattgccgctgcaggcagcagcaccg

SEQ ID NO: 5130 - DNA, 228 bp, Triticum aestivum
  Clone ID: LIB104-011-Q1-E1-C10
aattcccgggtcgacgggattcagcaacacatatacacactgtatggtctctcgggatgatatgtcgccaggtctccacaaagcaaaatattgtaacatgtaccctcacgtatacgagggcacttattcaaacagctactcctatgtaagcacagtataacttgggctctgctcaagtgttgtgatatactattcataaataaataaatatactatacagttgttcag

SEQ ID NO: 5131 - DNA, 404 bp, Triticum aestivum
  Clone ID: LIB104-011-Q1-E1-C11
attcccgggtcgacgggccaactgattttctcctcttgcagttgggttcggtcgatgaagactccaccggctcgctctggcaggacaccctcacaaatggcaccttgtagatgctcgatccttcaatctctggtggatgctccatctgggattgatactcccatcaccgctccctcacgatcggattcggtgaatgtgtttgctccatggcccagaggagcagctctatgtactccggcgcgactccctccaggtgtatcgccgccttttcgctctgttgcagatatttcgccatggatgtcgccgtcgccgctagttggtccttgttgtcaaaccaagactgtatctccaacatcctagctagcttcacagggtcgccgtccgcgatcctcatgtatccgttg

SEQ ID NO: 5132 - DNA, 285 bp, Triticum aestivum
  Clone ID: LIB104-011-Q1-E1-C12
tgctacaccctatagtgagtcgtattagttgggttcggtcgatgaatactccaccggttcgctctggcatgacaccctcacacatggcaccttgttacatgctcgatacttcaatctctggtgggtgctcaatctgggactgatactcctatcatcgctctcgtcacgataggattcgtgatgaatgtgttcgctccatgtttccagtggatcagtctctatgtactccggcgttactccctcgatctgtattgacgcctctttcactctgtttgcacatatttc

SEQ ID NO: 5133 - DNA, 397 bp, Triticum aestivum
  Clone ID: LIB104-011-Q1-E1-C2
ggtccagaatatccgggtcgacacctacgactcctaaggccacatatgtgacaccacaaggtaggacacgtagcaagacaggtacaaatggatcagatttcaaggttgttcgacgaacttgtcgttctacaagtgtaactctacggcatcatatctgctgtggtaaggtggttaaaagattactagcatcacactaattcagatattatgaacaggcctgtatgtatggattgtgatcgactacaccttaaggttgtatcaatatgtgatgactgagacttccctgataacgtgtgtacgttctttatggaaacatctgcaatgtctagccatgaacgttgagactgccttcactgaggttctgactcagatctatcgtgtagtcagcacgaaagcc

SEQ ID NO: 5134 - DNA, 393 bp, Triticum aestivum
  Clone ID: LIB104-011-Q1-E1-C3
gggtcgaccggcaatggaagatgtacgtgtgatatgtcaagtagtggacagataagccaaccactggatgtggttttgagggatttttgcactggggtttgtaaggtgctatgccgcgctgggtttgggatttgaaataaaacgaacggagatgtgccacgctcttaatcacaaaattaactattactgatataacaaagataactcataatgaaaaaaacctacactaaaaagcaagcatcacccacaagtataaccttgtcataaactggaaatgaaaataataaccattaggggccacactaagtgctttcattcaccataccatcaaaagtaaataactcaccctgaatcaggccctttaagtcgcattcaagggctgcattttaaaaa

SEQ ID NO: 5135 - DNA, 447 bp, Triticum aestivum
  Clone ID: LIB104-011-Q1-E1-C6
aggtaccggtcaagaattcccgggtcgacgggttgtctcctcgagtgttggttggtcacagctttggtggaaaaggtttttcctgttcctttttcatcttcttatctgacatgctatgcacttccataactgtccagctacctaattgtgcttgcagtggctttgagtatggtagatcaagctgcaaaaccacttgcccgtcctgtcagggtaagcttaactaccttttccgtgttatatgagtgtggcaataatggaatgccaactattattaattatattttgagctaaatttcttatgtgtattctgttccttgaaggtatgggttcttgatgctactcctggcaaagttcgttctgggctagatggcgaagatcatcccgttgaacttattgatttcctcagaagaatgcctgtgcaggttggccttttagaactatctatgc

SEQ ID NO: 5136 - DNA, 415 bp, Triticum aestivum
  Clone ID: LIB104-011-Q1-E1-C8
ggtaccagtctagaattcccgggccgaccggaaagctgaatgcgtgaggaatcatggatacacagtcgctcatccttggggatgccaacggcatcccattcacagattgtacggatgtcacaatcgtcgaatgctttgggatgccccggttggaaccctaatcgttcttcatcaacatcctatctgtcactatcggttgatcctaagttatgcttcctcagatgatgtttgctattcgtagctctcattttatggtgctttgcatgctgtttgtataggataccaaaactctgaaattattaaatgttagcgaatcttcacatatatgcatagctatgcgataactcattgatcttcacctatctccttctgagtactctgtcatttgctcgattgccccatttagatcttttac

SEQ ID NO: 5137 - DNA, 378 bp, Triticum aestivum
  Clone ID: LIB104-011-Q1-E1-C9
aattcccgggtcgacgggtagaataggcgatgtgcatcacggatatcttgtggagctaagtaggtgtgctcgatgtgcttcacgtatatcgtttgagcaatatacattttctcgaggtgcttcacctagatccttagagagttatagttatgctcgacgtgcttcaattacatcctctagagcatggtggtggatccttttgcagaaacgagtgatcgctcaggcttcacttaaattatttagagagactcataggatcatgggtagatgcttaataataatatgcttggtattcaagatttgtgaaactttcttttgagtgtgttgaatactaggagaaacgattgggatcatgataaatgttttgatatatggaag

SEQ ID NO: 5138 - DNA, 401 bp, Triticum aestivum
  Clone ID: LIB104-011-Q1-E1-D10
gggtcgacgggaacgcaatattaccacaaattctccggttgtggtaacataccgcacatattgcaataacttagtttcgttgcaataaatactaactttgttgcaatacaggcctcatattgcaacaagctgtatcggcatagcaatatggtaccagtattgcgacaaacaaattccgttgtgcgagggccgtcatttcgttgtaatagagactaggtatttcaacagaataactattcgtggcaatattcagaaagatattgcaacatcgatgtgatgttgcattagttacaaatattgttgcaaaaaagtggctaactatagcaacaaaatgcataggcgttgcaatatgatagcgatattgcaaccaacaaattccattgcgcgaagcatccgttttg

SEQ ID NO: 5139 - DNA, 424 bp, Triticum aestivum
  Clone ID: LIB104-011-Q1-E1-D5
ggtaccagtccagaattcccgggccgacggggaggttgagaagctgattggcaggatagtgaagtggctgaagcccggtgggcatattttcatcagggagtcctgcttccaccagtctggggattccaagaggaaagtgaacccgacgcactaccgggagccaaggttttacaccaaggtgtttaaggaatgccactcctatgaccaagatgggaattcctttgagctttctctggtaacttccaagtgcattggagcttatgtgaagagcaagaagaaccagaaccagatatgttggctatgggagaaggtcaagtgcacagaagacaaaggctttcagagattcctggacaatgtgcagtacaaatccactggaatcctgcgttatgagcgcgtgtttggggagggttatgtcagcaccggg

SEQ ID NO: 5140 - DNA, 453 bp, Triticum aestivum
  unsure at all n locations
  Clone ID: LIB104-011-Q1-E1-D6
ggtaccagtcatgaattcccgggccgacggggagtctcaagtcgatacctatgtgcgtgtttttccacggaaattttcaaaactcaaagtagtacatttttgtttgccaagttttagaaagtgggtagaccgaaatcagggatcactctactacttcctctgttcacttttataaggccttgtagacatttcagacagcatgcaaagcaggtcagttgtttgaaacgaattataaaagtgaacgtagggagcggtgactgtacatctctcagtggttggaaacatggaagagcggtacgggcaagctttaaccataagtagcccacactgaggcctgatttcccagcacaaaagttgctcgcaacagagaactgggcggtatccanagacggagcacatgatgaagagtgaacaaaactggcagcggagagtgggaggagaggagaggagagg

SEQ ID NO: 5141 - DNA, 413 bp, Triticum aestivum
  Clone ID: LIB104-011-Q1-E1-E10
aattcccgggccgacggggctcttcaagcacttgaacccgcttggatcacggcgagacagatggaagcaggacgaagagcaataacacgatatgcacgtcgtggtggaaaaatatgggtacgtatatttcccgacaaaccggttacactaagacccactgaaacacgtatgggctcgggaaaggggtcccccgaatattgggtatccgttgttaaacctggtcgtatactttatgaaatggggggagtatctgaaactgtagctagagcagctatctccatagctgccagtaaaatgcccatacgaagtcaatttattcgattagagatatagaaccctaaaaggggtatggaagataaaaaaaaaaatgcccggtttttctttctggaaagacaatatttctttcatccttt

SEQ ID NO: 5142 - DNA, 380 bp, Triticum aestivum
  unsure at all n locations
  Clone ID: LIB104-011-Q1-E1-E5
taccagtctagaattcccgggtcgacgggatgatcagcgaggccgatgtcgatggcgacggccagatcaactacgaggagttcgttaaggtcatgatggccaagtgatcccgccgatgtcccggtggacggtggtattattattttaccggggaggaggaaattgtgctatgcatattagtagtaaggaatgcggctctcgtttccttgtctttgccccaaaccagaagaagcgtactagtagacgtagttgctgaagagcattcatggaatcctcctcccctgctgctaccttgtctctctcccgtgtgtcattgaaacatctttctttctgtgtggcaaaaaaaaaaaanaaaaaaaaaaaaaaaaaccggccgctct

SEQ ID NO: 5143 - DNA, 302 bp, Triticum aestivum
  Clone ID: LIB104-011-Q1-E1-E6
ggtaccagtcaggaattcccgggccgacgggggattaatcaaataatatcatttctaacagttggtctgaaagttactcttcatagcaagtgccagaatttttttccttttctgttcccaccgggtgtgaaactatcttgtagctgtagatatattgattatggaaggctgaagttcgcaattgatgcaagaaaaaaacaaaaaaaaaaaaaaaaaaaaaaaaaaaaaaaaaaaaaaaaaaaaaaaaaaaaagaaacacaaaaagaataagctaaaagattaactctaaggtaatcaaaaat

SEQ ID NO: 5144 - DNA, 448 bp, Triticum aestivum
  unsure at all n locations
  Clone ID: LIB104-011-Q1-E1-E7
gtaccagtcaagaattcccgggccgacggggacacacaatcttcacaacattctttgccttctctcagaaaaatcaccgacattctgccattataccatggaggcctggaggaagacaaccatgtgttgcttgattcttttctgccttatggctacatgtagtgaggtttcatctaccgaaaacatgtgctatcacaaccattggaataaatgccatcctgatcaaaatggaatgtgtcgagatagttgtgtgaaagatggatgggatgatggacaatgccggaacaggtttaaaagactaaagggtgccaagtgcgaatgttaccctaagacttgtgatcattanggaggcaacatgcgactttcttctaccaagttactactatttataaatttacatcggttttaatgattgacgtcaaacatgttgtaacaccaatcatggtga

SEQ ID NO: 5145 - DNA, 247 bp, Triticum aestivum
  Clone ID: LIB104-011-Q1-E1-E8
aattcccgggtcgacctcagctacaacggacaggcaggcaccttgtcacactgcgagaacgccaatgccacctatgttggctaccagcacccagagccatgcatctagacgtacggccaattgggtttcctttttcctcttctaaagttagcgttttctaaacgttttgttggttcctggtgcttaaatataggaccatgaaataattggatttaattcaaaataagtcaattctaatacacacgaa

SEQ ID NO: 5146 - DNA, 425 bp, Triticum aestivum
  Clone ID: LIB104-011-Q1-E1-F1
gggtcgacgggccggactgcgagaaagaattcgagaatgagctggatttgcttggcaggatcaggcaccccaacatagtgtccctcctgggcttctgcgtccatggtggcaatcactacattgtttatgagctcatggagaagggatcattggagacacaactgcatgggccttcacatggatcggccatgagctggcacgtccggatgaagatcgcgctcgacacggccaggggattagagtatcttcatgagcactgcaatccatcggtcatccatagggatctgaaatcgtctaatatactcttggattcagacatcaatgctaagattgcagattttggccttgctgtgacaagtgggaatcttgacaaagggaacctgaagatctctgggaacttgggatatgtagctcctgagtactta

SEQ ID NO: 5147 - DNA, 438 bp, Triticum aestivum
  Clone ID: LIB104-011-Q1-E1-F4
cgggtcgaccggggctcctaaggtcggggaaggctctgattaccaacttgtaacgccctcgatgcggctatagctcccatgtgtcgaggcacgacttagaggcataaccgcattgaaagcaatgtcgcaagttaggcaatcttcacaacatcccatgtaatatagataataaaaggggagatacatagttggcttacactcgccacgtcaatcaaagtacataaatagcattacaacattcaaacactcatggcccgactatggcgccaaaatgaaagataaacccaacatgcgacacggtcccgatcaccccaactgggcaccactactgatcatcagggaaagacacatagtaacggcgtgagtcctcctcgaacttccacttgagctcaagggcgtcatctggaacggaatcatcaggccctgcatctggtttgg

SEQ ID NO: 5148 - DNA, 437 bp, Triticum aestivum
  Clone ID: LIB104-011-Q1-E1-F5
gtaccagtcaagaattcccgggccgacgggtgcgaccaatagtgatggtattgaactacggtcacatctatttaggaatgatgtaagatatttactatttgtcctcagtgcatattttgcatacataatttttttgctaaactttcattgctaagtgtattaattaagtactatacggtgttcttcaacaggactgccgatgacagttgtgcctcaggggatcgagactaaaggtcagatgtcaattgttagcttacggccaagatatcctgcattgcacatgaatgcattcaggatttctagaagcgatgaatgcttaatagtgaaagattggaggaaaattgttaatgatcgcagagaagtactacggggcagcaatgagaagcgcaacccacgattaggagacaggttcatctgcatgccccagtatgatcaat

SEQ ID NO: 5149 - DNA, 188 bp, Triticum aestivum
  Clone ID: LIB104-011-Q1-E1-F7
ggtaccagtctagaattcccgggtcgacggggctatctagttataaaaaaaaaaaaaaaaaaaaaaaaacaaaaaaaaaaaaaaaaaaaatacaacaaaaaaataacaacaagaaagacaaaccggccgctcaaacggttccaagcctacctactcatgcatgtaacgtcctaccgcctcaaaagggt

SEQ ID NO: 5150 - DNA, 375 bp, Triticum aestivum
  Clone ID: LIB104-011-Q1-E1-F8
aattcccgggccgacgggggtcagaagacaactaaagagggacaactcaaaggaacatacggttttctgagttgtggatgcataagttagtatgtcgaacaagttcaacatatttcttccagataacccatgctaaagaggaaggactggcagattcacaatatagaatggagaactcatcgagagcacttttgttgtgatctttcggctcaaaagaacttctgccaagaatggttcatggtatttggcagaatgaaataccacggacctcgaggactatcgcaacagttactaataacctaaaggaactagcagatactaccatcaagaagtacgtagagtgaatctcgggttcaaaaaccaatgagtagaata

SEQ ID NO: 5151 - DNA, 417 bp, Triticum aestivum
  Clone ID: LIB104-011-Q1-E1-F9
gtaccagtccagaattcccgggtcgacgggatatactgtatagctttggatccaaagagagccagaaactggatgcctcctagctgctacagtgatgttacctacatgctatctggagtgtaattcacagatatactgtatagctttgtccgactagaagctgaagtgtaatgttaagtatcgaatgactgaattagagaaaaaaaaaaaaaaaaaaaaaaaaaaaaaaaaaaaaaaaaaaaaaaaaaaaaaaaaaaaaaaaaaaaaaaaaaaaaaaaaaaaaaaaaaaaaaaaaaaaataaaaaaaaaaaaaaaaaaaaaaaaaaaaaaagggggcccccaaagggtttaaaccttaatttcccttgaagggaaatttaaaccccctcaaaagggcccccaaaattcaattcaagg

SEQ ID NO: 5152 - DNA, 433 bp, Triticum aestivum
  Clone ID: LIB104-011-Q1-E1-G1
gggtcgaccctgatataaatactttggttgaatctgatcctttctatggctatgaatctgaaactgttgtggcacatcttacaaaattaaatgatatagctaccctgttcactaatgatgagaaaactcgctactattatatccttaaattatttccattctcattaaagggtgatgctaagatattttttgattctcttgatcctggttgtgtgcgtagtccccaggatttgatttattatgtctctgctaaatatttccctactcagaagaaacaagctgctttaagggacatatatgattttgtgcaaattgaagaagagagtctcccacaatcttgggggaggcttctccaattacttaatgctttgcttgatcatcctctcaagaaaaatgaaatacttgatatcttttataatggactaaccgatgc

SEQ ID NO: 5153 - DNA, 407 bp, Triticum aestivum
  unsure at all n locations
  Clone ID: LIB104-011-Q1-E1-G11
attcncgggtcgacggggcataatattgatcatataatctaatcatagcatgaatattaagacacgagtgattcaaagaaatagtctataatttgacataaagacattaatactcaggcatcccaacaaacaatcctgcctttcaaaatatcaatgctaaagatcgttatccatacaaaatcgtatagttgtaacacccggataattaagctactgtaatcccctgttaatgatgccaggtcatcgcttttactgttgctagaaatcacgttcattcaatatcagttcaaattcaaatttaaaaacaaagtaaaaatttatagttttcaaaatgtcgaaactaaaaaatgcaaaccatgacaaataatccagaggtaataatggtgaagaaaccagattttttaata

SEQ ID NO: 5154 - DNA, 429 bp, Triticum aestivum
  Clone ID: LIB104-011-Q1-E1-G4
gggtcgaccgggttgcataattattagactactcattgagcttcacttatatcttttggagtagtttgtcatttgctctaatgcttcacttatatcgttttagagcatgacggtggttttattttgaagaaatagatgaactcttgtgcttcacttatattattttgagagtctttagaacagcatggtaattttctttggttatgaaactagtcctaatatgatgggcatccaagatgggtataataaaaactttcatataaagtgcattgaatactatgagaagtttgatacttgatgattgttttgagatatgaagatggtgatattagagtcatgctagttgagtagttgtgtatttgagaaatactttgtgtaaagtttgtgattcccatagcatgcatgtatggtgaaccattatgtgatgaa

SEQ ID NO: 5155 - DNA, 181 bp, Triticum aestivum
  Clone ID: LIB104-011-Q1-E1-G7
taccagtctagaattcccgggtcgacggggttagaaattgtaaatatgcattgttgtatcgcgacctgaatgaatgaaataaacgaaataacgctcttgttcaaccgtcaggctccggttcagtactgcaccaagctgttattttttgcctttttgaaaagaagcacgtgtcgctgtgttt

SEQ ID NO: 5156 - DNA, 381 bp, Triticum aestivum
  Clone ID: LIB104-011-Q1-E1-G8
attcccgggccgacgggagcacaaacagaactacaccggacagggtgacgacttgatctaccactccaaggggcacgctctgaacccagggcaaagggactggacaaggtaccagccttgggaaccaaagaaagaagaggccacctgatctgtatgaatggtacctgataatcctcttctatgtttcgcatttggtttggtgtcgcggatctaaaaccgccagtcaccttggtttcatggactggacctgaataatgtactctatctgatactgaatacctgccactgaacaattttaatctctgtggatgtggcaattgagaaactggcgattcggtcgtcggtgtttgcattgaagagtttcttttttctactgatgtc

SEQ ID NO: 5157 - DNA, 436 bp, Triticum aestivum
  Clone ID: LIB104-011-Q1-E1-H6
aattcccgggccgacgggaccgattacaaatctcggtaagaccaaaattattgcaacaggaaccagagagtttgcaagcccatctccgtgagactgagatcccattggtgagatcaaactgattagggtttctggtagtggctatgtcaagtgaactcggtggctccggatagatcaaattggtagggctgagtttgacatttggtttgggacatatgtggatatgagaaagtggtttagggctttggagcatatcactaagcactttgagcaagcaagccattaagaaacacctcatccctttttaatagtattgactttcctaaggactcaatgtgatcttgaatcactaaaatgaaaacgtagagtcttgagcttttgagcttttgccaatcctttgttcttagcatcttgtaagggttccacatcctcttgt

SEQ ID NO: 5158 - DNA, 435 bp, Triticum aestivum
  Clone ID: LIB104-011-Q1-E1-H7
gtaccagtctggaattcccgggccgacgggttgctcaagcactctgacaaggagagccttgcgagaaagaacaaatcaggattcaatgccctgcacatcactgcaaaggaaggccacggagaccctacttgtgccattgtgtgttcctccacttctggcctcctccattaccagtgactaacactacaataaatatgcaaataattagttttgctacactatagtagcaacaatccttgcgtgacaattattgtaccgattacatcatagcaaatcatagcaaagggacaatatgaggggccttcaaactgcagtttgagagacaatctgtttgtcctatggaggtgctcaatggacttaacatcagaatagcctggctttcagaagaaaagatgacagctttattttgttgttgtagtgtgcctattcggaaac

SEQ ID NO: 5159 - DNA, 371 bp, Triticum aestivum
  Clone ID: LIB104-011-Q1-E1-H9
cgggtcgacgggctaaaaaaaaaagagaaaaaataaaaaaaaaaaaataaaaaaaaaaaaaaaaaaaaataaattcagaaaaaaataaaaatacagaagaagaaaaaatttaaaaaaagaaataaatgagaaaaaataaaaaaatataaataaaaaaaataggggccccccagaggtttaaattttattttgtctttcttgcaactttaagacccttaatcgttttccctaaaatataatccttggggtgtttttttaaaacttctaaaggggaaaacccctggttttacccaatttaaccccttttgaaaaaaccccgttttcactaatgtggttttgtctgaatgggcccacattttacccccttccaa

SEQ ID NO: 5160 - DNA, 425 bp, Triticum aestivum
  Clone ID: LIB104-012-Q1-E1-C5
attcccgggtcgacgggaaggcctatgttggatgatattatctcacctgaacaaagtgcctttgtttctggaagaatgataacgaacaatgcactaattgcttttgagtgcattcattatatcaagcaagaaaaagatccaacaaaaagcttatgtgcatacaaactagacctgtcaaaagcatatgatcgggtagactagaacttcttgaggcaagtgatgcaaaagctggggttttgatcatcgatggattgactggattatgacttgtgtcacatcggtgagatgttcggtaagatttaatggaaccctcttggattcatttgcaccgtcgtgtggcctacggcaaggtgatccactctcccctttcgtgtttctgtttgttgctgacgggctttctcaatcctacgacaacgtgtggatgt

SEQ ID NO: 5161 - DNA, 114 bp, Triticum aestivum
  Clone ID: LIB104-012-Q1-E1-D10
gccccaactacaagggtggcacaaaaaaaaaattcggcggctcaaaaggttccagcctaacgaacccttgcatgcaacttacttgccctccaaaattctcgcctagattcagtt

SEQ ID NO: 5162 - DNA, 345 bp, Triticum aestivum
  Clone ID: LIB104-012-Q1-E1-D5
attcccgggtcgacgggaatgcctaaacgcccggcaaattcatcagcaaggaagaaaccataacttggaaccgcggtgcttcaaagtgctaacaagacttggaactccagcaaaggaagattgtacatatgtgactttgtttaggcagtgtagggaggtgctaggcacaaggtttattctgtgcgcaccagtgtatctatgttgatatgttagggtgtgcttatccacactgcactagttggtagccgtgtgcaaaatatgtatagtaccagtggtttggcttgtatgtgtgatacatgtgtgtatcttgactgcttggtaatgtaatggcttggttgcttgctt

SEQ ID NO: 5163 - DNA, 447 bp, Triticum aestivum
  unsure at all n locations
  Clone ID: LIB104-012-Q1-E1-E5
ggtaccgatctaaaattcccgggtcgacaccaacaaacatgtagtatatgatggctcccccgattctgcatcaattttctcactgcatcttggctgtaaacggactgtagcatcgattgttggagagacaggatcttcaaagaactcctttgctgaaactgtaattatgcagtcatcttcagcactcgaactatccactttgataaaagctccagattcttgcctaatctgtttgataataccacctctttttccaattacacctccgacattcgccgcagcacaaagcagacgcaggctaaactcttttgcagagctcacctccctccgttgttggtatatagaaggccaatctcccaccatatcacctttgtatcgtccataaggactaaccataggagtaatccctacaactggtgcagtagaggaactnacaaggcgggatcc

SEQ ID NO: 5164 - DNA, 421 bp, Triticum aestivum
  Clone ID: LIB104-012-Q1-E1-E6
aattcgcgggtcgacggggagaaagaaattagtgcaaacaaatctcacattagttccgttaaccgaccatgcacgccgatcagctattaccggcggtcgtcgccgcggtggccatggcttgcctgctcatcgccggccgggccgacggcctcgaggagtacgccccttctgccgcggtgagcctggagattgagccgctgtccatgaaccagaaccccggggagttcctcccgcgaccggaggtgatgtcgctgccgaccgatctgctctcaaggccagacgtgggtggcgacggtgaggggtacgtcccgcatgtggaggttgtgccagaggtggtgctgcagcccggagaccccctcgccgaggctctcggcggtggctcgtatgcataggagccatcgacagagccggtcacgctcat

SEQ ID NO: 5165 - DNA, 412 bp, Triticum aestivum
  Clone ID: LIB104-012-Q1-E1-F5
ggtaccgatctagaattcccgggtcgacggggcttcgtaaacggtgccctgttttgtagcgactgactacaatggtaggttgcgtacgtccttaatacatcactactaggtgcttatgttacttcgttctgtccggttattagcactcatgtttactttcgcactgagaactgaaaaactgaatgtaaatttagtatggatgccgtgtatgtggaccttgtgttgtaattccgtttaaagcaaaaaaaaaaaaaaaaaaaaaaaaaaaaaaaaaaaaaaaaaaaaaaaaaaaaaaaaaaaaaaaaaggaaaaaaagaaaaaaaaataaccaacacataaaggggtctcccaataggttcaaagctttagtccacggacgggcaacttcataccgctgctaggatgtaaccaa

SEQ ID NO: 5166 - DNA, 446 bp, Triticum aestivum
  Clone ID: LIB104-012-Q1-E1-F7
gtaccgatctagaattcccgggtcgacgggccatgccaagtttcatgattttctggtgagttttggatttgcggatatttccaaatcgagattgcaatgtttcgagccaggacgccgagacggttgaattcatcctcattccttccgtgggacctaaacatgcatcccaaggacacatgtacatttttctagccattttggtgcactaaagcatgtatttgtagtttgtatttgaattatggacattcctataaaactcggctaatgaaacaataaggtcaaatgaaccctgaataatttcaaagttcagcgtgaatctcctgttgctccatgttacgtgtagaagaaaatacaaggctaaaagagggagcgattatcctttcacccacaaggggacacgtttccctatcgaaaccacgacggttcttgtgacaaggctccggttt

SEQ ID NO: 5167 - DNA, 442 bp, Triticum aestivum
  unsure at all n locations
  Clone ID: LIB104-012-Q1-E1-G1
acggtccagaaatcncgggtcgacgggttctgttatgtgcttttataaagtttagaaataaaagtaatgtgccaaggtttgcctttaggatgtttacgatgcttgttggtttgtgtggtgcaggacagaaactttggctgtagtgcgcgattttacatgttttactggaatgtcaaacggttctgattctttttgcactgtctttccatacaaattgtttatttttccaaattttggcagaattttcaagtaacataagtatggttaatgttcagattgttacagactgttctgttttagacagattctgttattgatgcatagtttgcttgttttgatgaaactatcaatttatatcagtgtattaagccatgaaaaatttatactacagtagacatgatgcaaaaacaaaatatgaattggtttgcaacagtacttagag

SEQ ID NO: 5168 - DNA, 444 bp, Triticum aestivum
  Clone ID: LIB104-012-Q1-E1-G5
ggtaccgatctagaattcccgggtcgacgggaccttgggatccgggtggatccattacttgagcactatatgcttagcttaatggctttaaagaaagcgctgccagggagacaacccggaagttttagagagtcatttatttctgttgtgtgcttttgtaaagtttaaaaacaataataacgtgccaaggtttgcctttaggatgtttagattgcttgttggtttgtgcggtgcggaaacagaaactttggctgtagtgcgtgattttacattttttactgaaacgtcaaacggttttaaatttctttgcactgtctttatatacaaattgtttatctttcctaattgtttcataatttttggagtaccagaagtatggtgaatgtttagattactatagactgtcctgtttaagacagattctgtttttaatgcatagtttgc

SEQ ID NO: 5169 - DNA, 445 bp, Triticum aestivum
  Clone ID: LIB104-012-Q1-E1-G7
ggtaccgatctggaattcccgggtcgacgggaaccatccaaggatttgaagcacctaaacctgaagttatttataatgtttgggttcgaggatgaagacaaggtgacaaactatataaggcttgtcatggaacgtgccgtgggcttgaaaagaatcgagttgcatggtagaagcccatgcaatgggtgcgatgccatcgaccttgagtccctgagaagatcccaggcggatgaagctagcaggcatcggattaaggagcaactcagacatggatcttcctcgtccgtggagatagtaatctgctgatggatatggtgaaggaatgataaatttcataaagctgctcgagcgatgactgtacgaagtgcaggcagtcgtaattttaagttcagttattgatagtctggatgaatgttttgtttttgtccaatttacggagtaatta

SEQ ID NO: 5170 - DNA, 445 bp, Triticum aestivum
  Clone ID: LIB104-012-Q1-E1-H3
ccggtcaagaaatcccgggtcgacgggaaggtcacacagaatatggccctcaagctaaggaacaccgacactggcgagctcatcatgcacctggagtgggttaacctccccccaggcatgtcgcggtgatttgatttgatttgcagagggaggccagctattgtctgccttttgtgatcgtaatgttgcttcctctatatatgagctatgaaaataattaagcgatgcctatctcattctttacataacacccaccgtaatgatttgtggatctcaccaggatggtgcgtatataatatgagcaacgtcgtggtgagatccgcagatcatcacagtgggtgctacgtaaggcatgtgatagacttatgctgctgggggtaatgcttgctttcagttttggttctgcatatgttgtatggctattttaatacaaaaaggtatattt

SEQ ID NO: 5171 - DNA, 439 bp, Triticum aestivum
  unsure at all n locations
  Clone ID: LIB104-012-Q1-E1-H5
ggtaccgatncagaattcccgggccgacggggtataagccatggaaaagttataatacagtagctacagtgcaaaaacagaatatgaatgggtttgcaacaatacttagagtagtgatttgcattattatactaacggatcttaccgtgctttctgttgagttttgtgtggatgaagtgatcaaggatcgaggaggtctcgatatgaggagaaggaggagaggcaagagctcaagcttggggatgcccaaggcaccccaagtaaatattcaaggagactcaagcgtctaagcttggggatgccgcggaaggcatcccatctttcgtcaagaagtatcgatatgttttcgtcttcgtttcgttcatgtgatatgtgtaaatcttggagcatcttttgtgcttaattttcatttttcctttatgcaacatgatggtatgag

SEQ ID NO: 5172 - DNA, 440 bp, Triticum aestivum
  Clone ID: LIB104-012-Q1-E1-H7
ggtaccgatctagaattcccgggccgacgggggggaggtcatatgtacaataattgtgcccaaggaggacgcgaaggaaagggctgaacagttttcgaagccagcactaaccttagaagaattgacaagttggtcaaaagataaacttgctccatacaagattccgacgagattgcacgtatgggactctcttcctcggaatgccatgggaaaggttaacaagaaggagcttaagaaattattagaggtgtagccatatttacattgatgtacctatttttcaatcgcacccttctgcgaggcagacatatagtggtgtcagctaataattttgttctgttcgacaataatgataatttagagcaactatagtaaatgtgcaagtaaataatgcacactatcctatgatatcttaaaagcgagaatgtgaaataactaga

SEQ ID NO: 5173 - DNA, 441 bp, Triticum aestivum
  Clone ID: LIB104-013-Q1-E1-A1
taccggtccagaattcccgggtcgacgggctcttattaaggattatgttgatgggttgcattttaccgttgcacatgatgattttgatgaatgtaatatgcatgttcttgctgctcctacttgcaattattatgagagaggaactacatctccacctctctatgtttccaacacgatgaaattgcaagaaactgcttatgctatgtactggccattacttgatgcgcacgaattgttcttgtatgacatgctgatgcataggaagagagttagacttcgtcattgcttgatatatgttgctttgtgctcactactaaatgccaaatcattgttaattaaaattggctttgatataccttgggatccgggtggatccattacttgagcattttatgcctagcttaatggctttaaagaagtgctgccaagggagacaacccg

SEQ ID NO: 5174 - DNA, 375 bp, Triticum aestivum
  Clone ID: LIB104-013-Q1-E1-A10
attcacgggtcgacggcggtcttcagcgaggtctcgaggcataaactcctcaagaacatcaaaaaggtgggcccccgaaccggaaccggcccaaaccaattcgccaccgccaacggcggcaacctcaaaattccgtcggcccgccggtcgcctgtcatcgtcgccccgtgtcccgtgtcgtcgatctaaataagagagtcgtgtgtcgtgtcgtgtcatccccatgtccgtccgatgagatctccgtggttggtttaggagggttttaggtggactcttttggccgctggatctgtgtccggcggccatggttatcttcctgtgtctgctgctatcttactgtttgaatgagatgaactccgctatgaattatcc

SEQ ID NO: 5175 - DNA, 434 bp, Triticum aestivum
  unsure at all n locations
  Clone ID: LIB104-013-Q1-E1-A12
attcacgggtcgacgggttgggcgacggtgaagacatgatcgaaccgaagctagctgataccaaattgttatggtgctgctagaagganggcgcgagaaggccggccgggggccttttgcccatggccgggcaagatggaagggatttccttcttaattcttgcttgattagattgatacatctcctctctttatatagagaggtttacttgactcccaagcaaggcttacttgatccctaagaaagcgacccttatctctaattaaccctaagactaacgggctataccgccagcccaggccattaggcccattacgtactctaacacagtcataagattgtaactagtaagatttttaaaacatcaaaactactgttctttgtagttgttaaaaacacgacatccttcaagttcattaacaatatatgacaa

SEQ ID NO: 5176 - DNA, 454 bp, Triticum aestivum
  Clone ID: LIB104-013-Q1-E1-A2
gtaccggtccagaattcccgggtcgacgggggcaaggacgccgaggaggttctccagccggacgagggcaagggcccgatctccctcatgttcccaatcttcagcgcggcaaccatcgaccagatcttcaccacctcagatacactgtctcttccccatgggcccgctcatgcatggtgaagaccccctgctccgaggtggtgccgtggtcaagaggagaagcacagaatatggatggaggatggggaatacatgcagaaggcggaagctccatgctcagctcagctctcaactacactgctctaagactacttggtgagaatgtcgatgatgagcaagatatgtccgtgccaaaaacaaggaaatggatacatgaccatggtggtgcaatgatgataaaactggaagcaagatgcttggattttttgacaggtcaggtgtaaaccctaccccc

SEQ ID NO: 5177 - DNA, 356 bp, Triticum aestivum
  Clone ID: LIB104-013-Q1-E1-A3
taccggtccagaattcccgggtcgacggggaccaggagccacaagcggtcgatgaccaggagcagtcataggaaactatacttacacgttgacagttacaagaacctacatacatgttcgttcaccacgcttgatgttgctcttgtgtattgctgctgctgcccatcttttttctcatcccacacatgcacgcactggatgttatgcatcttatcgccttggctatcgcaatcctgaattctgcagtaaataacttaaaaaagattcatcacaagcggcctgctcaacaggatcctagcttacgtatgcttgcattcgacgtcatatctcttctagattgtcaccttaattcactt

SEQ ID NO: 5178 - DNA, 406 bp, Triticum aestivum
  Clone ID: LIB104-013-Q1-E1-A4
taccggtccagcattcccgggtcgacgggactgttcagtttttgacagattctgttttcattgtgttgattgcttattttgatgaatctatggctactgaaatagtttatgatccatagataagttggaatacaataggtttaataccaatacaaataaataatgagttcattacagtaccttgaagtggtcttttcttttcttccgctaatggagcttacgagttttctgttgagttttgtgttgtggagttttcaagttttgggtaaagattctatggactatggaatgaggagtggaaaagagcctaatcttggggatacccaatgcaccccaaggtaatattcaaggacaaccaagagcctaatcttggggatgccccggaaggcatcccctccttcgtcct

SEQ ID NO: 5179 - DNA, 418 bp, Triticum aestivum
  Clone ID: LIB104-013-Q1-E1-A5
tacggtccagaattcccgggtcgacgggatgcagaaaaggacacatgcgggctgagaggatttgaagtaatttccaaaatctcacccgtgggtatttatatccctaccctgtcggtgtgaccgagtggaacaactcagtggcaccgagattgcagaatcgcaagcggttgctccaactcagtgtgaccgaagtgttcaaatcggttgcaccgagatgaaaacctagatcaacttagtgaactcggtttgaacgaaatggatgtctcggtcagaccgaaatgcacaaagaggttttggaagtttaagtctatgaagaatcagggactccgagtgctcctcacacagagtggttcgaatctgacttgatcaaactttgtgatgtagcatgaatagagtttgagacgagaaaagcatagat

SEQ ID NO: 5180 - DNA, 295 bp, Triticum aestivum
  Clone ID: LIB104-013-Q1-E1-A6
gtaccggtccagaattcccgggtcgacgggggggttcaacgcggtgccgtacgtggtggcgctcttcagctgcatgctgtggatcttctacgcgctggtcaagaccaactccagcccgctgctcaccatcaacgccttcggctgcgtcgtcgagggcttctacatcctgctctacgtggtgtacgcgcccaaggccgccaagcaacgcgccctcgccttcctccttctcctccaagttgccgcctttgccctcaatggctccgttaacgttctcctcgtgccccaacccaaccgc

SEQ ID NO: 5181 - DNA, 424 bp, Triticum aestivum
  Clone ID: LIB104-013-Q1-E1-A7
taccggtccagaattcacgggtcgacatatctaagacaaagaagatcgccctaaggacattgatcgaccactctgtcgtggaaagttttggtgccggcggcaagacgtgcatcctcacgagggtctacccgaggaatgccgtcggggacaatgcacacctgttcgtcgtcaacaatggcgagtcggacatcaagctcaccaacctgcgtgcatgggagatgaagacccccacgatgaacaagcgtctggggcagtagcaacagcccggcccggtagatcgaggattcagagtagcctagactagccatagctagctagcttgttgatttagttgagattaattaggagaggtccaggtttagtgatgagttgttagaaaggaccggaaatgatccattttgtttcagaaccttttccaaatggc

SEQ ID NO: 5182 - DNA, 437 bp, Triticum aestivum
  Clone ID: LIB104-013-Q1-E1-A8
gccggcagtaccggtccagaattcccgggtcgacggggcaataagcacataacacaagcgaagaaaaagtgaagactttctatcaacaactattataatgatgcctttgatgtagaatatcactgcagttacatttgaacaaatgaaatccctttttaacagatgagttttcgtccgaaaccctgatacttccaaagagattgtctgttttgtatccagtttttgtcataaccctttcaactttttagcacatgctatatgggttaaatgatgataccatgccaactttcaaccttttcagagttcatttgtattgcttttcaattaaagggtcattgagctcaaataatgaactaataccaaaaagaatgaactaatagcaaaaagaatgaagtgaaagccaaaagaatgaactaatagcaaaaacaaagaactaa

SEQ ID NO: 5183 - DNA, 407 bp, Triticum aestivum
  Clone ID: LIB104-013-Q1-E1-B1
gtaccggtccagaattcccgggtcgacgggattattgatgtgcctcatgaaaatgaagatgatgcacttgatgatgatctcgttatgcctattgcttgttgtgatgattatgattgggaagataatgatacttcttatgatcttgaaaatctttttggcacttgcttggaatatgacaattgctatactattggtgctatccatactactaatgatgagagtgattatgcttatgatatgaaaaggcccaagcttggggatgctatgtttgaagaatatgatatttttgagaatatatttgctgcaattaatgtttgtcccaagcttggggatgctacgtttaatgaagatgatatttttagcccccccccccaaagttttgatatgcaaagttgttatgatgatag

SEQ ID NO: 5184 - DNA, 402 bp, Triticum aestivum
  unsure at all n locations
  Clone ID: LIB104-013-Q1-E1-B10
attcacgggtcgacgggaccaagatctgaaattcttgaatgagagagagtcttcacatagttacacaattatttagatactcattgatcttcacttatatcttttggagtagtttgtcgtttgctctagtgcttcacttatatctttttagagcacgacggtggttttattttgtagaaattattgaactctcatgcttcaattatattattttgagagtcctaaaaagcatggtaatttgaatgaaaactatcataggaggtgaattggatgccatgatcaatttgatacttgataattgttttgagatatggaggtagtgatattaaagtcatgctagttgggtgattatgaatttaaagaatgcttgtgtttaagttagcaagtcncgtagcatgcacg

SEQ ID NO: 5185 - DNA, 381 bp, Triticum aestivum
  Clone ID: LIB104-013-Q1-E1-B12
gggacaccctatagtgagtcgtattatttgaactcgggacttcttttgtgttcagtatgcagcattctaaacgacgtcaccaatttccaacatgttctgacatcatttgttgtttttcagtcatttacctaattgtttagagagctaaatgaccatgaaattgaaaatcactagaaaatgaactgtgaaaatgttgaaacttggcatggtatcatcatttcacccgcatagcatgtgcgaaagagtagagagggtcacggcaaaaactggacgcacttcgtgtacaaactggacaatctcattcggagtatcagggtttcggacgagaactcatctattacacgggcactttaatgttttttaaacttatttgaactcggg

SEQ ID NO: 5186 - DNA, 387 bp, Triticum aestivum
  Clone ID: LIB104-013-Q1-E1-B3
ggtaccggtccagaattcccgggtcgacggggagcacaagaaggacggcgagcacaaggagggcaggaaggacaacatcggcgacaagatcagcggcgacggccacagcgacggcaacagcgacggcgaccacaaggagaacagcgaccagaagaagaagaaggacaagaagcacagcgagggccacaaggacgacgacggccacggcaacaacaacagcgacagcgacagcgactgagccagctccggccacgcaccggcagcagcgtgcattctatgcaagatagatgaacgcttgggagaagtgtggcatacatatatcttgcatggtttggaccgtgtggtaccaaatgttcgtaatgcgtgacatgtcgcatggatcctgtg

SEQ ID NO: 5187 - DNA, 83 bp, Triticum aestivum
  Clone ID: LIB104-013-Q1-E1-B4
taccggtccagaattcccgggtcgacggggagcacaacacggagtggcagcaccacgatggcaagaatgatagcatgaacgac

SEQ ID NO: 5188 - DNA, 446 bp, Triticum aestivum
  Clone ID: LIB104-013-Q1-E1-B6
gtaccggtccagaattcccgggtcgacgggcgttgccaacttgattgagctcttgttgatcatctcattgtcattggcctctatcatcaccaaagctcttacttcttcttgtttttgcttttccctcttcctcttctttggtgcctcatgtgcagccctacatcgagccttttgttctggtgtggcttgcatacaactttttattgcccctttgataccagctatgtgttgcttcatcctagtcaccccacctgacatctcctttccacaaagaatgcacttgaatctttgcagatcatctggatcaatcagcacaacaaattcccaagccatgtcatctgattttctcttaagtttggaacttgcaacctctgaagtaccagaatcaggcatctacaaaaatcacaagggcaatagcatgtattatagtattagtattagacgtt

SEQ ID NO: 5189 - DNA, 150 bp, Triticum aestivum
  Clone ID: LIB104-013-Q1-E1-C1
gtaccggtccagaattcccgggtcgacgggcatcaaaaaaaaaaaaaaaaaaaaaaaaaaaaaaaaaaaagaaaaacaaaaagataaaaaaaaaaaataaacaagaatgaaaaagtcataactcatcaaaaaagtcacctaaattcaatt

SEQ ID NO: 5190 - DNA, 409 bp, Triticum aestivum
  Clone ID: LIB104-013-Q1-E1-C10
attcacgggtcgacggggaagataagattaggaaggttcaggagctgaacgcgaaagcgaaggctgctttggagaacggctggtcgtcgtgcatgaatctggacaagctggtccaatccgtcgtctgaaaattagcgcagcatgtcggccctgaataaattctgctgctttcgctcattgatgaacagattggggttgtttcttgcttgcttggaagatcgagagtgaaaaacatatcctatgttgtaagttgcaactgtatctcatgccaactcaataatgagtgggaccgaaaaaaatcatgatggagcaattcaaaaggtcaagtaggatgtcataattgtcatcgaaggatgtttggacctcaaaaaaatcggcggcttcaaaagtatcaaacttaagttccctt

SEQ ID NO: 5191 - DNA, 415 bp, Triticum aestivum
  Clone ID: LIB104-013-Q1-E1-C11
gtagcgtccagaattcacgggtcgacgggtatgtgaacaataaggtcgtccaggctctacatgttttgcatctgtagtcctcgtagacgcgggcgacatctaacttgatcttggattttgcgtattgcttcaatacagttccggtacacaaaaatacgtgatcaataaagccctcctggctctacatgttacatatgtatggcgaatctcccgtatgacacattagcacaggcccacgtcagcctgagacccatatgtcagtgggagcgagaaataagataatgataagcaaaaatgggtgacgcaaagtttcgaacccacaatccccagccaaaatttgcgtgagcaagccaccacactatgggccaaattcgggtaaaatcaggatgaacattcctgtatataaataacgctg

SEQ ID NO: 5192 - DNA, 403 bp, Triticum aestivum
  Clone ID: LIB104-013-Q1-E1-C12
ctcatgggtcgatgggggtccctatagtgagtcgtactattccctgctctcccccctctcgtcgggtaagtcgcaggtatggccaccgggtaatcggttcagatctcgcgctccttgtttcgctgttcttcgtttggttgtaattccaggcgagcgttctgtttgggttgtgctgctccttattacgttgatgtcgatcgaggcctagttccggtggtttgtcctcctctgttccgttgatgttggtattgtcttctgaacctcgctgctttggtttaggtcgcggctaatctattttgctttgacttctgatctgattgggtcctggctaatccatcatgctctgattgcgatatgttttagggtcgtggcttatccatttttatcctaattgctgatttga

SEQ ID NO: 5193 - DNA, 449 bp, Triticum aestivum
  Clone ID: LIB104-013-Q1-E1-C3
ggtaccggtccagaattcccgggtcgacggggatgatcatgttgtccttgacatgacttctatgtgcaagggcatgatattcgtgaacggcgaaggcatgggtcgctactggacgtcattcataactcctggcaaagtcgcttcccaggcagtgtaccatattccacggacatttttgaaatccaagaacaacctattggttgtatttgaggaggagcttggcaagccggaaggcatactcatccagacagtgaggagagatgacatctgcgtgttcatctcggagcacaaccctgcacagataaagccatgggacgagcatggaggccagatcaagctcatagccgaagaccacaacactcggggattcttgaactgccccccgaagaagaccatccaggaggtagtcttttgcaaccttcggaaacccggtggggtcatgcggcaac

SEQ ID NO: 5194 - DNA, 405 bp, Triticum aestivum
  unsure at all n locations
  Clone ID: LIB104-013-Q1-E1-C5
gtacggtccagaattcncgggtcgacgggcaccattggttctgagcgtttccgttgccctgaggtcctcttccagccatccttcattgggatggaagctgcaggtatccatgagaccacctacaactccatcatgaagtgcgacgtggatattaggaaggatctgtacggcaacattgttctcagtggtggtaccactatgttcactggaatcgctgatacgatgagcaaggagatcactgccttggctcctagcagcatgaagattaaagttgttgctcctcctgaaaggaagtgcagtgtctggatcggaggatccatcttggcatctctcagcaccttccagcagatgtggattgcgaaggctgaatacgacgagtctggcccatccatcgtgcacaggaaa

SEQ ID NO: 5195 - DNA, 451 bp, Triticum aestivum
  Clone ID: LIB104-013-Q1-E1-C6
taccggtccagaattcccgggtcgacacggagcacccagatgtatctatcacccctcacgctcactctatggcctgaaataacctccccgagcctggtaccagcggtttgccgacttccacaccaccattggtttcatcttcacatgttcgattcgtcgttgtttgccctctgccatgacactgacatgagctaccttttcttctatctcctccgacaccatgtttcaccgcatgatcagctctttccactaggcgctacattacatcccagatgttgaggtccgagacacctccaatggcttcttcctgtagcatgccaagtatgtcagccggctacttgatcgaggttgcatggccagtttccagccatcacatccctggtagacacccactccaaggtctctgccaccaccggctcagctgctgctgatgcaagcttctactggacta

SEQ ID NO: 5196 - DNA, 395 bp, Triticum aestivum
  Clone ID: LIB104-013-Q1-E1-C9
attcacgggtcgacggggtgtgtaaggggctgagaaatcatgtgtggaccccaaagtatcaagatatgtatcaaggccagtgttcctgaaatcagtgccattgtcacttctaaggtgctttatcttggcgccatagttgttcattgctcgattggcgaagcgtctgaagacatcctacacttcagtcttgtagaggattatgtgcactcaagtatatctagaataatcatcaacaataacaaagccatagaggcaagcagtagtagtaagagttgagtaatgagtgggaccgaaaagatccatgtggagcagttcgaagggtcgagtggttgtcatgattgtcttcgagggatgtttggccctcgtcatcttccctgcttcacaggcaccgcata

SEQ ID NO: 5197 - DNA, 436 bp, Triticum aestivum
  Clone ID: LIB104-013-Q1-E1-D11
taccggtccagaattcacgggccgacgggaatgatgaaacaggggacggcggcggcgagtggggcgtttaccgggggaggcgatgttcgtgctggcgcaggcgagaggaagatctccagcctaccggcgtacctcgccacggccgtggagggctgccacatcacgggcgacatcgtgcggcgcttcgcggagatggagctctcgccgctgctccgttggctgctgggcttcagagggtccagggagcgcctcctcaccgacgacctcttcatcgccaagctcgccatggagatgggcgtcagcatgatcgccaagaccgctgccgagtacgagaagagacgggagaacttcgtcaaagaaattgacatcgtcatcgctgatgtgggtggggtcgtcattcaagggatggacctttccctcaaggtaagggccttgt

SEQ ID NO: 5198 - DNA, 258 bp, Triticum aestivum
  Clone ID: LIB104-013-Q1-E1-D2
tacgctgacggtaccggtcataaattcccgggtcgacgggggctggcagactcacggcgcctgcccaggttgcgctgtgaacactgacaaggggctaatcagacagaatgtcgtggccatgattatttctcaccaccattgttgcggtggcagccacaatgcaagctgagaccgctctgactacggaggagagctcattgaagactgcgaccccatcaggatacgtgttgacgccaccgtagcagctacacgtgttgt

SEQ ID NO: 5199 - DNA, 451 bp, Triticum aestivum
  Clone ID: LIB104-013-Q1-E1-D3
cgctgccagtaccggtccagaattcccgggtcgaccctgaggacctggacggcttggcggccggcaacaagcaggagcaggtgtcaagcatcgtctcgcaggggcacgaggacggacagccggatgccgccgccggcaacgcggacgctaaggccgagaagccccacaagaaggcgtccggcaagcacaagctccgcagcgactagaagcagtgcgcgtgagcgcgtcactgccacaccgcgtacgtacgtaactacgagctgtcgccccgcccacctctccggcgacgcacgtaggcctccatccagcagcgtctccatcaaattgattaattgcgctttgaattactcttcttcttcctcgcggtactctcttccttgattgtagaaggaacgagtgacgtactaccatacttcggctagttacttaaagccttggttaattttttcct

SEQ ID NO: 5200 - DNA, 324 bp, Triticum aestivum
  Clone ID: LIB104-013-Q1-E1-D4
gtaccggtccagacattcccgggtcgacgggtaagacgagcactggttcacgcgagtgtactcttgcgacgtgggtttttgcaacagtccggaacgctgcacagtgagatgttcctttgagttttgtgtgtcttgctggagttatgcattgtgttatctcgaatagctgccgtgctggcatttggatcataatcttaatccgttcgtctgacacaaataaattcaatcacagaataaataaatgcggacgatctataggatcgaagcttacgtacgcgagcatgctaggtcataactcttctacagtgtcacctaatttcaatt

SEQ ID NO: 5201 - DNA, 444 bp, Triticum aestivum
  Clone ID: LIB104-013-Q1-E1-D6
taccggtccagaattcccgggtcgacggggaacagcagcttgacgtgcgcggcggtggggtccatcccggaggcgcagctgaactacccggcgatactggtgccactctccaagaagccgttcaaggcaaagcggacggtgacaaacgtagggccggcgaagtcgatgtacactgctcacctggacgtgcccaattggctcaaggtgaaggtgcagccagaggcgctggagttcacgtcggcgatggagaagaagacattcacggtgaccgtgagcagcaggggaggtgacgccgacgccaacgccgggcagctggtcgaggggagcctacgctgggtgtctgaagatcacgtggtgcggagcccgatcatcgccgacgccagggttgtcccgacatgattctgtcaggcgctccctggacatgcttctctcgcaagccgcatc

SEQ ID NO: 5202 - DNA, 425 bp, Triticum aestivum
  unsure at all n locations
  Clone ID: LIB104-013-Q1-E1-D7
taccggtccagaattcccgggtcgacggggagaatcaacatgatggactgcatctgcccagacgatcgttgcgacggccacaacgaagtgcatctctcaattccaggatcaacatgctggacgaatcctcctttcatgttaagttgcaacagtgcaagcaaacaccatggaggcttctgtagttagggacggtgaatctgcatcaacagtgctggatggaaattgctcgccgtccttcctccataaaccacgtagggaccttgtattagcctccccatctatccgtcaggaagccctgactttccctgctattgctgtcaaaaatgctacccttgtagcacacgaactgaacttaagtatgtcacatggagcttcaggtaacaaatctaaaagaaccaaaattaatgtatggcatgtcnttcgcc

SEQ ID NO: 5203 - DNA, 406 bp, Triticum aestivum
  Clone ID: LIB104-013-Q1-E1-E1
gtaccggtccagaattcccgggtcgacgggaacgctaaactccgaaaaggtgcactgccggagtgtgtgtccgaggtaacactggtcttcttcttcttcttccctcacacggtcccagcggcaggagcaagtgccctatcggtggcagctgctgcacctgcttgcaggtacaattggtcctcgcaaatcatcggatctttcttatcggacgggatggtgatgatcatcacaggtcgtggcatcttcagggtagttgtaagcgtagtgtgacgccgccatgaacttgaccaacgctacgcagcgatcgatgtcgttgtagggcaaagcgatcctggaaacatcgtacacgattctcttcgtcctgtagtttagatcgctttcaaaagtcatgggtagcgtaaccttt

SEQ ID NO: 5204 - DNA, 462 bp, Triticum aestivum
  Clone ID: LIB104-013-Q1-E1-E2
cgctgccagtaccggtccagaattcccgggccgacattcgcccgcaggaaagcaatgagcgcgctttcctatttggggtcgagagtggcactgatggtgaaggtaccaccagtgccgtcctccttggcggacaccttcttggtctctggcggagctgccattgtcttcttacacttgccggtggagctcgatggtgcgtcctcgacggcagcgcagcactccgaagaggtgcacttgccggagtgggcatcagaactcttgccggacttggtcttcttcttccccccgggagcttcaacggcaggtgacttgcgatctgttgcggctgtcgtttcccggtagatcttgtcagcgcagataagagcatccttcttgtcgccagggacagagatgacgcttatcgggcttggaatcttcagcatgttgtatgtgtagtgagaggctgccatgaaactggtgagt

SEQ ID NO: 5205 - DNA, 382 bp, Triticum aestivum
  Clone ID: LIB104-013-Q1-E1-E3
gtaccggtccagaattcccgggtcgacattcgcccgcaggaaagcaatgagcgcgctttcctatttggggtcgagagtggcactgatggtgaaggtaccaccagtgccgtcctccttggcggacaccttcttggtctctggcggagctgccattgtcttcttacacttgccggtggagctcgatggtgcgtcctcgacggcagcgcagcactccgaataggtgcacttgccggagtgggcatcagaactcttgccggacttggtcttcttcttccccccgggagcttcaacggcaggtgacttgcgatctgttgcggctgtcgtttcccggtagatcttgtcagcgcagatcagagcatccttcctgtcgcctctgacagag

SEQ ID NO: 5206 - DNA, 457 bp, Triticum aestivum
  unsure at all n locations
  Clone ID: LIB104-013-Q1-E1-E8
gtaccggtccagaattcncgggtcgacgggggggaagatgggagctctccaatatctgaacttggctgacaataagcttgaagcgaacgacaacaaggggtgggaattcatcacttctttggccaactgcagccaactgcagaaattgatactcagcaacaattcttttggaggacaactaccaggttcaattgtaaacctctcgacaactctccaacagttatacttagatgacactaggatctctgggagtatacccgcagatattggcaatctggttggtctcaacgtggtgttaatagcaaatacttccatatcaggagtgattccggatagcattggtaagctagagaacttgattgagctgggcttgtacaataatacgttgtctggcctcgtaccgtcatctctgggaaaatcttcacaattgaataagttttatgcatacaacaacaac

SEQ ID NO: 5207 - DNA, 453 bp, Triticum aestivum
  unsure at all n locations
  Clone ID: LIB104-013-Q1-E1-F1
gtaccggtccagaattcccgggtcgacgggccatcattcgctttgaagcatccgccgccgaccatgagagctcctctcttcctcatgttcgcttgggggatcgtaggccacaaagttgggcatctagcttgtgggagagagacgcatccatgacagcttctacaaaggtgggagaagcgaggattctagaggagggatctaatgaagaagagagataggagcagagaccactgcaccttatagcactggtgacggcgatagcttgcaacatcaatggccacaactttgcgagttgtgggggagcaaccgagaggggttcgatgttcgatttggacagtcgcagtcggatcagagagcggcggaaggaaggggagcgagcgagcagaagcaaaagaggcnganggggagatggggttcatggcgccggttaaggctggcctccttcttcgcggg

SEQ ID NO: 5208 - DNA, 402 bp, Triticum aestivum
  unsure at all n locations
  Clone ID: LIB104-013-Q1-E1-F10
attcacgggtcgacgggtgattataatactctatgtgcttcacttatatcttttgagctatatagtttttgctctagtgcttcacttatatcttttagagcacggtggtggatttgttttatagaaactattgttctctcatgcttcacttatattattttgagagtcttaaacagcatggtaatttacttaatcctaatatgctaggtattcaagactagtaaaaactttcttatgagtgtgttgaatactaagagaagtttgatgcttgatgattgttttgagatctggaggtagtgatattaaagttgtgctagttgagtagttgtgaatttgagaaatacttgtgttgaagtttgcaagtcncgtagcatgcacgtatggtaaatgttatgtaacaaa

SEQ ID NO: 5209 - DNA, 397 bp, Triticum aestivum
  Clone ID: LIB104-013-Q1-E1-F11
ggtcgacggggataggcactcctggcacacacgctcggcaaaatgaggtcgtgtgcgacgggcgagcgatcaaatatggttagacatacaattgtgctaaaaaatacaattatacatgccaaatcgtttctggtcgtaagtacatcccacatactcagtcccggctaaacgtttcttttagtatgtacattccacacagtcagtccaaggaatacgttttcgttagtatgtacatcccttacagttaatccaagaagtacgtttctgttcgtatatacatcccacacagtcactccaaggaaaacgttcgttcgcaagtacatcacacacaattttccccattaaattgtttgtgatagcattgccattgcacatgatattaacaattttatccttt

SEQ ID NO: 5210 - DNA, 387 bp, Triticum aestivum
  unsure at all n locations
  Clone ID: LIB104-013-Q1-E1-F2
gtaccggtccagaattcncgggtcgacggggaggttgacacgctgaatggccggacactgacctggctaaatcctcgcgggcacatcttcaccagggagtcctgcttccacctgtctggggatcccacgaggaaattgaacccgacgcactaccggcatccaacgttttacaccaaggtgtttaacgaatgccactcctatgaccaagatgggaattcctttgagctctccctggtaacatccaagtgcattggaccctatcttacaagcacgaagatccctaactagatattttcgctataggagaacgtcacgtgcacataacacaaatgccttcacacattcctgtacaatgtccactacaagtccactggaatcctaccttat

SEQ ID NO: 5211 - DNA, 383 bp, Triticum aestivum
  Clone ID: LIB104-013-Q1-E1-F4
gtaccggtccagaattcccgggtcgacggggaagtttaatacttgatgatcattttgagatatgacgatggtgatattagagttgtgctagttgagtaattgtgaatttgagaaatattgtgttgaagtttgcaaatcctgtagcatgcacatatggtaaacgttgtgtgacaaatttgacgcatgaggtgtttctttgattgtcctccttatgagtggcggtcggggacaagctatggtcttttcctaccaatcgatccccctaggagcatgcgcgtagtgcttggtttttgatgacttgtagacttttgcaataagtaagttagttccttaggactaatgttgagtccatggattatacgcactttggccttccatcattg

SEQ ID NO: 5212 - DNA, 416 bp, Triticum aestivum
  unsure at all n locations
  Clone ID: LIB104-013-Q1-E1-F5
tacggtccagaattcncgggtcgacggggggttggcaccggcctcccgtggcccactgttgatgatggcgtccgctgttggaggatgtaggtaggatcccccttagcatcagcttttgtttcctgcgaagaatcatgaatcaccccgtgggggcatgtaaggatctgcaatgcctttgtaccaattttccttgttgtgaaaatttgatgaacgcgcgtcacgctaaggcgcagcctcccctttctttcctcacgatagctttttgctctacgatgacgggtcccgatcccaaggcggctacagccgtcgcgggtatgccaggtcgcgatatcatggtcaaggccaggaggtgcgcggcccgaggtccaataagagaccctgaagcacgatgctcaagagggtccccttagcgccca

SEQ ID NO: 5213 - DNA, 427 bp, Triticum aestivum
  unsure at all n locations
  Clone ID: LIB104-013-Q1-E1-F6
gtaccggtccagaattcncgggtcgacggggctaaccagagagttggtcaggtaaactcagtgggaccgattcgctcatctcagtgagaccgaagtgttacaaaagggaaacagagagtttacattgcaatctcgatgggaccgatcgctcatctcggtaagaccgaaacgttatgaagggaaacagagagattacaatcccatctcggcgagaccgagatccctatcggtgagaccgatttgcctaaggtttgtggcagtggctatgacatttgaaacttggtggcgccggatagaaagaatcggtggggccaagtttgagttttggtttaagtcatatgtgggtgtggaaaggtagttgagggttttggagcatatcactaagcattttgagcaagcaagccattaagcagcaactcatccctcc

SEQ ID NO: 5214 - DNA, 356 bp, Triticum aestivum
  unsure at all n locations
  Clone ID: LIB104-013-Q1-E1-F7
taccggtccgtacattcncgggtcgacgggctaccgtcatgctaagcacatgagatgtaaaacatgataaacatcacatgcaatcaaatagtgacatgatatggccaatatcattttgctcctttgatctccatcttcggggcgctatgatcatcctcgtcaccggcatgacaccatgatgtccatcatcgtgtcttcatgaagttgtcacaccaatgaatacctctacgtacatggctaacgtgtttagcaataaagtatagtaatttacatggcgttattcgatgacacgcaggtcatacacgaattaacacaattcctatggctcctgcctgttgtcatactcatcgacatgc

SEQ ID NO: 5215 - DNA, 365 bp, Triticum aestivum
  Clone ID: LIB104-013-Q1-E1-F8
taccggtccagaattcccgggtcgacggggccctcgacctctccatcgagaggctccaggagatccaggacgagctcgagaaggttaatgaagaagcaagtgataaggttttggaggttgagcagaagtacagtgagattcgcagacctgtctatcttcggaggtgtgacatcatcaaaacaattccagacttttggctgacagcgtttctaagtcatcctcttctcagtgagcttttgactgaagaggatcaaaagatgttcaagtacttggaatctgttgatgttgatgattctaaagatgtcaagtcaggctactccatcactcttaacttctctgagaatccgtactttgaagacagaaag

SEQ ID NO: 5216 - DNA, 331 bp, Triticum aestivum
  Clone ID: LIB104-013-Q1-E1-G4
tacggtcatgaattcacggttcgacgggatgtagacagcttcggcgatggaagtcaggattatggggagattagtacgataatcatgactttgatgcatggataagctagctacatgcgtgcgtgagttggttagtctatgcatggcgtgagttagctggtgaagttgttagctacgtgcatgcatcgcatggatatgggtgcatgtggttgagatattctaggaggtgagtgtccgtgtgtgtacatggatagagtttgttagactccaagaaaaacgaggtacgtagtaggaggtggtgatgggaaagcggccgctctatggggatcca

SEQ ID NO: 5217 - DNA, 445 bp, Triticum aestivum
  Clone ID: LIB104-013-Q1-E1-G5
tacggtcctagaattcccgggtcgacacacctagccggaaggtctatcattgtagtatcttgactgagcaatttgaccatcttctccatgaggattttgagtgacttattctagaagttgttccttatggatcccttgtattccgaagcccgacctttacttgatggctatgttgacgcttttaagcatgatcgcggtatctagtacatcaaggagaacattagaagtggagtgctaagtgtctctcggtcgatcatccagatttttttccttggcctcgctaaggtgaaatctgagaaagtgttgtcttcctttgcggctgcatcctccatcgttattcatcattgtagtatctatttgtatcaacattcttggcttagatgttggcaaaccttgatgaatatggagttcctcaagttcttgagagcacacgcatgcactaagt

SEQ ID NO: 5218 - DNA, 400 bp, Triticum aestivum
  unsure at all n locations
  Clone ID: LIB104-013-Q1-E1-G6
acggtccagaattcccgggtcgacgggcagaatccaaacggaatgaaaccttcgtgagagttatttttggaacaaacgcaatccaggagacttggagtggatgtcaggtgaagctcgcggtggttgtcaaggtgatgggtcgcacggggtcgaggggtcaggtgacccaggtgagagtcaagttccttgatgaccagaaccgtctcatcatgangaacgtcaaggggcccgtccgtgagggcgacatcctcaccctgctcgagtccgagcgggaagccaggaggctgcgctaagaaatttcttcctttatacctgtctgtctttggaagaagaatgatgtactgttgccttcttactctaacgctttcgttctttgcctagctatgtggaagtgtaatga

SEQ ID NO: 5219 - DNA, 411 bp, Triticum aestivum
  Clone ID: LIB104-013-Q1-E1-G7
taccggtcctacattcccgggtcgacgggggcaccataccagggactgtgtccgacaaggagtggttgatggctacggagcaaaggttccaagcctggcctcgcgtcacctgcccgccggtcagcatgaacctcatcagccgccagaacttcattgtcaaagacctcaacccctgaggaccaagactcttgaagtttgcggtcggttggaacctttacactgatggcgatgcctgttgctaaatctacctatatgtgctggctgtactctcgaggctattttgtctgtctcaataattaacacaacactattgtgtaaggcgccgtggctatatttcttctgaacaacacaatacaacctgaagcacatttgctttggactttttgtcatcttttgtttgcataaacatat

SEQ ID NO: 5220 - DNA, 383 bp, Triticum aestivum
  Clone ID: LIB104-013-Q1-E1-G8
gtaccggtctagaattcccgggtcgacgggggagcaaatgtaggtgccaatgctggtcttggtggcggtgctggtgctggtgctggtgctggtgcgaatgggggcgctaacattggagctggcattggagcaaatgtaggtgccaatgccggtcttggtgtcggtgcacataaaggtattggtgctggtgctggtcttggagcaaatgtacgtattggagcaaatgtaggtgccaatgatggtcttggtggcggtgcaaacggtggtgctggtgttggtgcgaatggaggcgctaacgttggatttggcattggagcaaatgtaggtgccaatgccggtcttggtgtcggtgcacataaaggtattggtgttggtggtgtttt

SEQ ID NO: 5221 - DNA, 435 bp, Triticum aestivum
  Clone ID: LIB104-013-Q1-E1-H1
acgctgacggtaccggtccagaattcccgggtcgacggggagcacaagaaggcggaggagcacaagaagaaggacggggagcacaagaaggacggcgagcacaaggagggcatgatggagaagatcaaggagaagctccacatgggtggcggcagcgacgagcacaagaaggacgaggagcacaagaaggcggaggagcacaagaagaaggacggggagcacaagaaggacggcgagcacaaggagggcatgatggagaagatcaaggacaagatcagcggcgacggccacggcgacggcaagaaggacggcgaccacaaggagaagaaggacaagaagaagatgaaggacaagaagcacggcgagggccacaaggacgacgactgccacggcagcagcagcagccacagcgacagccactgagccagctccggc

SEQ ID NO: 5222 - DNA, 429 bp, Triticum aestivum
  unsure at all n locations
  Clone ID: LIB104-013-Q1-E1-H11
attcacgggtcgacgggcaagtgcaaaattggaatcccggcaactcagggtacccaccagctccaggcaagtatccagccaataggttctcacctcaacaaaagcagtcacggcgacatcagggggcttctccgcccctccggcaccgccgcctcatgagatgcatccttcacaccagatgccacctgctcatcatggaaatgagatgcatccttcacaccagatgccacctgctcatcatggaaatgagatgcatcctccacaccagatgccacctgctcatcatggaaatcagcagagaccggcaagtggtgcccctggaactggccaaccacctccgtattaccaccattaagtgtgtgtgtaccttcgccgccatttctgattagtttatggagttttgccactccaacantacggctaccccat

SEQ ID NO: 5223 - DNA, 444 bp, Triticum aestivum
  Clone ID: LIB104-013-Q1-E1-H3
gtaccggtccagaattcccgggccgacgccctggttcaaacccgccctttcttgcgcctggcatgtggcggcgaggaactggggacaccataccgggacacatccggcgagtggtgtcggcacgaggacgatgattccgaagatcttgagccctggcagttggacggtgagccggtatccgacgcggaaaccaccaatgaggagtaatgcagcaacttggccctatgctgccgtgtgccatgtttgcttgccccagaatgatcgaaacagctctcatcagtcgtgtgttggtctcttgttgtattaccggataagctatattttcttgccgttatctttcctcatgtgcccgttccgtgtgcatatggcatcctgtttgttgttacattgtgctatataggctgtagtattcagattctggatgttatttatggaaacatttgc

SEQ ID NO: 5224 - DNA, 398 bp, Triticum aestivum
  unsure at all n locations
  Clone ID: LIB104-013-Q1-E1-H5
tacggtccagaattcccgggtcgacgggttatcaaaaccatccgaagcagttgagtggtgggcagtaccacgtatttaccactagtttatgtaaacgtgaccagaaggttcataagagagctgtcaattctgttgagtcggcgattcctcattatttgaggtggtcagaacagcccatcatatggagcaaagaggatcaccctccacgggtcgataatgcgggtcagttagccttggtggtagcaccccaggttggtggatataaatccactaaggtgctcatggacggcggtagcagcatcaacatcctctactatcaaacttttcagcgtatggggttaactgataaaaatctgaggacatccaacacagttttcaatggagtggtcnctggtaag

SEQ ID NO: 5225 - DNA, 443 bp, Triticum aestivum
  unsure at all n locations
  Clone ID: LIB104-013-Q1-E1-H6
taccggtcctacattcncgggtccacgggttatatctattagagcacggtggtggttttattttatagaaataattgatctctcatgcttcacttatattattttgagagtcctttagaacaacatggcaatttacttttaggcataataaaaacttccatataagtgcattgaatactatgagaagtttggtacttgataattgttttgagatatggagatggtgatattagagtcatgctagttgagtagttgtgaatttgagaaatacttgtgttgaagtttgtgattcccgtagcatgcacgtatggtgaaccattatgtgatgaagtcagagcatgatttatttatttattgccttccttatgagtggcggttggggacgagcgatggtcttttcctaccaatctatcgccctatgagcatgcgcatagtactttttt

SEQ ID NO: 5226 - DNA, 376 bp, Triticum aestivum
  Clone ID: LIB104-013-Q1-E1-H7
taccggtccagaattcccgggtcgacagcagtatttaatcgttgatgatggcttatgtgtgtataccctcaaatttacatggcgatatggtttattcccttcccttttatttccgggtctatggttttatattgagtgacgcggtacaaaatcatcatgctatttttatataacttactttactttagtaagatctacgcaccatgtttcactttggccgaaatcgatgtcaacagatgcctctcgaggtctgaatgcgaatgttattctctaattcggattcaaaactcgagagtacatgtatcttatatttacgtgcctcagacatatggcttggcgctggaagtgtatgcatgtcatatcaaaatagccgtct

SEQ ID NO: 5227 - DNA, 294 bp, Triticum aestivum
  Clone ID: LIB104-014-Q1-E1-A1
gggtcgacgggaggattggttgccactaattttggagcggatgtggctgtttcactgtgttttttttttcttttcttttagttggcgttggctgaaggacgacagagtttcgtccgcccacctaaattgcttagcgtacaacgtgaggggtacttttatgtattcacggttagatcccattgagtaggcttatcttgaccctccaaaaaaaaaaaaaaaaaaaaaaaaaaaaaaaaaaaaaaaaaaaaaaaaaaaaaaaaaaaaaaaaaaaaaaaacaaaaaaaaaaaagcaaa

SEQ ID NO: 5228 - DNA, 271 bp, Triticum aestivum
  Clone ID: LIB104-014-Q1-E1-A11
tagtgagtcgtattatgggctatgcgaatatgcagtccgtcggatcaaatattggtgacggcacccaatgcaaggtctacaacggcaagtatggtgatcacattgtggccaatagagttctcaatagtgttggtaccgtcgaagaattggtaacacttgatgatcgcgtcaaccgagacctagataggatttgtcaagtcatgcatcacaagcttgtcgagttcaatgactcatgcaaagatccatgcatcgtcaatgcaactgatctgct

SEQ ID NO: 5229 - DNA, 395 bp, Triticum aestivum
  unsure at all n locations
  Clone ID: LIB104-014-Q1-E1-B12
attcgcgggtcgacggggtcacatatttcgtgagtctctgctcgtgaccgcactaccaacacactaacggtttggatagttgatccgagggggcctctagcctgatagcactaaccatcacgtgggcatagtatgggcgttctgcgtcgtatgcatcagccgaagcttagtagacgttagggactgagcgacgcgcgccgggttggactggtaagcaccttcctttttgaaggaggtagctaggtctgctcaccggccgcgtacgcaacgtgtaggtgttcctggggcgatggcccatgacccctgggggcataggtttagtccggcgtgctgacctctctattaagcctaggtctggttgtggcgtantgtttgggccaggccgggcatgacct

SEQ ID NO: 5230 - DNA, 447 bp, Triticum aestivum
  Clone ID: LIB104-014-Q1-E1-B6
gtaccgatcaagaattcgcgggtcgacgggatcgcttagcaagtgggccaaacatatgatgaatataatacctaaaatgcacaactttgatgtgccacacatgcctcaaacaccgtaaacccatgtactcacatagagcaaggttacatatgatggtccccttccccctcctcgacgcatactatatgctcctaccataatacaacccaaaaagaatcttcatcgatggtgaaattaattaacctctcctgatgtaggtcaaagtgatgcacatgcatcaacgatggcctcttgggcccacagatggaagtgtcacacgtgaatgtcctagctaggataaccaccgcctgcatgcaagtggcgcaaagaggtgttgtgtgatgtttgaatagccattttcacaattttgatgtggcacgtgcctcggaaaccgaaaagtcccgacac

SEQ ID NO: 5231 - DNA, 428 bp, Triticum aestivum
  Clone ID: LIB104-014-Q1-E1-B8
gtaccgatcaagaattcccgggtcgacggggatgtggatttatgttttaattagtgtttgttccaagtagaacctttgggaagacttgggtgaagtctatgcgatcttgctgtaaaaagcagaaagttttgcgctcacgagattagctaccatattttactggagagtgattttaggttgatcctttttgcatatgatttatagacaaattacccaggtccaacaatttgtttcagaatttttggagttacagaaatattctaatgatacagattactacagactgttcagtttttgacagattctgttttctatgtgttgtttgcttattttgatgaatctatgagtaatatcagagggtatgaaacatagattagttggaatacagtagatatgacaccaatattaattttaaatgagttcatgac

SEQ ID NO: 5232 - DNA, 437 bp, Triticum aestivum
  Clone ID: LIB104-014-Q1-E1-C10
aattcgcgggtcgacgggaccgattacggatccccacctttatcaatacttcatatatactcgcaatattcagattgcttttatcatattcttgcttgttcttcgattgcttgcaggaatagaccttcgtggtcaggttgattgtgctccggcatggtcaataacctctcggagttggtttagcgattgctaaggcgcaacgtcgtgcacgtttgtagtcggatcgtcaaagtcgtctccaccaaatcgatagttatcatctcatcgaaagatcgggacacccccgcctctatcaagtggtatcagttttcaggttgctcggtgagaatttccagttttcctagattagatttattttcttacctattgtccatgaaaaagccacataaaagagttagatctattcatccttggtccaagccagtctgagcctgtgc

SEQ ID NO: 5233 - DNA, 384 bp, Triticum aestivum
  Clone ID: LIB104-014-Q1-E1-C11
ggtcgacgggggtagaaatgattgataaggagccaaacaggagcttcgtagttgagaagggtcgtggcactcctttaaaggatataccaagtgtggcacagaggttaacgaggaagaaacctgctgatcgtaaatttcttcacaatgttctttttgggaggaaaggcaagactgtcgattttaaaggccatatacttcagttctctggatttgtgtggcatgagagcgatgaaaagcagagagccaaggcaaaggagaagcttgacaagtgtatgaaagacatgctggtggatctctgttggcttcgtgctattccggttcccaaaacaaacatcagaaaggaagatatcgtggcaaagctgttggacttcattgctgaacctc

SEQ ID NO: 5234 - DNA, 417 bp, Triticum aestivum
  Clone ID: LIB104-014-Q1-E1-C5
gtaccgatcaagaattcgcgggtcgacgggggatgatgatgataaggcctgaaaagccattctggtatggtagtgtcgattgtattgtctacattttttatataccattacttgtgcaagatactatcatgtgaccaataaacattggtttagttgcgctgcttatgttatggatacgtgtgtaaactcaagtttgatgttataaagtggcatttggtaatgcatcaaaagacaaaaatttaaaacgagtgtaaaaattgaacataacacaatcagaagaaaataaaagcgacaaaaaaatttgaaaagtttgaaataaaacggggccgcccaaagggttcaagccttagttacccttaaatgcaatttaaaacctctccaaaagggcccccaaatttcattccaggggccttcttt

SEQ ID NO: 5235 - DNA, 401 bp, Triticum aestivum
  Clone ID: LIB104-014-Q1-E1-C6
attcgcgggtcgacgggggaccgcaacgccgcgaggacggcggagcaggcagagcacatcaggagaaccgggaggatgccgccctcgctgggctgctggaactggtgctcgtagtcgtagacctggaaaaaccagcatgcgttgctcctgtcaactagggaatggaatggatctggcaccgtagaatcttctttcttctcttttgattggttcagtagatatgtggcacgagaacagaccgcctgtaagttgtaactatgtgtatgtaagttgcgagctttcttgccttgtctcatgtttcttgcattcttcagtgatgctgagatttctgttcagatccgtatgtacattacagacagtgatttgcttccaaaaaataataaatgatgtatgttttcaaa

SEQ ID NO: 5236 - DNA, 419 bp, Triticum aestivum
  Clone ID: LIB104-014-Q1-E1-C7
gtaccgatctagaattcgcgggtcgacggggaatcccaaagaaagatttttcttttctgaattataattattcagtcaattcaaataaggcgtatcttgttcaagccaataaatatagctggggttatagttaaagcagccagtagaaaaccaaaataactagttaaagtaagcatgaaagagttaaattccatttattttttttttactacactacatatgttggtaaagcatttacctaagttatggaaaattcataattcatcagttattttagataatactaaaaaacaagatagagtaagatacagaagtgtaaaagaaagtggattcatcagatgatacatgagtccctaattccgaatcaagagatttgttgtggaatttgtcaattgagtaaagtaataatattaagaact

SEQ ID NO: 5237 - DNA, 407 bp, Triticum aestivum
  Clone ID: LIB104-014-Q1-E1-C8
taccgatctagaattcgcgggtcgacggggactctcagaagtttgcaagagcccataaatcatcgacttggaacatgcttgtctgatgccattccaactccggcattttcaaagtccaaactgtgactgtgaaaccagatttcttcatgcttccaaaaaagccattatcgatgtcaacaaagttaacaatacctttgcatacaccaacagttctatatgcctcagggtatacacgaccataagagagatcatcgagctcagtccaaatttctatccctggaagctggatgaaacggagctctagattttcaccagcagaaagcacgttgcaggacaataagccgcggtggtaatccacccagtatattgtaccatctggataggagaatacctgatctgtctcccat

SEQ ID NO: 5238 - DNA, 399 bp, Triticum aestivum
  Clone ID: LIB104-014-Q1-E1-C9
attcgcgggtcgacgggaaggtggggaagctgatgctggcgctgtccgatctgctctgggaggacatgaagtccgggccggacagggtcgccgttccatacaagtgatccaggggaggggaacgctagagagatggcgtgtgcatgcgcaagcacgggcacgttcgtgcgtgtacaagatagtgtgtgagccgagccgcaatttgttgcccgtactgtttgtcacttgacttgtcaagccctgtataactgtggtatgtgtgtgccggatggatgactcaccatataaataatactacgatcttgggtcaaaaaagaaaaaacaataagaaaaattttgaagaaaaataacaatacaactgttatcaaaaagcggccgctctaaaggatccaagcttac

SEQ ID NO: 5239 - DNA, 372 bp, Triticum aestivum
  Clone ID: LIB104-014-Q1-E1-D10
attcgcgggtcgacgaggccaccaatgacgacaactccgtcgtcgccctccaccccgacaccatggagaggctccagctcttccgcggcgacaccgtccttctcaagggtaaaaagaggaaggacaccatctgcattgttcttgctgatgacacatgtgaggagcccaaagtcacaatgaacaaaactgtcacgaaaaacttgagagtgtgacatggtgatatggtgtctgtgtaacaaagcccccatatgtaatataggaaacgcgtgtacatacatcccatagaggagacactttaaaggggatcacgggacatttgttacaccctttctaaaacatacattcctttaacccaaagccccttttgaaaag

SEQ ID NO: 5240 - DNA, 96 bp, Triticum aestivum
  Clone ID: LIB104-014-Q1-E1-D12
tacaccctatagtgagtcgtattacatggtctgccaccacgacaccctggataggctccagatcttacgcggttaaaccgtcactctcaacgttac

SEQ ID NO: 5241 - DNA, 342 bp, Triticum aestivum
  Clone ID: LIB104-014-Q1-E1-D3
gggtcgaccgggaccgcaatgcacgacagccatctcttccgtgcggttcaaacctcaaattccaacccccttctcccccaaattaaggaggaccaccccgaaccggacccccaaaacttcaaacccttcgtctcaacctcggaccaaaaatggggccaacttcaacaaacctgttcagccgcctctttgccaaaaaggaaatgaggattcccatggttggtcttgatgccgctggtaaaaacaccatcctctacaagctcaagctcggagagatcgtcaccaccatcccaaccatcggatttaacgtcgaaactgttgaatacaagaacatcagcttcactg

SEQ ID NO: 5242 - DNA, 409 bp, Triticum aestivum
  Clone ID: LIB104-014-Q1-E1-D5
aattcgcgggtcgacgggaggcaattaatgtaatatcttgtgagggaatggagaggatggagaggccagagacctacaagcagtggcaggtgcggaatcagagagctgggttcaagcagctcccgctggaccaggaaatcatgaagcgtgcacgggagaaagtgaagtgctaccacaagaatttcatcatcgacgaggacaacgggtggttactacaaggatggaaggggcgtatcctgtacgcgctctcaacatggaaggcgaacccccaattctagcttctgtaaatggtgacctgttcatatttttggactctagagctgattggtcctggccaacaacccattagtagatgatgaacctgattactctcctgtagcatctgcctgttgtatgtgctgcccatgca

SEQ ID NO: 5243 - DNA, 423 bp, Triticum aestivum
  Clone ID: LIB104-014-Q1-E1-D6
attcgcgggtcgacggggagagacaaggctgcatccactgtcgtttacttggcttatcaaactacagagttgagagaacatatgaaagaggcgcgtggcccagcggaaccccacaatgtactccccattggcttcggcttccgtccaaggcgccatgtgaagcgaggccccatcccgggctctgttcttgtcaggcactatcttcgtaagaggaggatgcttgcttcttcgatatcaagtcactgtgaagggtcaagttctgaatcgttaattaaggcaaaagaatggatggtggatcttgttgattcatgtttggaagctggtaagcggcatcaagggtatccacttcaatatgtttgtactccaatggtacacaaaggtgctcctgttgatccattctcgcggagtaatcttggtacattc

SEQ ID NO: 5244 - DNA, 448 bp, Triticum aestivum
  Clone ID: LIB104-014-Q1-E1-D8
taccgatcaagaattcgcgggtcgacgggcattgcaataccgtttacgctcatttttatcgcttgttaccttgctgtttttatattttcagattacaaaaacctatatctaccatccatattgcacttgtatcaccatctcttcgccgaactagtgcacctatacaatttaccattgtattgggtgtgttggggacacaagagactctttgctatttggttgcagggttgtttgaaagagaccatctttatcctacgcctcccacagattgataaaccttaggtcatccacttgagggaaatttgctaccgtcctacaaacctctacacttggaagcccaacaacgtctacaagaagaagtttacgtagtagacatcacaccaccggatcgttgaagctctgccgaggttgcaatgaaacgttgtcgccgatggacttcgcctggggg

SEQ ID NO: 5245 - DNA, 337 bp, Triticum aestivum
  Clone ID: LIB104-014-Q1-E1-E10
tatagtgagtcgtattagcgatgctggtgtgaccttctactcgcggggaagaagatcagatgcctccagagatggctccatgggtacggctccgctatgatggactgttccatcattggagcagctcgattgatgtgtatgacggcgaggatgaatcatgacacgacagataacattaatctgaagtgggagtctaatagcatgtgaatagatgatgtacaatacatcaccaaaaagtgctagatgtgcaatgcatcaaccacgccatggccgctctgactgatgcagtaaatactgttgactcagaacttaattgaagaaactgaactttacagtc

SEQ ID NO: 5246 - DNA, 438 bp, Triticum aestivum
  Clone ID: LIB104-014-Q1-E1-E11
taccgatccagaattcgcgggtcgacgggcagatataaatcccaagtgactcaaagaatagagctatgctccccggcaacggcgccagaaattagtcttgataacccacaagtgtaggggatcacaacagctttcgagggtagagtattcaacccgaatttattgatttgacacaaggggagccaaagaatattctcaagtattagcagatgagttgtcaattcaaccacacctggaaacttagtatctgcaataaagtgtttagtagcaaagtaatttgatagtggcggtagcggcaacaaaactaaatacagcaaaaataatgtttttggtattttgtagtgattatagcagtagcagcgggaaagtaaacaagcgagaaccagtatatggaaaactcgtaaggcacggatcagtgatggataaatatgccggatg

SEQ ID NO: 5247 - DNA, 428 bp, Triticum aestivum
  unsure at all n locations
  Clone ID: LIB104-014-Q1-E1-E12
attcgcgggtcgacgggaacatctactcccactgaaagcgcatcgccggaaattctgaaataaatccaggcataatgcgagcgccaggatttgaatcctggtgggttggggataccactgtccacctaaccaactcaaccacaggttgattcgccaaaactttttcttttgcggggtatagcttcatagcttaggttccgtatattggattgcgtgtcgcacgtggcgtacgtatggtacggacgtatttaaccaggatctaatcgacctttactttccctataaaaaatggcctttactgtaagggaaggagaacatacaccatgcatcaggcatgaacattgcaaagcaaaacgttcaagtgccatgcgcgcagaagctttgttctanggcatgacatatcacgcctatttcctcttctccgcatg

SEQ ID NO: 5248 - DNA, 195 bp, Triticum aestivum
  Clone ID: LIB104-014-Q1-E1-E2
aagcgaccgagttagaagttgtcaatatgcattgtcgtatcgcgacctgaatgaaatagacgaaataatgctcatgttcgaaagaatgtgtgagagtagactttacgcaaaacggccgctctaaaagatttaagcataggtatgcgtgctatcgagatcatagctcttctatactgtcacctagattgagttcat

SEQ ID NO: 5249 - DNA, 424 bp, Triticum aestivum
  unsure at all n locations
  Clone ID: LIB104-014-Q1-E1-E4
gggtcgacggggatactaattcatgaagagtgttatcctatggaccatttgtttcatcttgcttgcaaagctgaacaggaaataaaacgacgtgttggccacgaggagaacaagcgcacggtgcacattccaagagttgatatgattgtaaatcatcaaagcgatactatgacaaccacatccgttgttgtcaggactacatcacctccaccatgtgacacatcgcccccgagagtggctacatcatctgagttgatcataagaggtaatgacaaaggtactgatcttccatctctacatgagaatgatgaatgccttgtcaatttgaatgcaccatctgatgagctacccactactttgatcacaccacctattttagaggactacgttgataatttgactttgccatgtgatcanacaactg

SEQ ID NO: 5250 - DNA, 416 bp, Triticum aestivum
  Clone ID: LIB104-014-Q1-E1-E5
taccgatcaacaattcccgggtcgacgggagctagcagtggcgctagggtggtggtggcggagaggtgtcaccgtcggggggatctcgggtctcctggagtgaacaacgaacaaatagtcgtgttctggactgaattaggacttccaaggctgttttttccctgcagaacaaggaacagaagttaacatctgacgattttatattggctttgccaagtgaacaatcaatcaggcgacagactctacaaatattccgtgggttcatcaggcaaagttcagaaatttcagagaaacgacttcagattcagactcagagttgaatgtaggctggagattcaggatcatagccagatagcctccacagcaatcaatcccggcatcgcaagcttcggcaaagatagtatggcatttcagac

SEQ ID NO: 5251 - DNA, 406 bp, Triticum aestivum
  Clone ID: LIB104-014-Q1-E1-E7
aattcgcgggtcgacgggagtgtccgacgtacaaccggacacattgatgggtcttctagagcaagcggctatctcagaggcacatcgtaccttaatgggtacggtggttgagaggatttcatccgcaaaaagcgggttgaatgaagcttttacgagcctgctaagaggctttgaggtacgcaaagtaatatatatatatatatatttgactgtaccgcatacgcaaggtgtgctctgtatagatagtatcccctgagactctggttgccgtccaaacatggcgaacaaaggatcatagtctcacgtaatgataccgttgttttcgtgcgcaggcagctgcaaatccggcgactgaccgaactgccgaatttgctgaattgaggcggcaacttgacatggcggacgc

SEQ ID NO: 5252 - DNA, 302 bp, Triticum aestivum
  Clone ID: LIB104-014-Q1-E1-E8
gacgggtctagtgattcacttatatcttttagagcacggtggtgtcttaattttgaagaaatttctagtctctcatgcttcacttatatcattttgagagtcgtttagaccagcatggtctgtgctatgatcataaagttggtcctggaatgacgagcatccgagttgggtctgggaaaaacttgcagttgaagtgctgtggcacctaggatcagtttgatctttcgacaattgtcgtgagtaagagaagtgctgccatgaatgtcctgccaattggttgcacagcctgaatggcaaagggg

SEQ ID NO: 5253 - DNA, 419 bp, Triticum aestivum
  Clone ID: LIB104-014-Q1-E1-E9
attcgcgggtcgacggggcatgtcagacgtttatttcaactagataatacaccgcacgttgttgcgggaattggttgctatatacgtagagatgatacttttggttcaaattattttagtgggcattttttgtatgaaacattagtatttagactaacaatatgtgaattgaaactaacatatagtattatattcgcttattctgtagtatgcatggtgcattttaatgtgggtcttttctcatgaatgcatagtggcacgatgtggcatatttgcatgttaagagaattaaagatagtggggatcaattacttaggtcatgcttggtggcatgatgagctgacatagttgcatgttgagggaattagagttagtgaggatcaactatttaggtttataaaatgggtgtttcctgaaaa

SEQ ID NO: 5254 - DNA, 416 bp, Triticum aestivum
  unsure at all n locations
  Clone ID: LIB104-014-Q1-E1-F1
ggtccagaaatcccgggtcgacgggaagcaggacaagggcgacaccgaggaggcgcagagcgaatgcaatggcgatggcgcggcgcctgggcagctgtcctcgcccgccacagtcgatcccaagtgggtcaagaggatccttgcaaatcggcagtcggcacagcggtcacgcgtgcgcaagctgcagtacatctcggagcttgagcgcagcgtcacgtcgctccagacggaggtgtcggcattgtccccgcgtgtggcattcctcgaccaccaacgctcactgctgacgctggggaacagccacctcaagcagcgcattgcggcgctcgcgcgggacaagatcttcaaagatgctcatcaggaggcactgaagaaggagatagagaggctgaggcanatcttacagcagcagagcc

SEQ ID NO: 5255 - DNA, 407 bp, Triticum aestivum
  Clone ID: LIB104-014-Q1-E1-F11
gtaccgatccagaattcgcgggtcgacgggagatgcgccatgctttcaggaatggagggagtaagtttcattactgttgaattggattgtatcgagtgaaattcagagatccatgccaaaagtaaggaacctatgagaaagaagtcatccaaaggtttaccagtcagcaccatggatgttgggctagccagcctgggtttgatcatcagctctatcttaatttgattgatacctaggtcctccaacgcatcactctttttttcattgtaaacgtatgagtgatgaataatagtgcctatttgttcatcgcttactatgcctgtgttaaataagtggcgggttggctactgcattttatgattattgtagttatccacatgaaagtgtctgtgcttttaattataatt

SEQ ID NO: 5256 - DNA, 436 bp, Triticum aestivum
  Clone ID: LIB104-014-Q1-E1-F6
taccagtctagaattcccgggtcgacggggaggttgagaagctgattggcaggatagtgaagtggctgaagcccggtgggcatattttcatcagggaatcgtgcttccaccagtctggggattccaagaggaaagtgaacccgacgcgctaccgggagccgaggttctacaccaaggtgtttaaggaatgccactcctatgaccaagaggggaattcctttgagctttctctggtaacttccaagtgcattggagcttatgtgaaaagcaagaagaaccagaaccagatatgttggctgtgggagaaggtcaagtgcacagaagacaaaggctttcagagattcctggacaatgtgcagtacaaatccactggaatcttgcgttatgagcgcgtgtttggggagggttatgttagcaccggtggattcgagaacac

SEQ ID NO: 5257 - DNA, 436 bp, Triticum aestivum
  unsure at all n locations
  Clone ID: LIB104-014-Q1-E1-G1
cggtccagaaatcncgggtcgacgggcttctttgagcaatttgacacaaagaaaaaatgtcacggagattgttgctcggacaacttctcgggcgaggaatgcaacacaaagagccaaatcggtggggtgtttggcgctcttcgtgtcactgatgacctgttgatgaggagggcgtattttaggaagcagcagcttgacaacaaaacaacatcacctaactctaactgaagaggacagccggtgtgatttgctcttacattgatatcgcatgcgtatgaataatggtccaatggaattgggagcggagtaagaagctcatgttgcctttatgcatgtaataatcatgcctgcctgcatggcccgctagctgttggtccaatgcctggctgcctgcctgaactggcgtcaatttccaagtttgtttttgtatatataa

SEQ ID NO: 5258 - DNA, 364 bp, Triticum aestivum
  Clone ID: LIB104-014-Q1-E1-G10
gggtcgacggggtcacgcatgtgaggttcagcatacgaggcacttggcacggtttttgcttgaacagcgtcaacactgccttcggcacatatgtggtggtactcagaaggacctccagggctgatacaacaatcagaataaataaatgtctaagcatactgttctgattgtagttccataactgtaaatctgtaactatatggtattgtgattctgtcgcaagtagaataaagaccccgtgtatgctacaaaaaaaaaaacaaaaaaaaaagaaagagacagattaaaacgataaaaacaaaagtagacgtcccagaaagttcaaagtaacgtctagattgtaaaaaaaagcggccgccctaaa

SEQ ID NO: 5259 - DNA, 170 bp, Triticum aestivum
  Clone ID: LIB104-014-Q1-E1-G4
ccggggccgaccggctctgtcatatctatgatagttgtggctatcgatggcatgtgcaaaaggaggtacaaaaggcaaatcctgagcggacgttctacaggatctaagcttaaggcgtcttacatcctatgtcggaggtcatcgatgctgacatcgaaattcaattcatc

SEQ ID NO: 5260 - DNA, 438 bp, Triticum aestivum
  Clone ID: LIB104-014-Q1-E1-G7
gtaccgatcaagaattcccgggtcgacgggggagctatatttttattcaccaacatgatatgtgttttgcttggagcgtcttgtattatttgtgtctttgtgtttttgtgtgccacaatcatccttattgtacacaccttttgagagagccatacatgaattaaaatttgatagaatactctatgtgcttcacttatatcttttgagctatgtaattttgctctatgtgcttcacttatatcttttgagctacgtagtttttctctatgtgcttcacttatatcttttgagcgttataattttgctctatgtgcttcacttagatattttagagcacggtggtggatttgttttaaataaactattgatctctcatgcttcacttaaattattttgagagtctcttaatagcatggtaatttgcttaataataatatg

SEQ ID NO: 5261 - DNA, 363 bp, Triticum aestivum
  Clone ID: LIB104-014-Q1-E1-G9
attcgcgggtcgacggggcgaggatgaggaagggtggtcggccgaggcgaatgaagacgaggcggcgtcgtccaacgagaaggacatcgaggagatcaacgtggaggatgacggtagtgtcgccatcgcggatgcctccgtgggcgtagtcaccaaggaggatgacagtatcatctcggccgatgctccggcgatagagaaggaccagatcgacacgttcgtgcctgctccggcagccaaggccaacgaggatgccggtgccaccttcctggctgccccggtggccggtgatgatggcagtgcctccttcgttgctgcgccggcggccaatgaggacgaacttgtatccatctcgtctgctcc

SEQ ID NO: 5262 - DNA, 371 bp, Triticum aestivum
  Clone ID: LIB104-014-Q1-E1-H1
cgggtcgacgggtctgttcaacaccattgttccgataacaacgtgctcccgttggtgttggcaggcttcttactttaacaattccctataatcggaaaaacaggatcatcatgcaacacatgagttagtcttaaaggtgagatcaggaacctattttgtgtttatcattccacacatgcaatatgggtttccctctgaatctcattgatatctcactaatatgtagactaaagaaccattgcaattgtaggacagaaaataaatattaatcacaacatggaaataaataataacatttaccattgctgttagggcatatttaaaatataataaatcaacaatgttgatgagatgggagagcttaaatacag

SEQ ID NO: 5263 - DNA, 410 bp, Triticum aestivum
  Clone ID: LIB104-014-Q1-E1-H5
attcgcgggtcgacggggcgactcatgacaagctcgagtggctgctcgctctcgcctccatgaggaaggaggcaggagcgctggataatcaaatttgatgcggcgctgcatgattttaccagcatcaattgtttttcagttccagaacgctgttgacttaaacatggtttccctcttttgcgaatgagtatgagcatgatttctaagtggccgtaacatcgctagcctagatatccctgctctggatttgtatgaataccccagtgtcagtgtggttgtaatttgggggtttgtagctggtcggttattctgtctgttggtatattggaattagactttaaacctgtgatgatactgaagaactgcaacgatgtgtggaagtcatgttgttcgattgttcattaaatata

SEQ ID NO: 5264 - DNA, 382 bp, Triticum aestivum
  Clone ID: LIB104-014-Q1-E1-H6
gggtcgacggggaagaagatggaggcccttgaacggctaggcgccgacgcgttcgttgtcagcaaggatgccgaggagatgaaggctgcgatgagtaccatggatggcatcataaacacggtgtctgcaaacatccccatggcccctctcttggggctactgaaacccaacggcaagatgatcatggttggcctcccagagaagcctatggagatccccccctttgctctggttgctacgaacaagaccctggccgggagctgcatcggcggcatgagggacacccaggagatgctcgacctcgccgccaagcatgacgtgacggcggacatcgaggtgattgacgtcgagtacgtgaacacggccatggagcgccttgcca

SEQ ID NO: 5265 - DNA, 400 bp, Triticum aestivum
  Clone ID: LIB104-014-Q1-E1-H7
aattcgcgggtcgacggggcttccgtgcgatgccaaacatgctgatgttccgtcctgctgatggcaaggagactgccggggcatacaaggtggctgtcctcaacaggaagaggccatctattctggctctctccaggcaaaagcttcctcatctgcctggtacctcaattgagggcgttgcgaagggtggatacactatctctgacaactcgaccgacaacaagcctgacttcatcataatgagcactggttctgaggtagagattgctgtgaaggctgccgaagagttgacgaaggaggggaagactgtccgcgttgtgtcatttgtctgctgggagcttttcgacgagcagtcagatgaatacaaggagagcgtgctccctgaggctgtcaccgcaag

SEQ ID NO: 5266 - DNA, 359 bp, Triticum aestivum
  Clone ID: LIB104-015-Q1-E1-A1
cggtcaagaatatcccgggtcgacgggcggctggaggctgcggcggacggcgagggagttgcgtatgagtttgggctctcaattggagcggaggaaggcggccggcgagggagctgcgggcggatgccggagctgcagcagtggggtggagcctggcggaggggaggagcgatggaggaagacgaagatccccggcgacaagaatttcaaattgagggtagtttggtactttttcctgttttcacctggtcggagaagttccccaacgacaactattttggaacagagggagtatatgtttctatagagtacttcgtttttgtactatacgcttgacaaaatgatttccttataagctg

SEQ ID NO: 5267 - DNA, 427 bp, Triticum aestivum
  Clone ID: LIB104-015-Q1-E1-A10
gacggggaacgtgctgaccatcttcgaggaggaaggcgggcggccggacgccatcatgatcctgacggtgaagcgcgacaacatctgcagcttcatctcggagaccaaccccgggcacgtacggtcgtgggagaccaaggacagccagctgacgatggtggcggacgacctgaagccgcgggcggtgctgacgtgcccggagaagaagttgatccagcaggtggtgttcgccagctacgggaacccgctggggatctgcggcaactacacgtttggcaactgccacacgcccaaggccaaggagattgtggagaaggcgtgcgtggggaagaggaactgcgtgctggccgtgttccacaaggtgtacggcggggacctcaactgcccgggcaccacgggcacgctgggcgtgcaggcaaagtgctcc

SEQ ID NO: 5268 - DNA, 327 bp, Triticum aestivum
  Clone ID: LIB104-015-Q1-E1-A8
gtaccgatctagaattgccgggtcgacgggggtggcagaggcgatctcagccgttggattatttcaattcttggtgcctattgcttaagagagattgatcgagagataagatattgccatgtagagagattatgctttgctctatcactgtggcaaatgcaataatgtatcccttctgtactatcattaggatttgaatgaatgcaataaaggatggtgctccttgtaaaaaaaaagaaaatgaaacaaaacaaaaatagaaaaaaaagaaagtaaaaacaaagaagaaaaaagaagatgacccatcgggaaggtagcgaagaatag

SEQ ID NO: 5269 - DNA, 329 bp, Triticum aestivum
  Clone ID: LIB104-015-Q1-E1-B11
ggtcaagaattaccgggtcgacgggtatggaataaggagtggcaagagcctgagcttggggatgcccaaggcaccccaagatattcaagaacagccaaaagcctaagcttggggatgccccgggaaggcatcccctctttcgtcttcgttcattggtaactttacttggagctatatttttattcgccacacgatatgtgttttgcttggagcgtcgtgtattatattagtatttgctttttagtttaccacaacaatcctttctttacacaccttttgggagaagcctactttattagaaatttattagaatatcctagtgcttcact

SEQ ID NO: 5270 - DNA, 59 bp, Triticum aestivum
  Clone ID: LIB104-015-Q1-E1-B12
tagtgagtcgtattacctgagcttggggatgcccaacgaaccccaagatattcatgatc

SEQ ID NO: 5271 - DNA, 320 bp, Triticum aestivum
  Clone ID: LIB104-015-Q1-E1-B5
aattgccgggccgacgggagctgcagcaaggataacgactgcgatgtcatggcttaggaggtgagtgttggcataagtcatgccatgtgcgatggcgaccggcgtcgggtgtgccagatcgtgttcatgtatgcgtgggagaggcagcccgagtcgtgtgtgctgtacgtccgggtataaaaagccctcccatgtaccgatcgaagtgatgcgatatgtgttgagccagagagagatgtagccttttggagtgtaaaaaaaaaaaaaaaaaaaaaaaaaaaaaaaagaacaaaagcacgaaaggataaaaacaaaaagcg

SEQ ID NO: 5272 - DNA, 347 bp, Triticum aestivum
  Clone ID: LIB104-015-Q1-E1-B6
attcgcgggtcgacggggcaaaagacaaatagaagcagacgttggtgtctgtatgtcggatgcgccatcaactgctggatttgtactgcgtacctcaaacctcatatccgggttgttgcttggatgtggatgtttggtggaatttgtgacccttaacagccgtttgcggtccggcttgctaacaccaatttcaggtacctgactggtcaaactaacaggttggccaaggtaaaaattctttgcatttgtgtggtgccccagagagtgtcatatatcagtacaatagtgtacatttgcaaaatctctctgttttcgtgctaactcggaaaaatttctctctttgaaaa

SEQ ID NO: 5273 - DNA, 447 bp, Triticum aestivum
  Clone ID: LIB104-015-Q1-E1-B7
ggtaccgagtctagaattcccgggccgacgggatgagcttcggcggcgccagctccgtcgcggccggtgggaagcggccgttcgagtacgggaggacgcatgtggtgaggcccaagggcgcgcacaaggccaccatcgtctggctccacggcctcggcgacaatggagccagctggtctcaactgttggaaactcttccccttcctaatataaaatggatttgcccaactgcacctacgaggcctgtggcaatttttggtggattcccatctactgcatggtttgatgttgctgatctttcagaagattctcctgatgatgttgaggggctggattcctcagctgcacatgttgcaaatttaatgtctaccgaaactgcagacatcaagcttggcgttggtggctttagtatgggtgctgctactgcgctttactctggtacttgct

SEQ ID NO: 5274 - DNA, 317 bp, Triticum aestivum
  unsure at all n locations
  Clone ID: LIB104-015-Q1-E1-B9
gccggtcaagaattaccgggtcgacgggagctgtgtgcggtggtgtcataaggagcctgtccatctccactagagttatcccaagtttcacttcacatcgtgatgttgttttaccttttttttcttgtcgtcgtcccgctgcctgctataacggacagcgctccctgttggcgccgccgccggcgggggtggtgccctggcggcggagggtgtatgtcctctgccgccgggtgctcncctgcttgtacctagatggttggttactctttccgtccattgtcaccggctaacattgtgataatatcagtctgggtaat

SEQ ID NO: 5275 - DNA, 242 bp, Triticum aestivum
  unsure at all n locations
  Clone ID: LIB104-015-Q1-E1-C1
ccggtcaagaaatcncgggtcgacgggcgagcaagtcaattgccacataagagatatccgcatgctgggcgggaagggccagttccgtcggcaatgtattcaaggtgacgcatctctcctgcatcaccaacgtcgactccgttcactcgatctcagtaattgtcattacgttgtcaaatctgttaatatgcaatgtccgcaccatgtgattgcacacgatctgcaacacaacacctccttgt

SEQ ID NO: 5276 - DNA, 331 bp, Triticum aestivum
  Clone ID: LIB104-015-Q1-E1-C11
ggtcaagaatacccgggtcgacgggaaggtcactcagaatatggccctcaagctaaaggaacaccgacacgggcgaactcatcatgcacctgagtgggttaacctccccccaagcattccccggtgatttgatttgattttcagagggaagccagctattgtctgccttttgtgatcgtaatgttgcttcctctatatatgagctatgaaaataattaagcgatgcctatctcattctttacataacacccaccgtaatgatttgtggatctcaccaggatggtgcgtatataatatgagcaacgtcgtggtgagattcgcagattatcac

SEQ ID NO: 5277 - DNA, 449 bp, Triticum aestivum
  unsure at all n locations
  Clone ID: LIB104-015-Q1-E1-C12
cggtcaagaattaccgggtcgacgggcagacggcggcgagggagcttcaggagcagcaggacggcatgatgtacctggacgtgaggacagaggaggagatgggcaagggccacatccgcggctccctcaacgtcccctacttcttcgtcacaccacaaggggtccgggagaagaacccccggttcgtggagcaggtcggctcactcttcaccacagaccaatacatacttgtcgggtgccagagcggcaagaggtccgagctggcctgcgtcgatctcctagcagcagggttcatgaatgtgaagaacgtgggaggaggctacgctgcgtggctgcacaacggactctcggttacaatgggagtccccaaacggccaccanaacctgaatctgctgcagcaatctgaatcaactagtagtacgtactacctgtagcatctatcaattct

SEQ ID NO: 5278 - DNA, 435 bp, Triticum aestivum
  Clone ID: LIB104-015-Q1-E1-C3
ccggtccaggaatcccgggtcgacgggtctcacaacaagcatgatggtttcggtagggaacgtcccacctttggggacgaaatgatatccattgcctctattgctttcaagtttttttctcgtgtcaacatagaacaacaggagtgttgtgtgaatttttgtgatttttcggggttcatgtggacatttttatgcattaactgagttttcaatgcatttatgtgcataattcaaatatgaactacatacgcatgcttctgtggacataaattggttgaaaaatcaaatctgtgtccttgggtgcatgcttaggtcccatgcaagaaatgggaatgaatttcaaacacgatggcacccgttgattgccggcaaaacaatgagatgcctggttttctaaatctagtaaatcaaaaactcgtctaaaattcatgaaac

SEQ ID NO: 5279 - DNA, 441 bp, Triticum aestivum
  Clone ID: LIB104-015-Q1-E1-C4
ccggtccagaattcccgggtcgacgggtaccttatgtggtggttttgttttctttcactaacggagcttataagatttcctgttgagttttgtgttgtgaagttttcaagttttgggcaaagcttttatggactatggaataaggagtggcaagagcctaagcttggggatgcccttggcaccccaatctattcaaggatagccaaaatcctaagcttggggatgccccgggaaggcatcccctctttcgtctccgttcattggtaactttacttggagctatatttttattcgccacatgatatgtgttttgcttggagcgtcgtgtattatattagtatttgctttttagtttaccaaaattatccttgatgtatacaccttttgggagaatcccatttgattagaatctgccagaatactcctatgagcttcacttgt

SEQ ID NO: 5280 - DNA, 446 bp, Triticum aestivum
  Clone ID: LIB104-015-Q1-E1-C5
caggtaccgatctagaattcccgggccgacgggggtgttactggagcatggccatctttgaaggtcggatatgccctgctttgctgctctgcttttcctcatatgatcctagtgtggagtgctcggcctttgcaagctgtaatcttaatttcctttgcattagctgcttgtggaggttgtagttagcgtttcagtccagtgtttccattgtatccttctgcccgctgtaatttggttgtttgctgtaactcctggccggttgatggctttgttaattcaaagccgggctcctcgtgagccttcgttctaaaaaaaagaaataagtattcttagtctgtcatactattttatagaaacccccccgatgtttcttatattaaaacccgcagtacataataaatgttttttttaaatactcgttacctctaaaccgtaactataaattt

SEQ ID NO: 5281 - DNA, 441 bp, Triticum aestivum
  Clone ID: LIB104-015-Q1-E1-C6
ggtaccgatctagaattcccgggtcgacggggcatgtagttcaaaatgggtactgatatttagatacaaatggttgaaaaaaaattgcatggagaaggttaccttaaatttacgtcggcaaaaaattcaacctcttctgctttgggcactcaatgcttgttttattgcaaaagaattctttctttcttgcatcaatctgtgttgaagtgaaacactcgctaaagtagaagcctagtctagtcataaagataaggaactactttaaaatgaatcagattgtccacattcaataacaagaatgaatatcttcatttacagtcatattcaacatacccttaagatgactaaaatagacttgttgtaatttacagaaaagaaatacatgagataagtcacctacctcatctatcatttaggagagggttagtatatgaagaaaga

SEQ ID NO: 5282 - DNA, 402 bp, Triticum aestivum
  Clone ID: LIB104-015-Q1-E1-C7
aggtaccgatctagaattcccgggccgacggggctgacagcggggatgtcggactggagcgagtgcccggagctggggccgatcggggacctgcttgtgtccaaggacttccagaccaaggcgtccgtgctggtggtgcagtcctatgggagggcggcggcggcggcggccgcgtcgacgtcttctgaatttgctgttggcgaggccgtcttgccggcgccagaggccatcatgccggcgacctccatggggcacccgccaatgcgcccacgacaacattcacattctgaccttatgctttgatagtagtatagtttggtaaagcttgctagcacattgattaattaattaattaattagggagcgcctaatttttgcacgggaattacgaagtgtctgatg

SEQ ID NO: 5283 - DNA, 383 bp, Triticum aestivum
  Clone ID: LIB104-015-Q1-E1-D1
cggtccagaaatcccgggtcgacgggttgggtcatatattcctcaaatatgcccaaatatttccttaaccagttcaaaaataattccccaatattacttcttcacttctctccagaagggcactttgtgaaggaagtatcatttatattattctgtttgctccaaactttttgggaattctcttatgtccaaatgattgccacatgccaaaacgcaacttcattttcctactgaatcttccttagtgatttttcaaagtttcggttcaaatagaagctttgtgaaggaagtactagctaggagtatccaaataagtttaaatttgcatgcctcttcatgtgctccatcccttgatctatgtgagcacatgaccaaatctttga

SEQ ID NO: 5284 - DNA, 325 bp, Triticum aestivum
  Clone ID: LIB104-015-Q1-E1-D10
ggtcaagaatacccgggtcgacgggacgtgacggatcgctaaacctagacaaatattgagggaaatggagcttggaggtcaagcttggagaggagaaagcttaagtagtgtggctcgggcattccatcgaacacctcgtgtgcataggatgtgagctagagcaccacaaagctctcccctcgccggcgacgaaaaacagagcagtgggagtgctctgctcgcgggcgaggggtatatatagtcaactaattggtcccggttcgtggccagaaccgggactaaagggcaacctttggtcccggttcaagccaccaaccgggaccaa

SEQ ID NO: 5285 - DNA, 334 bp, Triticum aestivum
  unsure at all n locations
  Clone ID: LIB104-015-Q1-E1-D11
ggtcaagaattaccgggtcgacgggggaacgatgagatcatggctangggaacttttgccaacattcgtattgtgaacaagttcttgaagggagaggttggcccccaaaccatccatgtaccatcaggggagaagcttgctgtttttgatgctgctatgaaatacaagaacgaagggcatgacactatcatcctggctggtgctgagtatggcagtggaagctcaagggattgggctgcgaagggtccaatgcttcagggagtgaaggctgtgatagccaagagttttgagaggattcaccgtagcaatctcgctggaatgggcatcgtccctc

SEQ ID NO: 5286 - DNA, 424 bp, Triticum aestivum
  unsure at all n locations
  Clone ID: LIB104-015-Q1-E1-D3
cggtcaagaaatcccgggtcgacgggtactccgttcttatgaacttaatactctagatgcatgttggatagcggtcgatgtgtggagtaatagtagtagatgcaggcaggagtcggtctacttgttttggatgtgatgcctatatacatgatcatgcctagataacgtcataattattcgcttttctatcaactgcttgacagtaatttgttcacccaccgtaatacttatgctctcgagagaagcctctagtgaaacctatggcccctgggtctatctcttaccatatttgttttcaacttacttttatttgcatcttcactttcttgcatctatattataaaataccanaaatatatttatcttatcatactatctttataagatctcactttcgcaagtggccctgaaagggattgacaac

SEQ ID NO: 5287 - DNA, 363 bp, Triticum aestivum
  Clone ID: LIB104-015-Q1-E1-D5
gtaccagtctagaattcgcgggccgacgtgtaataaaacgcatgccagcggaagtcgtccgtacatgcgttaatttacgccccttactgtagatgcaaaatccagggtaggtgcgagcataaaatgaagagggtcacatgcgttaatttacgtttagtcctttcagtgtcacgaggcagacaccctcgtcggttcgatctttttcagctccaatcaggccgccacataggaggcgtaggcacgcaccatccgcagcgaccgtcgagcacgagcacatggatgtattattggcagaaccagctgccttggtcgtctcttgacacaactaaccctccgtccacaatatgttttcaagcaactttt

SEQ ID NO: 5288 - DNA, 448 bp, Triticum aestivum
  Clone ID: LIB104-015-Q1-E1-D6
ggtaccgatctagaattcgcgggtcgacggggagcacaaggagggcatgatggagaagatcaaggacaagatcagcggcgacggccacggcgacggcaagaaggacggcgagcacaaggagaagaaggacaagaagaagaagaaggacaagaagcacggcgagggccacaaggacgacgacggccacggcagcagcagcagcgacagcgacagcgactgagccagctccggcccgcgctccggcagcgtgcagtgtaggcgagatcgatgatgaacacttgggagaagtgtgacagacatatatgttgcagggtttggagcgtgtggtagcatatgtatgtaatgcgtgacatgcctcatggatcttgtgatgtataataattagccggccgcactgcactgaacggtgcttgtaataataacgttaatcatgttggtattgatgtat

SEQ ID NO: 5289 - DNA, 389 bp, Triticum aestivum
  Clone ID: LIB104-015-Q1-E1-D7
ggtaccgatctagaattcccgggccgacggggagtctcttagaacagcatggtatttgctatggttatgaatttggtcccagaatgatgagcatccaacttgggtataataaaaactatcatagaaagtgcattaaacactaggatcaatttggttcttgataattgttttgagatataaaggtagtaatgttaagatccatgctagtgggtaattatgaaattgataaatacttgtgttgaagttggcaagtcccgttgcatgcacgtatggtaaaagttgtgtgacaaatttgttgcttgaggtgctcttttgattgtcttccttatgagtggcactcggggacgagcgatggtcttttcctaccaatctatccctctaggggcatg

SEQ ID NO: 5290 - DNA, 327 bp, Triticum aestivum
  Clone ID: LIB104-015-Q1-E1-D9
ggtcaagaattaccgggtcgacggggtcatcgacacaccactgtccgtcgggttgattgattatcaagaagggcccagctcgctcctagcccttctgctcttcctcgttgttgcctctgccagccccctagcatcggcccatggtgatcttgactatggcggtggagtgaagaaatctgaagctaccggcggatacaccgccggtattgagaagaaacccgaagctgtctcggccagtgctgagaataaacccgaagccatctccgctggtgtggagaagaaaccagatgccgtctccggaacagacgtctcctccagcgcggagac

SEQ ID NO: 5291 - DNA, 332 bp, Triticum aestivum
  Clone ID: LIB104-015-Q1-E1-E10
gggtcgacgggtacttcaagccgtggcgtctcagcttgctaaggtggttgtggacttcttccatgggagcaggtgatgtgctcctatagtcctatggtttgcagcgggattggagtggggcgatgctacaagagatatgtttgatacattgtcgttgcctttatctggttcattaccctttatatggatgagggggacatggattgattaccctctaattgtggtttgtgttggactctggttatctcggcgtcgcgtgatgggcgcttgcctgggtaaaaaaaagaaaaaaaaaaaaaaaaaaaaaagcggccgctctaaaggatccaagc

SEQ ID NO: 5292 - DNA, 450 bp, Triticum aestivum
  Clone ID: LIB104-015-Q1-E1-E12
ggtcaagaattaccgggtcgacgggggatatcgatggcacgtctgcgtgtcctgacacgatgtcagagtcgccgccatcagaagagaaggaggagtcacacaagtctttcgagttccccctgtccaaagatttggctgcacaatcagcagatgttgggtctagcacgcccaagattcagatgccgcctcgacctgctgaagttaccactgctgcgaccactcgtgccaagtcaacagtgaaggctgaatcgtgcactcccaacgtgcaggggagctcatccactcgctcaaagaccgtgcaaccgtctaatctgaagcagtcctcgctggcattaacgaagaagagtgtgctaaagggggctcctgatccggtggccggaaaaggcatctgctgctgcaaatgatattaggcaagaaaatcaggctgtgaagaagcaaaaactagatgat

SEQ ID NO: 5293 - DNA, 417 bp, Triticum aestivum
  Clone ID: LIB104-015-Q1-E1-E2
ccggtccagaaatcccgggtcgacggggaacgtgctgaccatcttcgaggaggaaggcgggcggccggacgccatcatgatcctgacggtgaagcgcgacaacatctgcagcttcatctcggagaccaaccccgggcacgtacggtcgtgggagaccaaggacagccagctgacgatggtggcggacgacctgaagccgcgggcggtgctgacgtgcccggagaagaagatgatccagcaggtggtgttcgccagctacgggaacccgctggggatctgcggcaactacacgcttggcaactgccacacgcccaaggccaaggagattgtggagaatgcgtgcgtggggaagaggagctgcgtgctggccgtgtcgcacgaagtgtacggcggggacctcaactgcccgggcaccac

SEQ ID NO: 5294 - DNA, 436 bp, Triticum aestivum
  unsure at all n locations
  Clone ID: LIB104-015-Q1-E1-E5
aattcccgggccgacccatcagcgtgtgacataaattgctaggtagccgcatagctcgttcgccttgcgtcaatggttgacggatcaaggttccatcagttgaccagccaatcattgacttctagaaataaaatactaaaatctgaaaaacaaaaaatcacgaaaaatggataaatgattttgatttcaaataatttcatggatttgaaaaggaattcaaaaaaaaaaatcatcaatacgaaaaaagctcatggttttggaaaaaagttcatcaaattgaaaaaacacaaaattgaaaaggttcatgtgtttgaaagaagttcatgactttgaaaaatgttcattgatttggcaaaatttcatgagttcaaaanaagttcacttaattttganaataagtttacggatttgaaaaaagttcatcgatttgataaaa

SEQ ID NO: 5295 - DNA, 393 bp, Triticum aestivum
  Clone ID: LIB104-015-Q1-E1-E7
ggtaccgagtctggaattcccgggtcgacgggagcatgagaaaccacacaaaattttcttcgacacctacctgtaactgaattaattctgtaagggctcatttgccttgcatgattctaaaaacatagggataggtcatggaaaaacacctgaatatgataggaatgcacatgggaaacatcgcatttgtgaacacaggatttctgtcaacttgggtgtttgcttcacacgaattggaggagcagaggaatgcacataagcatggccacactagagtgaaaccatatgaaagcgtgtatatggaaaaaaatcagcggtcattcacacgaaacacggccgctcttcaggatccaagcttacttactcgtgcatgctacgtcaaagctcttcgat

SEQ ID NO: 5296 - DNA, 322 bp, Triticum aestivum
  unsure at all n locations
  Clone ID: LIB104-015-Q1-E1-F10
cgggtcgacggggaagacgcggcattggaagcccgcgcggagaggagtacgagggttcactggttcggctgcggtgtgaggctgccgtcgccgcagggcctggccagcggtgggaatagtangggcggtgaggcctccgcggcagcacagccggccatgggaggcaggagcatgcgacacgaccggcgctgctttgggtggctggagcaagaagaccagaggttgaagaagcactacggccgttggatggacatcgtacggtcactggagctagaatcattcatattgactaagttgataaagcccttcatccccatcaact

SEQ ID NO: 5297 - DNA, 339 bp, Triticum aestivum
  Clone ID: LIB104-015-Q1-E1-G12
ggtcaagaattaccgggtcgacgggcctaaactctggctcaaaggtttctttcaagaatcaagagagaacattcaaggagtggattgtttggaaattaaaaccttcagatttcttagaagtgaggttgctttccaactacaattatagcttcacttggatttatgtgaatataagcgtaagatgtctagtggcaatgctacaaaatcattgcaggcgtgactcgtgagtatccggattgcactgctgctggccgtttcttgcaactgcgcacaacaggcttctgacaaagccaagtcttagactcatgaggtcccttttttcagccaaactgaaagcac

SEQ ID NO: 5298 - DNA, 444 bp, Triticum aestivum
  Clone ID: LIB104-015-Q1-E1-G4
taccggtctagaattcccgggccgacggggtggcagtcggggacgagcgacagtcttttcctaccaatctatccccctacgagcatgcgcgtagtgctttggtttttgatgacttctaaatttttccaacaagtatatgagttcttttgactaatgttgagtccatggattatacgcaccctttcacccctccattattgctagcctctcttgtatcgtgcaactttcgccggtaccatacacccaccatataccttcctcaaaacagccaccatacctacctattatggcatttccatatccattctgagatatattgccatgcaactttccatcgttccatttattatgacacctttcatcattgtcatattgctctttgcatgatcatgtagttgtcatcgtatttgtggcaaagcaccatcataatcttcatacatttcg

SEQ ID NO: 5299 - DNA, 406 bp, Triticum aestivum
  Clone ID: LIB104-015-Q1-E1-G7
ggtaccgatctagaattcccgggccgacgggcgccgtttaggaatcgcgcgcataggcgtacggaattcgagtagatgcacgcagctaacgatccgatctggcccgacccatttaaacagccagtcgctctcggttttaggtttgggacttttctaaaatttcctgaacaagtttttctgctttacttctttattgttttttatttccttttttcctttttcttttccgtttcattttttcttttttctttttctgtttcttttctgctttattttttattatttatttatttattaacatttcgtcttccttttcttttttatttctcaagtccatttattttcaaacttgaacaaaaatttcaatttttctttggaattccaaatatgttctcgtcctcaaaat

SEQ ID NO: 5300 - DNA, 444 bp, Triticum aestivum
  Clone ID: LIB104-015-Q1-E1-H5
ggtaccggtctagaattcccgggtcgacggggaatagatcatcacttgaacataagtaatcatatgacaaaatctatatatgctgctgctatgagaataatcatgatgccttcatgtccgtattttatttttatcgacgcctctacctctaaacatgaagacatattttttgttatcggcttttcgcttgaggacaagcgaggtctaagcttgggggagttgatacgtccattttgcatcatgcttttatatcgacatttattgcattatgggctgttatttcacggtatgtcacaatacttatggctattctctcttattttacaagatttacataaggagggagaatgccggcagctggagttctaggctggaaaaggagcaaatattagagacctattctgcgcaactccaaaagtcctgaaactccacggaatatcaaaa

SEQ ID NO: 5301 - DNA, 444 bp, Triticum aestivum
  Clone ID: LIB104-015-Q1-E1-H7
gtaccggtctagaattcccgggccgacgggcccggcgacgcggcggtggtctggcccgcgggtcagccgccggaggaggaggcgggggagacggagaaggaggtgtggtcgaggttctacggcgccggcttctggaggagcccctcgtcgctcggcgacgagaacagatgatcgggacaggccggcggctcctgcatgcatgcgacgccctggcttcttctacggctttcttgattcttgctcgggtaggcttccttcgttttcctcggggggaaaccgatgtagaggaggaaatgggaagcttgtgtgtcgtgtttgatccacaccgcattcttgttccaccttgtatccgctcttttttcttcttttctttctggtgtacgtcttctttgttgccattgtatgcaactaaatgtatataccgagtaatgtgattggggaaaa

SEQ ID NO: 5302 - DNA, 484 bp, Triticum aestivum
  unsure at all n locations
  Clone ID: LIB104-016-Q1-E1-A4
gtaggctccggaattcncaggtcgacggggttgtgactgactttccgtcccctggatggatagtatgttcttatatccaatcattgcatgaaagttgcatgatctttgatttcagaattatttatttcatcttctttatagaatgttcagttctgaacttgtgaactttccttacgtaagcgtgcgtgtgcaactcaattgtaatcttaggaattttcttgttcattctagttagcaatcatatatgaacgaagttatgaataagatgtgcacacaacttgaacatgcggcttttcgttattacaattgtgatcgacccctctgtctattattgagatggcccgataagatcaccaactgtagatgtcaagacttaatacccacaataagcgctgctagtgaaaaagatgcccataccagtacaacatagatcgaagctcttcaacaaacataactcgataatttcattaacattggcttacat

SEQ ID NO: 5303 - DNA, 477 bp, Triticum aestivum
  Clone ID: LIB104-016-Q1-E1-B5
tccgaaattcccgggtgcccgggtcacggtggcaatggtaaacgcaaggctgagggcggtttaaactttgtggccaacaccaatacgcaaaacaatagtcagtgtcagaaggaaaagccaccccgacttggcgggcccaagttcaaccttgaggcgatgatgaaccagccttgcccaaagcacggtatgcaagagaagccggtcagtcatctatggaaggattgcttcatcttgagggcgtatagaaactccaattttttccagaacaatcacggcccgaatggcggaccaggatccagctctcacgggcctggctttggtggaggcggctcaagttctggtttccagggccatggcaatcaaggtggtttaagtcagcagtatggttaagggaatcaacaggagcaatctggttattagagtaacctgaagcagctaaatagtggaccatatcatgtgttcaccacgagtttatgc

SEQ ID NO: 5304 - DNA, 216 bp, Triticum aestivum
  Clone ID: LIB104-016-Q1-E1-B6
gtccgaaatgtccgggtcgccgggggtaaaaaaaaaaaaaaaaaaaaaaaaaaaaaaaaaaaaaaaaaaaaaaaaaaaaaaaataaaaaaaaaaaaaaaaaaaccaaaaaaaaaaaaaaaaaaaaaaaaaaaaaaccggccgcccaaaaggatcaaacctaacttacccttgcatgcaacttcaaaccccttcaaaagtgccaccaaaatccaatt

SEQ ID NO: 5305 - DNA, 445 bp, Triticum aestivum
  Clone ID: LIB104-016-Q1-E1-B7
cccgggtggccgggaacaatggtacaaattcaactatgtatctgccaaagttgattatgcttaactctaggcattgcattactatatcatggtgaactattctttgaagaatttgtaggaggtactagaaaagtatgacttgatgagggatgccttgattttaaagaacagcctgaaagaatttagtttagtaaaatattgtatagccttctcgtaaaagtttgatacactttttcaagaaaacgaactttggttaatcattaagctataacttttctcatatttgaacaacaaggttatttgagctctgctaaaaaagtggcaatgttaaaaaaaaggttattttgtgtaatttttgcaaactttgttgaaagaagctacaaataattgatttcgctgtcaagtctacagtccaatgttaatctacagggtggaatcttcaaac

SEQ ID NO: 5306 - DNA, 449 bp, Triticum aestivum
  Clone ID: LIB104-016-Q1-E1-C3
gtcgccgggagcggcatactgtgacttcaggtacactgtgacggtcccctcgggagaattctgaaatgtgcgcacgggatccacactgcctgcatcacacctcgtatgcgcgtggagcccccaggccaggtgtgcaaaacgccagccgcctagggtaggacatgagccagccatgcctatgttcgtccacattgatccaaccatggaatggatttacacgggctctcactcaaatcccaggtgcatgacagctagcgaaatagctagctacgatcaattgatccatgcgttagatacacgcgtgatcacacagttgcgcagtgccatgatcatgtccggccacaatcaggccacatattatgcaacctgctagatacctacggcattgacctcacatacagctcgaggagcactctgtatcacatataccagatacactcatacatgca

SEQ ID NO: 5307 - DNA, 375 bp, Triticum aestivum
  Clone ID: LIB104-016-Q1-E1-C5
tccggacttcccgggtgcgccggggacgcggccgacaagggcaaagggaaggagaggcgcagcaaggagcagaagaaactcaagcagagaggaggaaagacaggaggcaggagatttgaagtaaagagtaaactgaagagcaagagaagatgaaaatgtatgcgcatctttggaagagattttgccagtttagttcgttttttcggttcatggtgaaattttcaccggagaagaaacatgccttgtgccagtgtagctttgcgtagtttagtgcgaggcggttttcatgttcacacgaaaatgaaatcttggcgcggcattttatcttgtgtgtcattcgaaacaaaaaatagaagggatcttgtgtgtcattcg

SEQ ID NO: 5308 - DNA, 457 bp, Triticum aestivum
  Clone ID: LIB104-016-Q1-E1-C8
ccgggtcgacggggacagtaaacttattatcacgagcggaagccttaagcatggcctcgacatgctacagagcatccatagtgataacaagagctcaaaaaaatcgctaaaggatgttgccacagagaacgagtttgagaaaaggcttctggcagatgttataccaccgaatgatattggagtcacctttgatgatattggtgcgttggagaatgtaaaggaaacattgaaggagttggtgatgctcccactgcaaaggccggaattgttctgcaaagggcagttaacgaagccttgcaagggaatattgctcttcggcccccctggcactgggaaaactatgcttgctaaagcagtagcaactgaagcaggcgccaacttcatcaatatatcaatgtcaagcattacatcgaagtggtttggcgaaggggagaaatatgtgaatgctgttttttca

SEQ ID NO: 5309 - DNA, 343 bp, Triticum aestivum
  Clone ID: LIB104-016-Q1-E1-D5
tccgcacttcccgggtggacgggtgacaagaacacgagagagagagagagagagagagagagagagagagagagatcaaacacatagctactggtacataccctcagccccgagggtgaactactccctgctcgttatggagagcgctgggatgatgaagatggccaccggtgagggatccccccttcggcagggtgccggaacagggtcccaattggtttttggtggctacagaggattgcggcggcggaactcccgatctaggttattttctggaagtttgggtatatataagaggtgtttgcgtcgggaacaagtcaggggggtcttcgaggcggccacg

SEQ ID NO: 5310 - DNA, 478 bp, Triticum aestivum
  Clone ID: LIB104-016-Q1-E1-E7
tccggaattcccgggtggccgggagaattgttgatcatgagatgacactcaaggataagaagagctccacaacaattcaagtggttcttacaaagcttcatgtgatgctcctacagcatcaagtgagaattaagtctcgaatgaagaattgagcttaatgtgaagaacttcaacaagttctacaagaatagaagcaaagagagaagttgcaagtcaaggtcctaaaatgacaaaagatcttctagtcgtgatcgtaattgctacaattgtggaagacccggacactactccaatgagtgtacgactccctacaagaaaatataagattcaccaaaaaggaggagtagaagagatgaatcacctccaagagagaggagtagagatgatggttatgagcgaataccctctcatagaagcaaggattcagaaaggaaggacaagtcatcaaagagctacacaaggcgaagactgcaagctc

SEQ ID NO: 5311 - DNA, 473 bp, Triticum aestivum
  Clone ID: LIB104-016-Q1-E1-F1
ttccgaggtcgacggggacctagtagatagccaatgcaacttcgtgtacttcggatgtgtccaacgaccagaccacgaccgcttacggatccctacctttatcaatacctcatatatactcgcaatattcagattgcttttatcaaattcatgcttgttcatcgattgcttgcaggaatagaccttcgtggtcaggttgattgtgctccggtgtggtcaataacctctcagagttggtttagcgattgctaaagcgcaacgtcgtgcacgtttgtagtcagatcgtcaaagtcatcttcaccaaatccatagttatcatctcatcgaaagatcgggacaccccgcctctatcatgtggtatcagttttcaggttgctcggtgagaatttccagttttcctacattagatttattttcttacctattgtccaataaattgccatacacacaatcagttagatctgttcatcctt

SEQ ID NO: 5312 - DNA, 489 bp, Triticum aestivum
  Clone ID: LIB104-016-Q1-E1-F5
tacaggtccgaaattcccggggcgccggggcaaagtactaaacaccgcagacaaatacagcgacagtcgccacacataagagctatccgaagcgaaaattactactataatttgatgaggaggccttagagcccccgcaatcaaagaataaggaaaacacccggtcgggtaaacaaccctacggccaacatatagcagcaatgggcatcgtactcaagccggcacgcgatccgcacaaggactcgcatcaaaaagacagcccagccagatctatctacgggccaagaaagcaagctctagtaagcaatgcaacgcaacaagtatccgaacatcacggcacacccaaatacaggggtgccgcacaccccctatgtttcaccgatgaggtgctggaccatgaatctccaccgggattcaaacccgtaaacatagaggcatacgacggaacaacagaccctggagtctggattgaggattatatcctccaca

SEQ ID NO: 5313 - DNA, 474 bp, Triticum aestivum
  Clone ID: LIB104-016-Q1-E1-G5
tacaggtccgtacttcccgggtcgccggggggagaatggaagcacgggagcgtccccctccccggcgctccttcttctcctccgcggctcaccaccgccgtggcgcctcatgccggcgccccactcacgacacgggagcgactctgccgcgcagagcgctcacctccttatcttgtgtgccgaggcttgctcgtctattttcctttttacccaggcccaatagaaagtaacggcccaagcgttaacggaagaacgtagaccaagcccgtgagcgaaagaacgttgtaataaggaattttgacaaaaatctttagtgcgtaccccaaattagtaccacctcgtttatattacgattttatctatataaattgtaaaagcgtattatgacatgagaagaaagcgtattgtgacggtgaacccgacaaagtcaatccgtgctttattattagggagagataaatggatgcagttttc

SEQ ID NO: 5314 - DNA, 410 bp, Triticum aestivum
  Clone ID: LIB104-017-Q1-E1-A1
taccggtccagaattcacgggtcgacgggtagtacacacgacaacatccaagtttggtataataaaaactatcataggaagtgaattggatgctatgatcaagttgatgcttgataattgttttgagatatggaggtggtgatattagagtcatgctagttgggtaattgtgaatttaaagaatacttgtgttgaagttggcaagccccatagcatgcacttacggtaaccgttgtgtaacaaatttgaaacatgaggtgttcttagattgtcatccttatgagtggcggtcggggacgagcactggtcttttcctagcaatctatccccctaggagcatgcgcgtagtgcttgatttttgatgacttgtagatttttgcaataagtatatgagttctttatgactaatg

SEQ ID NO: 5315 - DNA, 311 bp, Triticum aestivum
  Clone ID: LIB104-017-Q1-E1-A7
tgtaactattgttgttgttgctgttgctgttgttgttgttgttgttgttgctgctgctgctgctgtcgctgctaatgctgcagttgctgttgttgttgctgtcatcaacgttactgttgctgtgaccgttgctgttgttctcggtgtcgctgttgctattactgctagtgcagttgtatgttattgatctctgcagtcgtttatgctcgtacagttgttactgttcttctagttgttgtagatgcaatagctggtggagctagagaatgttatctttattgatcattgatgctattacagaagccttcaaa

SEQ ID NO: 5316 - DNA, 463 bp, Triticum aestivum
  Clone ID: LIB104-017-Q1-E1-A8
taccagtctagaattcccgggtcgacgggggcggttgtgccgacgcacgctccgagagcgacgaggagagcggcgaggaggtggacgaggcatgcgccgaggcggccatcctgctgaccaagctggcgatagcgcggcagagcccggacaacgtcagcgtcgtcgtcgtcaacctcaggaggcgccgcccgagattctgaccgccgctggatccatggatccaccatactatcgtccgtgatccctgactcagcggcgaacgtggcatccatagcggaattcatgaaatacacaacgaaattgtttcgtttattttccgggggtggcaaaggtgttgaggccagacagacccacgccgcccccgccattttcctttcgaaagccggcgatggtttccggcgtgtcaagaagctttctttctcgagcgtcatgagaaactgtactataatccggtggaaacgaa

SEQ ID NO: 5317 - DNA, 480 bp, Triticum aestivum
  Clone ID: LIB104-017-Q1-E1-A9
gggtcgccgggggaaggcgaaatcttttctggctgatagataaaaatccccaccacatccgcaagcgcgaactccctccccggatctgcaactagccggcttccctcccgatccgtctcgccgcggccgagatccttccttcctccggcgagagccaagatgtactcgtgggagatgctgtcgttcaacatccacgacgggttcctggaggcgatcgtgcgggggaaccgctcgggcctcctcacccaagccgattacaacaacctctgccagtgcgagaccctcgacgacatcaagatgcacctctccgccaccgagtacggtccatacctccagaacgaaccttctcccttgcacacgacaacaattgtggagaagtgcactctcaagctggttgatgaatacagacacatgttgtgccaggcgaatgaacctctatctacattcctacagtacataacgtatggacacatgatcgat

SEQ ID NO: 5318 - DNA, 474 bp, Triticum aestivum
  unsure at all n locations
  Clone ID: LIB104-017-Q1-E1-B12
gtccggacttcncgggtggacgggatatatttaaaaataataatttagtactccctctgtcctaaaataagtgactcaactttatattaattttatgagaaaaaatcaccatatattagaaaaggttgagtatgtattatgaaaatgttcatcacataataaaagagctcaccgtatataaaacgatcagtaaatataaagaatatgtatattaataatatattcggccggtgttcggaaaatattgatcgcatatttaaaattgtacttaataaactatatgaatgaaaaagtgcaaagtaaaaaccaaaaagacaaacaatgtgaaacccagacatgaaagaaagagaaaaacccactaacactgtgtattaaaaaaggcaaaagaaaaaataaaagggaaaataaagaaataaaataagacataaatagaaatctacacataaacataaaaccggaactaaattggaacag

SEQ ID NO: 5319 - DNA, 425 bp, Triticum aestivum
  unsure at all n locations
  Clone ID: LIB104-017-Q1-E1-B2
gggtcgacgggtcggtacaaggggtcagtccctggccgtgctcccaacctgaaccgcaacaggaagagaggccacgccctgctgtatgccgattacttttccaacanaccgctcttcaagccggataaattctgacgccattttcgaatgggaaggcatgtgttcaatcgtatctgagagggagtggttgctcatgacccatacttcgagtacaagagggatgtccttggcaagcttgggttctcctcttaccagaaatgcactgcggccgtccgcatgcttgcctatggaattccaggcaatttggtggatgacgacgtgcgtatgagtgagacaacatgtctgatgtcaatgtacaagttctgtcaggctatgatcgaggtgtttggtccagagtacttgaggcagccaactgccgctgatac

SEQ ID NO: 5320 - DNA, 427 bp, Triticum aestivum
  Clone ID: LIB104-017-Q1-E1-B6
aattcccgggtcgacggggaggacgatgtccagatcgcggagcgggctgtccctgaagccgtgtttggcgagctcggcaagagagccgcagagagcagggaggaaagctctagtgctcaagagaacaacgagcaacagctgggtgctctcgagagaatcaagcgaaggcgtcaatagggtcgaagattgtgatccaagcacgccattacctgtcgtttgagcctaatgatgttgtagctgttacgtgtaacatgttcttgctagcgtttgctcttcttgtacaatgattttgcaggagttaatccggtgtggatccgcagcgtttttctgtgtacaaactgtaaactcttgggacacgtgtccatcagtttcagtgaaattttgtcgatttcaacgatgaacaatggactggcagctttgttacaaa

SEQ ID NO: 5321 - DNA, 409 bp, Triticum aestivum
  Clone ID: LIB104-017-Q1-E1-B8
ggtaccagtcaagaattcccgggtcgacgggggcggcaaaactccgaggctggagactcgaggagaacgaataagaagaaatcacgggaacaaaaaggagacgacccttcagtcttatttataaggcaacagagttatatcaaacgcacggatgcaagagctgcagttaaaagaaggtgtgatatatgaaaaatgtcataaggacgtcatgcaggttctacaacaaccacaagtgatgacatcatgacagttgaccaagtaccagcacatgtcgatgatacaagattttgtgacagattgacatgaaccatttcagatcacactggggcctaaagttggggatactaccactatgtgtaagccggcatacttgggccgggttaacttcattagtaggacaagcagatga

SEQ ID NO: 5322 - DNA, 399 bp, Triticum aestivum
  unsure at all n locations
  Clone ID: LIB104-017-Q1-E1-C10
tacgagtccggacttcncgggtggacgggcagcccatccatcatgctacgtgcacctagacaaaggcacaagggccacaaaagttggtttttacttcatggagcaagagaagcaatgtgatgggcctaaggatttttttgatacgctagtagtacaactatgggctgatccatatgtttggcctctgtacgccaaggcgttcgagagatcaacagataaggcagcgtccatacttaataaatagttatttagattagagtttagactcgggttttattgtactccctccgtccggaaatacttgtcatcaaaatggataccaggagatgtatctagacctactttagttttagatacatccctttttagcaaggtttgatgacaggtacttccggacgg

SEQ ID NO: 5323 - DNA, 459 bp, Triticum aestivum
  Clone ID: LIB104-017-Q1-E1-C6
aattcccgggtcgacgggtgcatgtcatagagagagacctgacagagcctgatagaattgtgggtgaattgttacaacctggaggctacctgaaattgatggaattgggtctgcaggactgcgttgatgaaattgatgcacagcgtgtccttggttatgcattattcaaagatgggaagaacacaaaactttcttaccccttggagaagttccattcagatgtggctggcaggagctttcacaatggacggttcatacagaggatgcgagaaaaggttgcatctttgcccaatgtccaactggagcaaggaacagttacatctttgcttgaagaaaatggtacagttaagggtgtgcaatacaagatcaagtcaggtgaagaactaaaagcttatgcaccattgacaattgtatgcgatggctgcttttcaaacttaagacgtgccctttgctctccaa

SEQ ID NO: 5324 - DNA, 402 bp, Triticum aestivum
  Clone ID: LIB104-017-Q1-E1-C7
aattcccgggtcgacgggtacatgtaaactattgactcacataccttcaaatggtgtgtcttatcttcatatagatgaattaatttagcccatatataatatccacctaataatcagatatttggataataataataaacagctggttaccagcagctcttgccatgatacttaaggcacaaacagtttctacaacttccaatgttatcactatgcataatattttgttgacagaaaattcactcccctgcagattggctgcaaacaacaaaaatatgctgacaagttggccaacttaccaatgcatcagttttcgtacttgtcttgaaatctgctaggctttgtagtctggctagtattcctgaacgtttgccagtcttcaaatttgcacggacctttcat

SEQ ID NO: 5325 - DNA, 378 bp, Triticum aestivum
  Clone ID: LIB104-017-Q1-E1-D1
actccctatagtgagtcgtattaagggtggcggttttgttctctttcactaagggggcttataagatttcctgttgagttttgtgttgtgaagtttacaagttttgggttaagctttgaaggactacggaatacagtggcgagagcctaagcgtggggatgcccatggcaccccacgagatactacgagtagcaaaagcctaagcttggggatgccccaagaacagcatcccctctttcgtcttcgttcatggggaactttacttaaagctatatttttacacgccacatcataagtatttttcctgcagcgtcacgtactacatcaatcttaactttttaatataccacaatcatcctttctgtacacaccttttga

SEQ ID NO: 5326 - DNA, 303 bp, Triticum aestivum
  Clone ID: LIB104-017-Q1-E1-D2
tcgtattacatgatggcggagatcgacaccgacggtgacggcttcatcgacttcagcgagttcatctccttctgcaacgccaaccccgggctcatgaaggacgtcggcaaagtcttctgagtcagttcatttcacctcagccgtccgatccaggagccgattcatctacgtagggcctcgtatatcaatttcatgcaactacctactccggtcccgatccagcctcagcttcagctgaggccggccctaactttgtttgatcatttttttgctaccagtagtaactagtgatgattactgttc

SEQ ID NO: 5327 - DNA, 407 bp, Triticum aestivum
  unsure at all n locations
  Clone ID: LIB104-017-Q1-E1-D5
attcccgggtcgacgggagttcattaaactaccttaggtggtggttttgttttctttcactaagcggggcttataaggatttcctgttgagttttgtgttgtgaagttgacatgttttgggttaagctttgaaggactatggaatagactggcgagagcctaagcgtggggatgcccatggcaccccaagagattctacgatangcaaaagcctaagcttggggatgccccaagaacagcatcccctctttcgtcttcgttcatggtgaactttacttgaagctatatttttacacgccacatgataagtgtttttcttggagcgtcacgtactacattaatcttatctttataatataccacaatcatcctttctgtacacaccttttgagataagcccacatgat

SEQ ID NO: 5328 - DNA, 437 bp, Triticum aestivum
  Clone ID: LIB104-017-Q1-E1-D6
attcccgggtcgacctccgcggacaaggtgcagcgcatgatggcggagatcgacaccgacggtgacggcttcatcgacttcagcgagttcatctccttctgcaacgccaaccccgggctcatgaaggacgtcgccaaggtcttctgaatcagttcatttcacctcagccgtccgatccaggagccgatccatctacgtacggcttcgtatatcaatttcatgcaactacctactccggtcccgatccagcctcagcttcacctgaggccggccctaattttgtttgatcatttttttgctaccagtagtaactagtgatgatcactgttccatcatttatttattttatatcatcacaagtttcttttctttctctacctttttgtcgatcgtcggctccagctcgatccaacgattcatgctgctaattgtttgtg

SEQ ID NO: 5329 - DNA, 451 bp, Triticum aestivum
  unsure at all n locations
  Clone ID: LIB104-017-Q1-E1-D7
aattcccgggtcgacgggggaacgaaaagatcatggctaggggaacttttgccaacattcgcattgtgaacaagttcttgaagggagaggttggccccaaaaccgtccatgttccatcaggggagaagcttgctgtttttgatgctgctatgaaatacaagaatgaagggcatgacactatcatcctggctggtgctgagtatggcagtggaagctcaaaggattgggctgcaaagggtccaatgcttcacggagtgaacgccgtgatagccaacagttttgacaggattcaccgtagcaatcatgctggaatgggcatcgtccctctatgcttcaaggctggcgaggatgccgacagtcttggcttaactggccatgagncgttacaccatccagcttccgactgatgtgaatgaaatcaagcctggccaagatgttacagtcacaaccg

SEQ ID NO: 5330 - DNA, 440 bp, Triticum aestivum
  Clone ID: LIB104-017-Q1-E1-D8
aattcccgggtcgacgggggcagtgaggcgaacggcggggatgacctacatcggctactccaggctctgcgcgtccattgtgcggagctgcctcaaggagccctacaagtccgaggccgccgaagtcgagaaggtccactactcccgctccaagtggaccgacggaaagcagcccaagcccaccatctgcgaagatgataaatgaaagatccggtgccatggtgacagagtccttcctacggacgttttcaaaagctactgtgtttcgtgctggccattctacctaaaactcgttatctgttacatttatgtttcacgctcaagaataaattatttacgtgacattggatctgttccgacaccattttattttaacttttaatcgctccttctctaaaaagaaaagaagtggaagaaatcaaaacaaaaaagcggccgct

SEQ ID NO: 5331 - DNA, 431 bp, Triticum aestivum
  Clone ID: LIB104-017-Q1-E1-E1
gggtcgagcgaaggtttgcagatcaccgacaaggatcgaccatgagtgaaatcaacccgagtcagatcagttctacgttgaaggagaatagggtgaagaagtttatcttccgtgttaagtcacagcccctccaaccagacgtagccctttggcagaagggtgaactggtctaccaaatatatctgtctccatcaagcaccattggttctatttactctactgcatttccatcagcagtttattttcgtgctctgtgccgatagttttttcgattatttcattcaggttgttatcaacttgtgtttcaatgttcaccctgtttcactgttttcgtctgtattcatgtgttatcatcttgtccctaagattcacctgtgaaatccttccatacattgctatgtctcattctactacatttttttgcatgttgc

SEQ ID NO: 5332 - DNA, 414 bp, Triticum aestivum
  Clone ID: LIB104-017-Q1-E1-E5
attcccgggtcgacgggacgacacagtcataatttcagtttccctagttttccatgtcaagctggcgcgctaagccattatgcattgaattccgatgaccatcgcgctaccttccccctataagtactgtttcccagccttctccagtgccaccgtgacccaactcgccatatcctcataagcccccaccggctcgatgtcgctcgccacgtacgccatgcccccgcccgtccacagtaggcgacgccaaaggcggtcactgccggaactagtgtttggtttttcactggaaggcagacggagggaggaggcattctatctgtctttagatggcaatgcgtagaccgaggagttgttggagcgcgaccgcatggcggaggagcaggagttgttggagcgcgaccgcctggcgga

SEQ ID NO: 5333 - DNA, 368 bp, Triticum aestivum
  Clone ID: LIB104-017-Q1-E1-F1
gggtcgaggcgagcacttaggtgaaggcatacttcgttgactgaggaagtgtataaagatgttgtctgacggtggttgtatatcaatctttgcttgctaaacttccgagttccactgggtcacgtttcatgcacatgtagtcggtggggaattacttaccatcatctactagtgagccttgattacagcatatgtttcgcgacgtacggtctccaaatagatgcagctccctactatcaggtagcggcaactcagtttacatcaggcggtcagttacccatcagttattgggtgctgataacctgacatctggatctcacgcaggataataatgcgtagggtgaccctgagacaatattcccctggat

SEQ ID NO: 5334 - DNA, 428 bp, Triticum aestivum
  Clone ID: LIB104-017-Q1-E1-F3
gggtcgacggggattccaatttccattaaggaaaggcatggaacactttcctagaaagaaaattaaattactttatgaatctattatgagatccacttatggattgcataccaaaaatgacaatacctagatctattcttgtttttatgcctagctaggggcgttaaacgatagcgcttgttgggaggcaacccaattttattttcgtttcttgttttttgttcccgtttagcaataaatggttcatctagtctatgtttggatgtggttttatgttttaattggtttttgtgccaagtagaaccttcgggaagacttgggggaagtctttgcggtcttgctgtaaaaaacagaaactttagtgctcacaagattttatgccattttttactaaagagtgccattaggttgattaattttaagatgat

SEQ ID NO: 5335 - DNA, 430 bp, Triticum aestivum
  unsure at all n locations
  Clone ID: LIB104-017-Q1-E1-F4
gggtcgagtcatcaggatagaatcgatataatctggaagggccaggagctcatcttccaaagaacgatccggttattgaccggcatcgatctgtcaggcaacctcttgtctcagtgcatccctgacgagctaaccaacctttacggcctccgatttctgaacctgtcaagaaatcatctgtcatgcggcatccctggagatgtcggtagtttgaagaatctcgagtttcttgatctatcatgtaatgagctttcaggacacattccacagagcatctcgttcttgtcaacgctcagcatattcaacatctccaacaatcatttgtcaggcangatacctggtgggagccagatgcagacgttgactgaaccttcgttttaccggaacaattccggcctttgcggatttcctctagccgattgtccaacta

SEQ ID NO: 5336 - DNA, 416 bp, Triticum aestivum
  Clone ID: LIB104-017-Q1-E1-F6
aattcccgggtcgacgggggtgcctaccagcctcatcatgcatggtcttcgaagaagggtcatcctcacggccaggtgtatgggtataggaactccctctgggcagaacaccttggtatggttgatgaccacttcaaggaaccttctagcctggactgtgtaagattagtgaaccaaatagccgaagaaaactgggaaagattcgcgtcagaagagatgaaaacgttgcaagggcacctcctcagatacccagtgaaggtagagcccgatggtaagattgtcccgctgcccgaccaagaatgcttccccgacgttggcggcaagatctgcggcgctccgacctcgcttcctgattcgctgacgatgtagcatcacagtactgacttctcttcagggtccaatctggttcgtttgct

SEQ ID NO: 5337 - DNA, 466 bp, Triticum aestivum
  Clone ID: LIB104-017-Q1-E1-F9
gggtggccggggaataaggagaggcaagatcctaagcttggggattcccaaggcaccacaatgtaaatccaaggacaaccaaaagcctaagcttgggtatgcccgggaaggcatcccctctttcgtcttcgtctatcggtaactttacttgaggctatatttttattcaccacatgatatgtgttttgcttggagcgtcttgtatgatttgagtatttgctttttagtttaccacgatcatccttgctgtacacacattttgggggagacacgcatgagtcggaatttatttgaatactctatgtgcttcacttatatcttttgagctagacaatattgctctagtgcttcacttatatctttttagagcatggtggtggttttattttataaaaattatttatctctcatgcttcacttatattactttgagagtcttttagaacatcatggtaatttgctttgg

SEQ ID NO: 5338 - DNA, 437 bp, Triticum aestivum
  Clone ID: LIB104-017-Q1-E1-G1
gggtcgaggggtcataccaaggctaaggagtgatgtggtgcaatgtcttgtcagtttcgagctggtgttcccatcatcctgcttcaatatcatgacgcacgtcctagttcatctagttgacgagattgtcattctgggccccgtatttctacacaatatgtacccctttgagaggttcatgggagtcctaaagaaatatgtccgtaaccgcgctaggccagaaggaagcatctccatgggccatcgaacagaggatgccatcgggttttgtgttgacttcattcctggccttaagaagataggtctccctaaatcgtggtatgaggggagactgactggaaaaggcacgcttggaagggactcaataatatgcagggacggatattcttggtctcaagcacactacacagttctacagaactctaccttggtgaccc

SEQ ID NO: 5339 - DNA, 409 bp, Triticum aestivum
  Clone ID: LIB104-017-Q1-E1-G3
gggtcgaggcgataaactcatgcaatatgatcaaaaccccatctttttatcctcgatggcaacaatacaatacgtgtcgtttcccctgctgtcactgggatcgagcaccgcaagattgaacccaaagctaagcacttctcacattgcaagaaagatcaatctagtaggccaaaccaaactgataattcgaagagacttgcaaagataaccaatcatacagaaaagaattcagaggagattcaaatattgttcatagataaactcgatcataaacccacaattcatcggatctcgacaaacacaccgcaaaaaaagattacatcgaatagatctccaagagaatcgaggagaactttgtattgagattcaaagagagagaagaagcatctagctaataactatggacccg

SEQ ID NO: 5340 - DNA, 342 bp, Triticum aestivum
  Clone ID: LIB104-017-Q1-E1-G7
attcccgggtcgacgggcacaggcacgagccttcaccatggaaaagactgagacgggagacgtgtaggtgcccatacacttctcaatgtcccatcaccaggctcggaactgggactgctgtccattcaagaaatcagtgcgtccagctcctaacagtctggcatcttcgtgatgctacattacatgtagcaatgtcaatttatatagttatgcagacgattcgttatgataaatcccccgcgagaccaaaatgcgatacggacacgcgagatgatacgcgcttacatgatcgatcatacaacatgcagtctctgcaatacatgtcattctggtgtccgttac

SEQ ID NO: 5341 - DNA, 82 bp, Triticum aestivum
  Clone ID: LIB104-017-Q1-E1-G9
ggtatcactataatgagtcgtattaggtgacgtacgttcttatccttaagttcgggtactctctgcagtggcataaccatgt

SEQ ID NO: 5342 - DNA, 426 bp, Triticum aestivum
  Clone ID: LIB104-017-Q1-E1-H1
gggtcgacggggctattggtcagcttgcaaggctcctgtgggaagctgagaagtcggggcactaccagtacttcctctgtgtcactggagaccactctactcctgttgagtacggagaccacagctttgaacctgtcccgtttgcaatatgccgtctgagagatttcgtgggagcgattggggagggcaatgtgatgaataccccccttgacgatttcccgctgcctttggttaaatccggagaagatttaactgatgattcagaaccagcggaacacaagcctggggagcgtaaagcttttagcggcgatacagtgtgtgaatacaccgagattgctgctgcaaggggctgccttgggcggttccctggaagtgagatgatgggcatcatcaagaagttcatgaaagcaaagaacgattaacgcc

SEQ ID NO: 5343 - DNA, 456 bp, Triticum aestivum
  Clone ID: LIB104-017-Q1-E1-H11
gggtggacgggtgatacgtatactggttgtgatatcaagattaggagggtgaatgttagagctaatcttgatatttgtattagcatgtttgagttttgcatgtagtctagtctagtgtggtgttcgtccgacgaaggcttcaggtgagcgcgccaatgaggtgagatgccaggatgccgtgtgaggcggcgagcacggcgagatgccgatggtgctgcgtgagaagcggcaagacgtatcagaggcaactcgacgtagaagaaggagcggcgctgcgaggaggcggcgccaacaattggcatcagagccttgtcgatccgcggaagcgatggcagcgacgacgacgcggcggactccatgttaagtggaagacgtcggcacgatgtgggtggccgtcggcggcgcgatgctaccggtggccggttgcggtgtgatgccgctagattatggcggtgc

SEQ ID NO: 5344 - DNA, 467 bp, Triticum aestivum
  unsure at all n locations
  Clone ID: LIB104-017-Q1-E1-H7
tacagtcaacaattcncgggtcgacgcctacctgcattacatcttcggcgaggagaacgagccggagcaggtgagggagcaagagcttcatcggccggtgcaggcaccatgacccatcggcagcgatatcagcgtcacagtccttgggagcacaatcgacatattgcagaggaggtgtgataagcagtttgccatccaccgtgcaaaagatccagagctgctcggcggcatgatcgacgacccacccgaagagacaccctcaccagtgctcatcgagagcctgatgccccacaaggaatgggcagaggacctctgcgattcagtcaagataaaggcagcctacggcttcatcattgcccgcggcgtccgtgtcaacctcgattctgatgatgtggtggccaagctcgagcgcatccttggcggagttgacgtccctgacgaagtagaacatccccaacgttataacc

SEQ ID NO: 5345 - DNA, 314 bp, Triticum aestivum
  Clone ID: LIB104-018-Q1-E1-A11
ccctagagtgagtcgtattacgtgcacgtttgtagtcggatcgtcaaagtcatcttcaccaaatcgatagttatcatctcatcgaaagatcgggacacccccgcctctatcaagtggtatcagttttcaggttgctcggtgagaatttcgagttttcctagattagatttattttcttacctattgtccaagaagatgccacaaagaagagttagatctattcatccttggtccaagccagtctgagcctttgcaattttcttttcattgcttgcatagttgatttatcggttgcatcgtcgtgtccaattgct

SEQ ID NO: 5346 - DNA, 400 bp, Triticum aestivum
  unsure at all n locations
  Clone ID: LIB104-018-Q1-E1-A6
taccgatccagaattcgcgggtcgacagctccctctacgacggggattgcaaatgcatggccgcagtctccaagatcctttcatcgtaccctgggccagccagacgccttgacatccgcatgttcattaccaactgcaaggtctaagccaagtacggcgagtggttcttatcgccctcccttgatcaactcgaggagctcagctttgaagctggatgatgtcgctctctgccgccatccgcgctccgcctcacgccaacgctgcaccgcgccagcttcagctcctgctatcttcnccagccgcgcctgtccttcttctccctcaactcaagcagctcgacctcttcgacattggcatctcgaagcaggctatggagcacctgctccgcaactgtactatg

SEQ ID NO: 5347 - DNA, 414 bp, Triticum aestivum
  Clone ID: LIB104-018-Q1-E1-A7
gacggggtaggttaaacaccaatataaataaataatgagttcattacagtaacttaaagtggtggtttgttttcttatactaacggagctcatgagattttctgtttaagttttgtgttgtgaagttttcaagcttttgggtaaatatttgatggattttggaacaaggagtggccagagcctgagcttggggattcccaaggcaccccaaggtaaaattcaaggacaagcaaaggcctaagcttggggattctctggaaggcatcccctctttcgtcttcgtctatcggtaaatttacttgaggctatatttttattcaccacatgatatatgttttgcttggagcgtcttgtatgatttgagtctttgctttttagtttaccacaatcatccttgctgtacactccttttgg

SEQ ID NO: 5348 - DNA, 59 bp, Triticum aestivum
  Clone ID: LIB104-018-Q1-E1-B12
gggacaccctatagtgagtcgtattaggagattggcacggagtacacggttgagcatgt

SEQ ID NO: 5349 - DNA, 440 bp, Triticum aestivum
  unsure at all n locations
  Clone ID: LIB104-018-Q1-E1-B2
gggtcgacggggcgacggaagcgatggactgccggccgttcggcggcggcgagagcaagctcaaggcggaggcgacgacggacaacaaggggtggtacaagatcgagatcgatcaggaccaccaggacgagatctgcgaggtggtgctgaccaagagccccgacgcgtcgtgcgccgagatcgaggagttccgcgaccgcgcgcgcgtcncgctcaccagcaacaacggcatgaagcagcagggcacccgcttcgccaaccccatcgccttcttccccaaggagccgcgcaaggagtgcggcggcatcctccaggcttacgacctcaaggacgcacccgagaaacccatgaaccccatcccatccatatagtctcgctcaggttgcttccatcatcatcatcatcatcgtctcctcatgactctcctacgtacggtgccc

SEQ ID NO: 5350 - DNA, 149 bp, Triticum aestivum
  Clone ID: LIB104-018-Q1-E1-B3
gggttcacgacagaagatcgtgtaagttgttctggtgccattcgaaatggttcaaaggtaatggattgaggctgctctgaaggatccacactgacgtacacttgcatgcgacctcatagcacctctatagtgtcagctaggattcaatt

SEQ ID NO: 5351 - DNA, 421 bp, Triticum aestivum
  Clone ID: LIB104-018-Q1-E1-B5
aattcgcgggtcgacgggcccataaaataagagcgtttttgacagtagtgtagtgtaaaaaacgctcttatattatgggacggagggagtagcatggaacaatcaaaaattatagatacgttggagacgtatcagcatccccaagcttaattcctgctcgtcctcgagtaggtaaatgataaagaaacagaatttttaatgtggaatgctgcctaacatgttcatcacatattcttttcttttgtagcatggacatatggacttttatatggttcaaagcaatagtctagttttgaaatgaagatttcaatactcaagcatatcaacaagcaaccatttctttcagaatatcaacagtaaagaaagttatctctagcccatcatgctcaatcattgatccattcatgaaacacactcgcat

SEQ ID NO: 5352 - DNA, 413 bp, Triticum aestivum
  Clone ID: LIB104-018-Q1-E1-B6
aattcgcgggtcgacgggtccatagaatgtcaagctcctctttcagcagccccagatacagattgatgtcgttccctggttgttttggcccttcaattagcatactcatgtgaatgtacttcctcttcatgcacaaccaggggggaaggttgtacatccacacaaacacaggccaggtgctatgtgtgcttctctggctgccaaatggattgactccatcggtgctcgcgcccagcacgatgttccttggatcgttcccaaattctgggtattcgaagttcaacgcttgccactggctcgcatccttacggtgactcagcatcttgtcttttttatctatctccggatcatttgcgtcaacttctcgcttcttcccctccctacccgcctgccaacgcaggagctttgctacc

SEQ ID NO: 5353 - DNA, 398 bp, Triticum aestivum
  unsure at all n locations
  Clone ID: LIB104-018-Q1-E1-B7
aattcncgggtcgacgggtaacattaaacccactatcttcgatttcaaggaatttaattatgataattgttctttagtagattgtatttccttgttgcaatctgtgttgaattctcctcatgcttatagtcaaaataaagcttttaccaaacatattgttgatgccttgatgcaatcttatgatgaaaaacttaatttggaagcttctatacctagaaaacttaatgatgagtgggaacctactatagagattaaaattaaagatcatgactgttatgctttatgtgatttgggtgctagtgtttccagaattcagaaaactttatgtgatattcgaggtttccatgatcttgatgattgctctttaaatttgcaccttgcggattccaccattaaaa

SEQ ID NO: 5354 - DNA, 406 bp, Triticum aestivum
  unsure at all n locations
  Clone ID: LIB104-018-Q1-E1-B8
aattcncgggtcgacgggagaaggcagtgtatgtcatttcgcacacggaggtgacacgttccctctcggatccacgggccttcttgagagaagctccgatttgcaaaaagcttataccaaagcttgtcccaattcggccataaaatttaccacaacatgttggtgccatgtcatgacaccatgccaagtttcatgattttcaagcgtgctttggatttagatgaattaagaaaccaactcaatattttcggtcgagccataacgcccagatgtttgaatttcattctcatttcatgcatgggacctagaaattcacctaaggacacacatgtgatttttcaaccaactttggtgcactggagcatgtgcttgtagtttaaatttaaattatcacattaaatgacta

SEQ ID NO: 5355 - DNA, 384 bp, Triticum aestivum
  Clone ID: LIB104-018-Q1-E1-C1
ggtccagaatatccgggtcgaccggttgatacacacttgattgaaggagccggtcacttccaaatggaaggtcctgcttttgatgcccagatggtagatctcattgtcaattttatcaaatctttgcccaaatagtgtactgtaactgtgtgaaagtgcgcaaagcgtgtagtgatgaacatcgaaaacatacgatttggatagtgccttcatggtttgtattttctcgtgttgtatgtgtacactgggtgttgtgttcgagatagtaatcaaatcttagtttccatttcatatgagttttagactcagtgatgcaagccgcatggaaaatcttattgtcatcacgacattgtaatccaatcttattattgtttgtatagccat

SEQ ID NO: 5356 - DNA, 440 bp, Triticum aestivum
  Clone ID: LIB104-018-Q1-E1-C10
attcccgggtcgacgggatcttcctagatgatgataggcgcttcagcatcaagctggactagaacttcaaagtggatacagtaagtcacaacgacaagtcttttttcgtaattaagcatgacatctgcttcatttgcttcaacttatattttttactattctactagcgtatcccctgccatgcaagagtttttgtattggataagataggtttcagtcatagtatggaggaaaagaaagtttacttgaagaccgagcatggttatattttccatgcgaagttatacaattcagacgactacacctattttggatgcaaaacatggcgagcactatgcaagacttatgcaattgagccctgataagggttatcaccctttgaatatccgtcgggaagatgatattgaaggtaataccgacatctgggtcaatgtgcaaat

SEQ ID NO: 5357 - DNA, 330 bp, Triticum aestivum
  Clone ID: LIB104-018-Q1-E1-C5
aattccgggtcgacgggacacggaagcctgagccctgcaagagaagacagccaagaacgcggcgcatgccacgcagggggccgacgacaccttgaagaacgccgccggctcgatatactagttcggatccggataccggcccacctgcatattgcatctgttctgtctgtctcgtgaattgtcatgaagtggagagatgttctgatgtagaatttccgtgcgatgtggttgcgcccggcttgtagcacaattctttcggcgcctccagatcgggcccgtgttgttgatgcgtaactcgtgaatctttgacgcaatgagatgcatttcgtc

SEQ ID NO: 5358 - DNA, 358 bp, Triticum aestivum
  Clone ID: LIB104-018-Q1-E1-C6
aattcacgggtcgacgggtaagtttcactagtggcttctctcaagagcataagtatttctacggtgggtgaacaaattactgttgagcaattgacagaattgagcatagttatgagaatatctaggtatgatcatgtatataggcatcacgtctgcctcgacaaaaagacctgctgctgccctgttgcttaattataaatgccgttgaagcgatcgagctaagaatcagtgaaagatgacaataagcaatcttggtacacctctaaatacgtagtctttatttgttaacggtgtccctatttatgacctgtcaaccaaagatttgtgtactctagtaatgtatgtattatatcaccac

SEQ ID NO: 5359 - DNA, 413 bp, Triticum aestivum
  Clone ID: LIB104-018-Q1-E1-C7
aattcccgggtcgacgggggacgagaacttcaaagtggatacaataagtcacaatgacaagtcttttttcgtaattaagcatggcatttgcttcatttgcttcaacttataatttaagcatgacattaagcatgacaagtctttttttactattctactagcgtatcccctgccatgcaagagtttttgtattggataagataggtttcagtcgtactatggaggaaaagaaattttacttgaagaccgagcatggttatattttcaatgtaaaattatacaattcagacgactacacctattttggttgcaaaacatggcgagcactatgcaagacttatgcatttgagcctgatatggttatcacctttgatattcgtctaaaagatgatattgaaggtaataccgacatc

SEQ ID NO: 5360 - DNA, 325 bp, Triticum aestivum
  Clone ID: LIB104-018-Q1-E1-C8
gacggggcagtagagttggcctgaggccagaccatataatagatacgggcgtgttctacacaggagttcttgtagaacatgttccagtcaaacctcgttcccttcgtctccggttttcaataccaacacctgtcatcctcgtctcccatcgtttggatggaatagccacatggagctgaccttcactttacagagacaggggcaagccgataatttgtagcctccctggttgtattctggaaatttcagtagaactgaatccctgtaggagctcactaaagactctagctaagacctttttgagacgctgggtgactcgcgtgga

SEQ ID NO: 5361 - DNA, 365 bp, Triticum aestivum
  Clone ID: LIB104-018-Q1-E1-D5
aattcccgggtcgacgggaggttcaaaggagagaagcgacagagttagaagttgtaaatatgcattgttgtatcgcgacctgaatgaaataaacgaaataatgctcttgttcacaaaaaaaaaaaaaaaaaaaaaaaaaaaaaaaaccaaaaaaaaaaaaaaaaaaaaaaaaaaaaaaaaccggccgcccaaaaggttcaagcctaacttacccttcaaggcaagttaaaacccctccaaaatttcaaccaaaatcaatttaatggccctccttttaaaaacttcttaatgggaaaaaccctgcgttaaccaaactaaacccctttgaaaaaaatccccatttcccaagcgggctaaaaacaaaa

SEQ ID NO: 5362 - DNA, 345 bp, Triticum aestivum
  Clone ID: LIB104-018-Q1-E1-D8
gacgggatgcaaaagatacacaaaatatggaaacttcgggcaagtttgttgatcataggagcattgagacgcagacaaatccaattgatcgttctatagcactcttactttttcatcagccatcagaccaagtggctggagctgttgacaatcctcgccactaaaatctcataacgagaaccacaaggcctatgctaaaaactaggttggttaatgttgcgaaaattactggagatggctcgtggagattcaaggatcgcctagtcatatattgtaatcatcatctccgtgaatgcatgagcaatcgtgaatgtttatccgatatggtacggtacgttccgtttt

SEQ ID NO: 5363 - DNA, 436 bp, Triticum aestivum
  Clone ID: LIB104-018-Q1-E1-E10
aattcccgggtcgacgggcgcgttacgaaagctgaggctttattacgagacaaagaggaagaaaatgcgatgctgaagcaacaattggaacattatgagaataaatggtcagaatatgagaccaagatgaaagttatggaagaggcatggaagaaacagctctcttctctgcagttgagtcttgtggctgctaagaagagcctagctgctgatgacatggtcacccgagcagctcggactgataccactccaacgcatgctcaatacgactctgaagatacaatgtccacagggacccatacctcagacgggacagagttgaaataccagaaccaaatcccctaagctaaaatgggcaacgggaaactcaaataggcgggataaatgcggtgaatcacctatcaaaggagtttgaggacaggcgacaggtattcga

SEQ ID NO: 5364 - DNA, 440 bp, Triticum aestivum
  Clone ID: LIB104-018-Q1-E1-E11
attcccgggccgacgggagaaagtatgcaatagattgaataaatagatagcaaataaaataaagtgcagcaaagtatttttggtttaatagatctgaaaataaatacaagaaaaagtagatcgcaaaggcaaatatatgagaaagagacccgggcgccataggtttcactagtggcttctctcgagaaaaatagcaaacggtgggtgaacatcaaatactcatgacgatatccaggcaatgatcatataggcatcacgtccaagattagtagaccgactccttcctgcatctactactattactccacacatcgactgctatccagcatgcatctaatgcaataagttcaaggaaaaattggagtattgcattaggaacgatgacatgatgtaaacaagatctatctatgtagagatggaccccatcgttttatccttag

SEQ ID NO: 5365 - DNA, 349 bp, Triticum aestivum
  Clone ID: LIB104-018-Q1-E1-E9
tcccgggtcgacggggattttaaccatgatagcgtggctcgccgtgcattgaaaaatacatgtctcgcttatcttgcatccctgaatgagcgagatgtcactgaacttgcattaactgagtacaagtctgctacgatcatgaccgagcagtttgctgcattagcagcattgtctcaaaatccaggtcaagtccgtgaggatgcccttttggacttctataacaaatggctacaagattatttggttgtaagcaagtggtttgctcttcaagctacctcggacattcctggaaatgtagtccatgttcaaaagtgactggctcaacctgcttttgacatgccgaatccgg

SEQ ID NO: 5366 - DNA, 421 bp, Triticum aestivum
  Clone ID: LIB104-018-Q1-E1-F7
acgggctagactacggtgttgaggaaggtggtgcctgtcttgtcgaagatgagagagggtgcatgtgtcataaccttttggtttggataatttatcatttttcttataaaattccctctcattattgaactacaattagttacatcatctatctagtaagagacgaatgagttcaacaggaagttagtacaatatgggcccttggacattaatttgcgctagctcatgggcaacctcatttgattctctaaagtaatgcacacaattagtactaggaaagtcacaagctagatggtagcaatcagccacaaccgcagttgcaggttccattgatctccctctttctttttttttgcgggaccattgatctccctccatcattcattgagtttactagttcaaattatccgaatttaccaaa

SEQ ID NO: 5367 - DNA, 363 bp, Triticum aestivum
  Clone ID: LIB104-018-Q1-E1-G7
gacgggttaatccacgtcaatttggaatctacaggactttccacaagttctgctgttaagtaccaccataatcagtggctgcgttcatgggcatattcaccagcgcggcgtaccgctatagctgacagaaagtgtgctttctcagcatgaagataatataatgggaaggaatattgcgtcaagaagaacgatcgggtagagcttatcacggcaagctacaggtcgtacctagcagacaagcattgtctcatgaaagtttactttttgtagatgtacaaattgatgtagaataggtgaatttaatttcatctatacatgatcaattgcttgctgtacatttgactaaataaagcaataaatcag

SEQ ID NO: 5368 - DNA, 417 bp, Triticum aestivum
  Clone ID: LIB104-019-Q1-E1-A10
gtaccggacctaaattcccgggtcgacgggggcgacgatgtggatgtggacgaggcggatagaaagctcttagatgatgaaaagaaacccgatatcacgaaacgaccacacgctcctattgaagatgaggtggaatgcaagaagccaaagatagcagaaggctcaaggtgccaaggagaagaacctgaggctggagggataaagaattcctcctgggtctgatgacaggggaatgcagtaaacaccagaagcatcaaaactatgatctggaacagtatcctgaataaactattttctggattatgaatgaattctgaagcatggggctataagtgaattatgtaacatggatttgtaactatggtggatgttaaagttaacgttctatcagtacatcgtgaatgcgtgctgaatatg

SEQ ID NO: 5369 - DNA, 182 bp, Triticum aestivum
  Clone ID: LIB104-019-Q1-E1-A11
attcgcgggtcgacgggggaaaaaaaataaaaataaaaaaaaaaaaaaaaaaaaaacaaaaaataaaaaaacaaaacacaaaaaaaaaaaaaaaaaaaaaagcgcccactcaaaaggatcgaagcttacttacccttgcatgcaacttcatgccactgcaacattgtcacctaacttcagtt

SEQ ID NO: 5370 - DNA, 424 bp, Triticum aestivum
  Clone ID: LIB104-019-Q1-E1-A2
ggtccagaaatcccgggtcgacggggggctgaaagaggttttatatcaccctttctgggaacaactgatgcatcagccagatataacctggacaaaaaggctttcttctcttcagcactttctttgcgcgtgccagtatctgaggatttcttgagtaactgaagtactgattgcagtgtctcaatcttttcaggatttatccctggggagcaacgatgtttccagaagtcaacttccctgtcacggtgccatgcacttcgtctccttcctgtggacgatgcatacaacttcttggtcagattctcacgtatcttgcccttttgaagcagtgacttccttgcgagtgaaaggttgggttttttggctggtccatccatggacttcccaattgctgaacggaatgcggtcaaaagtttttcgtcaa

SEQ ID NO: 5371 - DNA, 362 bp, Triticum aestivum
  Clone ID: LIB104-019-Q1-E1-A5
gacgggcaaatcgaaagaacaacaaaggaccgcgaagaacggtcagtcgtcgccgaacgggatcatgatcacgagaaatatctatatacgataataaggttgtgttattgccgccatgtccgttgacctgatgtttgtttcagctagagaaatcgttaagcccgctcataatttttcgacgccatggaaaataataactactggtatatcactctatatcaaaccggcttgtgaaataaatggttgcgccccggttttttgtcgtcaaaaaaaatgaacaaaggagttgtaaaaagccaaaaacttgcgaaagcgcataatataccaacgggctgttctaaaggatccaagcttaagtacgc

SEQ ID NO: 5372 - DNA, 393 bp, Triticum aestivum
  unsure at all n locations
  Clone ID: LIB104-019-Q1-E1-A6
gtaccggaccagaattcccgggtcgacggggcggactcctcccccgaagacgaggaggaggaagaagactctctcccggaggagggagagaggaagaggaaggcttccccaatangggaggctgaagggtccaagagggggagaactattcccccggacagctctgccaacaccaatgttggcgaggaggagtgcccttcaagggccaggcctcctgcgagatcgtaagtatccggatccctgtatattctaaaatttctttcgtgccacatagtgcctttctaatgccgcatagtatccgcagtccggccgatgatgatctccccgctttttcgagcgggtcgttggccccgtcggatgtggattcacttccgacggcctctactccccgcg

SEQ ID NO: 5373 - DNA, 424 bp, Triticum aestivum
  Clone ID: LIB104-019-Q1-E1-A8
gtaccggactagaattcccgggtcgacgggtgcatcgggggataagtctcgttgcggtggaagagaaggtcgtgtgagcggccccggcaaagaggacgatggcgctgatgaagcgagatgacgtgatgcaaggctcttggtccatcgccgtggatgagaaacgtccatctctagcagtggacgacgcggtcttggtaggcgctccagcatggtggaggatggtggcgatggatgtagtggaggacggcggcgatggatgtggtggaggacggcggcgatggatggggtggcggacgaaggctggtgtggggatggtgttctagcgcggatggtgtatgaatgggaaaatggatggacaggtacggtgaaccatgtttttggacgcacctgtatgaaatatgggaaagttacgaacttagccccc

SEQ ID NO: 5374 - DNA, 447 bp, Triticum aestivum
  Clone ID: LIB104-019-Q1-E1-B10
taccgatccgaaattcgcgggtcgacgggcacgggtggcaagtaacgaaaccagatagcgtatgtgaaattaattgaagcgggaccaaacaaagcggacgaaaccaagaacatcacctccctttaatagtaggtatagatataggtttagagagatgacaggaattgctcatccacatggttagtcgtaaaatcctacataaaacttgtagatcactgaatatgatatgtttgattccttgcaatagatttgcgatataaaggtggtgatattagagtcatgctagtgagtgactatggattagtagaaatacttgtgttgaggtttgtgattcccgaaccatgcacgtatggtgaaccgttatgtgatgaagtcggagcatgacttattttttgattttcatcctttgtgtggaggtcgggattgtgcgatggttaactcctacca

SEQ ID NO: 5375 - DNA, 461 bp, Triticum aestivum
  Clone ID: LIB104-019-Q1-E1-B11
taccgatcctgaattcccgggtcgacggggctatggttgggtttcacgaccttaatgatctttagtagttgcggatgcttgctaggggtccaatcataagtgcatatgatccaggtagagaaagtatgttagctcatgcctctccctcatatagaattgcaagaatgattaccggtacttgttatcgattgcctagggacaaatgactttcttgttgacaaaatccatctacttttactttcccgcaatttattcatagttttattctcgcaaagtactcgtagtttattcttgcaaaatagttcatacttgttctaggtaaagcagacatcaagtgtgcgtagagttgtatcggtggtcgatagaacttgatggaatatttgttctgcctttagctcctcgttgggctcgacactcttatttatcaaagaaggctacaaaagatcccctatacttgtggg

SEQ ID NO: 5376 - DNA, 457 bp, Triticum aestivum
  Clone ID: LIB104-019-Q1-E1-B12
gtaccggtcctaaattcccgggtcgacggggacttcctttctcaccacagaattactgacaagtgacagcagatggcacgataaaagactggtgattattatccatttcgtagggctagtacgagggaatgggagatcccgtcgtgtttagctctcactgtgctgccctcgacatatcttgtttttggagatctcccttgtcatttataccttagatcaattttgtttggtgaattgagatgttgcttgttcgagtaaatacgatgacacacttctgacacttccatcttacaatgggaattgagctgttgcttgtacaactttgttccatggaacaaatgtaactgtgttccatgttacaatgggagttgagctgttgcttgcaaaaaacattaactccacaatgagaacaacactcttaattaacaaaaaaagctacaaaatattccccaatacc

SEQ ID NO: 5377 - DNA, 449 bp, Triticum aestivum
  unsure at all n locations
  Clone ID: LIB104-019-Q1-E1-B2
ggtccagaaatcccgggtcgacggggacttgaagctggcccagatatgcggcaccatcgcggctgacgaaaggcgccatgagcttgcctataccaagatagtggagaagctcttcgtggtcgatcccgactacacggtcctggccttcgccagcattatgaagaacaagatcacgatgcctgcccacctgatgtatgatgggcaggaggacaacctctttgagcacttcagcgcggtggcacagaggctgggcgtttacaccgccatggactacgccgacatcctcgagttcctggtcaagaggtggaacgtcgccggcctcactgggttgtccggtgaagggcggcgcgctcaggattacctatgctccctaggaccaaggtttangaagctggtggagcgagctcaggggagcgggaagcagttgcctgttgttcctttcagctgga

SEQ ID NO: 5378 - DNA, 441 bp, Triticum aestivum
  unsure at all n locations
  Clone ID: LIB104-019-Q1-E1-B6
ggtaccggaccagaattcgcgggtcgacggggacttgaagctggcccagatatgcggcaccatcgcggctgacgaaaggcgccatgagcttgcctataccaagatagtggagaagctcttcgcggtcgatcccgactacacggtcctggccttcgccagcattatgaagaggaagatcacgatgcctgcccacctgatgtatgatgggcaggaggacaacctctttgagcacttcagcgcggtggcacagaggctgggcgtttacaccgccatggactacgccgacatcctcgagttcctggtcaagaggtggaacgtcgccggcctcactgggttgtccggtgaagggcggcgcgctcaggattacctatgctccctaaggacaaggtttangaagctggtggagcgagctcaagggagcgggaagcagttgccctgtgt

SEQ ID NO: 5379 - DNA, 203 bp, Triticum aestivum
  Clone ID: LIB104-019-Q1-E1-B8
taccggaccagaattcgcgggtcgacgggtggtaagaagagtttttgcagtaactgggggtgaaaggagaaaaccaaagaagaatgtgtacatatacctacggcttggatgattggttggtgaaatggagatattgttggttaattgatttagtgctgaaaaaaaaaaagaattttaaaaaaaaaaaagcgggcgctccaaaa

SEQ ID NO: 5380 - DNA, 448 bp, Triticum aestivum
  unsure at all n locations
  Clone ID: LIB104-019-Q1-E1-C1
cggtcctagaatcccgggtcgacggggctggtgatcaccgggtgggcgccgcagctggagatcctagcgcacagcgccacggcggcgttcatgagccactgtggctggaactcgaccatggagagcatgagccacggcaagccgattctggcatggcccatgcactgcgaccagccgtgggacgcggagcttgtctgcaactacctcaaggccggcgtcctcgtgcggccatgggagaagcacggcgaggtggtcacggcgaaggccatacaggaagtcatcgaggaggccatgctctccgacaaaggaatggccatgcggcaacgggcaagtgcgctcggggaggccgtccgcgcctccgtggttgacggcggttcgtcgcgcaaggacctagatgatttcactgcttacatcacaaggtgatcgacanaatgccatcctggacgat

SEQ ID NO: 5381 - DNA, 448 bp, Triticum aestivum
  Clone ID: LIB104-019-Q1-E1-C3
cggtccagaaatcccgggtcgacgggttcgagtctcttatgatactcccacatattctgatatgaagaagacattttgcgttaatatgtgagcagttagtggactttttcaatgccaggaagttcaggatacgaatggcttaagggctggttaaaatgatgagttcactcaggacgctactgaagattactatgaaggaggaacatatgcttgtaagaattgcactaatgtcaagtttccgctctatgtgcttaacgttttgacgttatgcatgtgttcccttcctatgctacttgatttttgttcccctaagttgtttgctcacaaaatcactattcatatgaagtgggttaggcttaaatgtgctactaatatgcttcatgatgctctcattctgtctcaattcgtatcgtttatgcgagcatcattgaaatcatcatgccttagc

SEQ ID NO: 5382 - DNA, 423 bp, Triticum aestivum
  Clone ID: LIB104-019-Q1-E1-C4
ccggtcctagaatcccgggtcgacgggagctggatcctgcccggcaacgaggagtacaaaggtgtatggaatcacgcgaagagtgatggccatgaatactaaggtctccatgttagcgagccagccaggaaatatgccataatcaaggaacttgactatccagttactatgaaggatgagacagttgtcctgcagtttgaattgaggcttcacaatggccttgagtgtcgacgtgcttatatcaagtatatccgtcctcacgcgaccggatggaacaccaaggactttgacagtgatactccatacacaattatgtttggtcccgacaagtgtggttcaacgaacaaggttcacttcatcctgaagcacacgaaccctaagactggcatatacgttgaacatcatctcaagtcccacactctg

SEQ ID NO: 5383 - DNA, 426 bp, Triticum aestivum
  Clone ID: LIB104-019-Q1-E1-C5
taccgatccagaattcccgggtcgacgggacctaagtggtggttttattttcttatactaacggagcttacgagttttgtttgagttttgtgtggttgaagttttgaagttttgggtagagattcgatggactatggagtaaggagtggaaagagcctaagcttgggaatgcccaaggcaccccaaggtaatattaaaggacagccaagagcctaagcttggggatgccccggaaggcatcccctctttcgtcttcgttcatcggtaacttgactttgagctatatttttattcaccacatgatatgtgttatgcttggagagtcattttcctttgttagcttttgcttgctgttagttgtaataatgtgtttcatcgttactttcagtatacatgacaacgataccctttgccatgcttactttg

SEQ ID NO: 5384 - DNA, 251 bp, Triticum aestivum
  Clone ID: LIB104-019-Q1-E1-C7
tacaactcactataatgagtcgtattaagtcgacggggttgaattcagttaattgtaatcaatacaagtgtgatgatcatcatatatacagcattgcccacattaaaaaaaaggaaaaatgccaaattcaatgaaggcccaaataaaaaattacaataaagaaagaataagcggccgctctaaaggatccaaacttacgtacacgtccatgcgacctcatagctcttctataatgtcacctaaattcaact

SEQ ID NO: 5385 - DNA, 448 bp, Triticum aestivum
  Clone ID: LIB104-019-Q1-E1-C8
gtaccggaccagaattcccgggtcgacgggttgatcctgctgaaaatcagaaacttttgcacccaataaattagttttggtaatccaaagaaacgtgattttgatatgatgctttttgatatgtactgttacacaagtggtttaggttttcgcaatttatcaggatttgtggagttacagaagtattctagagttacagtttactacagacagttatgtttctgacatattctgcattctatgtgttgtttgcttattttgatgaatccatgagtaatatgggagggtatgaaccatagagaagttggaatacagtaaatatttcacaaatatgaatttagaatgagttcataacagtacctaagtggtgatttattttcttatactaacggagcttacgagttttctgttaagttttgtgttgtgacgttttcaagttttgggtaaa

SEQ ID NO: 5386 - DNA, 460 bp, Triticum aestivum
  Clone ID: LIB104-019-Q1-E1-C9
taccgatcccaaattcgcgggtcgacggggcctgggtggacgtgccgcccatgcgccacgccatcgtcgtcaacatcggcgaccagctggaggtgatcaccaacgggcggtacaagagcgtgatgcaccgcgtgctcacccgccacgacggcaaccgcatgtccatcgcctccttctacaaccccggcgccgacgccgtcatattcccggccccggcgctcgtgggcgctgccgacgctgctgagaggaacgagggcgaggagggcaccgccgtatacccaaggttcgtgttcgaggactacatgaacctgtacgtgcgccacaagttcgaggccaaggagccacggttcacggccatgaaggcagacgccgcacccatcgccaccgcatgataactgatacgcgcccggacccggacgagagtattgtgagacgtgttttattttcttttgggcgtgcc

SEQ ID NO: 5387 - DNA, 446 bp, Triticum aestivum
  unsure at all n locations
  Clone ID: LIB104-019-Q1-E1-D10
gtaccgatcctaaattcccgggtcgacggggtcgattgctgacctgacaattaaacgtggaaagaaggttgtagcttcaagtaatggtacatcagttcaagaagctgaacagcgtacaattgaaagcatatgtaatcaggacaagacagcagcctcgcttatatgccagctcaagaaacgtcattccacacaaatatcaacaatgccaatgatgaaagatgtccttggtgttgtggctaccttaggaaaaacaaatgatgataatctaagcagcctactctcagagtacttgggaatagacaatatgcttggtctcgtttgcaagacttatgatggcataaagagtcttgaaacatatggcacagaaggcaacattgataagaaaagtggtattcatggactgggtggctcaattggnaagattctgcatgggaggtttacgtgtt

SEQ ID NO: 5388 - DNA, 452 bp, Triticum aestivum
  Clone ID: LIB104-019-Q1-E1-D11
gtaccgatccggaattcccgggtcgacgggtgccaacacaaatggctcaatggtcattgccactcacaggcgtcacctgcttgatggtcgaagacgagggaagggcgacaacatctaaaactccgcgttccacgacgccgagaggtaggctctctgacgcatgacaaggctccacgggggcttggtgatgccaggtccacctccgaatcctgaagagaccccaacttgagctgctccatcgatagaggtgaaacagataccacaatacatgcacacacccaaggcagaatacatgagctgaagattagcaacaacgcccgatacaagtccaagcaaagcacctcgctcgtcaccttctatatacataaatattatagaggttgtaatacagagaatctgaaatagctcttcacaccaaaaccttttaaaatagttttgttacctttttttgc

SEQ ID NO: 5389 - DNA, 436 bp, Triticum aestivum
  Clone ID: LIB104-019-Q1-E1-D12
attcccgggtcgactgtacggacaccgaagccttagaagctttcaagcatagcgttcgagacgaatggcttgccatacacctcggtcaagaaaagccgagaacaatggtagcattaacaagcctcatgacccgtttttgcgcgggcgaggacagctggttagcccgatgcggcaccagcgactcaagtacatccgaagtcagggatggaaacgggaaatcatgacgcagcaagaataagcgctagaataaagaagacagcccgaagagcaggacggtaaacgccggatttagaagctctcggctaggccagcagaagccgccctccaaaggcaacagagatgaactgtccagcctaaacaaaattctggaccaaatatgttagatccatagcatccctgataaacctgcatatcatacccacagagaatgttgggt

SEQ ID NO: 5390 - DNA, 440 bp, Triticum aestivum
  unsure at all n locations
  Clone ID: LIB104-019-Q1-E1-D2
ggtccagaattcccgggtcgacggggcctagctaggggcgttaaacgatagcgcttgttgggaggcaacccaattttattttgtgttttttgtttttgcttatgtttagtaataaataatccatctaccttctgtttggatgtggttttatgttttaattagtgtttgtgccaagtaggacctatangataacctacgatgatagttgatttgattctgctgaaaaacagaaactttgcgtgcacgaatataattatgataaattacaggaacgtgattttgcgttgattattttttctgctgatcaataaacaaattgtacagaacttcctattttggtagaatttttagagttccagaagtttgcgttagttacagattgctacagactgttctgtttttgacagattctgtttttcgtgtgttgtttgcttattttg

SEQ ID NO: 5391 - DNA, 448 bp, Triticum aestivum
  unsure at all n locations
  Clone ID: LIB104-019-Q1-E1-D4
accggtccagaaatcccgggtcgacggggaaggagaagaagctcaagtcaaaaaagcacaggaggcgaagctattcttcctcagaatctgacagtgaatccgagagcgacagcgatcggaaacacaggaagaggaatgaccgcagaatgcacangaaacatggccactctgactctgatggtgccaggaggcgcaagcacaggtcaaagaggaggagctcagactctagcgatgagagcgacagtgatgaatatgatagcgaatctgaagaagagcgccgaaggaagaagcactcgcacaggaggaagcatcgccgtcactcttcaaggtcagagtctgatgcttcagattacagcagcgatgatgatgagcgaaggtcaaccaggaaggaacacactangagccggatgcaccgccaccgatcatcagacgatgaatccgangacaa

SEQ ID NO: 5392 - DNA, 406 bp, Triticum aestivum
  Clone ID: LIB104-019-Q1-E1-D7
aattcgcgggtcgacgggggtatgagatagtccttggttgatttatataatgctctttgcacttcactttatcttgtgagtatggctttatagaatgcttcatgtacttcacttatatcatttgaagtttggaattgcctgtttctcttcacttacacaaccgccatttgtagaatgctctttttattcgcttatatttgttacagcatggacatatcttttgtagagagaattatactctcttgcttcacttatatctatttagagagacgacaggaactagccattcatatggttagtcatataatcctacatacaacttgtagatcattgaatatgatatgtctgattccttgcaatagttttgcgatataaagatggtgctactagagtcatgctactcggt

SEQ ID NO: 5393 - DNA, 448 bp, Triticum aestivum
  Clone ID: LIB104-019-Q1-E1-D9
gtaccgatccagaattcccgggtcgacggggcatgatatatttattgattgtcttccttatgtgtggaggtcgggatcacgcgatggttaactcctaccaacccttcccctaggagcatgtgtgtagtactttgttttgatgacttgtagatttttgcaataagtatgtgagttctttatgaataatgttgagtccatggattatacgcactctcacccttccaccattgccagcctctctagtaccgcgcaactttcgctggtgcattacacccaccatataccttcctcaaaatagccaccatacctacctattatggcatttccatagccattccgagatatattgccatgcaactttccaccgcttcatttatgacacgctccatcattgtcatattgctttgcatgatcatgtagttgacatcgtatttgtggcaaagccaac

SEQ ID NO: 5394 - DNA, 430 bp, Triticum aestivum
  unsure at all n locations
  Clone ID: LIB104-019-Q1-E1-E1
gctaccggtccagatatcccgggtcgacgggcatatgcatgaggcaacagctgatgccgccgcgtcctgtatctgccagcccttcgtaggtcctgggcggtataagtacatttatatagcacctaggtagtaaaacagatggtctagccgatgtctacttctagtcctatctcaaatattttcttttctctcctctccatctgtttctcttttctgagatgagaaaataaaaaccttcagcagtgctaggccggcccaactctccttgtctctctctctctctccctagtttttcctccagcccagctgggcctaccagggcctgccggcccatcccctaaccaaggcccgcctaaacccttctaaacctagctgcacaggagccatcgctccatcncctcacagccactcgatcccaactctttgccgc

SEQ ID NO: 5395 - DNA, 441 bp, Triticum aestivum
  Clone ID: LIB104-019-Q1-E1-E10
gtaccgatccagaattcccgggtcgacgggttgatcctgctgaaaatcagaaacttttgcacccaataaattagttttggtaatccaaagaaacgtgattttgatatgatgctttttgatatgtactgttacacaagtggtttaggttttcgcaatttatcaggatttgtggagttacagaagtattctagagttacagtttactacagacagttatgtttctgacatattctgcattctatgtgttgtttgcttattttgatgaatccatgagtaatatgggagggtatgaaccatagagaagttggaatacagtaaatatttcacaaatatgaatttagaatgagttcataacagtacctaagtggtgatttattttcttatactaacggagcttacgagttttctgttaagttttgtgttgtgacgttttcaagtttt

SEQ ID NO: 5396 - DNA, 324 bp, Triticum aestivum
  Clone ID: LIB104-019-Q1-E1-E11
gtaccggtccagaattcccgggtcgacgggacgtcagtaattagcacaaggcgagtgatgggcgccggtgcgccggcggaaactttgggccggtcctttttaaaccattagattaatgcgctgatgagcgttagataaccacgccaaagtcatcgtctccacgcacaaattctccctacgcggaaaaagtggatcgtgaacgaagtgcggcccacacgcaccagctgttgtgccaccgggcgtgcgtcgccagctccaacaccatcagcccccatcgtcgccgtcacagacctccggcatcacgggttcgcatcacctcatcgc

SEQ ID NO: 5397 - DNA, 462 bp, Triticum aestivum
  unsure at all n locations
  Clone ID: LIB104-019-Q1-E1-E12
gtaccggtcgcagaatcncgggtcgacggggatgatgagtacattggcctgaggtccggagtccgtcagccattggtgaataagcaaactgctaccgatcccagggtgcccaatcttgactaccgtccaatcaggaacgatgcatggagccaaagaatgagagacaagtatggggtggattcctttgatccaaacaggtttcaacaggcgacgatatctcccgcagaacatagaaacagatgcacaatcctctgatgcttggtcgatgcagttcagtaccggtctccgaatttacagccagctgtgcaataacatcgactcgcatgtagcatgtggctgggtgatctgatgtttccaagttgtgttggatgtggcgagcccttgcaatcgcccgtcgtagttctttcagttacatactcagaaatctctgcatctttcagtctttgcaataattgaaactaa

SEQ ID NO: 5398 - DNA, 439 bp, Triticum aestivum
  unsure at all n locations
  Clone ID: LIB104-019-Q1-E1-E2
cggtcctagaattccgggtcgacgggctcgcacagaggccaggatatattcgagcatggttggttgatcgatatcattcattacatgttgggctgccgttttccgcccttctccggaataaacgtgtactttatcagagataaaaaaaataagagtacagacgctccaccatgcggttctagtagtagtactactcgtactaccgcgcttggctctttgcctcttcgtgaagtcgaacaatgatggtactccgcatgttgggtactacagtgtatgcctctgacaatctgacaccgaatggactgatgcatgtccaccgagggtaggttgcattagtcaaaaggcgtaagcgagcttcaccttgtcctgcaagcttctcctcgttctgcgagttgacgggacacaccanaaagtagtgctagtccatactccctccttt

SEQ ID NO: 5399 - DNA, 436 bp, Triticum aestivum
  Clone ID: LIB104-019-Q1-E1-E6
attcgcgggtcgacggggtcagttatgtagtgggcatgggcagtgtactgtaggcctgtaggtcttccttggcagtagcactttgcaaaaaggatccttagtcagttgcaacccttaattaagtactccaacttagcataagctctgttcccagtccttaggttagaatcatcaccgagtgttggccaaggacatgtttctttgcttttctttctctttacaagtcattgtcctctgatttactccaactattttcaccaacgcctgctggagatgttggatgatgtagctgacactgctgtgtgttggtgctctattctttgggtagagatgtgttgcctgcctggaggatgcttgaagcagagtatcccggagactagcagatatgatgatcgaaacttttatcttagctttctgtctctactacttcctgatg

SEQ ID NO: 5400 - DNA, 425 bp, Triticum aestivum
  Clone ID: LIB104-019-Q1-E1-E8
aattcgcgggtcgacgggcacagaggtatcattgatacccgtgaaagatgttcgtacctttacgtcagtaggtgaaacaatatctagccaatattttgatgacttgtactggccattctccatcccaactccttcacctacattatcaaattcatcattgtcgtccctcttattgggtttgtacagcacaccttccatgttcaacctttccattaccatctacaaacacaaatgaaacacgataagtagttgaacaattaaaccatgttcaatacaacttctaaattacctgtgcacatctttggggtatattgagaacctctttgtgaagcagctttatgtatgtcatcacacggtccatactacaagtcatgttcgatgaaaccgtggacgtgcttggctttctactcctgacaccacctttc

SEQ ID NO: 5401 - DNA, 449 bp, Triticum aestivum
  Clone ID: LIB104-019-Q1-E1-F10
gtaccggtccagaattcccgggtcgacgggatgttggaacgttaaatttggagggtttaattgccaatgatgtggtgtctccccaaccatggttgaattggccggttcccatatggatcactccaagttttaataagatccacaaataactaggtttccagtataaggacgttactgggaagggaatgctcttgcttctcatcaataatttactacagaactattctgactggacatatccgttgagctgttgtttttgttagggcaagcaagcagaaagaattaatttatctggtggtcagcctggcgaaggatttgggaaaatgttccctaggggaaggagaaaataatgtttatggtggctgaaatcgaagttgctctgcgaagaagaccagatatcagtgggaatagaatgctcttgcttctcatcaataatttactccagaact

SEQ ID NO: 5402 - DNA, 402 bp, Triticum aestivum
  Clone ID: LIB104-019-Q1-E1-F11
attcccgggtcgacgggtccgccaacggccagccgaatcgacggagaaggaatggcttcaaccaggggagacgtaggatgggagttcgaccaaggcgaactgatatggaggatagtgtacggcgaactgtctatgtctcagacattgatcaacatgtcactgaacagaagcttgctgaggttttctcaaactgtggtcaagtggtagattgccgtatctgtggtgatccaaactcagtgatgcgttttgcttttatcgagttcgccgatgatgtcggtgcaagagcagctctaacgcttggtggaaccattcttggtttttatcctgtcagagtcctgccatctaagactgcaattttgcctgtgaaccccaaatttcttcctcgaacataggacgagaaag

SEQ ID NO: 5403 - DNA, 435 bp, Triticum aestivum
  Clone ID: LIB104-019-Q1-E1-F4
gggtcgacgggccagcagagtggtgctgcaatcatcaaagcgaggaagctctccagtgctctctctgctgctagctcagcttgtgatcacatccgtgactgggttctgggaacccctgagggaacatttgtttccatgggtgtgtactctgatggttcatacggtgtgcctgctggtcttatctactccttcccagtaacgtgcagtggtggtgaatggacaattgttcaaggtctcccgatcgatgagttctcgaggaagaagatggatgcgaccgcccaggagctgtcggaggagaaggcgctggcctactcatgcctcgcgtaaatccacattggaagggcagctgctcctctggatgttttgaataaatgaaaccttccgctccttagaaactctcgtctcccaccagaacagccgcacatcgcgatgcat

SEQ ID NO: 5404 - DNA, 450 bp, Triticum aestivum
  unsure at all n locations
  Clone ID: LIB104-019-Q1-E1-F5
gtaccggaccagaattcccgggtcgacaactaaccaaacgatgaagaaagaagacataccttcgagcatgtcgtcaatcaccgagtagccatttgataggtgcttctccctgtcgggccagctcgagtgctgggactcgaacttggccttgagctgctcctcctcggccttcagaagccagacctgctccatgtgccgggttgcttggtccgccagctccgtctcgagccggtcgcgcgccatggctgcctggctgcattccagctccttagcctggagttggctctcgagctcatgcacgcgggtcctcagccgggcggcgacctctgcaaaagcaagcaagaatcatcaacatctacatcagcgaaaacaagaagctttcagagaagattctgcctgactactcaacagtcggcccgaatctcggngggctacaccagttggtgcgct

SEQ ID NO: 5405 - DNA, 448 bp, Triticum aestivum
  unsure at all n locations
  Clone ID: LIB104-019-Q1-E1-F7
taccggaccagaattcgcgggtcgacgggggagaacatgagtattaacctagatcatcctaaactcagtggtgaaacaactgttcaaaatgctgttacagaagtcgctgccatggttggggagaatgtaaaactcagacgaggtttcatgttgtccacgactggacatggtgtcgtttcatcttatctgcatacctgtcctcagccaggtttgggccgcattgctggattgattacattagaagcagaagatagcagtgcttcccttgatgctctcaagagagttgggtcgtctatcgcaatgcatattgttgcagcaaaaccattattcttatcaaaagaattggtttctgctgcagctttagaaaatgaacgtgacgtgctccgaactcaggctgaaagttcaggtaaaccccaaatggccatagagaanatggtggaaggccgat

SEQ ID NO: 5406 - DNA, 423 bp, Triticum aestivum
  Clone ID: LIB104-019-Q1-E1-F9
gtaccggtcctgaattcccgggtcgacgggtacttcacacacttttgtgttttgtctaattgcaggtgtatgggacatttgtacaatccacatatgaagataaggaagaaagagatgtttatttgctgtccaaaaagttctctcacgtcacttttggcccaagagaagatagagtccaagtctctcacgttctggattcagattcggactgcacagacacacctgactcaaaacgcacacaagtgtttcatacggactccgaattgggtgattctatttttgttggaaactagatttcgtgaactttccaacccaattggaatcaccttcaaattcgtccggagcgttgagttgtggacgaaacaatgtgatgctgcagcagaatccgagtcaaactacaagtccaaaggtgtaacatcacct

SEQ ID NO: 5407 - DNA, 279 bp, Triticum aestivum
  Clone ID: LIB104-019-Q1-E1-G1
ctaccggtcaagaattcccgggtcgacgacgactcctactacaccggaggtgcctactactacgtgcaggccgctgacgacgaccaggagtagtttaggaggatcccaggcaggaggcctgcgcctctttcgatctgtatcccagtttgtgctagccatcttatggcaacttgtttaacttatgtctgtactcagatattgttgcttccgctgactcgtctatgatcgagcacttgtattcgagccctcgaggcccctggcttgtattatgatgcttgt

SEQ ID NO: 5408 - DNA, 448 bp, Triticum aestivum
  Clone ID: LIB104-019-Q1-E1-G10
attcccgggtcgacctccgcggacgaggtgcagcgcatgatggcggagatcgacaccgatggtgacggcttcatcgacttcagcgagttcatctccttctgcaacgccaacccggggctcatgaaggacgtcgccaaggtcttctgaatcagttcatttcacctcagccgtccgatccaggagccgatccatctacgtacggcttcgtatatcaatttcatgcaactacctactccggtcccgatccagcctcagcttcacctgaggccggccctaattttgtttgatcaattttttgctactagtagtaactagtgatgatcactgttgcaccatttatttattttatatcgtcacaactttccagtgtttcttttctttctctacctttttgtcgatcgtcggctccagctcgatcgaacgatccatgctgctaattgtttgtgta

SEQ ID NO: 5409 - DNA, 448 bp, Triticum aestivum
  Clone ID: LIB104-019-Q1-E1-G12
ttcccgggtcgacgggggattctcaggtgtttcagcaataggttcactagaagcatgcaaagtcctatcatttttctttttcttctttttagaaggactaggtgcctcaatattatttctctgagaatcttgctcaattctattagggtggccttcaggatacaaatgttcctgagtcattctaccagttctagtagccactctaacagcataatcattattcttactattcaattcattgagcaaatcattctgagctttaagtacttgtcctacttgagtggtaaccatagaagcatgtttagtaatgagtttaagttcacctttaactctagacatataatcacccaagtgttcaatcatataagcattttgttttaattgtctaccaatataagcattgaaatcttcttgcctaaccataaagttatcaaactcatccaaacat

SEQ ID NO: 5410 - DNA, 444 bp, Triticum aestivum
  unsure at all n locations
  Clone ID: LIB104-019-Q1-E1-G5
gtaccggacaagaattcccgggtcgacgggaaagaggatctagctgggtggcggacggagtagggtgtggggtttcatcatgggttttcgcggcctcggtgtacgaatgggtgggcggatgggatggtagtggggaaccatggcttagagacgcgcttgtctgaaatgtggggtaagttacgaaagtacccccaccgatttgaggaggttctttcggttcaggggtaccacgggcatttcgcgtgtcgggatttcacaggaggtgggagttttcgcgcgcgttgtaatttcggaatagcaaggcacgggttgagatggagggagttgtcggagcacaacaagacaaagatatatcttaaatatttcgggctaacaaggcgcgggttgaaatttccggacaagcctaacatgtacntgtacanatcaatgcgccctacanatgtc

SEQ ID NO: 5411 - DNA, 441 bp, Triticum aestivum
  Clone ID: LIB104-019-Q1-E1-G7
attcccgggtcgacgacgaggcgcatacggtgactttgtaaatcttaagatgatgtgccagctcagtctctcgaaagtgcttataaaaatagggtgtgtgtgcattcataggggtgaatgtatgtgcgtatgtatgagcgcttgcatctgataaaaacaactactctcacgacaactcatcataatggtcaagggcgagacggtacacgctccgcactaagaaaatcctgcgcggatcggtacgacgtgatgtattacaccactcaccggctaacccggtcagtgataactatcaacatggaataacaattgaagttatcactgaccgtccgctagctgaaggcatgtgcaacaaagaataaacaacaacacacaattacagaggcaacacagaagacatgaagacatgcacatataaacattggtgaacattcgattatc

SEQ ID NO: 5412 - DNA, 449 bp, Triticum aestivum
  Clone ID: LIB104-019-Q1-E1-H5
ggtacggacaagaattcccgggtcgacgacgacgggcggctgctgctgccgccacttcccgagaacaaccgaccggtgcagtcccctgaagaggttggccggctggattgcgtgccagccatcttcgatgagctcccagtccgggacaagatgtgtgttttctccgtatcagcagcaagagcttctctagatgaactgaatgaatcagcagtgcttttgtgcctcgaatggtctccgtgtccgtggcgaccggagctcgagtttcttctggcaaatgcctccacggcaccggtgaatctatcccggatctcttgtcctactgaaagtctttctgttctctcaacagatggcccaactccagccaatcttccactcggttgtcgaacaagcttgttactggaactcatatgaggatacttgagtgcggtccagtcaaatacataatcaaa

SEQ ID NO: 5413 - DNA, 427 bp, Triticum aestivum
  Clone ID: LIB104-019-Q1-E1-H7
gtaccggacaagaattcgcgggtcgacgggagacttagggccaggcagatgatgtctggtgatgaacttatgatgtctacagaaggtcggagctttgtggatggtggcatgaaggagatagaagctggaggtagaggatacagaagaggggcaaatgatgatttcatggtttatggacaggacaactcaatggacaggaggagctccttggacccccttgccgaggcgcattacaagagacccactcctctagaggaaaagaagaatgtgcacagtatgggcgatgagtccttcatgatacctgttacctccaactcacatgataaccttggagcagccggccgtactgccattgacattgatgccgagcttggctcaagtgttcagaaaacatcagatgctaaggctggcgctgaacttttctatg

SEQ ID NO: 5414 - DNA, 454 bp, Triticum aestivum
  Clone ID: LIB104-020-Q1-E1-A1
ttcccgggtccacggggagtgcgacaaaggtgccatggccgccatagcccagtctgcgccggattctgtgctgatgacattggcggagtttgagacgacaagagaggcgtggaatgcactcaaagagatgaggattgaataaaatcgtgtcacgaaggctcgggcacaagtgctgaagcgccaagttcacaagttgcagatggagaaaagtgaatcggtgaacgactatgccatgcagatggagaaagctcgacgagaccgagattgtggagaagtttttcagttcggtcactgataaattcacgtacatcatcgggacgctcgagcagctttacgatatcgacgacatgaccataacggaagcgatcggatgcttgcggacgtgggaagagaatgctcgtggatgtcggaaacgcaaaggaggaggtgatgaccaactcatgtactcacgcgc

SEQ ID NO: 5415 - DNA, 463 bp, Triticum aestivum
  Clone ID: LIB104-020-Q1-E1-A10
ggtcctaaattcccgggtccacggggagtagtttaacacagaccttcgggtgcctagttattagctagatggcttcttctctctctttggatctcaatacaaagttctcctcaatcttcttggagatctatttgatgtaactcttttagcggtgtgtttgtcgagatccgatgaattgggggtttatgatcaagattatctatgaacaatatttgaatcttctctgaattcttttatgtatgattggttatctttgcaagtctcttcaaattatcagtttggttttgcctactagattgatctttcttgcaatgggagaagtggttagctttgggttcaatcatgcagtgctcgattccagtgatagtaggggaaatgacacgtattgtattattgccatcgaggataaaaatatggggtttatatcatattgcttgagtttatccctctacatcatgtcatc

SEQ ID NO: 5416 - DNA, 467 bp, Triticum aestivum
  Clone ID: LIB104-020-Q1-E1-A11
ggtccaggattcccgggtccacggatcaccggaaaacgacatcctccagctccttcttcaattcctcacaacttttcttgaaagcagccatggattcctccacctcctgctcgcactcgatccggagcttcctcaagtcacccatcagttcctcgacgaccgctgtcagcgtcatccccaaggcactactctgctcatgcagcatcttcctgccaacggcctcctccttctcgccgaacgccttgaggatcttcgcattgtcactgatgagttgctcaatgaggccggtctccttgtcaaccgaggcatctctgatcttgagcagcttcatcaagccgttgaccagctcctgctgcttagtgacgccagtgagaatgtcatcgtccccggccaaagacttccggaatgccagctcatcgcgatggccgacgtcgcgagtgcgcttgtgagagccctcgcgtgcccgt

SEQ ID NO: 5417 - DNA, 470 bp, Triticum aestivum
  unsure at all n locations
  Clone ID: LIB104-020-Q1-E1-A2
cgcctgccatgtaccggtccgagattcncggatccacggggggtgttcaatctttcgaagatgctcatagggatagggtatgcgttcataggggtgagtgtatgcgtgtgtatatgagcactcgtatttgtaccgtgttaaaaaaagattccaaggtcccaaagataatgaacttgattaaaaatttgtgtatataaattcattctttttagataaaagtttgaatttaatttggttggtgtgcgccaaacctaggctatagtgcaacgcctagacgacacatgggagcctcagcagcaagccactgtgatggactctttccaacaaaaaataaatctaaaatctttgtgaacatataatccaaatatcagataataaacttgatataacagattaaaggtaattacacactggtgctagaacttgccatgaatgtgcactttagtgcctgaacttgcaaaatacattta

SEQ ID NO: 5418 - DNA, 461 bp, Triticum aestivum
  Clone ID: LIB104-020-Q1-E1-B10
ggtcctagattcccgggtccacgacggcctaaacgctgctcctcctcccctttaccgacggagggggatacgtccggatctgtaaccagcggtgaggatagaaagccagtgttttttgaagggagaaagacagtgttactacccttatcttgtttagatctggagaggatgagagtgtgtgaatagagcaatcctagcaagcaagcgcgaaggctccggcctatatatacgtagtggggtagttttcctttttcactccatcaaaacaatcgtttaaaattgtgtactactacatgccaggtcgcatttttttagttgttgattgttttttgagatagctacccgcttgttccaagtggtgttacggtgtgccaagtcgcactttgtatcgttcaagtctggtactacaagtccctccattaaatgaacaacaacccctcgtaaaattgtgagcaagccac

SEQ ID NO: 5419 - DNA, 468 bp, Triticum aestivum
  Clone ID: LIB104-020-Q1-E1-B11
ggtcctaggattcccgggtccacggggagatctaagaggagaaccaccgcttcgagaggggtcgtctggagcggtagagggcgttcgaggtgagcatcgctgaaggtgcagcagcggcaggcaccgtattgcagtagtctagttcgtcagtagcctcctcctcctcttcctcttattgagcgcgcttggcagaggagaggctaccggaaatagtacaaagcccctccgtagtagtatttaggggctattttgttcagttcatctgactatagatgtggtggaactgtacaacatacttaaaagtagctagtatatatagttgaactagctatttcagtacgtggttggcaacaattggggaaaaattcggtcgattcagctataaagttgaacggtttttaaaaattaagcacgactacttaatctatgaatggaatctatgcttaattactgaattttagttgcaaa

SEQ ID NO: 5420 - DNA, 491 bp, Triticum aestivum
  unsure at all n locations
  Clone ID: LIB104-020-Q1-E1-B4
cgccgggctgtaccggcccgagattcncgaggccacgggtaggactacaaaatgaaatgctcttgaagacattttctcttggtctggatttgggcatttttatatcgtgcagtccgcagtttacctgcatctttcgctttgaagagtgtacatttgctatgtcatccacgagatttgttcttgtaaaaaaaaaaaaaaaaaaaaaaaaaaaaaaaaagaaaaaaaaaagaaaaaaaaaaaaaaaaaaaaaaatgaaaaaaaaacaacttggaaaaaaaagaaataaaaaaaaaaaaaaacgggccgcccaaaaggttccaaccttagttacccttgaatggaaattcaaaacccttcaaaagggtccccaaaattcaattcacgggccgtcgtttaaaaacatcgtgacgggaaaaacccgggggttaccaaatttaacccccttggaaaaaatcccccttttccaagcggggttaaaagcgaaaaggccc

SEQ ID NO: 5421 - DNA, 467 bp, Triticum aestivum
  Clone ID: LIB104-020-Q1-E1-C11
ggtccagaattcccgggtcgacgggatccatctcatcttggaaaagatctcttgattcagtgaagcaatgaaactgacaccataatattttgaattaaaatcagaaatcattttcctctcttggctaagtaaaaggaagcttgtatgtaaaacaattatttggtaactgatatcatcaagaaagctgtgtttctatcatgttttcacctgcatacgtgatgcatagcagtacaccattatgtaagaactagagctcgaatttacatgagtccattagtctccagatctagcaatggctcctataagtatgcaattcctataatgcagttatattctagacaaggtcctgataaagaacttgattactaccaggataacaaggtgctaatgaataaaaatagaaggtgccaatgaactaaaataatagaaggtgctaatgatttatgtttcttaactaaaatgcaaaa

SEQ ID NO: 5422 - DNA, 474 bp, Triticum aestivum
  unsure at all n locations
  Clone ID: LIB104-020-Q1-E1-C6
ggtcctagattcccgggtccacgggtctttcttgtaaaacatcattattttgatttttcttgatttcatttcctttcttctttgagggcaccaatgctgctaatacattccttcatcgaaaacttcctttttgtgaaacttgtactattatgtgcttattattgtatattataataagcttattgtatattataataagcacaatttccgtcttaattgagtgcaaacgttgtccttgtgtttttttcatgttctttcttcttaaatggtaataccaatgccattaattcattccttcttagaaaactttgttattttaatttgtttcagcatttgttttattttctttctatgagggtaataacactcccactacttcattcccttgtgagaaactttctttgcgaaaatttcattattatatgcttatacttgcatattatanaggtcacattttttgtgtaaactgtgtgc

SEQ ID NO: 5423 - DNA, 479 bp, Triticum aestivum
  Clone ID: LIB104-020-Q1-E1-D11
cgcctgccggtaccggtccgaggattcccgggtcgaccgattttgacatgggaggagtccgttaagagagacctgaaggattggagtatcgacaaagagctagctatggacaggggtgcgtggaagcttgctatccatgtgccatagccatgagttggttgcgagatcttatgggtttcacctctagcctaccccaacttgtttgggactaaaggctttgttgttgttgttgtttcatttttttatgaatgtactgttcatgagggtgtaggggcacccgggagctgttagacatttctcgaaactgtattgatttttttattttaagatttggcttaatctgaccaattagattaacacattcttttttaattgctatcagaattgagagatccagcaaagatatatgtcaaattgtttattgtctagctattggtttctattgatattcatgtcaaatctctattgatgatcatttt

SEQ ID NO: 5424 - DNA, 447 bp, Triticum aestivum
  unsure at all n locations
  Clone ID: LIB104-020-Q1-E1-D12
ggtccagaattcccgggtcgacgggtaatatgctaggtattcaagactagtaaaaactttcttatgagtgtgttgaatactaagagaagtttgatgcttgatgattgttttgagacatggaggtagtgatatcaaagttgtgctagttgagtagttgtgaatttgagaaatacttgtgtcgaagtttgcaagtcccgtagcatgcacgtatggtaaacgttatgtaacaaatttgaaacatgaggtgttctttgattgtcctccttatgagtgacggtcggngacgagcgatggtcttttcctaccaatctatcccccaggagcatgcgcgtagtgcttggtttttgatgacttgtagatttttgcaataagtatgtgagttctttatgactaatgttgagtccatggattatacgcactctcacctttccatcattgctagcctct

SEQ ID NO: 5425 - DNA, 413 bp, Triticum aestivum
  unsure at all n locations
  Clone ID: LIB104-020-Q1-E1-D2
attcccgagtcgacgggacctgggaggtgtcgctgccggcggaggaggtgccgcccgagctgcccgagccggccctcggcatcaatttcgcccgcaacggcatgaaccgccgcgactggctctccctcgtcgccgtccactccgactcgtggctcctctccgtcgccttcttcttcggggcgccgctcaccgccaacgaacggaagcgcttgttcagcatgatcaacgatcttccaaatgtgtatgaaagtatggttgacaggaagcacagggacaggtctggtgttgatagcagtggcaaatccaggcactcatcanagccaaagcagcgaactgatgatgtccgccaaagaactccagggcagttgcccgagaagaagacgaggacganggacaagaagaacacagcgaaa

SEQ ID NO: 5426 - DNA, 482 bp, Triticum aestivum
  unsure at all n locations
  Clone ID: LIB104-020-Q1-E1-D9
cgcctgcagtaccggtcctagattcccgggtcgacgggaagaaggacggcgagaagaaggaggagggcgacggcaagaaggacggcgacgggaagaagggttgggcggcctacatcgagtccgtcggcccggccaaggagcccgagaagaaggaggagaagaaggaggaggccaagaaggagggcggcgacgccaagaaggaaggcggcgacggcggcgacggcaagaaggacggcgatgggaagaaggacggcgacgggaagaaggacggcgagaagaaggaggagggcgacggcaagaaggacggcgacgggaagaaggacggcggcctacatcgagtccgtcggcccggccaaggagcccgagaagaaggaggagaagaaggaggaggccaagaaggagggcggcgacgccaagaaggaaggtggccccgctgtcgttcncgcaccacatgccgctgccgcaccacatgccgccgccct

SEQ ID NO: 5427 - DNA, 474 bp, Triticum aestivum
  Clone ID: LIB104-020-Q1-E1-E11
cgcctgcggtaccggtcctaggattcccgggtcgacggggacgcagaagatcgtgatcccgccgggcaacttcctggtgggcgcgctggagctgtcgggcccctgcacctcctccatcatcatccggctggacggcaacctcctcggcaccggcgacctcaccgcctacaagaagaactggatcgaggtgatgcgcgtggacaacttcgccatcaacggccacggcgtcatcgacggccagggccccctcgtgtgggagaagaacatgtgcagcaagcactacgactgcaagatcctccccaacagcctggtgctggactacgtgaacaacgcgacgatccgcggcatcacgctcaagaacgcaaagttcttccacctcaacctcttcaactgcaagaacgtgctggtggagaacgtggagatcacggcgcccgggaacagccccaacacggacggcatccacatgggcgactc

SEQ ID NO: 5428 - DNA, 452 bp, Triticum aestivum
  Clone ID: LIB104-020-Q1-E1-E2
tggtacgcctgccatgtaccggtccgaaaattcccgagtcgacggggtggcgaccttgagcacgaccagttctgggcggcggcggtttaggcagcggctgcgacggcgattcccgcatgggcggtggtgattgaggctcgcggttgctggttgagcctggtggcggctgcgctgtgaactccagttcatcctttactgtcaacgttaccctcagcccggcaagttcccaagttggcggaaataaaagagcaaagaaagtgccagcaaagctaccagactagtgcttgtttgttgctgtctgttcttatgtcagaccatgtgagaattcatggttatcgttgattgtaagctatattcagtattatttccctttcccatttagtactttgtcagactatgttcaactaaattgggctcagaacatgttcaactaaactcaatacaatgccccc

SEQ ID NO: 5429 - DNA, 468 bp, Triticum aestivum
  unsure at all n locations
  Clone ID: LIB104-020-Q1-E1-E3
cgcctgcccgtaccggcccgaaattcncgagtcgacgggaggcctgccagcccaatcagcatcagagaacgccgaaaggtcacaagatggtgcagactgaaggagcagaccatacgaagcagtagaggaaacataacgcaggatgcgcttaactgccgagagatgagtggtacgaggtgcatgcagatactggcacacacggttgactgcataagagacatcaggtctggtgatagtgagatattgcagaccaccaacaaggctgcgatactcagtggcatcatcagtggaaagaagatcccatcaagggcagacaaccggtcagtggcagacatcggagtgatagcatgtttgcattggagcatcccagcacggcccagcaaatccgttgagtactttttctgactcaaagtccaaccagtagaagaccgtgacacctccaatccaagaaaataatgcaaagcacca

SEQ ID NO: 5430 - DNA, 372 bp, Triticum aestivum
  Clone ID: LIB104-020-Q1-E1-E5
taccggtccgacattcccggggtcacgggatgaccgcaatgttctcctacacccttatcctgcagctgctagccacgctccaaatctacgcagtgccattcatgacttttgtcacaacaactaagatcttcacgtacatttgtcgctccttttagatcctgccaacaatcagttctgacatctattattctgacaattcttctataaatattattttcatgccacaattcaacttcgcgcttcgtagaagtggtgcgccattaaatagctcaactactaacgtcgcaccacaccaacggtgcgctataataacttgtgcaccacgttcctagtgtaacaccgtggatgtggtgcgccattccttttcgctca

SEQ ID NO: 5431 - DNA, 466 bp, Triticum aestivum
  unsure at all n locations
  Clone ID: LIB104-020-Q1-E1-E8
ccggtcctgaattcccgggtccacgggtaccacactatggacttctgctagccagagtggccggcctacctacttcagtgatcgacaccgcgaccagcatcacttcacgtatcacagagcaggaaatggttaggatggacgcgaactgcgtgcagtaccagccgctgaggatggcgtaccaggccgcgcaacggctcatctgcttgaagtactcaaaccaaggggacgactacatccgtgaagcattgcaggacctcaaggagagttacgctgcaggcaatttgatatgaaacaacaagagattacgtctccaggaatttgatagaggtctgtttgtaggtctatggccgcagaggatccatcagtcttatttccatccgccgctgtaattatatattagtcagagtccgatactgaaagtggcgatancggagagatcccttattacacacagcacacctggagt

SEQ ID NO: 5432 - DNA, 384 bp, Triticum aestivum
  Clone ID: LIB104-020-Q1-E1-F10
cggtccaggattcccgggtcgacgggacggtggcgcaagcttggagctgctggaaggcaagcccctcccaggtgttcttgcccttgacgaggcgtaggttgattcggtttcacctatcagcttgctgcgtgccctttgtttgggatctcatcttggtctaacgctggaacgttatatgtcccaaggaaactttgagataggcttgtcgccaatttttgctagtaaatgagtcgtgaataattatcaacttgctctgtgcgagtgaagtgatgtgactggaatttaacgtacccccgtggatgtgtatggttttaagatctgcatctttgtgtgctgcttccttctgtgttttttgctttgcttattttggaataaatttttgtc

SEQ ID NO: 5433 - DNA, 454 bp, Triticum aestivum
  Clone ID: LIB104-020-Q1-E1-F11
cgcctgcagtaccggtcctaggttcccgggtcgacgggatcgactgcatcgagaccatcgtgtgccactgatcagcgagtgaatcacgagctgctctgctcgtggtccagccgcgcgtgtgtgcgagactaattatttcttcgtctgatcaccgtatgatcggcgtgttcatttgttgttcacttgtgcttctgactgaagccgcgtgttgtacagaatacagagctatgaagaaacccatttcgccgtgattatttggataaaaaaaaaacaaaaaaagaaacgcaagaggcgcaaagcgcaagcagacgcgggaaagagcacaaagcaaaagacaaaagaaaaaaaaaaaaaggggccgctctaaaggtttcaggcttacgttcccgtgaatgcaacttcataccccttcaaaagggtcaccaaaattcaattcacgggccgtcgttttaaa

SEQ ID NO: 5434 - DNA, 417 bp, Triticum aestivum
  Clone ID: LIB104-020-Q1-E1-F2
acgcctggctgtaccggtccgagaattccgagtcgacggggacgcagaagatcgtgatcccgccgggcaacttcttggtgggcgcgctggagctgtcaggcccctgcaccccctccatcatcatccggctggacggcaacctcctcggcaccggcgacctcaccgcctacaagaagaactggatcgaggtgatgcgcgtggacaacttcaccatcaacggccacggcaccatcgacggccagggccccctcgtgtgggagaagaaccagtgcagcaagcactacgactgcaagatcctccccaacagcctggtgctggactacgtgaacaacgcgacgatccggggcatcacgctcaagaacgccaagttcttccacctcaacctcttcaagtgcaagacggtgctggtggagaacg

SEQ ID NO: 5435 - DNA, 414 bp, Triticum aestivum
  Clone ID: LIB104-020-Q1-E1-F6
cctgcaggaaccggtccgaaattcccgggtcgacagggactggcctccaagggccaagcccctggagagatcgtaagtatccggactcccgaataacttcatggtttttctttttgccacataatgtctttctaatgccgcatacaaccctgcagtccgcccaaggatgatcttcccgcttcgtcgcatgggtccttaggtgcgtcggatatggattctcttccgactgcctccaccccccgtgatgcggacgatgccgaggtgggatcccgggaaggtacccactcggaggaggaggccccggaggtgtcgctggacaacctcccggactttgcaccggactcggccccggaacccatagtggctccggagtccggcgggcgaccccttcgtaagaagggcaaagacgtgacg

SEQ ID NO: 5436 - DNA, 481 bp, Triticum aestivum
  unsure at all n locations
  Clone ID: LIB104-020-Q1-E1-F8
ggtccagaattcccgggtcgacgggagtacttagtgaaatacgtattgtcggctataaaggagaagtggcctgagagcaatagatggaataccatctacgtacagcaggacaatgctaagactcatataaaaccagatgatccactttttttgcaggaagctgctaggggtggttgggatattaggatgatataccaaccacctaattctcctaacacaaacatattagatcttggttggtttgcctcaattcaagcaatgttccatagaaagatgcccaagaccctagccgagattgtccaaaaggtattgcactgattagatcttggttggtattctttttatgttctatgtgatatatacctatttgtgtatgaactgttttgagtttttcatgtcatgtgtcatangttaattaatccctagctgagtaccccatcaaaggctcaataggatctggttgagtcatcaagcgtgcatg

SEQ ID NO: 5437 - DNA, 441 bp, Triticum aestivum
  Clone ID: LIB104-020-Q1-E1-F9
ggtcctaggattcccgggtccacgggggaaaaaaaggcctgatgctcctgctgatgaagcttcgtcctactacaaggttcctttctcaaaaaccgtctacattgaaaaaaactgattttcgcgtgaaggactccaaagattactatggattggctcctggtaaatctgccctgctgaggtatgcattcccgataaaatgcacagaggttatttatggtgataatccagatgatattgttgaaattcgagccgagtatgacccttcaaagacctctaaacctaagggtgttctgcactgggttgccgagccagcacctggagttgagccgttaaaggttgaaataagaatatttgagaaattattcctctcggagaatcccgccgaattgaaaaactggctgggtgaaattaacccgcactcaaaggaagtaatcaagggcg

SEQ ID NO: 5438 - DNA, 468 bp, Triticum aestivum
  Clone ID: LIB104-020-Q1-E1-G11
ccggtcctagattcccgggtccacgggaattttggacatggcaggctcagtcgtgttggcgaggcaggccccagactgcgaggtggttggttggtaagctcgaggatgaacagtggaaggcaggggaggagacgaagaggcaagtgtgaatcgaggctgaaaatttgggaacttgccctctgagagctgtctaaaagaggaaacccgaatcgctggttgggctggtcctatagctcaagcctcaattggtggaaaaggaaaagttggtaactaaaaaaatgggcacaggtctataagccgaggctcggggcaggcccaggccatgtgacccaagttgccacacccatagcaagtaattaacctgtttgaaaccctgggttggcgccctcaactccctaatcatagcgatcattaacctgtgtcgaagcacgagcattacctcctggtcacacagtcaaagcactttgc

SEQ ID NO: 5439 - DNA, 307 bp, Triticum aestivum
  unsure at all n locations
  Clone ID: LIB104-020-Q1-E1-G5
ggtccgaaattcncgggtcgacctccgcggacgaggtgcagcgcatgatggcggagatcgacaccgacggtgacggcttcatcgacttcaacgagttcaactccttccgcaacgccaaacccgggctcaagaaagacgtccccaaaggcctccgaatcaattcaattcaactcaaccgtccgattcaagaaccgattcaaccacgtacgggttcctataacaatttcaagcaactacctacaccggtcccgattcaacctcaacttcacctgaaggcggccctaattttgtttgatcattttttttg

SEQ ID NO: 5440 - DNA, 379 bp, Triticum aestivum
  Clone ID: LIB104-020-Q1-E1-G7
ggtccgaaattcccgggtcgacgggagacagcggtgtctaaggtggagtagaaggatgcggctgctggagcttttctccctccgtgcacccaacaagcctttgtgcaaaatttgaaccagacattgcttttgtagaattatcgttgcttagtattacgattctctaacaattgcgcgcgctatatatctcccatatctatatatgtacacagtgtatatatcgcgcccacatgtgtacgcatacaatatcatagagtatactcgacaaaaaaaaaaaaaaaaaaaaaaaaaaaagcgggggcgctctaggatatacacgcatatatacgtgtatatgagatgtcatatctcctctagagtgtcacctattcacatcaca

SEQ ID NO: 5441 - DNA, 479 bp, Triticum aestivum
  Clone ID: LIB104-020-Q1-E1-H10
cgcctgcaggatacggtccgagaattcccgggtcgacgggttatcggaaaattcaaatgcggcacttcttttctactggaatgagatgaaccgacaggttagagtagaagggtcggttcagaaggtctcagaagaagaatctgagaagtatttccacagccgcccacgtggaagtcagcttggtgcaattgttagcaagcagagcactgtcatttctggaagagaagttctccaacaagcatacaaggaattggagcaaaaatattctgacggtagcttcatcccaaaacccgattactggggtggctacaggttgacatcaaatctttttgagttctggcaaggccagcagtctcgtctgcatgaccggctacagtattcacagcgagaattaggtgggagtacagaatggcacatccaaaggttgtccccttgatcagtaacctccttaaagctctcgcctcgtgggtaataaaagg

SEQ ID NO: 5442 - DNA, 376 bp, Triticum aestivum
  Clone ID: LIB104-020-Q1-E1-H12
ggtccaggactcccgggtcgacggaggaaggagcagcagcaggagcaggagacccagcagcaaggccaaggactcaccgccagacccccgctcgccaacggcaggtctggaatgttgccaatgtcgagccctccagcaaatccaggacagcttaccattttttatggtgggtcagtatgtgtgtatgactcagtgccaccagagaaggctcaagcaatcatgctcattgcagcagcagcagctgcggcctcaaaaagcaatggcaccgctgctgttaagcctccagcgatgtctgcgaccaatgctatccaggccatgcctaagcggtcgctctcacttcagagcacttctgtagcagatggacaacctcaggctg

SEQ ID NO: 5443 - DNA, 471 bp, Triticum aestivum
  unsure at all n locations
  Clone ID: LIB104-020-Q1-E1-H2
attcccgagtcgacccgcgaccgttgtagcgcgatgcggagggccagatactcctcatttgtcaccttcgccactgccggtgcctgacattgggatggagggggaggggaacaaacagggagcggagtggaagcggcgaagatggaagcaaagagtgaagtggagctagggtttgctccgggtggggattttagtggggatagagtgggtaggtatgggccatggtggtcaggctgacgtggcagacgcgtctaggccaccccatacccgccctagatttaggctgggtttgaggggtgcctgtcagctcgaatggccatgtttggtatanggagcccgactcggtcaaattttagtgacagtgcattgatcaggccatctacccggtcagttttggcacggaccgggccgtccaccatgacgtagttgccacggtaggggttgccgggcaccatacacgacactagagag

SEQ ID NO: 5444 - DNA, 456 bp, Triticum aestivum
  Clone ID: LIB104-020-Q1-E1-H9
ggtccgaggatccccgggtcgacggggagtaaaagagaatcctactctccgatatatataatcctaagactgaaaacatttttgttctagactcaacaacgtcagcgattcgatcaagcagggggctcctaagtcggggatggccctgattaccaacttgtaacacccacgatgcggctatatctcccacgtgtcgtagcacgacttagaggcataaccgcattgtggttttgtcgcaagaagtgtcatcttcaaacaatcccaagttatgaacaagaaagggataaatagagttggattacaatcgccacttcacacaagtacttaaataaatcatacatcattcagagtacacacatagtccgactacggacgaagccaaaagaaaagaagataacccaactgctagattcccgatcgtcccaactgggctccactactgatcaacatgaaacg

SEQ ID NO: 5445 - DNA, 469 bp, Triticum aestivum
  unsure at all n locations
  Clone ID: LIB104-021-Q1-E1-A6
taccggtccagaattcccgggtcgacggggagaagaagaaatccagcgagaacatcaaggtcatctacgcccgcgccaagcagtacgccgaggagtacgatgcccaggacaaggagttggttcagcttaagcgtgaggcccggatgaagggtgggttttatgtcagtcctgaggccaagctgctgtttgttgtcagaatcagaggtatcaatgccatgcacccaaagaccaagaagatcttgcagctgttgcgtttgaggcagatattcaatggagtgttcctgaaggttaacaaggccaccatcaacatgctccgcagggtcgagccatatgttgcatatgggtacccgaacctgaagagtgtgagggagttgatctacaagagaggttatggcaagctcaacaagcaaaggattcctctgaccaacaacaaggtcattgangagggtcttggaaagcacaacatcat

SEQ ID NO: 5446 - DNA, 467 bp, Triticum aestivum
  Clone ID: LIB104-021-Q1-E1-B6
gtacggtccagaattcccgggtcgacgggaagcagcaaagttgagcatgcggtgtcgcgcttgtgatgcacagtgcttggctccggtacatcacagaggccggcagcaaggaacacagcttcctgcccttgcctctgtaaatcatcaaggaggaaaaatgtgcaagatgcttgaagtttccccttgaaacgaaggtcttgggcctttgtttgtacatatattcccttgatttgtactgactctccaattaattattcagagagctatggccatacaaggaaatcaaaagtttcagttgcatgtagcaaggaaggtcaatttgacacggcggtgctgccatttgcccctcccttctccctcgaaaatgtggttgacgctccccagatcttcaggttgcatgacaagatttttttcctgtggaacatattgtgtatcttccatcggtcatgagtaaattcaaatcaaaa

SEQ ID NO: 5447 - DNA, 451 bp, Triticum aestivum
  unsure at all n locations
  Clone ID: LIB104-021-Q1-E1-B7
attctcgggtcgacggggggcaagtaaggaactattatctagctctgcacttgattcaccttatgttttgagtaagcttgcaacaccaccacatgctattaatcctgatatgtcgcaagtaattaatgatgctacttctgctatgaatgatgttgatgatgatgctagtacttttcttgataagattgtgccactgggtgaatctcttgatgaacaacttgctagatctaaagaaattgagaatgctgaaaccaatgaaagtacttaaactgatgaaattattgaaactggaaattttgattcacctattggaactagtgccactagatatgaatttcctgagatacctgagggtcatgttatggatggagaagtagctagagactttcttgcttgtaaggatanagatgatcttaaaaaattactacgcaggctgaaagaaaaatctttg

SEQ ID NO: 5448 - DNA, 466 bp, Triticum aestivum
  Clone ID: LIB104-021-Q1-E1-B8
gtaccggtccagaattcccgggtcgacggggatatgtgatttgcttggagcgtcgtgtattatattagtctttgctttttagtttaccacaatcatcctttctgtacacaccttttgggagaaacccacttgattagaatttattagaatatgctatgtgcttcacttatatcttttgggctagatagtttttgctctagtgcttcacttatatcttttagagcacggcggtggcttaattttgtagaaatttctagtctctcatgcttcacttatattattttgagagtctcttagaatagcatggtatttgctatggttatgaatttggtcctagaatgatgagcatccaagttgggtataataaacactatcatagcaagtgcattaaacactaggatcaatttgatgcttgataattgttttgagatatgaaggtactagtgttagagtcatgctagtgggt

SEQ ID NO: 5449 - DNA, 456 bp, Triticum aestivum
  Clone ID: LIB104-021-Q1-E1-B9
attcccgagtcgacttcgaccaaagcgatatccatcatctcatcgaaagacgggacacctttgcctctatcaagtggtatcagatttccaggttgctcggtgagattttacagtttttcgtagtttagatcgagtctgttcttcatacctacagtccacgaaaaagccacaaaaaaatagggttagttcatcatatccgaaccaatctgagcctttgcataatctttttagggtttttgctttgttgaatttgcggttgcatcgtcgtgtcaagttgctggtcttagagtctagtcttttagagtttcgagttctggtcataagttgtcacgccgccgccgcaccatcatcatcgccttgccatctaccaccattgctcatccgccaccgctctgaatccgtatctatataccaccaccgatccgtatccatataccactaccgctaccatatacc

SEQ ID NO: 5450 - DNA, 486 bp, Triticum aestivum
  unsure at all n locations
  Clone ID: LIB104-021-Q1-E1-C4
cgctgcggtaccggtccgaagccccgggtcgacaggatccaggttccactattggttattgaccggagaggtgtctcggtcatgtctacatagttctcgaacccgtagggtccgcacgcttaacgttacgatgacagttatattatgagtttatatgttttgatgtaccgaaggttgttcggagtcccggatgtgatcacggacatgacgaggagtctcgaaatgctcgagacataaagattgatatattggacgactatattcggacaccggaagtgttccggagaagtttcagataaaaccggagtgccggaggggttaccggaaccccccggggaagtattgggccttagtgggccttgaggggagagagagggcagcagccaggaggtggcacgccccctcccatgaggagtcctaattggactaagggagggggcgcagcccctctttcccgctcnctctccctctctttccttgccccct

SEQ ID NO: 5451 - DNA, 469 bp, Triticum aestivum
  Clone ID: LIB104-021-Q1-E1-C5
taccggtccagaattcccgggtcgacggggtgatgagtaagctctttgagaaggacactgagcaactcgattcgtcggaagtgcagaaacaagatgatgttgttaacatcatggaaccgtctgatgctgagacagaactctctaatgctgagacggaaccctctgatacggagacagaaccctctgattccgacaatgatttgccaatggaagaaacaacagaaactcctgaagaagatttggatgacctccaaatggaagaaacagacgatccttctgaagaagaattcgatgatgaccttgtgatcaacattgctcctcgcaaggccaacaactcagctgcccagttaaatagggcaaaccaagcagtgaataaggacgagcggttcagaaaacgtcagcactttgatgagatttctccacaaatgaagagacagaaacctgaggatttatctgaacctagaaacca

SEQ ID NO: 5452 - DNA, 470 bp, Triticum aestivum
  Clone ID: LIB104-021-Q1-E1-C6
gtacggtccagaattcccgggtcgacgggatagcgcaagccaaggaagacctggcggcagagaacactaggatgactatggaacgggccgctttggatgctcaggcgcaacgaatccaagctgattccttccggctctcattggatcagaacgcttcaaacgaagtcctgaggagaaggcaccggagtcgtctgccgccggtttacaaggtgaggaacctcttcaacacacctagtgtagggaccagtgacccgccaggggtaaatcaggcagtagccgcgcttgggactggagcgccggctcaaccgtgcatgacaggcccgcccagtcagaataatatcctaccacaacacgtgccgacaccaccgggtcattactctaaccctttggataacatgatcgttgtgatgtcgtgactggcggatctcccagttgaaggcgagtctctagcggcggttgaaacgcggaag

SEQ ID NO: 5453 - DNA, 464 bp, Triticum aestivum
  Clone ID: LIB104-021-Q1-E1-C7
acggtccagcattcccgggtcgacgggggggggagagaatcctcccttggccgccgcccctttcccatctagggctggccgcaccccttgggggtgggaaaccctaaagggggcgcagccccccttccccctatatatacttgaggtttggggctgccatacacatgagttctctccctcttggtgcagccctacctctctccctactcctcctctcccctggtgcttagcgaagccctgctggattgccacgctcctccaccaccaccacgctgttgtgctgctgttggatggagtcttcctcaacctctccctctctccttgctggatcaaggcgtgggagacgtcaccgggctgtacgtgtgttgaacgcggaggtgccgtccgttcggcacttgatcatcggtgatctgaatcacgacgagtacgactccatcaaccccgtttacttgaacgcttccgct

SEQ ID NO: 5454 - DNA, 466 bp, Triticum aestivum
  Clone ID: LIB104-021-Q1-E1-C8
tacggtcctaaattcccgggtcgacctcctccagccaccacctgtgattgttcatccacgggctcctgttcatcgagcctccaccgcgcgctactccacgggctactgttcaaccagccctctccacgggctcctattcaaccaccccttcatgggctattgttcatccagccctctaccgtctactattcatccagacctccacggggtggtcctgttcatcctgccctccatggggtcctgttcatccagccccaactggctcgatcgatcggggtcctgttcatccagaggcaacaccacggggtcctattcatccacccacaccaggaactgttcatccaacccccccagcaacgctcactgttcatccaaaggcagtatcgatcggcttcagttagcagcagtagcgaaggaatcgttcgatcgagttcagttaacagccatcgattaatcgctcgggttc

SEQ ID NO: 5455 - DNA, 458 bp, Triticum aestivum
  unsure at all n locations
  Clone ID: LIB104-021-Q1-E1-D11
attcccgggtcgacgggagacacattggagtacgaacggttctgcaaaaagggcctacggccttctctcaaggacatctgctggaacggtccgtcagaggaaaagcttccatcagtatcggagtcagtacctccaactccgtcctccaagtcgaccaaaagaaatggcatttaagtgtgatatcttctgagatgcaattacaatctattctcctctctctttcttccctcctcaaagagctgagactttgctcacttgagcatcaagctttagggctctttgttaatcttttttacagtttccaatttgtggtagcaattgtagtatatggttctcctgttctattcaccaatagaagcacaaaaagtgacagtaacactcttacagtgttgctttgggacaagcataccatcacctgcaaaaaagatcttgtaagagccanagctattataggatga

SEQ ID NO: 5456 - DNA, 465 bp, Triticum aestivum
  Clone ID: LIB104-021-Q1-E1-D5
taccggtccagaattcccgggtcgacgggagaagtattgggccttattgggccatacgggaaagagagagggtctgcctagggcaggccgcgcgccccccaaggcctagtccgaattggactagggggaggggccgcaccccctccttccttcccttctctcttccctttccttctctcctactcctactacatggaaggtctcctagttggactaggaaaggagggagtcctactcgtcctactcccggtgggagtaggactcctccctggcgcgccctcccttggccggccgccccctcccccttactcctttatatacgggggcaggggggcaccccataacacacaagttgatctacggatcgttccttagccgtgtgcggtgcccccctccaccatattccacctcggtcatatcgtcgcagagtttaagcgaagccctgcgccggtggagcatcatcat

SEQ ID NO: 5457 - DNA, 458 bp, Triticum aestivum
  Clone ID: LIB104-021-Q1-E1-D6
tacggtcctaaattcccgggtcgacggggaggtcgaagccctccggagagaagtagagatgctcttccaacagaagctcaagccgggtacggctaccgcggcgttatagacactcggatgaacgcaagggaaacaggcaggcgtttccgatccagtgaatcagtgctggctgccaaacttttgaaagagtagattgttttcagaagagtctggctgttgagctgagtcccttcttacttttgccggagggttatagtgttgtaggattcgatggaacataggttagagacacttgatatgatgatatgggttagttttcccatttgcacagcaagctatgacacccccctgtgtttcttggaagatttccttttttattggaagacacgatgatcctccattcctcctgttatagaagtgcaaagacgtcttaaaaaaaacagagaaaagtgaaaaca

SEQ ID NO: 5458 - DNA, 464 bp, Triticum aestivum
  Clone ID: LIB104-021-Q1-E1-D7
gtaccggtccagaattcccgggtcgacgggggtgaagcaccaggacctccccgtggtgctgggcgcctgctgcgtcctgcacaacatctgcgagatgcgccgcgaggagctcgagccggaggtcccgtttgcgctcttcgacgacgacaccacgccggagacccctgttcgctctgagaccgccaagcaggagagggacagcatcgcgcacaacctcctccaccgcggtttcgccggcaccacatttttctgatcaaatcacctcctgccctctccttggcttggtacagataaaaaattaaacatgtagcgaattcttttagccgctaggatagaacattttgttaggatttgtacaccacgttcagagaaactggaaattcatgtaaacattctgtggaaaatttcggcagtacctgctgtcggttactcggtttattgtttaaagatatatatacaattta

SEQ ID NO: 5459 - DNA, 468 bp, Triticum aestivum
  Clone ID: LIB104-021-Q1-E1-D8
tacggtccagaattcccgggtcgacgggactcgaaaagacgtctcgaacagcgaccagtctctcgccttatcatgacagtcagttttagctttctccactgaggcgctcgcccagctcaaccggggctcaatcgcagtggttctcccagtgctaccttagccgacagaatggaacgtaaggtaccaaaacatgggagccgggcaaacccaactattgacccaaaacatgattcggagccgatgcatataatgctataagttcggggtgccgcacttgtgaaagtgttcggacttatcacaccataatgcggggaacacaagcccctggtgtattctgccgtaccaaaatatacgggtgcaagatgtcattaatgaacatatatgtaaaaaaggtaatgcaattataggcaaaaattgatgcattgtttattcaagagattctgccatgagtgcagaacgatacaatag

SEQ ID NO: 5460 - DNA, 469 bp, Triticum aestivum
  Clone ID: LIB104-021-Q1-E1-E8
gtacggtccagaattcccgggtcgacgggccttatcaacgcttgcctcgtcggtatgggcgcgaacgtgttctacggataacagccggccaccccgcgacggttgcccatcttgtgcgggagagacactcgcacttgggctccgctttccatgcgccgatacatacatagatggcatcgcgggttagggaaactccaacgaggcacaccaattctgcatccctaaatatccggaccgaatagtctggaagaccgtttggtcatcaatccaatgggagtcaccaaatatccacggaccagttcggatgtccggaatcccacataaaccgaataggattgatgggtgtgggggtctcgccaaaaaattgcttaacgggtcaacggtacaatcgcatactcatattaaccactcgattacaaaaaatgctatgggagtagcatcccattaggacatcgggctcaattcacga

SEQ ID NO: 5461 - DNA, 424 bp, Triticum aestivum
  Clone ID: LIB104-021-Q1-E1-F4
aaaagccggtggaatcgaaaaggcggagaaggtgatgggctggattaatttgatggaatttccacacggatatacaatagccttctagtctgaggtctgtggtgttgtttgtggcagtctgtgaccccttctaatgtcaggcatgcagtgtacataacgtgcaacctgagattgttgtattaggagaaaatagaatttggacgctagtgtccgagtttgagcagtatggcaccatcaagatcccttgtgatcttccctcaaaaaaaaatcccttgtgatccattatgcagtggggcctgaccagccttttacgtttgtgagagtcgaatcttgtgttgccatgtggaatgtttgtgtctttgtttcagagcaaaaaaaaaaaaaaaaaaaaaaaaaaaaaagcggccgctctagaggatccaag

SEQ ID NO: 5462 - DNA, 435 bp, Triticum aestivum
  Clone ID: LIB104-021-Q1-E1-F5
gtaccggtccagaattcccgggtcgacgggaggccggagtcctgtcaggatgggcggcgaggtcgtggcttagaggggagaatgttaggaataagccacgcatgagtatgtgctcatgtgtgtgatctgcatgcatggatggattagttagctagctatggagccggcgcagctgagtcgcgtggcagttctgcgtggaggaagaataggaagcaatagttgaggcttggtcctatacgtgtgtatccaaagattctggagacttggctgttacccaagcgtgtgtagctagcccgtggagtactaatcggatcaagcaaccgtgggcttgaccatgcatacgtgtgtgcgtggggttagtgggtgtgtgtgagtcttgtacttggctatataagttgagtaaatgaatgagaaaagtggccgtgagggctggat

SEQ ID NO: 5463 - DNA, 472 bp, Triticum aestivum
  Clone ID: LIB104-021-Q1-E1-F6
ggtaccggtccagaattcccgggtcgacgctacgtaccaaacatacatacgtatacagaggactagctagacgcgctagctacctagtacgcagacaggatatcggcatgaacaaatatgcatacagagagaagtgatatcgaccacctctccttctccgagagattggtcgaacagacaagttctcgtatatctatcggagactaccggctagatatagacaatagatatataatcgcctacagtacggacgcgtggtctacatactattctccgtcttcagcgatcacgtggtcaataaagaatgccgccaattcctcttgaattgctcgcatgcgatctggtgctacgagttcatcccgcatcagagacatctaattttaatacgggggtcaatacatagatatatatatatggatgaatgagactcatcacaaatgatggtaactacatgaaactgtgaatactgtta

SEQ ID NO: 5464 - DNA, 463 bp, Triticum aestivum
  Clone ID: LIB104-021-Q1-E1-F8
taccggtccagaattcccgggtcgacggggtgttttgcttggagcgtcgtgtattatattagtcttttctttttagtttaccacaatcatccttgctgtacacaccttttgggagaagcctatttgattagaatttgctagaatactctatgtgcttcacttatatcttttgagcttgatagtttttgctctagtgcttcacttatatcttttagagcacggtggtgacttatttttgtagaaattattagtctctcatgcttcacttatatctttttgagagtcttttataatggcatggtatttgctatggttataaaattggtcctagaatggtaggcatccaagttgggtataataaaaactatcgtagaaagtgaattggatgctatggtcaatttgatacttgataattgttttgagatatggatgtagtgatattaaagtcatgctagttgggtga

SEQ ID NO: 5465 - DNA, 444 bp, Triticum aestivum
  Clone ID: LIB104-021-Q1-E1-G6
cgggtcgacgggcaaatcgtaggaacaacaaaggaccgcgaagaacggtcagtcgtcgccgagcgggatcatgatcacgagaaatatatatataggataataaggtggtgtattgccgccatgtccgttgagctgatgtttgtttcagctagagaaatcgttacgcccgctcataatttttcgacgctatggaaaataataactactggtatatcactctatatcaaaccggcttgtgaaataaatggttgcgccccggttttttgtcgtcgaaaaaaaaaaaaaaaaaaaaaaaaaaaaaaaaaaaaaaaaaaagaaaaaagcggccgctctaaaggatcaaaactcgagcgtatctatgaggttccaagcttaagtacttctacatggtaagtcaaattcaattcacagggccacctaatttaaattcatgggcggtaattt

SEQ ID NO: 5466 - DNA, 305 bp, Triticum aestivum
  Clone ID: LIB104-021-Q1-E1-G8
attcccgggtcgacgggacgggagtaaagttacgtggccaacttcttgttttcaaaaggtttccaaataaaagttcagtgtcatgacgttgggaagaaaaaaaatttgctgctcttaaggctgcgatgacagtattgttgttagttgtcagcatgttgcatcactgtgtggtgtatgttggatgttgttggaaaaaaaaaaaaaaaaaaaaaaaaaaagcggcggccccacaagatgatcgatgcttacgtcctcctgcatacgacatcatacctctactatgtcgtcaactatcttcacatcgg

SEQ ID NO: 5467 - DNA, 414 bp, Triticum aestivum
  unsure at all n locations
  Clone ID: LIB104-021-Q1-E1-H12
ttcccggagtcacggatggccggcagctcgagcactcctggagtttgcagctgccgtcgtagcagtagctacagccctgtcggctgccgtagacgccctctcggtggaagcggctgcgctcaatgcggatgtggcggcactctcggtgtaggcggccgagctcttggtgcaggcgcggcgctcgggggggggggggcgcggccatcgtactggccttcacgaagcgtttccacgacgtcatctttgcaagaagggggtgcgggaatggggatcaggattcatggattcgggggttgccggaacaggagtanacgagccggcgaagcttaaagagggagacttaaatagacccagatattttcatcgcaaacggttcctagaaaagaactgtgtgtgatgtcgtagataattttt

SEQ ID NO: 5468 - DNA, 469 bp, Triticum aestivum
  Clone ID: LIB104-021-Q1-E1-H7
taccggtccagaattcccgggtcgacgggttcggcctcttcgcctcgacccacggcgagtccccgccgatgcaggtgagcgcgagctactacggcgccgcggagctcgaccgggccacccatcagcacaagctggtcaagggagacgacatcgaggtgcatcttgatcacatgcacatgggggtgggcggggacgacagctggacgccgtgcgtgcacgaggagtacctgctgtcgccggcggcgagctacaggttctcgctgcggctgcgccccctgtcgccgtcgtcatcgtgccacgacatctacagctcccggctacctaattgatcgtcccatctgtctgatgtggccgtcagaggtgcgtctgagagagaaagaacattcgagagactgaaacaatactgtccgagtcgctctcgctcgtgtaaacgtaagaagactgtaactggacaggtacctgtcaataa

SEQ ID NO: 5469 - DNA, 423 bp, Triticum aestivum
  Clone ID: LIB104-022-Q1-E1-A1
taccggtccaaaattcacgggtcgacaacttttatctagcatccagtcctacaaggtagggggatgcaagaacagagggacaagatccaagtcacggtctgcaaacacttccataaggggggcaatttttgcaactagaagattaggggggaggtacagagagggaaatcaactagttctaaaactaaaagaagttcatggccagaaaattttggaacaacaccttttacctttttgttttcacttgggaaacttgcccaactatgccaatttttttttgcaattctccagatttattgcctggtcagcacggagaattgcagacacatttgcgttttcaaaaaaatattccccacgattttatgtcttgatttctcgtcctttttactatgtttttcaatgtgcaaggagagctccccaacg

SEQ ID NO: 5470 - DNA, 386 bp, Triticum aestivum
  Clone ID: LIB104-022-Q1-E1-A11
gggtcgacgttgaatgcctagattttaaggacttcctccagagcaacctagtcaaattcattactgtagactttggtaatgacaaagaagtcctgggtcggataggcctcgttgtaggcaacaccttcgacctccagaagaattggctggtgtcctctcgtcagccttcaatgctgaccctggcaggagccatggttcatccttcgtacggtaaactggagaaacctccatacacatttcatcgttatgcatggcagcagaatgtactagatatagaccacatccactaccctgcaatggatggctacctttgtttcaatatctacaagggttggatgaagagcaagagccaagtgtgtggttcaagcaaagaagtatcgtccaag

SEQ ID NO: 5471 - DNA, 407 bp, Triticum aestivum
  Clone ID: LIB104-022-Q1-E1-A2
cctgcagctaccggtccagaaatcccgggtcgacgggaagactagtatgaatgattcaaaggagaaggatgagaaaaagaaagaagatggcgacagctcacaaaaggagaaggccaagacagggaaagataagaagagcgagagcaaagataaggataaaattagcgtcaaggagactggatctgatgcagatgacagtacccccaagaacaaaaagaatgataaggacaatgcaaagaagaatgatgaaagcgatgaaaaacaagagaaagacaaagagaaggaggaacatgataacaagaagaagcatgtagaagtgggtcacgcaagagaaatcaagctacaagataatgagtctgcgaacaaagaaactggtgcttctgaagagaagaatgatggcacggaca

SEQ ID NO: 5472 - DNA, 445 bp, Triticum aestivum
  Clone ID: LIB104-022-Q1-E1-A4
cggtccagaattccgggtcgacgccatagaggcagaagcccatgcggtagccaaacagatactcgaacacgtccagaaacgaccacacgaagtagccctgcacgttcgacccgttcctgctggattcgagggtctcctcgatgtaatcctgcaggtactgcgacctgaactcgtcgtcaggggcgttcccagcagacggatcagcaatgctagcagctccgttctcatggatcatgactatagggttcttgtatttgagctggagatgctccagcattttctgcagagcccacggtttcgatgtcatgaaatcgcttttcaacccagacaggagctggttcttcttcaaaactggcatgtcatagttcactgatgcatcacacatgtaatctctcagctcatcatccagcttgctaagatcagccttcacatataccgcaatgta

SEQ ID NO: 5473 - DNA, 384 bp, Triticum aestivum
  Clone ID: LIB104-022-Q1-E1-A5
attcgcgggtcgaccgcgacggaaaactcacctacggcggctactccagcatggtggtggtgcacgagcgcttcgtggtccggttcccggacgccatgccgctggacaaaggcgcgcccctgctgtgcgccggcatcaccgtgtacacccccatgaagtaccacgggctgaacgctcccgggatgcacctcggcgtgctgggcctgggcgggctcggtcacgtcgccgtcaagttcggcaaggccttcgggatgaaggtgacggtgatcagctcatcgccggggaagaagcatgaggccctcgagaggctaagcgccgacggcttcgttgtcagcaagaacgccgacgagatgaaagctgcgatgaacaccatggatggcatca

SEQ ID NO: 5474 - DNA, 396 bp, Triticum aestivum
  Clone ID: LIB104-022-Q1-E1-A6
attcccgggtcgacgggaaaggcatggagaactttccaagaaagaaagtcaaattaccttatgaatctatcatgcgtgctacttatgaatttaatgccgaagatggcactcgttagatctatctttgtttttatgcctagctaggggcgttaaatgatagcgctagttgggaggtaacccaattttctttatgttttttgttttggctcctgtttagtaataaatctagcatctaccttctggttagatgtgtttttatcttttaattagtgtttgttccaagtagaacctataggataacctacgatgatagttgatttgattctgctgaaaaacagaaactttgcacgcacgaacataattttgttaattcacaggaacgtgattttgcgttga

SEQ ID NO: 5475 - DNA, 287 bp, Triticum aestivum
  Clone ID: LIB104-022-Q1-E1-A7
attcgcgggtcgacctggaagtctacaagtgcttcaggatgctcaagtacattgtcaggaataacgaactgcgccacatctccatcaacatgatgtccaacatcgacgatgtttctgttggtctcaaatgcttgcggcacggggcagcagtgtaactggtcaagccgcttcgcatgactcatctgttggaactctggacccatgtgtggccagtgagacagcagcttggataggtccataaagatttcgtcaatgtcaatcgtgacttggggctgtctgtaactaat

SEQ ID NO: 5476 - DNA, 411 bp, Triticum aestivum
  Clone ID: LIB104-022-Q1-E1-A8
taccggaccagaattcccgggtcgacgggcaattcatcagatcttgacaaacacaccgcaaatgaagattacatcgaatagatctccacaagagagggggagaactagtaaaatattttatgaacaatagggaagttggaatacagtaagtttaaaaccaatattaataaagagcgagttcagtacagtaccttgaagtggtgttttgttttctttcgctaacggagcttatgagattttctgttgagttttgtgttgtgaagttttcaagttttgggtagatatttgatggcttatggaacaaggagtggcaaaagcctaagcttgggaaagcccatggcaccccgagtaatctaaggacaccaaaaagcctaatcttggggatgccccggaatgcatcccctctttcgt

SEQ ID NO: 5477 - DNA, 447 bp, Triticum aestivum
  unsure at all n locations
  Clone ID: LIB104-022-Q1-E1-B4
ccggtccagatattccgggtcgacgggagagtangagacaaacctaacaagacatagagagagagatagagagagaaagagagaggaagaacttaggtctgtgagaaagatggatacatgtaatatacatgagatgcatgtgcatctggattctgtatacgtggaaggtgaagagacaacatgtttggtgagagagctggaaaaacatggaacagaggggaaagatctcgtgggttgagggattgacaattttatgcgggggagagagggattggtaattttgtgcaagagagagagagagagggtgcggggaggagtgagtcagccgtcgtcacatcaccctgcttccaaatcgacccgcattctctagcgcggtgtggtcgctgtcntcgatctcctcgatgccctctttgaagattgacgtgttgtgcatgttggggtgaaaat

SEQ ID NO: 5478 - DNA, 185 bp, Triticum aestivum
  Clone ID: LIB104-022-Q1-E1-B6
cctatagtgagtcgtattacgggtaaaacgaagacgaacaataggaacatgcaaaccaagaagacgtagagggagaaggctaactacaggaataagtaatagacgaagatatcgagcttcaggaagcgggtcacgaagacgaatatgaatgtctcgagggacatgcagacgaagaagaagatgaa

SEQ ID NO: 5479 - DNA, 390 bp, Triticum aestivum
  Clone ID: LIB104-022-Q1-E1-B7
attcgcgggtcgacgggtagtcacattgcacgcacagtgcataccaagacacgccaacagcccgtcatgtagcaatcttcatgtgttttcactaatcatggtctctttggactcacggatgccataagggccaaatgcatcaatattgacacgttgcactcaaacgtgccacttgggccaacatggataatgggttttttactagcaaggatcacataagccattatatagtgttggtaccctagctaataacaacatatatcaacattggtcctagttgcagcttcacaggaccacttatgcatgtgtcgataccatcttgaccaacacgcaacaacattggtctcattagattgatacatgccataaggggtccaaatcattcaccaa

SEQ ID NO: 5480 - DNA, 432 bp, Triticum aestivum
  Clone ID: LIB104-022-Q1-E1-B8
taccggaccagaattcccgggtcgacggggatgcagccgctggcaccgtcgggctaccgccgggcgccggagatgaaggagaaggtggaggcgtcgtcgatcgacctggaggcggggaacggggagacgctctacccggggatctcgcgcggggagaacgccctccgctggggcttcatccgcaaggtctacggcatcctctgcgcgcagctggtcctcaccaccgtcgtctccgccatcaccgtcttccaccccaccctcaacgccacgctctccaactcgcccgtcctcgcgctcgtgctcgctgtcctccccttcatcctgatgatcccattgtacatctatcagcacagacaccctcacaatcttgctatcttgggtttgttcactctgtgcttgagcttcagcattggtgtggcttgtgcaaacact

SEQ ID NO: 5481 - DNA, 242 bp, Triticum aestivum
  Clone ID: LIB104-022-Q1-E1-B9
gggtcgacgttgaatgccaagattttaaggacttcctccagagcatcctagtcaaattcattactgtagactttggtaatgacaaataagtcctgcgtcagatacgcctcgttgtaagcaacaccttcgagctccaggacaattggctggcgtcgtctcgtcagccttcactgctgaccctgtgaggacacatgggtcatccttcgtaccgtatactggagaaagctccatacacatttcat

SEQ ID NO: 5482 - DNA, 384 bp, Triticum aestivum
  Clone ID: LIB104-022-Q1-E1-C1
gggtcgacgggtacatcatcctgaggcgggaccacacggttcagtcttaagtacggatgcattggacgtcatagtgctgctacaatggcacgtatcttcagctgatgtggccatcgttatagaagatccagactgggatgtcgctgctctgatacaaattacgcgtcttgtatcaaattctcatttagacagatggattaacaccgaaaaggttggcaacgttcacacatagtacgagttgcacaccctgactggtgaagaggacgcgccctgttgcagaccagtacacacgagccgatgtggtggtctatgcgcagagtaaacgatacacttgccattcgggctaatgaccggtactttcgctttccacgcttcttttctcgg

SEQ ID NO: 5483 - DNA, 396 bp, Triticum aestivum
  unsure at all n locations
  Clone ID: LIB104-022-Q1-E1-C11
taccggtcctacattcncgggtcgactaggtcataccagacctgtgggacccatatgtcagcgtcacaggttaaacaggggggtttagtttagtttaattaaaaattagggcactacggcccacatgtcagtgtcagcaggggggtaattaaattaaaataaactaaactaattaacaggggggctggccccacctgtcatcgacccaaggggggtcaaacccctggtcagcagggcctaacctgccggcggcttgacgccagcgaggccgagacggcggacgccttcggacttcttgctccggcggtcaaaccggtggatgaaggcgtctaccttgagctgtgactcccccgcatccatctgtgcaaacgtcaggggctgaagtggcccaagctc

SEQ ID NO: 5484 - DNA, 236 bp, Triticum aestivum
  unsure at all n locations
  Clone ID: LIB104-022-Q1-E1-C2
acggtccagaaatcncgggtcgacggggtaccgacagtgtgacggcaccctcctagattctcataagcacatcagcatcaagctggatgagaacttaaactgggtacaatatgtcataccgagtggttgcctacatcagtaaacatgaggaatgctgcacatgctagcacttaaaattaattgaatcttaccaatgttctaacgtaccccctgtcataccagagttattgtcttgg

SEQ ID NO: 5485 - DNA, 430 bp, Triticum aestivum
  unsure at all n locations
  Clone ID: LIB104-022-Q1-E1-C4
ccggtccagaaatcncgggtcgacggggcggtaaactttctattttgaaacagcaacatgtatacttgcaagatactcatagtaaaagctatccttgaaatttttattgaaaatagagatgcaaaacattattataaataacatcaggcaaatactaacaaaagaaaatgacgctccaagcataacacatatcatgtggtgaataaaaatatagctccaagtaaagttaccgatgagcacagacgaatgacgtgatgccatccggggcatccccaagcttacgatcatggatgtcctttaatactacattggggtgccttgggaatcaccaatcttaagctcttcgcactccttattccatagtccatcgaatctttacacaaaacttgaaaacttcacaacacagaacttaacagaaaactcgtaagct

SEQ ID NO: 5486 - DNA, 462 bp, Triticum aestivum
  Clone ID: LIB104-022-Q1-E1-C6
taccggaccagaattcccgggtcgacgggatatgagtatcagagtagcatgtctggagaaaccacaccacctacagagttctgttgcccaatatcaacaaagctaatgcatgatcctgtgataataacatctggacagacttacgaaagagaatatattgagaaatggttcagtgagggatacaacacttgtcccaagacacaaaaaaagctagaaaactttgcgatgattccaaatacttgcatgagggatctcatttgcaactggtgcagagagcatggtttcacaatctcagattttcttccaagcaaagattcctacagttatttgccagagcaattgcatggtcactctatgtcaagtttgcacaatgtttcagtacctctaattgctgggaatgccaggaattttgtgattgatcacagcagttcatctgtcgcgttttctgatgccagttatgtc

SEQ ID NO: 5487 - DNA, 401 bp, Triticum aestivum
  unsure at all n locations
  Clone ID: LIB104-022-Q1-E1-D1
ggtccaanaatcccgggtcgacgggaaggattccacctatgagctttggacgacggtgaacaatctcttcgcctcgcaatcacagtcccggatcaccaatctaaggatcgcgatcaccaacaccaagaagggcacaatgtcgagctcggcgtatatggcgaagatgaagagccttggggatgaactggctgccgctggtcgtcccatctctgatccggagatggtgaactacatactcgcaggacttgaccgcaactacgactccgtggtggcggtgatcggcgctgtcaagaacacaatcaccgccgatgacctcttcgctcagatctccgcctttgatcagaggatggagatgctgggagactcgtcttcaggcgggtttcattcatctgccaacgccg

SEQ ID NO: 5488 - DNA, 438 bp, Triticum aestivum
  Clone ID: LIB104-022-Q1-E1-D6
taccggatcgagaattcccgggtcgacgggaggccggagtcctgtcaggatgggcggcgaggtcgtggcttagaggggagaatgttaggaataagccaagcatgagtatgtgctcatgtgtgtgatctgcatgcatggatggattagttagctagctatggagccggcgcagctgagtcgcgtggcagttctgcgtggaggaagaataggaagcaatagttgaggcttggtcctatacgtgtgtatccaaagattctggagacttggctgttacccaagcgtgtgtagctagcccgtggagtactaatcggatcaagcaaccgtgggcttgaccatgcatgcgtgtgtgcgtggggttagtgggtgtgtgtgagtcttgtacttggctatataagttgagtaaatgaatgagaaaagcggccgtgagggctggataca

SEQ ID NO: 5489 - DNA, 434 bp, Triticum aestivum
  Clone ID: LIB104-022-Q1-E1-D8
attcccgggtcgacggggggtgagagtcatctttcatccacaaccaaggcatacacaaacctagacggggagaaatcacatatagtcaacacggcatgggcaatgttggcactaatgaaagctggacaggccgaaagagatccgtctcctttgcacgaagctgcaaggcttatcatgagcatgcagcttggcaatggtgacttcccacaggaggaaatgattggaagtttcttgaaaaatggtcccttgtgttatatggcttatcgcaacatattccccatatgggcccttggagagtatcatagattagtactttgctctggctaaattagtaccttctggtatgaagcacctaaatgttgtcgctcctctgctggcaatgctgaaagagcgatatcttgatttacaagtcctgaagaaagaaacaagaagat

SEQ ID NO: 5490 - DNA, 410 bp, Triticum aestivum
  unsure at all n locations
  Clone ID: LIB104-022-Q1-E1-D9
cgctgacgtacggtcgtaaattcncgggtcgactaggtcaaaccagacctgtgggacccatatgtcagcgtcacaggttaaacaggggggtttagtttagttcaattaaagattagggcactacggcccacatgtcagtgtcagcaggggggtaattgaatgatgatactctagacaagttatcacgggggctggcccacctgtcagcagccacaggcggtaaaatccctggccaacagggcctatgctgccgctcgcttgcggccaccaaagcctaaagcggggcgggcatctcacgtctagctctgccggtcaggaagtcgcctgagggaatttcttcgaatccgggactgtcttcctcacaacggtgcaagcttaaatcgctaccatgaccgtggcccagaggagcc

SEQ ID NO: 5491 - DNA, 424 bp, Triticum aestivum
  unsure at all n locations
  Clone ID: LIB104-022-Q1-E1-E2
cggtccagaaatcncgggtcgacgggataggcgacgtcggctcttccccgcgtgagagcgataggacccctgggacattcgtactggcatgcgtctgttgcctgattgctcacaacggctgccgctccctggacctcaggcgggagacgttcgtcaccactgtcccgtgccacgagtccatcgagctcgtgtctatcccaatcagagccctgacgcatgacgcgcagccgagaatgaaaatgcttaggatgtttgccacgaaagggtttttactagctgggagctgtctgttgcactttgccttactataggctacaaccttgtgtccttgtgctgtgcaacttgtggcactcccagattgcagtcaaagttatggcatatggcgtaatgctacactctgttaactggaaaagatgcgacatta

SEQ ID NO: 5492 - DNA, 417 bp, Triticum aestivum
  Clone ID: LIB104-022-Q1-E1-E5
taccggacaagaattcccgggtcgacggggttgatgcaagccctagatttagtctgatgacatgcttgctaatcatcattatcctgtttgaagactttacttcgtacattacattgaaagattaaatgaacaagtgcaataccacactgtgatcaaattctgccttgggctatggaatcccgggaacaattgtactcagctttctgtaataatccctatctgctgctagcatggcaacattgaaaaaaacatcagaaattctacttgagtgccttcaagtaatttagattgtccaattatttctgtcactggatactctttgtttttcactgatcacggatttgggttcagaagatttgctaatttaggttacgataatgttggactgaagttatgatggcgtgttgtagataaaaa

SEQ ID NO: 5493 - DNA, 389 bp, Triticum aestivum
  Clone ID: LIB104-022-Q1-E1-E7
attcgcgggtcgacggggaagatcaagctccaggcgggaggagacccccgccgcgtcggtagatgagagaaggcactggcgcagtcatggtttagatatgaaagttttggacaccgagcggaactcagtcgagagcttatatatgaaaactagtgagagagagaagactatatttatgcaattagaagagaactatatacattgtttttccctaagctcaataaggtctgtgtcctttgtggactgcgtttcttctttgtcgagacagaacatacactaccgaggattgcagtcaaatggaacttcgattcaagtttaacttttgcaataagtatatgaagttctttagcagtagctctagacgatacaggcttacgtacgcatgcatg

SEQ ID NO: 5494 - DNA, 403 bp, Triticum aestivum
  unsure at all n locations
  Clone ID: LIB104-022-Q1-E1-F1
ggtccagaaatcncgggtcgacggggcactgcatgtttctaatcaccacggttgatggcgtgttctcatttgtcgagtgtttttaggcaatatttggaaagcgttaatccgttagtacggttcacctatgcccaagtgtcaaccagatcgcactagctaaatgtttttggttgtttattaatgaattataaactttgtcgagtgcccattggaaaatacttgacaaagataagacacttgacaaacaatttgaaaggacatcgacccctaattagggttttggtgttaatggcaatagtgagtagacgactaactatgtttcgagtatgctttgagtatatacatcattggaaatggaacataaagttcgtctgcgattccctaagctaaaaggataaaagaa

SEQ ID NO: 5495 - DNA, 414 bp, Triticum aestivum
  Clone ID: LIB104-022-Q1-E1-F7
taccggactagaattcgcgggtcgacctgaagtacatgggagagggggggtcctcgtcgaagtgcgagaacgccatggccacgtacgttggctaccagcacccagagccatgcgcctagtcggccaatttgattctggtggatgctggtgcgaccttaatttaattctccttttcttcttctactaatctaattaatcaatgtttcctggacgaatttgttgtttcctgttgcttagatgttttgtgtgtgtgcggcattagggagctgccaattgctgcatctacggagtactccctccattccaaattactcgtcgtggttttagttcaaagggagtacttgcctagttgcccaatcagtgaactcgatcgtctgacaagtgggccctgtgcttatgttgacgattaatgtg

SEQ ID NO: 5496 - DNA, 452 bp, Triticum aestivum
  unsure at all n locations
  Clone ID: LIB104-022-Q1-E1-G1
taccggtccagaattcncgggtcgacgggttgacatacttgctacttcctcttgctgcttggataactttgtagtccaatatgctttgtccaacatttagactttccccttcaaagacacattgtctccgaaagttggaagattctatattttatatcccttatcttttgagaaaatatatgtgagtgaacctgaatgtggatgtataagattagtatgaaaccacaaaaaatgcaataatgcatacttacatgcaaggcaaccattatctttctaacttataaaagacaatatattaatacaaccatgtttgatctcaactttctagaaatccaatgatagtaagcttgttaggaaagaaacatatgattagttttaggacaaatggccaaagttgttatagaactggcatgtaatacacataacatgagatgttagttaanctaattttt

SEQ ID NO: 5497 - DNA, 450 bp, Triticum aestivum
  Clone ID: LIB104-022-Q1-E1-G2
gggtcgacggggtattaataaacctgacaggttaattgaagagtgcaatatcgtttcttttgctttatctgttgcagaagaaattgaaggtaatgctgagccttcttcatattccgaggctattatttctggtgatagtaataagtggatgaccgctatgcatgatgagatggaatcacttgaaaagaatggcacttgggatttagtaagattacctagagagaagaaacatattcgttgcaagtgggttttcaagaggaaagaaggtgtttctcctaatgatgagacaagatataaagcaaggttagttgctaaaggttatagccagattccaggtattgactataacgaagtcttttctcctgttgtgaagcatagctctattcgcactttactcagtattgttgccatgcatgatcttgagcttgaacaattggatgtaaaaactgc

SEQ ID NO: 5498 - DNA, 461 bp, Triticum aestivum
  unsure at all n locations
  Clone ID: LIB104-022-Q1-E1-G3
ccggtccagaattcncgggtcgacgggctcatagtgcttcacttatatatttttagcttgatactattgctcattgtgcctcacttatatcttttgagcttgatagttttgctcatagtgcttcacttatatcttttgagcataataatttttgctctagtacttcacttagatcttttagagcacggtggtggatttgttttaaagaaactattgatccctcatgcttcacttagattattttgagagtatttaatagcattgtaatttgcttaaagataatatacttggtattcaagatatgtgaaactttcttttgagtgcattgaatagtaagataagtttgatgcttgataattgttttgagatatggaggtgataatatcaaagcaatgctagttggggtgattatgaatttaaagaatgcttgtgttgaagtttgtgantccgtagcatgcacg

SEQ ID NO: 5499 - DNA, 443 bp, Triticum aestivum
  Clone ID: LIB104-022-Q1-E1-G5
gtaccggtccagaattcccgggtcgacgggaacgagagagaggaagccatctagttactaactacggacccgaaggtctacaaagaactactcacgcatcatcggagaggcaccaatggaagtggtgaacccctccgtgatgttgtctagattggatctgctggctctagactctgcggcggctggaattgattttcatcgattcccctatggtttctggaatattggggtatttatagagtaaagaggcagtccggggggcatccgaggtgggcacaacccaccaaggcgcgcctgggcctccaggcgcgccctggtgggttgtgctccccttggagcatcccccaggtgcttcttcggcccattggatgtcttttggtccaaaaaaatccacaaaaagtttcactacgtttggactccgtttggtattgatttcctgcgat

SEQ ID NO: 5500 - DNA, 427 bp, Triticum aestivum
  unsure at all n locations
  Clone ID: LIB104-022-Q1-E1-G8
aattcgcgggtcgacggggacatcgagatcgacggcaagcccgcaggtcgggttgtcatgggacttttcggcaaggctgttcctaaaaccgcagagaacttcagagcactctgcacaggtgagaaaggcatgggcaacagcggcaaacctctccactacaaggggagttcgttccacagaattatccccagcttcatgatccaaggaggggacttcactcttggcgatggaaggggcggtgaatcaatctatggcacaaagttcgccgatgagaacttcaagctcaagcacactggaccaggctacctttccatgggcaatgctgggagagatnacaatggatcccagttcttcatcnacactgtaaccatgagctggttggacggcaagcacgtcgtgttcggcaaggtgttgtctggaatggacg

SEQ ID NO: 5501 - DNA, 385 bp, Triticum aestivum
  unsure at all n locations
  Clone ID: LIB104-022-Q1-E1-H1
ccggtccagaattcncgggtcgacggggctgctcgatcgcggtagtgttcgtgatctgcctcttcatgctcgcgttcgggtggtcgtggggtccgctcgggtggacggtgccgagcgagatcttcgccctggagacgcggtcggcggggcagagcatcacggtggccgtcaacctcttcttcaccttcatcatcgcgcaggcgttcctgtcgctgctctgcgccttcaagttcgccatcttcatcttcttcgctgcgtggatcgccgtcatgaccgccttcgtctatgtcttcctgccggagaccaagggcgtgcccatcgagcagatggtgctgctctggagcaagcacgggttctggaagaacgtcatgccggacatgccact

SEQ ID NO: 5502 - DNA, 413 bp, Triticum aestivum
  unsure at all n locations
  Clone ID: LIB104-022-Q1-E1-H5
taccggtccagaattcccgggtcgacggggatccggcagacggaggcgaacgaggaggcgaagctgagctcgttccagcaggagatcgtgcagctggcggcggtgctgaacggcgaccaccagctaagcagcctgcaggagaggatcagggagaggatgaacgtgagggaaggcacctcctacatgaggagcgccgtgcggcgcttcttcgaggccggcatgtcggccaagaggatgggcctcgccgacgacgagcagatcgtcaagatgaggccctcccttaccaccagaatgacctcctcccctgcagatcaagatgatagtccgtagagagcaacgatgcatacatacataggatgaagattgatgttggaattaccanaattcttagtactacacatacatacatagaa

SEQ ID NO: 5503 - DNA, 403 bp, Triticum aestivum
  unsure at all n locations
  Clone ID: LIB104-022-Q1-E1-H6
taccggaccagaattcgccggtcgacgggggccacatcaagtacggcggttggagctcggacaacggcggaagcggcgttgcagagtgcaaactaggcggcttctggctcctacggcgcctacgggagctcacgaggttactggacatggattccaggccagtaagtcacgggagtgacgccggccatgagcttgagcggcggtgggtttcggcctcgatggaactacggcctagagctcgcaatcgagagcgttgttagaggggaaatgaccaggtgctcacaacgcgttggatggnnggctcggnagctcgggcgaggctctggagtcggtgtgtggtcgccggcgatctcggcggacgagagttgaagacggcgaaggcgacggcgatgcaaggcgttcg

SEQ ID NO: 5504 - DNA, 457 bp, Triticum aestivum
  Clone ID: LIB104-023-Q1-E1-A5
cccgggtcgacgggaaagttcttgttttcgtaatttgttcactatttcagaaaaatgttcatgtttcaaaaaatgttcgggaatttcaaaaaatgttctcgttttcaggtagaaacacaatttcagaacaatgttgatgtttgaaaaatgttcgcggtttcaacattgtgatcgcaatttcaaaaaatatccctgtgtttttttgttcgcatttccaaaacacatatgaatacaaatattgttcgcattttaaaaaaaatattcatgttttatttcttttgggtttgaattaagaaaatgtgtttttcaatttttgtttaaaaatatcatttgtggtcttagaaaatatttaggaatttccaaaaaaggaaatagaacatcacatttttcgaaaactgtttgtaatatatacaatacttgcgtgatttcaaaactgtttgcaactttaaaggaatgt

SEQ ID NO: 5505 - DNA, 483 bp, Triticum aestivum
  unsure at all n locations
  Clone ID: LIB104-023-Q1-E1-A8
taccgatccagaattcgcgggtcgacgggatcgaagaccaggccccggcaccgcacatcactttccccttagttgctcgacactactgggttactatcgagtgccgagggtgagacctcttcagcacttctaatgttaacgttgtagtgtagctattcggtcgtggtcatcgagggtgatttcctccttaaccacttcccaagtctcagaaaggtaacgatgctatctttgtcgtcatcgaccaattctcgaaggttgctcactttctgccagtcaaggagactatcactgctagtcaattagcaaacttgtatatctccagaattgtgtcactccacggcattccgaaggagatcagttcagaccgtggaagtattttcactccgaagttctgggatagtttccaagaggcaatgggaactcatattacctggagcactgcttatcatccccaatcncaagcccaagttgagcgagtcaatc

SEQ ID NO: 5506 - DNA, 262 bp, Triticum aestivum
  Clone ID: LIB104-023-Q1-E1-C2
ctctccaatgttgatgtaagtaactgtcagatgttgagtgtcttgaaaactttctgataattgtgggatttgctttgtaatggtaatcgtgaaattggtgtggttgaaaaaaaaaaaaaaaaaaaaaaaaaaaaaaaaaaaaaaaaaaaaaaaaaaaaaaaaaaaaaaaaaaaaaaaaaaagcggccgctcaaaaggatcaaagctaacgtacgcgtgaatgcaacgtcatagctcttcaaaagtgtcacctaaattaaatt

SEQ ID NO: 5507 - DNA, 138 bp, Triticum aestivum
  Clone ID: LIB104-023-Q1-E1-G7
aactaggcgtgcatgctagctcagaccgctgcgaaagtgtcaccgtaattcaaatcactggccgtacgtttctacagcgttcagactgacagaaccttgtcataacgtaacatatccgtcttggattatatctaccga

SEQ ID NO: 5508 - DNA, 306 bp, Triticum aestivum
  Clone ID: LIB104-023-Q1-E1-H5
ggtccacgggggaagaggaaggaaggacatggagttattcgtgacgtgtttaaaactcttgaggttttttttttgaaaaaaagcaaatacactgccccgtggacaacttttctcggacagagggagtattatagaagaaaatgttgtattgaaaaaaaaaaaaaaaaaaaaaaaaaaaaaaaaaaaaaaaaaaaaaaaaaaaaaaaaaaaaaaaaaaaaaaaaacggtcaaacaaaaggatccaaccttacgtacgcatgaaagctactacatagcccatcaagacagtcatcataaattcaattc

SEQ ID NO: 5509 - DNA, 461 bp, Triticum aestivum
  unsure at all n locations
  Clone ID: LIB104-024-Q1-E1-A9
ggtacgcctgccggtaccggtccgaaattcncgggtcgacgggcagcggcggcggagtgtgtggtgggtgttccgcgcacacccaacagggatgccacgcgcactatactatgccgggtagtgcgccaccgatgtagcctcccagttggagttgttgtctgatgacagtggtgtggctgagcgaccacgatggaccagcgccattggtgattatgggagaagcagacgagataagctacagggagggaggggaaaatgcgacgcaggactcgcgagccgtgagggtttatatagtaggcctgtaagtattggatttttggtgatttcaccgagtcgggtgggaagctcgcgcaggaacctgcgaggttacgcagggaatgagctcactgacgattcattggcaccaccgttttggcaaaagaacgcccccgcgcgttgcacaagcttgcgttgtacgccta

SEQ ID NO: 5510 - DNA, 433 bp, Triticum aestivum
  Clone ID: LIB104-024-Q1-E1-C12
ttcccggggtcacgggtcctcctacctcctaggccgccaccccttgctcctatataagtagatccatctagtagcttttcccttcggatttgtttagttaaaagttagccattgcaacttcgtgtacttcgtttgtgtccaacgaccagaccaagaccgcttacggatccccacctttatcaatacttcatacatattcacaatattcagattgcttttatcatattcttgcttgttctttgattgcttgcaggaatagaccttcgtggtcaggttgatcgtgctccggcgtggtcaataacctcaagagattggtttagcgattgctaaggcgcgacgtcctcgcacgttcatagtcggatcgtgaaagtcgtctccagcaaatcgatagttatcatctcatcgaaagatcgggacacctcccgcccctatc

SEQ ID NO: 5511 - DNA, 206 bp, Triticum aestivum
  Clone ID: LIB104-024-Q1-E1-E10
ggggttgtttcaagacggcagaaaaaatggtactaatgtaacaacgaaaccagataaattcgcctgccctgcagcaacaatcagtaatcatgcatgaataaataatggtcacaataccaaaggggccgccctaaaggatcaaagcttaatttcacatgcatgcaacttcaaaacccttcaaaagtgtcccctaatttcaattcagg

SEQ ID NO: 5512 - DNA, 461 bp, Triticum aestivum
  unsure at all n locations
  Clone ID: LIB104-024-Q1-E1-E6
cgggcacacaccatataccttcctcaaaacagccaccatacctatgtattatggcatttccatagccattccgagatatattgccatgcaactttccaccgttccgtttattatgacacactccatcattgtcatattgcttagcatgatcatgtagtcgacatcgtatttgtggcaaagccaccattcataattctttcatacatgtcactcatgagtcattgcatatcccggtacaccgccgaaggcattcatatagagtcatattttgttctaagtatcgagttgtaattgttgagttgtaagaaaaataaaagtgtgatgatcatcattattagagcattgtcccagtgaggaaaggatgatggagactatgattcccccacaagtcgggacgagactccagaaaaaaaangcgnnnaaaaaaaaaaaaaagcggccgctctagaggattcaagctt

SEQ ID NO: 5513 - DNA, 142 bp, Triticum aestivum
  Clone ID: LIB104-024-Q1-E1-F3
gcaacgggaacggaagaaagaccgggaacacaaaaaaaaaaaaaaaaaaaaaaaaaaaaacgggcgctccaaaagattcaaacctaacttcgccttcaagccaactcaaaacccctccaaaatggcaaccaaattcaaatca

SEQ ID NO: 5514 - DNA, 236 bp, Triticum aestivum
  Clone ID: LIB104-024-Q1-E1-F8
cgggagattcacaggagagaagcgacggagttagaagttgtaaatatgcattgttgtatcgcgacctgaatgaaataaacgaaataatgctcttgttcaatcggcaaaaaaaaaaaataaaaaaaaagaaaaaaaagaggacgcacaagatgatgaaaacagatgatactactgcatgcgacatcatagctcttccatattatcaactaaatacacatcacaggtcgtcgttaaac

SEQ ID NO: 5515 - DNA, 136 bp, Triticum aestivum
  Clone ID: LIB104-024-Q1-E1-H4
tgacacataaacaaaatggatacggaaaaaactcatcaaaaatgtcaaaaaaaaatcggccccccaaaaggatcaaacctaacttacccttgaatgcaacttcaaagccctccaaaattgtcaccaaaattcaatt

SEQ ID NO: 5516 - DNA, 456 bp, Triticum aestivum
  Clone ID: LIB104-025-Q1-E1-A10
attcccgggtcgacgggtacagccactacggtcgctcgacgacgaagtcggcgaagaggagcggcggcaagaagcagacgagcaagatcgtcggcttcgtgaagatgcacttcgtcggcacctccttcccgccagctcgagcgagggatcggttggacgccagccgcgcgccctgctattcgtcatacaacgactacgagtacgcggcggagtggaacgctgtggttccggcgacggcggcggccgtggaggaggaggtggtggaggtgtgcgacgacacggcggagtgcgggtacctgtgttggctggaggaggagaggtcgtcgggtggcgtgccggcgggcgaggacgacggcgccgaggctagtccggcggtgaacgagatcgacaggctggcggagaagttcatcgcgaggttccacgcgaagttcttgctggagaagcaggagtcgtacc

SEQ ID NO: 5517 - DNA, 442 bp, Triticum aestivum
  Clone ID: LIB104-025-Q1-E1-A12
gtacaggtccgaaattcccgggtcgacggggcaccctctctctcctccatttctctcctcctcctgccaccgatcccgaaccagggaggaacccggcgcgaggagggcaaaggaagagaagaggagatcaccgagcccagcgcgcgcacaggacagcaggcgccgcgatctcgcacaggagcggagatggggctcacgttcacgaagctgttcagccggctcttcgccaagaaggagatgaggatcctcatggtcggtctcgatgcggctggtaagaccaccatcctctacaagctcaagctcggagagatcgtcaccaccatccccacaatcgggtttaatgtcgaaactgtagagtacaagaacattagtttcaccgtttgggatgtcgggggtcaggacaagatcaggcccctgtggaggcactacttccagaacatcc

SEQ ID NO: 5518 - DNA, 447 bp, Triticum aestivum
  unsure at all n locations
  Clone ID: LIB104-025-Q1-E1-B4
gggtccacctccgcggacgaagtgcagcgcatgatggcagagatcgacaccgacggtgacggcttcatcgacttcagcgagttcatctccttctgcaacgccaacccggggctcatgaaggacgtcgccaaggtcttctgaatcagttcatttcacctcagccgtccgttccaggagccgatccatctacgtacggcttcgtatatcaatttcatgcaactacctactccggtcccgatccagcctcagcttcacctgaggccggccctaaatttgtttgatcaattcttttgctactagtagtaactagtgatgatcactgttgcatcatttaattatttattttatatatcatcacaagtttcctgtgattcctttctttctatacctttttgtcgattgtcngctccagctcgatcgaacgattcatgctgctaattgtttgtg

SEQ ID NO: 5519 - DNA, 446 bp, Triticum aestivum
  unsure at all n locations
  Clone ID: LIB104-025-Q1-E1-B7
gtacaagtccagaattcncgggtcgacgggggtatttagatatttgctgggagaaagaagagatagatcaagagaacagctcagcactgcggaaaacaaagtcaattatactcacaaatagttctgcatgcaaactgaagctgggagatgtggagggtgctttgttagatgcagactttgcactgcgtgaaacagagggcaacgcaaaagcttttttccgtcaaggacaggcacgcatgacactcaagaatattgatgctgcagttgggagcttccagcgtgcgttggagttggagccaaacgatggaggaatcaaacgggagctggctgctgcaaagaagaaggttactgacagacgcaatctggagcggaaggcattttccaagatgttcgagacgtcaggaagttcagagaaaagtgatggagtattggcagcaagttcagag

SEQ ID NO: 5520 - DNA, 446 bp, Triticum aestivum
  Clone ID: LIB104-025-Q1-E1-C10
tccagaattcccgggtccacggggacgacgacgtggatgtggacgagtcggatagaaagctcttagatgatgaaaagaaacccgatatcacgaaacgaccacacactcctattggagatgaggtggaatgcaagaagccaaagatagcagaaggctcaaggtgccaaggagaagaacctgaggctggagggataaagaattcctcctgggtctgatgacaggggaatgcagtaaacaccagaagcatcaaaactatgatctggaacagtatcctgaataaactattttctggattatgaatgaattctgaagcatggggctataagtgaattatgtaacatggatttgtaactatggtggatgttaagttaacgttctatcagtgcatcgtgaatgcgtgcccaaaaaaaaaaaaaaaacatcaaaaaaaaaagcggccgctctag

SEQ ID NO: 5521 - DNA, 443 bp, Triticum aestivum
  unsure at all n locations
  Clone ID: LIB104-025-Q1-E1-C2
ggtccgacattcacgggtccacgggatatatggaattggagttgaggtcggtggagcgtcagggggcccatgatgcaggggggctcgcccaggggggtangcgcgccccaacccttgcggacagggtgtgggccccctaacgtggatctttcttccagtatttttttgtatattccaaaaataatctccgttgattttcaagtcattccgggaacttttatttctgcacaaaaataacaccatggaaattctgctgaaaacagcgtcagtccaggttagttccattcaaatcatgcaagtcaaagtccaaaacaagggcaaaagtgtttggaaaagtagatacgacggacacgcatcaattcccccaagcttaaacctatgcctgtcctcaagcaattcagttgataaactaaaagtgataaagaaaaacttttacaaactcc

SEQ ID NO: 5522 - DNA, 452 bp, Triticum aestivum
  Clone ID: LIB104-025-Q1-E1-D10
gggtcgacgggggtcatatcgacaatcaaccgtgatggcgtccaaagtccttcttgcaatcctcctcctcgccgcggcgacgccagcgtcgctggctgccatcgatatggcgcagatgctcgctgacaagccccagtacgcgaccttcctgaggctcctgaaggagacaaaggtcgccgatgacgtgagccggctcaagtcggcttccgtgctggtcgtccccgagaaggccgtaaagccactcttggcggtgccggccgccaagcagcggacgatcctccagcatcatgtcctcatcaagtatttcgaccccatccagctgggcgagatgaagaccaacgttgccaagctccagaccatgctctccaacacagataaggacatgggcaccatcgactactccaaggacaaggacggccagatgtacctacgctccccaggcgccgatagtg

SEQ ID NO: 5523 - DNA, 464 bp, Triticum aestivum
  Clone ID: LIB104-025-Q1-E1-D11
tccagaattcccgggtcgacgggtcttggggatgctatgtttaatgaagatgatatttttagcctcccaagttttgatatgcaaagttgttatgatgatagcatgcctcttacttatgattatattgatgaaagtgggtctggaagagtgtcaactttaggaagtgatgattccactatcttgggagaggtctcaatcgattatgatgagaacaaagttggtacttatgatgattattgtgatgaaacttatgctataaaaaatagtgacgattatatttataaaacttgtcatgattatgattaccctttttcttaacgttactcttttaatgtggaaacaaattttagtgttcaagtctcttatgatactcccgctgttccgaatgagaagaattttgcttatgtggagagtagtaaattttctatgcttgtagattatgaaaagaatgctttaggtgctgg

SEQ ID NO: 5524 - DNA, 466 bp, Triticum aestivum
  Clone ID: LIB104-025-Q1-E1-D12
tccagaattcccgggtcgacggggaagcggtcgttcgatgccgagacgccgcggcggcgggagtcggcacgcagcaacgaggcggtcgaggaggcgcggatcaagctgctggagctgcggcaggtgaacaaggtgaaggcgctcgtcggcgccttcgagaccgtcatggacgacaaccaaagccccaccgccgcccgcaagccgcggctcaacctcggcgcctgaactacgagtacattcgatgagcatgaagctcgatcgcgtgcgcctcctcctttatccccgctactctttaatcacccatcaacccaatttgtcgtcgtcgcacacttatctataattacggtatcgcttatattctgcaaggaggaagatgatggaggggttatcatcatgatgtaataataataatgatcatggaggaagatggtgtattttactttatactatcgtctacacgatcaat

SEQ ID NO: 5525 - DNA, 458 bp, Triticum aestivum
  Clone ID: LIB104-025-Q1-E1-D5
attcccgggtccacgggggactggcaatggcgcgcgccgtcgccgtcggcgcgttccagaggctcaaggcgcgctgggcctgcctccagaggcgcaccgaggtcaaggtggacgacctttccgtcatgctcggcgcctgctgcgcgctccacaacatctgcgagcgcagcggcgaacccttggacctccagctgctgcagggcctggagctcgacctagacgacgacgacgaccacatggtcgccaatgaccccgtgccctcccccgccgccgagcaaatgcgagacaccatcgcccacaacatgcttcaccatggcaacaagctggccggcgctgggacgtcttcctacaacctacaagcaattactggtttccatttcttgaccggttcattaacccgattcaaagttaaaggaataattaaaggagtagagcaccaaaattcatttgttattttg

SEQ ID NO: 5526 - DNA, 457 bp, Triticum aestivum
  unsure at all n locations
  Clone ID: LIB104-025-Q1-E1-D8
gggtccacgggataataatggtgcggatggcgatgttcccaagagtggtcctgtcgaagacgaggagcatattgcttctctgaggcctaaaagatcaaagagactagtgaggagcacgggtgaggataaggaatccgttgctgcttgtgatgttgagaaacctgcagatgcagctgaaaacaatgacaacaatgatgcagaagagttgcaatatccttcagcctagtggacctactgggttgacctgatgagaacataagatgcgaatggcaagactctaatttttggtgtcgagtangagcatcaaagatggcacccagaggaggagctctggatctgcttaaggtgttacgcagttcaataagtactttaactgtgctgtgcagcttcttttcagaaacctgggactgcaacttgggtgcagttgcagtgagctgagcccaatgatggctgttat

SEQ ID NO: 5527 - DNA, 413 bp, Triticum aestivum
  Clone ID: LIB104-025-Q1-E1-D9
attcccgggtccacgggttctccacatttgtacagtgaggcaggtcccgcttctagccagcattatgctacattgtactgcctgtaacttgtaatggagtctggagcgattcagtgtgtctgtcagttgcggtgcggcgcatccgcccgacggccatgattggcgtgtcagtctttcgacacagtacgttattcgcatatgtgtgtgtgtgtgtgtgtgtgtgtgtattgctgtgaaaaaaaaaaaaaaaaaaaaaaaaaaaaaaaaaaaaaaaaaaaaaaaaaaagaaaaaaaaaaaaaaaaaaaaaaaaaaaaaagcggccgcccaaaaggatccaagcttacttacccttgcatgcaacttcatagcccttcaaaagtgtccccaaatttcatttcaggggccgtctttt

SEQ ID NO: 5528 - DNA, 450 bp, Triticum aestivum
  unsure at all n locations
  Clone ID: LIB104-025-Q1-E1-F12
tccaaaattcccgggtcgacggggacggagatcgggttcgtccacacactcccgccgccaccaccgccgcgaaccggagagcgaggccgacaccgccgccgcgatgagggccaagtggaagaagaagaggatgaggaggctcaagaggaagcgccgaaagatgaggcagcgatccaagtaggccgtaagcatcatcttgcatccaggcagcggaactctgaggggtgatggcattgtctagtgattcttgatttgttctgttgttttggctgcggaagttgcttttacctgtgtttggtcaaatttagttgtttaatactagtctggctatgttccagtactgagttttatgtaatgtgaggattatatgtgtttgtgactgaattttatgcacctattatccttgaggaaaaaaannnnaanaaaaaaaaaaaaaaaagcggccgctct

SEQ ID NO: 5529 - DNA, 450 bp, Triticum aestivum
  unsure at all n locations
  Clone ID: LIB104-025-Q1-E1-F9
taccagtccaaaattcccgggtccacctcaggtatataatcgtaatggtaggcctgcaccaccacctcaggtacgagatgatgtccatattcctaaactgaaattgaatattccaccatttgagggtagatatgttcctgatatatatcttacttgggagttagaaactgaacaacgatttacatgtttacaatatcctgaggagagacgagttgctgctgctgtttgtgctttcactagttttgcatgtgtatggtggtctgaacattgtagattatatcctattccaactacttgggctgctttgaaaagtgctatgcgtacgcgttgggttccaccatattaccaacgtgaattgcttcaaaaattgcagcgtttaagacaagggaaaaattctgtanaagaatattatcaggaaagtgaaacttggatgattagatgtggtattgt

SEQ ID NO: 5530 - DNA, 459 bp, Triticum aestivum
  Clone ID: LIB104-025-Q1-E1-G10
attcccgggtccacggggtaatgctcaaacacatatccattaacgatgtgtgggtcaatgaacccaacatcatggatgttccttactctgcattccttaatcttcattctgcatgtataatagcggacacaacaatatagttaggacatatatatagtgcaggcaatatgaacgagatggggtagaaataaatcacttacagaacgtagcaactgatgatagatttgtcgagctcgcgcagattgaaaagctggaacaattcactcagatgaatttgtacatagtaatctttgaagtgatgctcatatctaacttccacataaatatattctttggcgtttttattttttatgtaacccttgtaccatttcagcagacctttcatttatggaggtagatcctgttcctgcgcaggctcgacgagaggcccattcttcacatatgtaattactacctcct

SEQ ID NO: 5531 - DNA, 290 bp, Triticum aestivum
  Clone ID: LIB104-025-Q1-E1-H11
cggggtcagttcagtcttctacagaatatagtcctcatcatagatcccgaggactccacaaagtactatccccgctttaacctggaagatacttcaagttataaggacttggtcgaacagatcatcaaatttccttatcttattagagaaggcctatttcttctttagtgtcggtgatcttcgattcactggccgtcgaataactcgatctttactattgaaaccttcttgtttcctatcttactttcgttgatgtatatcctactttcgccacctggattgatctccat

SEQ ID NO: 5532 - DNA, 473 bp, Triticum aestivum
  Clone ID: LIB104-026-Q1-E1-C5
attcccgggtccacgggaggcggataacgctcggaggttgataatattcatgatgcgtcaagttgctcagcgacaccgaacacaaaggctccagagtccaagtggcatgcctggagatgccgaggaaggttatgcggttagcagcggtggcgccaatggaaccaccccgtaccctttcaccttggagggcgacgacgaggatgacatggctctggccggaggggaaggggcgggtatgcttagatcagacaggcgtcgccggcgacgccgtaggaaccgtggaagactgtttttagattctaattgagaaggcaggggctctgtcaccagagtacatgcacagctgattccctggtgcctggcattcatcaattccaaccaaaatttacttgttcatgatcattgtaccaaagtagtttgtcttaacctcagctcatcattgctttccatcaaccatgtttcattttcacatt

SEQ ID NO: 5533 - DNA, 475 bp, Triticum aestivum
  unsure at all n locations
  Clone ID: LIB104-026-Q1-E1-D8
attcncgggtccacggggcgtatgaaaaaggtagacatcaaaacataaatttgaaaatatgttaatcatgcatttataaaacggtaaacatgtactgtataaaacaatgtttctcatgtaaacaaaaaatatagagggtgtatgtaaaaaagtccacataaaaattactacaaaatgttaatcatgtattaaaaaaatgttaattgtgtgttttaaaaaatgctcctgatatatatggaaaatttacaatgtgtataaaaaagttgacatcaaaatatatatttgggaaacaaagtgtaatcatgtgtttgaaaattttcaaatgtatgtgaaaattgttgctgtataccaaaaaattaatgtgtacgaaaaagaaaatatgcatcaagacttatatttaaaaaaaatgttgatcatgtatttaaaaattgttaaacatgtattaaaaaatatacccgatatatacgaaaaatat

SEQ ID NO: 5534 - DNA, 443 bp, Triticum aestivum
  Clone ID: LIB104-026-Q1-E1-E1
cggtccgaaattcacgggtcgacgggaagcttttatggacaaaggaataaagggtggcaagagcctaagcttggggatgcccaaggcaccccaagatattcaataatagccaaaagcctaagcttggggatgccccgggaaggcatcctctctttcgtcttcgttcattggtaactttacttggagctatatttttattcgccacatgatatgtgttttgcttggagcgtcgtgtattatattagtctttgctttttagtttgcaacaatcatccttgctgtacacacattttgggagaagcctttttgattagaatttgctagaatactctatgtgcttcacttatatcttttgagcttgatagttttgctctagtgcttcacttatatcttttagagcacagtggtatcttaaatttgaataaattgctagtctctcatgc

SEQ ID NO: 5535 - DNA, 439 bp, Triticum aestivum
  Clone ID: LIB104-026-Q1-E1-E8
gggtcgacgggactgttctgtttttgacagattctgttttccgtgtgttgtttgcttattttgatgaatctatggctagtaaaatagtttataatccatagagaagttggaatacagtagttttaacaccaatataaattaagaatgagttcattacagtaccttgaagtggtcttttgttttctttcgctaacggagctcacgagttttctattttgagttttgtgttgtgaagttttcaagttttgggtgaattcttttgatggatcatggaacaaggagtggaaagagcctaagcttggggattcccatggaacccccaagataatccaaggacaccaaaaattcaaagcttggggatgccctggaaggcatcccctcttttgtccacttccatcggtaatttacttggagctatatttttattcaccaacatgat

SEQ ID NO: 5536 - DNA, 394 bp, Triticum aestivum
  Clone ID: LIB104-026-Q1-E1-F1
tgacggtccgaaattcacgggtccacggggaagaaagggaagaaacgccggaggaggtctaaaggaactagccaggcaacggctgaaggtgcttctggagagaagaaaaagaggaagagtcggaaacaaaaagttgaggctgaaaatgagaatgatgatgaagatgatgctggtcctgctggttctgaggactcatcaatgggagaaagtgatgaggactctgaagtgaaagaagagaccaagagtgatgaagagcctgaagcaacaccggtgaagaaaaagtcaacagatggtaaacaaggaaagaaggaagctggattcaaggcaaaggaaaaggatgcatcggtgaagaagactcctactaaatctgtaaaaagcgtgtcaaagccaaatg

SEQ ID NO: 5537 - DNA, 453 bp, Triticum aestivum
  unsure at all n locations
  Clone ID: LIB104-026-Q1-E1-F11
cggtccgaaattcacgggtccacgggccgctaaacatagacaaatattaaggaaaatggagcttggaggtcgagcttggagaggagaaagcttaagtagtgtggctcgggcattccatcgaacacctcatgtgcatangaggtgagctagagcaccacaaagctctcccctcgccggccacganaaatagagcactgtgagtgctctgctcgcgggcgaggggtagatataggcaactaattggtcccggttcgtgccacgaaccgggactaaagggcagcctttggtcccggttcacgccaccaactgggaccaatggtggtgggccaggagcgagacgcattggtcccggttcgtcncaccaaccggaaccaataggtccagccgaaccgggaacaatggcccacgtggcccagtcngcccccgggctcacgaaccgggttcaatgccccc

SEQ ID NO: 5538 - DNA, 377 bp, Triticum aestivum
  Clone ID: LIB104-026-Q1-E1-F2
cggtccgaaattcacgggtccacggggtggaaggcaagcgccgggactaggcaccccgtttctcatcgccgctatgggttcatgacgaagacaattttatcttaagttagaaccgcagcaacaattgatgtaatataactctgcagtactttaagatgaaacatgctatcttcctgtgttgatctttctttgtatgtatacaccctacgcccagtgggatagggttgccggcgcgtaaacccatgctatggcgcttcgaggacggatccttagcagcctgccgggggcgcttgctgccggaaaaaccaacttgccactcttagcgcggccgcttgagctgttgagcggactcaaaatagaacaaggacgttgctaat

SEQ ID NO: 5539 - DNA, 459 bp, Triticum aestivum
  unsure at all n locations
  Clone ID: LIB104-026-Q1-E1-F6
attcncgggtcgacgggaaaggcactgaactagtttgcaacaaagaagagagaaaatgtctaccgctgaggcaacccgtgaggagaatgtgtacatggccaagctcgccgagcaggctgagcgttatgaggaaatggtcgaattcatggagaaggtggccaagaccgctgatgtaggtgagctcactgttgaggagcgcaacctgctctctgtggcttacaagaatgtgattggtgcccggagggcttcctggaggatcatctcctccattgagcagaaggaggagagccgtgggaacgaggcctatgtcgcatcaatcaaggagtaccgtaccaggattgaaaccgagctcagcaagatctgtgatggcatcctcaagcttctggactcccaccttgtcncctctgccactgcagcagagtccaaggtgttctatctgaaaatgaagggtgactacca

SEQ ID NO: 5540 - DNA, 184 bp, Triticum aestivum
  Clone ID: LIB104-026-Q1-E1-G12
aagccaagtaaattaacaaaaacaaaaaaaagtagttaaattggggacgtcaaaaatgtttcggatttaaataaaccttaaatgaaaaaaaaaaggggcggctcaaggggttcaaagtttaatttcgcttgaatgcgatttaaaacctcttcaaaagggtaacctaggttaatttcaagggcat

SEQ ID NO: 5541 - DNA, 417 bp, Triticum aestivum
  Clone ID: LIB104-026-Q1-E1-H3
ggtccgaaattaccgggtccacggcgcagaggtgtaagaaacagaaggggtgctctgtttctcacatcgagtgctctgtcgagcagaactactgatcgtgatcgccccgagcacgggcggggtatatattgaccatcgagtgtcatgttgtttcgctgtgctggggttttgttgtcggggttttgtcgtcagatttcaccagctcgtttctttctccggttctttgtttctttcacacggtaaatgcagctaccactcgattcttggcgtttgttgtttgtaaagaagatcgtagcttgtaagtaaaatcgtttgcagtgtaaaatgtacaaaggtagcatgggaaatgcttaacagaggagtcttggtcttgcactcaaaaaaaaaaaaaaaaaaaaaaaaaaaaaagcgggcgct

SEQ ID NO: 5542 - DNA, 53 bp, Triticum aestivum
  unsure at all n locations
  Clone ID: LIB104-027-Q1-E1-A12
agtcgtattaaaatctgcgnctcgtgtgtgtgttctttctgtggtgcggtgag

SEQ ID NO: 5543 - DNA, 393 bp, Triticum aestivum
  unsure at all n locations
  Clone ID: LIB104-027-Q1-E1-A4
gggtcgacggggaccacaaggagaagaaggacaagaagaagaagaaggacaagaagcacggcgagggccacaaggacgacgacggccacggcagcagcagcagcgacagcgacagcgactgagccagctccggccgcgctccggcagcagcgtgcagtgtaggcgagatcgatgaacgcttgggagaagtgtggcatacatatatgttgcagggtttggagcgtgtggtagcatatgtatgtaatgcgtgacatgtctcatggatcttgtgatgtataataattagccggctgcactgcactgcacggtgcttgtaataataacgttaatgaatcatgttggcattgatgtgaaaaaaaaaaaanaaaaaaaaaaaaaaaaagcggccgctct

SEQ ID NO: 5544 - DNA, 371 bp, Triticum aestivum
  Clone ID: LIB104-027-Q1-E1-A7
cgggccgacggggatcttgagcaaatatcacaccaaagtttgatgatgacaaaaggctatgaggagatgtctattgcgtaggtgcaaaatctccatcgatacagatcgcgctaggtgccagtttttccgcagagaacgggccccgctggtaatgtgctgcaagattgattgacagatcttaagcaggtcctcgcaagtcctcacgccggtgatgatcagtttgtcagccagatacataaggatcgtaatagaaacggggtcaatgcctaacaaccagtaacgtagattgtcaagagacggcgacacagctcatcatcattctcttgtatactctgcacaggctagtccacttttccacagaagactcaatg

SEQ ID NO: 5545 - DNA, 468 bp, Triticum aestivum
  Clone ID: LIB104-027-Q1-E1-A8
gtaccggactagaattcccgggtcgacgggatgatgatagttgatttgattctgctgaaaaacagaaactttgtgcgtgcgaatttagttttgttaaatcacagaactttttcattgattcgtttttcttctgatcaatagacaaattttacaggacttcctattttggtaggatttttagagttccagaagtttgcgttagttatagatttctacagattgttctgtttttgacagattctgtttttcgtgtgttgtttgcttatcttgatgcatctatggctagtaaaatagtttaataaccatacagaagttgggatacagttggtttaacaccaaaataaataaagaatgagttcattacagtaccatatgtggtggttttgttttctttcactaacggagcttataagatttcctattgagttttgtgttgtgaagttttcaaggttttggctaaagctttta

SEQ ID NO: 5546 - DNA, 391 bp, Triticum aestivum
  Clone ID: LIB104-027-Q1-E1-A9
gggccgacgggtacggcgtttcgataactaatagatttttgcaataagtatgtgagttctttatgactaatgttgagtccatggattatacgcactctcacccttccaccattgctagccattctaataccgcacacctttcgccggtatcatacacccaccatataccttcctcaaaacagccaccatacctacttatcatggcatttccatagccattccgagatatattgccatgcaactttccaccgttccgtttattatgacacgcttcatcattgtcatattgctttgcatgatcatgtagttgacattgtatttgtggcaaagccaccgttcataattctttcatacatgtcactcttgattcattgcacatcccgggtacacg

SEQ ID NO: 5547 - DNA, 406 bp, Triticum aestivum
  unsure at all n locations
  Clone ID: LIB104-027-Q1-E1-B7
aattcccgggtcgacggggaggaggaggccacgtcgggagctgaggggccttcagctcatgttagttctttgctcgagtgacagattgttttgttttgttttgttttctttgctcgtgttgaaatacaggtgttgatgatcgtgacaactgtttttcttcatttaggggcaaatgtatgtgtggctgcagtccccctctatattgacatgcgatctattgtatttatttgggtangaggtgtatttaaggatcactttgccctcaaaaaaaaaaaataaaaaaataaaaaaaaaaaaaaaaaaaaaaaaaaaaaaaaaaaaaaataaaaaccaaaacaaaaaaaaaaaaaaaaaaaaaaaaaggggccgcccaaaaggttcaaaccttacttacccttgaatgcaa

SEQ ID NO: 5548 - DNA, 450 bp, Triticum aestivum
  unsure at all n locations
  Clone ID: LIB104-027-Q1-E1-B8
gtaccggactggaattcccgggtcgacggggaaaatgctcaaatgcatgagatgaacacgtatgcaaatgcacatcacatgacgacatgataagagatgcatggtcacgacaacagcacacggtgacaaagagccgaacccgggaaaatagattaacttaacgccggaaacggcaatagttggcgtacatatacggaacgttacatccggggtgttacacggtgtcccaacttagcccatcacaagatctcacggtcattgaaggatattccttctctcaagacatccgataagccggatccggtaacagacatctcaatataggaaacatgtcagcatagccagccgaatgtgccgacatatcccgatatgagctgcacatatctcgttctcacggcacactcagactgtccaaacctccggtaaggcatcccanaattgcccctggtg

SEQ ID NO: 5549 - DNA, 408 bp, Triticum aestivum
  unsure at all n locations
  Clone ID: LIB104-027-Q1-E1-C2
cggtccagaattcncgggtcgacgggtatgagaaatatcatggatactacggagggaaggaggaatcgaggaaatccaactacaccgatgtggttaataaatattatgatcttgctactagcttctatgagtatggctggggtgaatccttccactttgctcacaggtggaatggggaatctttaagggaaagcatcaaaaggcacgagcactttctggctttacagcttgagttgaaaccagggatgaaggttttggatgtcggctgtggaataggcgggccattaagagaaatttgcagatttaacctcaacctcagttactggattgaacaacaacgactaacagataactaggggaaaagcgcttaatcggtcggtangacttggcgctacttgtgattttgtc

SEQ ID NO: 5550 - DNA, 353 bp, Triticum aestivum
  Clone ID: LIB104-027-Q1-E1-C3
ggtccagaattcccgggtcgacgggcccttttgggtgttaatcacatagcaatgtgaactagattattgactctagtaaaccctttgggtgttgatcacataatgatgtgaactatgggtattaatcacatgcagatgtggggattggtgttaaatcacatagcgatgtgaactagattactgactctagtcaagtagaggcatactaatgacactatgtttgtctatgtattcacacatgtattatgtttccggttaatacaattctagcatgaatactaaacatttatcatgatagaaggaaacaactaataactttattattgcctctacggcatcgatccttcaatctc

SEQ ID NO: 5551 - DNA, 201 bp, Triticum aestivum
  Clone ID: LIB104-027-Q1-E1-C5
aattcccgggtcgacgggggaatcaacacaaaacaaaaacgaaaaaataagataaagaagaagagtcaaaaatgcataaaaatacctatacatacaaaacaaaaaatcaaaaaaaattcggccgccccagaggttccaaccttaattacgcttgaatgacatctcttgacgcttcaaaattttcaccaaatttcaattcaa

SEQ ID NO: 5552 - DNA, 469 bp, Triticum aestivum
  Clone ID: LIB104-027-Q1-E1-C6
aggtaccgatctggaattcccgggtcgacgggggatcaaatatgataatctatcttagttgcccctggcagaacacaatgttactgtcaggtcgccatcggttatatcgagtgagtgtttgtggctggccgagctggtctgagaactgctgaatgcaatctatccttaaatttggtaaaaaaaaaaaaaaaaaaaaaaaaaaaaacaaaaaaaaaaaaaaaaaaaaaaaaaaaaaaaataaaaaaaatgaaaataactaaccataataaaggaaaaaaaaaaaccggcaaaaaacaaaaaaaggggccccccaaaaggttcaaagctaagttacccttcaatgaaagttcaaacctcttcaaaggtgcccccaaatttcatttcaggggccttcttttaaaaacttggtaacggaaaaaaccctgggtttacccaaattaaacccctttaaaaaaaacccccttttcca

SEQ ID NO: 5553 - DNA, 456 bp, Triticum aestivum
  Clone ID: LIB104-027-Q1-E1-C7
aattcccgggtcgacatcgtctatcacaactggctgctcatgtacctcaacgacgaggaggttgagaagctgattggcaggatagtgaagcggctgaagcccggtgggcatattttcatcagggaatcgtgcgtccaccagtctggggattccaagaggaaagtgaacccgacgcactaccgggagccgaggttctacaccaaggggtttaagggaaggcactcctaagaccaagaagggaattcctttgagctttctctggtaacttccaagtgcattggagcttatgtgaaaagcaagaagaaccagaaccagatatgttggctgtgggagaaggtcaagtgcacagaagacaaaggctttcagagattcctggacaatgtgcagtacaaatccactggaatcttgcgttatgagcccgtgttttgggaagggttatgttagcaccggtggatt

SEQ ID NO: 5554 - DNA, 466 bp, Triticum aestivum
  unsure at all n locations
  Clone ID: LIB104-027-Q1-E1-D2
ggtccagaattcccgggtcgacgggtatgaatgtttagttgctcaacgtgttttgagtgtgcaagttacacaagctgagcaaaatcagaggcataatttgtttcatacgaagggagttgtgaaggaacgttctgttcacgtcatcatagatggagggagctacaacaacttggctagcatggagatggttgagaagctatctctcaccacaagacctcatccacatccttactacatccaatggttcaacgacaacggcaaggttaaggtaacatgtattgttcgtgtgcattttagtatctctacataatgctgattatgttgattgtgatgtggtacctatgcangcatgttccttaatacttggtagaacatggcaatttgataaaaattctgtacaccatggtagaatcaatcagtatactcctgttcataaggacaaaaatattactttgcttcctatgac

SEQ ID NO: 5555 - DNA, 472 bp, Triticum aestivum
  unsure at all n locations
  Clone ID: LIB104-027-Q1-E1-D5
taccgatctagaattcccgggtcgacgggggccgtgatcgttatgccagtgaccggtacccctctggtggtgaccgctttggtgcagacaggtatggtgcagctccagaccgttatgcaccaagtggtggtggaggtggctatggcagggagcgggagagaagctacgagagagatggaattcgtggtggtggcgcctatgacaggagtggcccaaggggcggtgcaagctatgacagggacggcccaaggggcggcatcggtggtggctatgacagggacggtccacgtggaggcggcgccgactatggcagcggagggcctgctcgctacgagggaggaggttacagggagaggcctgcgccgtatgaccgccccaggggaggaggacgcttcgacgaccgctattagtgacctgttgctgcantcgagctatgtatttgcgttttaactctttcaagtttggcatggcc

SEQ ID NO: 5556 - DNA, 458 bp, Triticum aestivum
  Clone ID: LIB104-027-Q1-E1-D8
cgccaggtaccgatcaggaattcccgggtcgacatagcccgcttgcggggcagaatcacatcgtaaccttataaccacgatgtacgatcgtgttggtacacaatacgtatgagaaacaaatcacaaggaaaaaaatgctacccacagcagccgatctctccttcctccccccgtcgacgggaagctcgccggcggcgaggtggcacgggcgacggacgtcggaggcgaaaccgctcgacgaaacagaaggagggagcagcgctgaccgaggcgttgcggcctcgggcgtacggcggcgagatcgatgctctgtcgccggcggcgggttggggacggtggcgagatcgatgctccagccgccatcttgtcgtttccctttcaccgaggatatgcatttgcgaacgtgatttgacgattacaacctcccaaccctcccagggccggcccataaagacgga

SEQ ID NO: 5557 - DNA, 416 bp, Triticum aestivum
  unsure at all n locations
  Clone ID: LIB104-027-Q1-E1-E11
gggtcgacgggtcttatacgatggacttagaggattctaccactgcttgcaaacttccacaatggggtagtgctagtgaacctcgcaaatctgaatttagaaattttcttgctagtataactgtgggggaatctagagatatagcagaagctaccatagggagcattcattttcctgctatacattattttgctctcttcataggtaggtgcataaatggtaaagatgaagcatgtcacatgtgtgtccctgaccttcagtattcttaggagtgctgtgttaggagacaaatcttataatttgggagccattgttgcacgtaggttgcatcataatagttttaatggagatttctttgcangaatttatgcaacccgcttagctaatttcctggtgtggacatacgtgatgatgat

SEQ ID NO: 5558 - DNA, 410 bp, Triticum aestivum
  Clone ID: LIB104-027-Q1-E1-E12
cggtcaagtattcccgggtcgacgggtggcaatgccaacgatatgttgatcttcaatgattttatccgcacccagtcgctagttgaactacccatcaagggtaggacgtacacgtggagtaacatgcaggatgaccctttgctggtgcaattagattggtttttttcctcagtgcactggtcttcttcctaccctaataccactgtatcgcccttgggcaagcctgcttcagatcacgtcccctgcgtcattggcattgatttgtgcatcccaaaaagcaaggtgtttcattttgaaaactactggatacaacattcagggtttcacgagatagtgcaatgctcttgaagccaaccttgtcatgcggctaactcagcggctttgatctgtagaaagctaaagaagctgcg

SEQ ID NO: 5559 - DNA, 404 bp, Triticum aestivum
  unsure at all n locations
  Clone ID: LIB104-027-Q1-E1-E2
ccggtcaagaattcccgggtcgacgggggcggataccaaaaccatcacactatataataacaagcaataataaaagtaagaaaattagacaagtatctatctaaagtaagaatttttctttcaggagaagattagaacaagaggctcatcacggtggtgcaagcgacgagattcgcgccggcgatcgacggccgtgaagacggggacnggacgtgacagaccgctaaacctagacaaatctcaaggaaaatggagcttggaggtcgagcttcgagaggagaaagcttaactagcatggctcgggcatttcattgaacacctcatgtgcataggaggtgagctagagcacccaaatgccctctcctcgccggccagaaaaaatagagcactgtggagtgctctgc

SEQ ID NO: 5560 - DNA, 410 bp, Triticum aestivum
  unsure at all n locations
  Clone ID: LIB104-027-Q1-E1-E6
aggtaccgatcaggaattcccgggccgacgagagaaggtaacaccaaaggaaaagaaaacacgtacacagaaagtgaatatagaagtgttcaagactgtgaagcgggaggttcctggtatatctacgtttcattgtacttagttaagttgatgttactgttgttttttctcgctgccgccatgccatgaacaggcgaggcaggcagcttctcaaacttgtgttgttgtaacttgtatgatgggagcttaagtacattactttgtttcataaaaaaaaaaaaaaaaaaaaaaaaaaaaaaaaaaaaaaaaaaaaaaaaaaaaaaaaaagaaaaaaaaaaaaaaaaaaaaaaaaaaaaaaaaaaaaanaaaaaaaaaaaaaaaaaaaaaaaaaaaaaaagggggccccccaa

SEQ ID NO: 5561 - DNA, 428 bp, Triticum aestivum
  unsure at all n locations
  Clone ID: LIB104-027-Q1-E1-E9
ccggtcaagaagtcncgggtcgactttgacgatccgactacgaacgtgcgaggacgtcgcgccttagcaatcgctaaaccaactccgagaggttattgaccacgctggagcacgatcaacctgaccacgagggtctgtttcctgcgagcaaacgaagaacaagcaagaaactaagattgcaatctggatattgcgaatataagatgaaagctttattgatcaaggtggggttctgtgacgcctttgtctggtcgttgaacacaaacgaagtacgcgaagttgcagctatggcgaacttttaatctaaacaaaacccgaagtctaaacgatgccctaagggctctatatatggaggaagaggggggaatttcgtggcccttggtggaggggtccgaaatcaccctatctcttgttttcccacacatacg

SEQ ID NO: 5562 - DNA, 265 bp, Triticum aestivum
  Clone ID: LIB104-027-Q1-E1-F1
gccacggtcaaagaatccgggtcgacgggttacaacaaaacagttcttggtgataacagctctcttgtaaataccaacaagctactcaccttactggtccaaacctactagttgctctaaatgtttaaaataactttacaattctgttttgatacaaaaaaaaaaaaaaaaaaaaaaaaaaaaaagcgggcgctccaaaagattcaagcttaagtaagcgttcaagcgacgtcaaaactctcctatagtgtaaccaaaatcaatt

SEQ ID NO: 5563 - DNA, 370 bp, Triticum aestivum
  unsure at all n locations
  Clone ID: LIB104-027-Q1-E1-F10
gggtcgacgttcgcccgcaggaaagcaacgagcgcgctttcctatttagggtcgagagtggcactgatggtgaaggtaccaccagtgccatcctccttggcggacaccttcttggtctctggtggagctgccattgtcttcttacacttgccggtggagctcgatggtgcgtccccgacggtagcgcagcactccaaagaggtgcgcttgccggagtgggcatccgaactcttgccggacttggtcttcttcttcgccctgggagcttcaacagcaagtgacttgcgatctgttgcggctgctgcttcncggtagatcttgtcggcgcagataagagcatccttcttgtcgccagggacagagatgacac

SEQ ID NO: 5564 - DNA, 329 bp, Triticum aestivum
  Clone ID: LIB104-027-Q1-E1-F11
gggtcgacggggccgtcgatcatgtctgactaactcccgtcgcttctgctctccacatcctacgttaggtactgaagcccgtagataacttttccgcccaggtttagaacgtcgctgcaaacactacgtatgaaaattgataaatgagatagctcctagtgatgtttctcgctgaactgctgcgatgttggacactttgtcagcgacaaggagttatctcctacgcgacccatcgtggtattgtgtacatttgcttaaggttttgcttatcgttgttatcatctatggtatgcaattcatgggtcggcaatcataactcatgcaggagc

SEQ ID NO: 5565 - DNA, 468 bp, Triticum aestivum
  Clone ID: LIB104-027-Q1-E1-F4
ggtcaagcattcccgggtcgacgggccagagatgggctgagacccggatatggtttaaagcctgtagttgtaatcattgttatggtagaacttgtagtgtaagacaagtatagttgagagtccgagccggacactcttatgagccggccgggactctgagggctgctgggcgtcagcctccctatataaagggacgacccggcagcggtttagaggcgagaacaatctcatcgagagctgggatagcaagtttagttccctggtgatcgtaaccctaagcaataccatctcaactggatgcaggcttttaccttcaccgtaaggggccgaaccagtataaaccctcgtgttccttgtctcatttaaccccttcaagctttcctagttgcaatggctccacgactaagtcctagctcgatgacaatcggccgtgacatttccacgacagttggcgcccaccgtggggcc

SEQ ID NO: 5566 - DNA, 446 bp, Triticum aestivum
  Clone ID: LIB104-027-Q1-E1-F6
aattcgcgggtcgacgggctggtgaacgcgccggggtcggtgattgacgtggtgcgcgacgccaaggagaaggaggcggagggggctgagttccggctggaggacgagatcgaccatgtcgccgacgtcgtcatccgccggatccacaagcagctcaagctgcacaagctcgagtcgttcacgaggttctgcgagatgatggagaggagcgcttgatccacatccctagaagcagatccgcctccagtccagtgaggtattatgcataagtatgcactggcgccagctccatcacaccctaagccaggattatgtctaacttgatccgagacccatgcatgtgagtagaaggaagagatacatccaggcaagaagatgcttatcttctgctaaggttttagtggggaagccaatggtcaacaacttgggactttactcattacgta

SEQ ID NO: 5567 - DNA, 371 bp, Triticum aestivum
  Clone ID: LIB104-027-Q1-E1-F9
cccgggtcgacgggcaccatcaaaaacgtgttcatgctgacccagtacataccgttaatgtagttgaggctgacggggatcagatcgcagtcaatggggttgatgcttgccaccctacgatcattatgctgcgtgacatgccatttctgaagatcaggcggcatcagcaaacaaggagctggcttaaaaagctccggcctgagggttttgagtaaacggtacagccccgacgagcacgcggcaagcggcatggtactgagattatccacacgcgaaacaatgagcttgattacctctgtggggagcgaattccagccactcttttggcgaacgctgcttggttctgccattgttactgcttgggtttcgga

SEQ ID NO: 5568 - DNA, 413 bp, Triticum aestivum
  unsure at all n locations
  Clone ID: LIB104-027-Q1-E1-G1
gggtcgacgggggcttccatcagacaggaactttggaaatttgctgaggaaggttcactangcaaatttcgttgaattttggcatggggcaatgttattgacagaaaaaggtgtcaaaaaagtttggggtcaatgatgcaaagataaatgacacttccttctcaaaaatccacttanggcagaatgagaaaaaggaatatttgtgaattatctttgatgatgccaaggaaggtttttgacatatctatggaagatatgacccaaacaaaattttgagaactatttgggaatttggggagtgacggaaaatataggttgtttcacaaactaatggcaaaaatgatgattcctttaatagaaaaaggaatattcccaataaaaaaatattgggaatggcccaagatgaaaatgac

SEQ ID NO: 5569 - DNA, 401 bp, Triticum aestivum
  Clone ID: LIB104-027-Q1-E1-G10
ccggtctagtattcccgggtcgacgggtcgatacatcaggggaggcaaattgaggggaggcatgatggttcctaatgagaggcacttttgtatctggaatggagtcacggttcatgactctgttattgcaatttttattcaagcagttgttgacccagggagccactgtttttttatgtacgttgggttcaggcgggaatatctatgatagcccacagttatttgtatgtgagaagcatggacagacatagagatgcaggtccgttgatatcactgaggtttgtctttaaagcaaagtggaggcacgcatgtggcttttgtgctggccgaaccgtgcttctatttttctttagtccccatgtagtatttgcacgatagggtcatcttgtttgcttcctctc

SEQ ID NO: 5570 - DNA, 408 bp, Triticum aestivum
  unsure at all n locations
  Clone ID: LIB104-027-Q1-E1-G11
ccggtcttcaattcccgggtcgccgggggcggataccaaaaccatcgcactatataataacaagcaatacaatagtaagaaaattagacaagtatctatctaaagtaagaattttttttctttcagaaagaagataagaacaagaggctcatcacggtggtgccggcgacgagatcggcgcgggcaatcgacggcggtgaagacgggaatgggacgtgacgggccgctaaacctagacaaatctcgaggaaaatggagctttgaggtcgagcttcgagagaagaaagcttaactactgtggctcgggcatttcatcgaacacctcatgtgcatangaggtgagctagagcagcacaaagccctcccctcgccggccagagaaaaacagagcactggagttgctctgct

SEQ ID NO: 5571 - DNA, 423 bp, Triticum aestivum
  unsure at all n locations
  Clone ID: LIB104-027-Q1-E1-G3
ggtccagaattcccgggtcgacgggggaagcgattctgcaggcggtagggcaagaacccggtcaagaattggagggcgaggcggaggagagcgcagatcgagaggggaacggcgacgacactgggaaggaagatagtgggtgtaaagatctggtcctggtagaggaccctgtcctggtcgaggatccagaggaaggtacctgtacttctctggcggtcgcatccaagaacttgttccgtccattgttaagcacgcaagaaacttttctgtgctgttatttggctctattagctgactgttggtagtgttcaactgtaagatgcaataatacaatagaagttctatggtgttcttgcgtangaatagttgcagaagaaacagtatagctggttttcgggtgttgctaattttaaatttaacaat

SEQ ID NO: 5572 - DNA, 111 bp, Triticum aestivum
  Clone ID: LIB104-027-Q1-E1-G5
gtaccggactagaattcgccggtcgacgggaggatttacgagtccggaaactgcttcaagtcggccgcaacgcgctatgactccgcttcagtagacatttgtaggatccgc

SEQ ID NO: 5573 - DNA, 427 bp, Triticum aestivum
  Clone ID: LIB104-027-Q1-E1-G9
ccggtcaagaattcccgggtcgacggggcggcagtgatgaaataaagaaccacaagtggttcaaggcagtgaactggaagaaactagaggctcgacagatcaagccaagcttctgcccaaatgttgctgggcagacctgcattgcaaactttgacgagtgctggacgagtatgcccgtgctggattcccccgtggccagccctgtcgctgcagatagcaacttcgtggggttcagttacgtgcggccggagccattccttcaaaagccgagtcctctaggctgaagactactttataattgtggtatctaagaaatctggtatcttacctttgctcaagacagtaagatgaacctgctgttgtgcttgttttagacttcactagttgattgcccgtgcgttgccatggaacacaagaacacacgtta

SEQ ID NO: 5574 - DNA, 192 bp, Triticum aestivum
  Clone ID: LIB104-027-Q1-E1-H1
gggtcgacgggcttcatagcaaaattacacgagagagagagatatcactggtaatgttgctctggaagtatctcatgctatgggatcaacacaaaaatccagggcccacgtgtggatcacaatccaccaatgactgaccaggggttcttgcgcacccaaatttgttgtgaccaactggttgaactccctccg

SEQ ID NO: 5575 - DNA, 412 bp, Triticum aestivum
  Clone ID: LIB104-027-Q1-E1-H11
ccggtcaagaattcccgggtcgacgggaagcactatgtatctatggaaatttcagttttggcatcgagcatctctcttccctcacacgagtccatgccatgattagctgcaaatgtgctgtagcttcggaggtgaatactgtgaaggatgcgatacgagaacaagcaggtaacttgtctagcaaacccacgatcgaatttaccacaataaatgaacacatgataattcctgatcacaaagcaaagacagcagcagtttcccctaaaatttggttaaacgggtgtatcaacttcagacaaactgcctagcatcgtaagaggtcaggatggagtcaattttaatcacatgtggctgaagcactcatgcagaacaggacacgcgacttcgtcttcctctctagtactccctccgt

SEQ ID NO: 5576 - DNA, 468 bp, Triticum aestivum
  Clone ID: LIB104-027-Q1-E1-H3
ccggtccagaattcccgggtcgacgggctatgctaagagtgtgactcgttatttttttcttttttttaagaaaaaaacttagtaattatagaaaattaactaataaccaacctattgcttcgtattgtcgagatcctaactaagaaacagtcactatatgaataaatacctctatcataaatgagtagatgtgtcatatagttgtagcaactgcaattttttctctaaaaaagaaaagggattctaggttgtgaagcaaaactaaagggatgtggataaagggagggatgatagaaagaaggaagaggaaataaattagattttaggattcaacaaggtagggtcatgaatttcatcataaaaaggaatgtgataaagcatcaatataataaaaataatagagaattaaaaattttaacttgaaacaagaactacaaatttaaagcaataataaagagccgcccgggt

SEQ ID NO: 5577 - DNA, 309 bp, Triticum aestivum
  Clone ID: LIB104-027-Q1-E1-H5
ggtaccggactagaattcccgggtcgacggggagcacaaggagaagaaggacaagaagaagaagaaggacaagaagcacggcgagggccacaaggacgacgacggccacggcagcagcagcagcgacagcgacagcgactgagccagctccggccgcgtgcagtgcaggggagatgaacgcgtgggttaatttggagcgtgtggtagcatatgtatgtaatgcttgacatgtctcatggatcttgtaatgtaataaccggctgcactgcatggtgcttgtaataataacgttaaggaatttccattggt

SEQ ID NO: 5578 - DNA, 368 bp, Triticum aestivum
  Clone ID: LIB104-027-Q1-E1-H9
ccggtccagtagttcccgggtcgacggggaccacaaggagaagaaggacaagaagaagaagaaggacaagaagcacggcgagggccacaaggacgacgacggccacggcagcagcagcagcgacagcgacagcgactgagccagctccggccgcgctccggcagcagcgtgcagtgtaggcgagatcgatgaacgcttgggagaagtgtggcatacatatatgttgcagggtttggagcgtgtggtagcatatgtatgtaatgcgtgacatgtctcatggatcttgtgatgtataataattagccggctgcactgcactgcacggtgcttgtaataataacgttaatgaatcatgttggtattgatac

SEQ ID NO: 5579 - DNA, 422 bp, Triticum aestivum
  Clone ID: LIB104-028-Q1-E1-B7
gtaccggtcacgaattcgcgggtcgacggtggctacaaagtgggtggtgggtgggcctcgaatttcttcgccgtccgtatcccaaccatgctgaccgtaatccggccagggctctcctgacaaagagagagactttagtgaattcaggatgtcgccaaaaggcgagtgctgaaagacgtccgcggcggtgaactccatgatcggagcccaatcgggtttgatcggaaggggtgcggaggattcggagtccggaacggagtccggcaccttggaatcacgggccttgcaaaggactaggctggtatttggctctatcgccgtaaagattgcggctcctggggcagcgtccaatcgtccgtccttggttggtgtagtcggctccgggataatggtcggagcggacacctgagccgcgctctggg

SEQ ID NO: 5580 - DNA, 408 bp, Triticum aestivum
  Clone ID: LIB104-028-Q1-E1-C1
accggtcaagaattcccgggtcgacaagattctggcaggcgatgcccgaattctcgagcgccttcacatcattagtgatgtccaccgtagcgaacatgtagtgggggctattgacaaacctggcgaaacgctcgcaatgccttgtcgtcaggcagtagtggtagacgaggacgtggtggcgcacacacatctgagcgacgacgaccttgggacgcgacccggcacgagcgcgagcgtactcaaggtcgaacccgaccaccttgtacttctccgcggcaagcaagagctccatgatgtggatgtagtgctccacccagaatgggtcgttggtgtacaccatcaagaggtacatgaaccttctggtgggtgtccaccacggcacgcatggtgaactgctgctcgtcgtca

SEQ ID NO: 5581 - DNA, 331 bp, Triticum aestivum
  Clone ID: LIB104-028-Q1-E1-C11
gtaccgatcaagaattcccgggccgacggggcttggagtagaatttgtaatgctcaaaatagatctactaggaagctttctacttccgttcttctccgcaatttttatgtaggcatcactccttggaatagatgtgttcttgatactgttgccggaggtgatttcttgagtagccatacgtttgacgcttataatgctatgttagatttgtttggcccaccacctcttttggttaatggaactgttttaactttagaacacgttatgcaacggcttgatgttatttaaaataaaatggccagtgttgatttgattgaaaatttggataaaa

SEQ ID NO: 5582 - DNA, 450 bp, Triticum aestivum
  Clone ID: LIB104-028-Q1-E1-C12
gtaccggactagaattcccgggccgacgggtatcccactaggagcatgcgcgtagtactttgtttcgatgactaatagatttttgcaataagtatgtgagttatttatgactaatgttgagtccatggattatatgcactctcacccttgcatcattgctagcctcttcggtaccatgcattgccctttctcaccttgagagttgtgcaaacttcgccgatgcatccaaaccctgtgatacgatacgctctatcacacataagcctccttatatcttcctcaaaacagccaccatacctacctattatggcatttccatagccattccgagatatattgccatgcaacttccatcatcatcatatacatgacttgagcatttattgtcatattgctttgcatgatcgtaagatagctagcatgataatttcatggcttgtcaattttttg

SEQ ID NO: 5583 - DNA, 453 bp, Triticum aestivum
  Clone ID: LIB104-028-Q1-E1-D11
gtaccggaccagaattcccgggccgacgggtggcgcagtggcgccaacacttcccgcgggacatcatcaacgagcgcgggttctatgcgcaaaggagggcggagagggataagatgagggcagagcgaaccgcctatcgcgaggacaagcgtaggcgaaaagtggacgctcaattcaacatgaggctaggagcagcgtcgccttgggaattggacgacgatcggtatcttctcgcctacagtcatacgtcagaggaggacatcacctaggaggagtcagacaacaaggagtagttgaattatctttttttaaccaaccatgctgagaactatcctctactctatctacttcttgagctcagcactgtaaacactttttttaaagcgccgcgcattgtgattctgttggagatgctctaacatggcagatgagtgctttaatgttgcccacaag

SEQ ID NO: 5584 - DNA, 428 bp, Triticum aestivum
  Clone ID: LIB104-028-Q1-E1-D5
gtaccggtcatgaattcccgggccgacggggtccacaatcatccttgctgtacacaccttttgagagatacacacatgattcagaaattgttagaacactctatgtgcttcacttatatctattgagttatatagtttttgatctagtgcttcacttatatattttagggcacggtggtggatttgttttatagaaactattcttctctcatgcttcacttagattcttttgagagtcctacaaaacagcgtggtaatttgctttaattatgttaggcattcaagattaataaaaaaattcttatgagtgtgttgaatactatgagaagttttatacttgataattgttttgagatatggagatggtgatattagagtcatgctagttgagtagttgtgaatttgagaaatacttgtggtaaagtttg

SEQ ID NO: 5585 - DNA, 430 bp, Triticum aestivum
  Clone ID: LIB104-028-Q1-E1-D6
gtaccggtcatgaattcccgggtcgacgggctatttaaaactgctcgacgggagcttaatcttccttctgctaatgaattgattagttctcagtcaaacaatgaggcaaatggaaatctggaaaacacacaggaagtgcaggtgaacccaacgagcttatctcaatacagggacatccagagaaagattgttgagtttatcagaaagagataccatattctggaaaaatgcttggacattgaatatgccgtgataaaaacaaatactcctgttcctgatgatcttactgaacaaaatgttcctatgggacatagcccagctgttccagatatcagtgaagtgttgagagaacttccccctcttgtaccaatttctgccaaagaagtggcttctgatggctcaactgaccaggcacacctttcccatcttt

SEQ ID NO: 5586 - DNA, 176 bp, Triticum aestivum
  Clone ID: LIB104-028-Q1-E1-E11
atcgacggggatccaaaaaaaaaaaaaaaaaaaaaaaaaaaacaaaaaaaaaaaaaaaaaaaaaaaaaaaaaaaaaaaaaaaaaaaccggccgccctaaaggttcaaaccttacttacccttgcatgcaacttcatagccctccaaaagtgtcaccaaatttcatttcacggccct

SEQ ID NO: 5587 - DNA, 337 bp, Triticum aestivum
  Clone ID: LIB104-028-Q1-E1-E2
taccggtcctatattcccgggtccacggggtcaggaaaaagtggggcggtggtgtcatgggctccaagtcgcaggccaagaccaaggccagggaaaggctcatcgccaaggaggctgcgcagaggatgaactaagcctagccttatatgtcagagcatatgccatgtagtttccctttcagtgtgtcctgattttgacgaggaactcgaacccttttagcagcactgtggaatcgtattgtggttttctgattctctgttccgttcgccagacttatgcaaagatcagatgaggtttacccatgtttggattctatatagttttatgccctttgtcg

SEQ ID NO: 5588 - DNA, 225 bp, Triticum aestivum
  Clone ID: LIB104-028-Q1-E1-E6
tgggactcccagtagtgagtcgtattagatatttattacattagttagtgactagattgggcaggttagttagttggtgccattcaatgcatgtgcaagctcccgtcatcattatcatggtcatcatcagggtgtgatgatagcttagacttgatcaatggcacatattagtacttaaatgacgtgatcctggttacggttatccagtaatctgatgcctcggtt

SEQ ID NO: 5589 - DNA, 393 bp, Triticum aestivum
  Clone ID: LIB104-028-Q1-E1-E8
aattcgcgggtcgacgggtcatcaaaagaatcctgcaacatgagacgttgcagccatgtaggtcagtatattgaatgtactggcaatttcacgctgtagagcaatgctaaataatggctatcactacatgcatatttggttggtggaggctctaagtttaatttttgcataaagccaattttttcctacaacaaaggaatatattttatttaactataaagtttgttgaaaacattgagaaggttcctccaactcaatcccaaattaacatcaataacctaacaaattatttaaataacgtgatgagatcaacatgataattcaagaaccagatacccaagatgtccacaaccagggatacggctagtcatgactagtttgtacactctgctg

SEQ ID NO: 5590 - DNA, 371 bp, Triticum aestivum
  Clone ID: LIB104-028-Q1-E1-E9
gtaccggaccagaattcgcgggccgacatgggcgacatgctgatgatggacaggttccgtcaatggcaggccaggcacaaccggtcgtacctgagcgcggacgagaggctgcgtcgcttccgggtgtaccgcgacaacgtggagtacatcgacgccaccaagccggcgcggcgacctcacctacgagctcggcgagaatgagttcgccgacctcacccatgaggagttcctagccaggtacgcgtcgtcctacgatggggtcggtgatgatactggcatcacgttgcctgtgggcggtggcgacgccgagctgtggtcgtcctgcggcgacaatgatagctccttggaggctccgcctcccagctgggact

SEQ ID NO: 5591 - DNA, 450 bp, Triticum aestivum
  unsure at all n locations
  Clone ID: LIB104-028-Q1-E1-F11
gtaccggactggaattcccgggccgacgggagcacacatctaatattaccacctttatatctcaaaacaactatcaagtatcaaacttctcttactattcaatgcactttataaactaccatgccgttctaagggactctcaaaatgatataagtgaagcatgagagatcaataatttcaataaaatataaccaccaccgtgctctaaaagatataagtgaagcactagagcaaaattgtttagctcaaaagatataagtgaagcacatagagtattctcataaattccgattaatgtgtgtctctctcaaaaggtgtgtacagcaaggatgattgtggtgaaacanaacgcanagactcaaatcatacaagacgctccaagcanaacacatatcatgtggtgaataaaaatatagctccaagtaaagttaacgaatggacgaagacaaa

SEQ ID NO: 5592 - DNA, 415 bp, Triticum aestivum
  Clone ID: LIB104-028-Q1-E1-F5
gtaccggactagaattcccgggtcgacgggtgtgattatttgcttatggtgggttccgggagggattgaaacctgtaccccaagttgtgagtcgttgcatatgggatgaagagggcaatttatcttaaggtcatagttgagtttgccttaatgaacttgttcgtatttgtggatatttgctaatagttctaatcataagtgcataaaaatccaagaaagaaatagtatgttagcagaggcctctcccacatataaaactacaatgacgattatcgttctgttatcaattgcctcccaaaataagagtctctaccttagtacaactttgtactaaagttagtccaaagtcaagacacttatttcgggatggagggagtattaggataggaaataccataataattttcttgaaaca

SEQ ID NO: 5593 - DNA, 419 bp, Triticum aestivum
  Clone ID: LIB104-028-Q1-E1-F6
taccggtcaggaattcccgggtcgacgggtcgccatataaccttggatggggatgaattgtgtgctcgggggagggggtgtgtgtgtgatgtgtgttgcctctgtgtgtgtgtgtgtcagatattgagagaaaacaaacctaaggagagaaatgtgtgtgtatgtgacggaaagctacttgctaaacagggtattcacgaagagattgtgcgtgcgagatagagagcgatgtgcgggccttgaggtgggcaggggccgggtgagggtgtcaaaatgtgcgccttgatgcatgtgttacatgcgatcgtgcgagggacggacgaatcgagagagatggttgttgtgttacggatgttcctctctctctcacatacacacacacacaagtaaaatagaagaccgttctctcatgtatacac

SEQ ID NO: 5594 - DNA, 444 bp, Triticum aestivum
  Clone ID: LIB104-028-Q1-E1-F8
aattcccgggtcgacgggtattataataacagatctcacgaaggtttttgttaagttttgtgtgggtgaagtgttcaaagatcgaggaggtctcgatatgaggagaaggaggagaggtaggagttcaagcttggggatgcccaagtaaatatgcgaggagactcaagtgtctaatcttggggtaccccggaaggcatcccatctttcttcaacaagtatcgatatgtttcagttttcgtttcgttcatgtgatatgcttaaatcttggagtgtcttttgtgtttagtttttgctttttattttatgcacaatgctggtatgatatagtccatggttgatttatggaattctctttgcacttcaattatatcttttgagtatggctttatagaatgcttcatgtgcttcacttatatcattcgaagttgggatgcctggttcccc

SEQ ID NO: 5595 - DNA, 437 bp, Triticum aestivum
  unsure at all n locations
  Clone ID: LIB104-028-Q1-E1-F9
ggtaccgatctagaattcgcgggccgacgggttccaccataagcatgatatcaacgagtctctcaaagccatgagaatttccattgacaagtgcaaagaaagaactgctaggatgcgtgctaagaaagatgcctttatgaaagcgtgttcttctagttcctatgaaaataatgatgaagatctaaaagttattgatgtgtcccctattaaatctttgttttgcaatatgaatcttgataatgatcggactgaatatgatccatctttacctagaaggcgttctaagaattcagaatttattggtcctgatgctaaatttgataaaagtgggattgaagaaattaaaaccctagatgttgctaaacccactatattggatttcaaggaatttaattatgaaaattgctctttgattgattgtatttcnttgttgcaat

SEQ ID NO: 5596 - DNA, 458 bp, Triticum aestivum
  Clone ID: LIB104-028-Q1-E1-G5
gtaccggtacagaattcgcgggccgacgggtttgcattttgttcccagcttgcaccgtcattgagccattctaccatgggtctcttccatttccgatgataagcaaattcatccattacgttgtcttcaacaaggtaatccacatcatccaagtccgagtatgccattctaccgaccccctccaaacgatcgctcgaggattgtcttaggctggtttaaagagtttcaatgatctttgaatcaaaagtaattctttttgccacttaaggggatatttctacgagtcaccttccctaaggtgcctcgttgtggtttcatggcaactcaactcctcgctacgttgacaatcgattaccaccttcttaagcgtgaaattgttgtctacctagtgaaccctcgttatctgttccactccatccccccaagggggtgtgcttcgtctctcagctcaagagatg

SEQ ID NO: 5597 - DNA, 411 bp, Triticum aestivum
  Clone ID: LIB104-028-Q1-E1-G7
gtaccggtcatgaattcgcgggccgacgaggaggaggagcctgaggaggagctaggaactgaatatctggtgcagccgcttggccgtgctgaagacgaagagcattccagtgactttgagccagaagaaaatggtgatggtgctgaggacgaggagattgaggatgatgatgctgaggatggtgaggattctgtcaaggcgcaatcctcttcgaagaggaagaggtctggcgcggaggatgaagatgatgatgacggtgatgatgatggtgatgatgatgagaagcctccatcaaagcgatagtcaatttgttcttgctgatctggtatcttttctgcttgggccaagaaggaaaataatcctcacggagagggttgttggtaaatgctgtagctttaggacatctgtggt

SEQ ID NO: 5598 - DNA, 424 bp, Triticum aestivum
  unsure at all n locations
  Clone ID: LIB104-028-Q1-E1-H5
gtaccggtacagaattcgcgggtcgacgggccggcatgttggggcatcgttttccacggaggctggggagactatccgcgcaaccctgtttcctggtgatggcatcgggcctgagatcgccgagtcggtcaagcaggtattcaatgttgcaggtgtaccgatagaatgggaagaacattatgttggtacggaagttgatcccagaacagagagctttttgacatgggagagcctggagtcggtgcgtagaaacaaagttggcttgaaaggtcctatggctacacctattggaaaaggccaccgttctttgaatcttacattaaggaaagaacttggactctacgccaatgtcagaccttgcaacagcctcncaggctacaagactagatatgatgatgtgaaccttgtgacaatccgtgaaaat

SEQ ID NO: 5599 - DNA, 408 bp, Triticum aestivum
  Clone ID: LIB104-028-Q1-E1-H7
gtaccggactagaattcccgggccgacgggcaggaacagatgatcacacaatatcttttgataaatcctttttacctagcttctgatttctattaccagaaacagattgtctgttcttacaggaaacatctacaaacagccgttattcgttattgtgctcttccatgttgcgccgctgacaagaggatggagggttttagtcgtcgtcgcggagaagaagggtaaccaccaagcaggagagagggaggaaagctatgcccgttcgctggaagccaggcaacccggcgccatcgtcgaggagagcgaggaggggctagattacgccgccacagaggtgagctacgaggggctgcggcgtccctgcataggaggggggagagaagccgccaccgcaccacgtgattctgc

SEQ ID NO: 5600 - DNA, 375 bp, Triticum aestivum
  Clone ID: LIB104-029-Q1-E1-A1
taccggtccagaattcccgggtcgacgggcgcggcgtgcagctgcgcatcgccgatggcgcgcaggtgaccgtgcagtatgcgcacaacgtgatcatccacaacatccacgtcaacgacctcatcgtgggcaagggcggcaggatccgggactcgccgcagcacgccgggttccgcacccagtccgacggcgacggcgtgagcgtcttcggctccaccgacgtgtggctcgaccacctctccctcgccacctgccaggacggcctcatcgacgtcatcgaccagtccaccggcgtcaccatctccaactgccacctcacaaaccacaacgacgtcatgctcttcggctccagcgacagcaaccccaaagacgaga

SEQ ID NO: 5601 - DNA, 463 bp, Triticum aestivum
  Clone ID: LIB104-029-Q1-E1-A4
cggtcaagaattcccgagtcgacgggtagaaggaagaagaaacacaaaggaggcagcataaagctcaaactacactgaccatgttgccacttggccaatatgcaaattcaaatctacaaccaacaggacgcatattcagtttccaactacaactaagataaccaatccaccggaactgaataacagtgttctctaacttccactaaatggaacttagtaaaaggtaaatggtccatactcgattattcaccaagagaatcaagtactcagatttcgcaatctaggtgaatgagtggttggaaggatgaacaaatgaataggcttgaaaatgacaatataggacttaagaatgcctgtttacataatactcctccgttcacaaatagaagatgtttttgatatttcaattatggactacatactacggaatgaaatgagtgaacaaacacactaaaatgtgtct

SEQ ID NO: 5602 - DNA, 67 bp, Triticum aestivum
  Clone ID: LIB104-029-Q1-E1-A7
ctactcccaatagtgagtcgtattagttgctttagttctcatccatgatctatttttctacttcatc

SEQ ID NO: 5603 - DNA, 409 bp, Triticum aestivum
  Clone ID: LIB104-029-Q1-E1-A9
attcccgggtcgacgggcaaaacaacttcaaccgaatgagtacaactctgggacatttactctgtccaacttgggcatgtttggtgtagatagatttgatgcaattcttccacctggccagggagctataatggctgttggagcctcaaaacctacagtggcggctgataaagatggtttctttagtgttaagagcaaaatgatggtcaatgtcacggctgatcacaggattgtttatggtgctgatttggctgcattcctgcaaacttttgcgaaaattgttgaggatcctgagagcctaactttgtaggatgttcttggaagtggtctatgagttgttcaaccgtcagttcatttccagttggaagtctatcgctgagtttgtttttcgttttcctatctgtatcct

SEQ ID NO: 5604 - DNA, 422 bp, Triticum aestivum
  Clone ID: LIB104-029-Q1-E1-B10
taccggtctacaattcacgggtcgacggggaatactagtgttaaagtttgtgattcccgtagcatgcacgtatggtgaaccgttatgtgatgaagtcggagcatgatttatttattgattgtcttccttatgagtggcggtcggggacgagtgatggtcttttcctaccaatctattcccctaggagcatgcgtgttatactttgctttgataacttctagatttttgcaataagtatatgagttctttatgactaatgttgagtccatggattatatgcacttttccccatccttccaccattgctagccactctaataccgcgcactttttgccggtatcatacacctaccatataccttcctcaaaacagccaccatacctacctatcatggcattcccatagccattccgagatatat

SEQ ID NO: 5605 - DNA, 472 bp, Triticum aestivum
  Clone ID: LIB104-029-Q1-E1-B2
cgccggcattacggtcaagaattcccgagtcgacgggacgcggggtggactgatcatctaccatggagtcatgttgaaggtggagcttgattgaggggctacggtgtaaggatccagagagtcgaagcctattcagctgggaaaaagcgagtgacatgcagtttggactggagcctagtggtttgatggaagcgtgaaactcgtcatcggtcggtgatgatcggtggtactctgcagtgggggttgagtggtgtggtttagcgacccttgagactcgaccgggacagcggaggctcgacgcgataatagcggtgaggcatgcggtagcacggggcatggagacgggccagggctctggtggtcatacatgtggtgaggcaactgcgaatttgactcggggtgactacaagcaaatggtgaaaatcctttcaggtttcagacaggcggtcaagaaatgagcggtgatattgag

SEQ ID NO: 5606 - DNA, 385 bp, Triticum aestivum
  Clone ID: LIB104-029-Q1-E1-B3
attcccgagtcgactacatgacacttcaccattatttgggactagaggaaggcattgggaagtaataagtatttgatgggttgctagagtgacagaagcttataccctagtttatgcattgcttcgtacggggctgatttggatccacatgtttcaagctatggttaggtttaccttgatacttttgttgtagttgtggatgcttgcaatagtgatgaggacatcaatacaattgttacacccacagcccctgctgctatacatactggaccaattactagagctcgtgcacgccaactaaattaccaggtactttcgtttcttggtaatgattctaatgttcatgagaatatgatgctgcctaaattggatacatttgttttgc

SEQ ID NO: 5607 - DNA, 456 bp, Triticum aestivum
  unsure at all n locations
  Clone ID: LIB104-029-Q1-E1-B4
attcccgagtcgacggggaaccggacgttcgatgccgagacgccgcggcggcgggagtcggcacgcagcaacgaggcggtcgaggaggcgcggatcaagcagctggagctgcggcaggtgaacaaggtgaaggcgctcgtcggcgccttcgagaccgtcatggacgacaaccaaagccccaccgccgcccgcaagccgcggctcaacctcggcgcctgaactacgagtacattcgatgagcatgaagctcgatcgcgtgcgcctcctcctttatccccgctactctttaatcacccatcaacccaatttgtcgtcgtcgcacacttatctataattacggtatcgcttatattctgcaaggaggaagatgatggaagggttatcatcatgatggtattataataatgatcatggagcanaaaaaaaaaaaaaaaaaaaaaaaaaaaagcggccgcc

SEQ ID NO: 5608 - DNA, 409 bp, Triticum aestivum
  Clone ID: LIB104-029-Q1-E1-B6
cggtcaagaattcccgggtcgacgggtagctagatggcttcttctctctttttggatctcaatacaatgttctccccctctcttgtggagatctattcgatgtaaactctttttgtggtgtgtttgtcgagatccgatgaattgtgggtttatgatcaagtttatctatgagaaatatttgaatctcctctgaattcttttatgtatgattgagttatctttgcaagtctcttcgaattatcagtttggtttggcctactagattgatctttcttgccatgtgagaagtgcttagctttgggttcaatcttgcggtgtccttacccagtgacagaaagggttgcaaggcacatattgtattgttgccatcgaggataaaaagatggggtttatatcatattgcatgggt

SEQ ID NO: 5609 - DNA, 461 bp, Triticum aestivum
  Clone ID: LIB104-029-Q1-E1-B7
accggtccagcattcccgggtcgacctccgcggacgaggtgcagcgcatgatggcggagatcgacaccgatggtgacggcttcatcgacttcagcgagttcatctccttctgcaacgccaacccggggctcatgaaggacgtcgccaaggtcttctgaatcagttcatttcacctcagccgtccgatccaggagccgatccatctacgtacggcttcgtatatcaatttcatgcaactacctactccggtcccgatccagcctcagcttcacctgaggccggccctaattttgtttgatcaatttttttgctactagtagtaactagtgatgatcactgttgcaccatttatttattttatatcgtcacaactttccagtgtttcttttctttctctacctttttggccattgttcgggtcaagctcgatcgaacgatccatgctgctaattgtttgtgta

SEQ ID NO: 5610 - DNA, 254 bp, Triticum aestivum
  Clone ID: LIB104-029-Q1-E1-C10
ggtctagaattaccgggtcgacggcgtatgtcatatttaggtaggaattttagagttccagaactttgcgttacttacagattgctacagacttttctgtttttgacatattctgtatttcttgtgtggtttgcttattttgaggcatctatggatattaaattattttataaacaatattgaagttggaatacattaggttaatcaccaattaattaaataaggatttaataacgttacctaagttggaggtt

SEQ ID NO: 5611 - DNA, 417 bp, Triticum aestivum
  Clone ID: LIB104-029-Q1-E1-C12
ggtcaagaattcacgggtcgacgggcattactattttaatgtggaaacaatttttagtgttcaaatctcttatgatactcccaccattccgaatgaaaagaattttgcttatgtggagagtagtaaaaattctatgcttgtagatcatgaaaagaatgctttaggtgttgtttatattgttgaattcattcatgatgctactgaaaattattatgagggagtaatatatgcttgtaggaattgcaataatgtcaagtttcctctctatgtgttgaaaatcttgaagctatgcttgttttaccttccaatgctagttgattatcgttcccataagttgtttgctcacaaaatccctatgcatacgaagtgggttagacttaaaagtgctagtcatatgctttatgatgctcccgttaa

SEQ ID NO: 5612 - DNA, 451 bp, Triticum aestivum
  unsure at all n locations
  Clone ID: LIB104-029-Q1-E1-C2
attcccgagtcgacgggagcaaaccattcaccatggtactgcttgatgagatagagaaagctcaccctgatattttcaatatccttctccaaatttttgaagatgggcatctggcagactcacagggtcgcagagtttcgttcaagaacacattgattgtcatgacatcaaatgttggttctacgtcaatttcgaatggacgacggagcatgggtttctcaacagaggatactgagtcgagcagatatgtcgcggtgaaatccctcgtgatggaagagctgaaaggattcttccgtccagaattgctcaacaggattgatgagacggttgtcttccgtcctctggaacagactcagatgctggcgattctcgatatcctcctagaggaacttaagggcaagctcttggccgtcgggatcggcctanaggtctccgatgccatgaaggagct

SEQ ID NO: 5613 - DNA, 387 bp, Triticum aestivum
  Clone ID: LIB104-029-Q1-E1-C3
accggtcaagaattcccgagtcgacgggcgctagattttgttgcatttaatgaaaaccttagaaaaaaggttcctaccaatattctagttgatagaatttctgaacttaatgacgattttgctattcgaaataatgagctaggatattctctcgaatataggctcaccaagttctgtcaaaagaatgcctataatgatgaattggttatgcaatatgaagggccgaaggaggaacctatacctcctaaggttgatcttggggatttttgtcccattaaatttagcccttttgattacttttgcttgccacaaagaaagcttgctgccgaacgtagagagtatgaaatgagttttaatgatctatcttattattatggcagtacctag

SEQ ID NO: 5614 - DNA, 383 bp, Triticum aestivum
  Clone ID: LIB104-029-Q1-E1-C4
attcccgagtcgacggggcacgagacagtagtatcatgttctggatttctttcagaaagatcacaactgggagtggtgggtgggtattttgatggactcctgttagtcatgttacaactgtgagtggtgggtggtctaagagtggcagatagttttcagacaatgtgcgccatcttcggatccttttcctggcacagaaccgctaagtacaactacccacacaatcatggttgatgagacaactcatatctttgaccgtctgcgtgtattgttgatgaatcatggttggttgatgagacaatcacatcattgcccgcctgcgtgctttggtgatgatttttcacttaggaatatggcaaaatgttttcttgaatccatccata

SEQ ID NO: 5615 - DNA, 459 bp, Triticum aestivum
  Clone ID: LIB104-029-Q1-E1-C6
taccggtctagcattcccgggtcgacagggcctccaattcgtaaaaagaggagaggtaaatcacacagagaaccatcagcaatggcgaagatttctagtagcaccgttgttctcctggtgtttctcgtctcgtcgtggggggcattgccggtgctgtcccgtggaggcctggaggatggaggaggcgggccaaacggtggtatcggtgctaatgttgggcttcaaaagtctgtcggtgctaatattggtgttggtgcgaatggaggcgctggtgctggtgctggtgctggcattggagcaaatgtaggtgttggagcaaatgtaggtgccaatgctggtcttggtgccggtgcaaatggaaatggtggtgctggtcttggtgtcggtgcacataaatctattggtgccaaatgttggtgttggtgcaaatggaggcgctggtgctggtgctggtgctgg

SEQ ID NO: 5616 - DNA, 455 bp, Triticum aestivum
  unsure at all n locations
  Clone ID: LIB104-029-Q1-E1-C8
acggtccagcattcccgggtcgacggggtaccgtacataccaacaacagtcctgggggagttttgtttgcaagtattttgatttgatttttcttaaagcatgggactgggcatcccggtgaccaaccatgttctcgtgagagaggagcggagtccactcctcttgagaataacccacctagcatggaagatacaaacaaccctagttgatacatgagctattcgagcatacaaaacggaatttcatttgaaggtttggagtttggcacatacaaatttacttggaatggcaggtaaataccgcatataggaaggtatggtggactcatatggaataactttggggtttaaggaattggatgcacaagtagtattcccgcttagtataagtgaaggctancaaaagaatgggaaacaaccaactagagagcgacaacagtcatgaacatgcattaa

SEQ ID NO: 5617 - DNA, 409 bp, Triticum aestivum
  Clone ID: LIB104-029-Q1-E1-D10
cggtctagaattcacgggccgacggggaccatgatgcttgacaaggcgccaggcctagatggctttactgggcgcttctacatgtcctgctggcagatcataaaaatggacttcatgagggcgctcgaccaattccaccgaggagacatgcgtggattagcggtgatcaataaggcactagtatcattactacctgatacgtctccaacgtatctataatttttgattgttccatgctattatattaccctttttggaagtttatgggttttactttacacattattatcatttttgggactaacctactaaccgaaggcccatcccatatttgtagcgaccagacctcaaacagtccgatctctgtgcatcagtgtcatccctgggtcagtaatgctgacacgcacag

SEQ ID NO: 5618 - DNA, 400 bp, Triticum aestivum
  Clone ID: LIB104-029-Q1-E1-D11
cggtctaaaattcacgggtcgacgggcgtgttcacccacaatacgacgttctgctgcgtcaagcagccgcctggcagtcagaagggtgcctactacgccatccatcacatgcgggcgattgtacgggaccagcatcaacttctgctaccgagtaaactcaaagattgggccgcgagcatgttggcaatccaggacgcggacatcagacaagaattctttcgcatccagtcggagtttgcagaaatcatctatcaagatgtccttcgtacctcggggcagttctacctcagaaatcaaccgtccaacagtgacatcgacacaatgctacaaatgcaggctgacaatgaccgttatttcatgactcccatgatagacggcgacttcatccacgctccggtcc

SEQ ID NO: 5619 - DNA, 453 bp, Triticum aestivum
  Clone ID: LIB104-029-Q1-E1-D2
attcccgagtcgacgggcgcctgtacagcaggtgctacgcacgacagatcttccagagtcttcgcgtctggatggacgagcgcatggaggtggagccgttgggcgccgtagtggcgtcgacggatggccggactggcaaggatgatgcggatctctctcctgaagacgggtcagtggtttgatgatgatggcagcttgtaaaacgtgtgcgtgtggtgtacgctttaggtctgctgcaccggctgttggttccgatacgttatgtggatgaatcggcaatgacaccggttttagatatgaggagtgagagcactccacattatcgcgtttgtaggtgtgaatggtggcttcgggtgacctgacgtatgttttggtcagtcctttgctgaataagttaataaagatggccgtatgcatcaattgatgcagaggccggaggtctcaacctccttt

SEQ ID NO: 5620 - DNA, 454 bp, Triticum aestivum
  unsure at all n locations
  Clone ID: LIB104-029-Q1-E1-D3
attcccgagtcgacggggacttacagaatgaggacggttcatggttcggatcatggggtatttgcttcacatacggcacgtggtttgctatagagggcctatcggcagttggacagtgttacaataatagcacctacatccggaagggttgccagtttctattatcaaagcagctaaggaatggtggatggggtgagagtcatctttcatccacaaccaaggcatacacgaacctagacggggagaaatcacatgtagtcaacaccgcatgggcaatgttggcactaatgaaagctggacaggccgaacgagatccgtctcctttgcacgaagctgcaagacttatcatgagcatgcaacttggcaatggtgacttcccacangangaaatgaatggaatttccttganaaagggtcccttgtgttatatggcttatcgcaacatattccccat

SEQ ID NO: 5621 - DNA, 451 bp, Triticum aestivum
  Clone ID: LIB104-029-Q1-E1-D5
accggtctagaattcccgggtcgacgggaaactaatatgatgtagagtagacccgggggccataggtttcactagtggctactctcaagatagcatatattatggtgggtgaacaaattaatgccgagcaattgatagaaaatcgcatagttatgagaatatctaggcatgatcataaacatacgcatcacgtccgtatcaagtagaccgaaatgattctgcatctactactattactccacacatcgaccgctatccagcatgcatctagagtattaagttcataagaacagagtaactcattaggcaagatgacatgatgtagagggataaactcaagcaatatgatataaaccccatctttttatccttgatgtcaataatacaatatgtgccttgctggccctaaagtcaattggaaaaggacaccgcaggattgaacccaaagcta

SEQ ID NO: 5622 - DNA, 264 bp, Triticum aestivum
  Clone ID: LIB104-029-Q1-E1-D7
ttcccgggtcgacggggaagcgcaggaaaaagtgagcgagtgggagacatcaggaagcgacggagtctcagctgtgtgtacatgttgtagggtaggagctcctgggtcttttgattccagtgttgtatgaaatggcgcgatggatgggttctaggagtttttcttttggacgggggatgtacgaaactgacttgcgcgcgtctctccgctcgtgggactcggggaaacagtgttccccttcgaactgttgtcctgtatgttttg

SEQ ID NO: 5623 - DNA, 406 bp, Triticum aestivum
  Clone ID: LIB104-029-Q1-E1-E10
ggtctagaattaccgggccgacttccatcaaaacgatatccatcatctcatcgaaagacgggacacctttgcctctatcaagtggtatcagatttccaggttgctcggtgagattttacagtttttcgtagtttagatcgagtctgttcttcatacctacagtccacgaaaaagccacaaaaaaattagggttagttcagtatatccgaaccaatctgagcctttgcataatcttttagggtttttgctttgttgaatttgcggttgcatcgtcatgtcaagttgctggtcttagagtctagtcttttagagtttcgagttctggtcataagttgtcacgccgccgccgcaccatcatcatcgccttgccatctaccactattgcttatccgccaccgctctgaat

SEQ ID NO: 5624 - DNA, 476 bp, Triticum aestivum
  unsure at all n locations
  Clone ID: LIB104-029-Q1-E1-E3
cgccggcatgtacggtcaagaattcccgagtcgacgggtacatccccagagtccaagtccatttgatgaggctggtgtcgctgcctacgtgacccagaggggtagtaatactgaccacacacctgtacatcggcctcgtgtcagtgttagcgtcagcggcgtcgcccctgacgcacactatagagacggggcggcggcctacgcgggcctcgccggtgcccacgatcaagaggaagacgctgccgtcctcctccgagactagcaggaggcggtgatcctccagcgactccgacatggtgaacgggtagcacatctcgtacttgatgttctccgccaagggccagcaatggacgaagggctccttggaggcatcgaccaggccgtccatgaaatgggagtggctgttagggaacatgcgcaagttgantatatgagcaagttactatgagatttaatccgaataagcacaaaataaa

SEQ ID NO: 5625 - DNA, 453 bp, Triticum aestivum
  Clone ID: LIB104-029-Q1-E1-E4
attcccgagtcgacggggacccaaaggcatccaaaggtggaggtgagaggcagttcaatggcctggttgatgtctaccgcaagactctcaagtcagatggtattgctgggctttaccgtggattcaacatctcctgtgttggaatcattgtctaccgtggtctgtactttggactgtatgactctctgaagccagttctcctcactggcactctccaggacaacttctttgccagctttgctcttggttggttgatcaccaacggtgcaggtcttgcatcttaccccattgacaccgtccgcagaaggatgatgatgacctctggagaggctgtcaagtacaagagctccttggatgctttccagcagatcctggcgaaagaaggtggcaagtcccccttcaagggttctggtgccaacatcctccgagccattgctggtgctggtgtgctcc

SEQ ID NO: 5626 - DNA, 396 bp, Triticum aestivum
  Clone ID: LIB104-029-Q1-E1-E5
acggtctagcattcccgggtcgacgggggctcaacggtcgctcacgacctcattttgccaaacgtgtgtgccaggagggcatatcccggacggtttctgggtcgtgtgggaaggaccccccctatcgcccacactcacttggcgacggttccaaatgtcgtcgcggaaaggggtaaagaattgtttgtttaggatcgacgcgcaccagtgatgcgcatgtagttcaaatttgaattatgcacataaatgcattgagaactcagttaatgcataaaaatgtccaaacgaaccccgaaaaatcataaaaattcacacaacgctcccgttgttctatgttgacacgagaaaaaaaaaatgaaagcaataagaggcaatggatatcgtttcctccccaaa

SEQ ID NO: 5627 - DNA, 387 bp, Triticum aestivum
  Clone ID: LIB104-029-Q1-E1-E7
accggtcaagaattcccgggtcgacgggtatcagcagctccggcaagttcttcagggccacaagaggccgatggtgatggcaacgtgatcagccaaccagcagcttgctggatcctcttctctctggatgcctaaagtcagtatgtcaatgtaatgtaaacatccctttccccttcccctttcttcatgtagcttcggtctactccttagtagtcttggtaaagcttgtgctttgtagttgcttcagctactggtactgtctattgtgtgtgatgtaatatattatggaccattatggcattccttttcaaaatcaaaaaaaaaaaaaaaaaaaaaaaaaaaaaaaaagaaaaaaaaaaaaaaaaaaaaaaaaaaaaagcggccgct

SEQ ID NO: 5628 - DNA, 400 bp, Triticum aestivum
  Clone ID: LIB104-029-Q1-E1-E8
accggtctagcattcccgggtcgacggggattatgacatacatctgcaccggcgtcactgtcctgactgcctaccattttggtctaaccggcctcggtgcctcttgttggcgggttgctgccgcttcggcatggcgtctcgaattccatccctataaaataccatatacacaaggtaggtgaagtgtctaaaatgagatgcctgcagttgggattttggttattcggaaatgcgacgcatggagctgtccaagatactcggacgtaatggccattatggcatcagcagacctcaattgaaagaactgactgattatcatccccatgaatatgtcaggatcatcgtcgagtccgaggaccatggtccagtcaaggtcatctggttgtggatatgggctgtt

SEQ ID NO: 5629 - DNA, 451 bp, Triticum aestivum
  Clone ID: LIB104-029-Q1-E1-F1
attcccgagtcgacggggcatcaggtatttattgattgtcttccttatgagtggcggtcggggacgagtgatggtctttcctaccaatctatccccctaggagcatgcacgtagtactttgtttctatgactaatagatttatgcaataagtatgtgagttctttatgactattgttgagtccatggattatacgcactctcacccttccatcattgctagcctcttcggtatcgtgcattgccctttctcacctcgagagttggtgcaaacttcgccggtgcatccaaaccccgtgatacgatacgctctatcacacataagcctccttatatcttcctcaaaacagccaccatacctacctatcatggcatttccatagccattccgagatataatggcatgcacctttcatcatcatcatatacatgacttgagcatttattgtcata

SEQ ID NO: 5630 - DNA, 419 bp, Triticum aestivum
  Clone ID: LIB104-029-Q1-E1-F11
cggtctagaattaccgggtcgacgggcaaggaaatccccaacattgatcctgagcatctcaaggctgccaggaaattccccaaacttcgtgtcaaggatgccgatgctacggctctgaatgtcttcaagattctccggggcagtccagtcgatggtcataaagatgtaacccttcgtgaagaatgtctacggctctgaatgctacggctctgaatgtctacggctctgaatgtcttcatgactctgaggaccttggctgagattcaggaagaagaagaatgaagatggcgctactaggaagcaatatcgtctcttgctctaatatgaactagctttgcagtattgtagtatttgaatctttcctatgttgtcgctctgtgtctcgatcttcaaaactgctggacggatgtgatgttttg

SEQ ID NO: 5631 - DNA, 455 bp, Triticum aestivum
  Clone ID: LIB104-029-Q1-E1-F2
attcccgagtcgacggggtcaccaaagcagggacgttttaatttcaaaaaaaaccatagatcattaggacattttagtacattgactgattttctacgggtataatgtgcaaaaatcaaatttgagctacatgcacacatgacagtgcacctaaatggattgcaaaaacacatgtgtctcactgggtgcatgtttactcctcgtgcaagaaatttcaaacattgagactcttaatttttaaattctagtacatccaaaacttatctaaagttcatgaaacttatcatgttgtcatctagacaccaatacaaagtggcattgtacttttttgtcaaatttgagaccagttttggtgtaatatgtatctaattacaaacgggagattattaataatttggaaaccattatcccaaatgaattatttattcgaaccgtgagcgttagacaaacaatgg

SEQ ID NO: 5632 - DNA, 375 bp, Triticum aestivum
  Clone ID: LIB104-029-Q1-E1-F3
attcccgagtcgacgggcggcgctagacgtgcccggagaagaagttgatccagcaggtggtgttcgccagctacgggaacccgctggggatctgcggctactacacggtgggcaaatgccacacgcccaaggccaaggagattgtggagaaggcgtgcgtggggaagaggagctgcgtgctggccgtgtcgcacgaggtgtacggcggggacctcaactgcccgggcaccacggccacgctggccgtgcaggcaaagtgctccaagaggcagaggaccgccgagcaataagtaagctaagctcagatatgtactgctatgtagatcatctcatcaccttcacctttgccgaccatggtctttttcatgctgcttg

SEQ ID NO: 5633 - DNA, 452 bp, Triticum aestivum
  Clone ID: LIB104-029-Q1-E1-F4
aattcccgagtcgacggggtgcgtaccggaagccaaagccgtcccacggcgacgacgacgaccggcccagctacggccgcaagaagaatgacgacgacgacgacgatgagaggcggtcgcggtacaagaagcgcgacgacgacgacgatgatgagaggaagccacggcacaagaagtgcgacgatgacgacgacgacgaccatgagaggaggccgcgctacaagaaacgtgatgacgacgacgatgacgacgatgacagaaagccgcgttacaagaagcgcgatgacgacgacgacgatgatgataggaagccacgttacaagcacgatgatgatgaggacgacgacgatgataggaagcagcgtcgcggggacaaccgccgccggcacgaatacgatgattgatcaaggcatcatgacatgagtttagctgacgctaataagcatagttgc

SEQ ID NO: 5634 - DNA, 370 bp, Triticum aestivum
  Clone ID: LIB104-029-Q1-E1-F5
gtaccggtcaagaattcccgggtcgacgttcgtgagggggaacctggtgttcgccgaagggaagcacgccggggccgcctgcggcgccaccatcctcgccaagtgatacactagagctacaatgtcattgctgatttctagcgtatatgatcgtgtgcgctgtgtagtagtatgtatgtgtgcagatttgtagttgtttccctgtgtataattggatccggtgcatgcatccattcccctccattgtgtatacccacccattcattggacagcaccaggtgtaggttatttctctgaattattcagatgtagtagttctgaacttctcagttgtgataatatctatgggaagaatgtggattattctgcc

SEQ ID NO: 5635 - DNA, 427 bp, Triticum aestivum
  Clone ID: LIB104-029-Q1-E1-F7
taccggtcaagaattcccgggtcgacggggctagggacgttaaacgatagcgctagttgggaggcaacccaattttgtttgtgttttttttcctgtttagtaataaatcttgcatctaccttctgtttagatgtgtttttatcttttaattagtgtttgtgccaagtagaacctataggataacctatgatgatagttgatttgattctgctgaaaaacagaaactttgcacgcacgaatttaattttgtcaaatcacagagacgtgattttgcgttgattctttttgctgatgatcaatagacagattttccaggacttactattttggtagggtttttagagttctagaagtttgcgttagttacagattgctacagactgttctgtttttgacagattctgtttttcgtgtggtggttgcctaa

SEQ ID NO: 5636 - DNA, 399 bp, Triticum aestivum
  Clone ID: LIB104-029-Q1-E1-F9
ccggtcaagaattcacgggccgacggggggagctacgctggtgcgccgcgccctcgaggccgtgcgccggacgccgcgctggcagaagaggctcgtcgtcctcaccgcaggagctggcactttaagctatgcttgccaggataaccgtgttcttcaaatcagtgatggaacggggggcaagaaaaaagtggttatacttggaactggttgggcaggtgcaagtttcttgagaaatatcgacacttctttgtatgatgtccatgtggtatcacctcgcaactattttatgttcactcctctgttgccgagtgtgacatgtggcacggttgaagcacgcagtattgtggagccaattcgcaatattgtgagaaagagaggtggtgcattcagattctggga

SEQ ID NO: 5637 - DNA, 328 bp, Triticum aestivum
  Clone ID: LIB104-029-Q1-E1-G1
attcccggatcgacgggagacgctgcatgcaagtatgatcgatcgatgatcgtccgaagcaagtggagtgcagtgcagtcagccagaggaagacgaaggcgtttctatcagtccgatctcctgccccttttacatgatgattattattattatcttagtgcatgtgtatgtaatatccaccatgaactgatgttacagtagactgccacattggtagtgcagtgcagcacagcacataaaaaaaaaaaaaaaaaaaagaaaaaaaaaaaaaaaaaaaaacaaaaaaaaaaaaaaaaaaaaaaaaagacatacaaaaaaaaacgaaaat

SEQ ID NO: 5638 - DNA, 370 bp, Triticum aestivum
  Clone ID: LIB104-029-Q1-E1-G3
attcccgggtcgacgggcgaccggatgctcgtggagatgtaagtggaggccgatacatcgctcgcagatatagtgatttgtgtgttttacgtagcagattcgggaggcacttatggcatgacatcattggcggagacggaatataggttgggtacaatcatgtgacttcagaatcatgctttatgaacaggtttcatgagcatggtcaagcgcgatctgcgaatacgtttcgtgaccatgggtcattgtcatggagtaagccaatccattgacactcctatggacccatggatgatttacatttttctcttgtcccaattcatccacatatgtatccggttatccacacccttctaactcggccccatcg

SEQ ID NO: 5639 - DNA, 459 bp, Triticum aestivum
  Clone ID: LIB104-029-Q1-E1-G5
accggtcaagcattcccgggtcgacgggcctaaacactggctcaaaggtttctttcaagaatcatgagagaacattcaaggagtggattatttggaaattagaaccttcagatttcttagaacttcacttggatttatgtgaatataagcgtaagaggtctagtggcaatgctacaaaatcactgcaggcgatataataacgttgtagatagacggagactgaatcagttgacactactttgatgtctatcgagccaatgggacaacaaagtccttgcagaaaagaagaaccggaagcgggttatctatcttcacgagcaagttggcgtctgtaaaccttcaccggagccattccagctctttcagagccacaaggcaaggaagttgaggaaccaagaccccaacggtgcaaaacaatttggcaatcgaaaggactagggctgccataagggacctgta

SEQ ID NO: 5640 - DNA, 280 bp, Triticum aestivum
  Clone ID: LIB104-029-Q1-E1-G7
gattccctatagtgagtcgtatgacgatacattgctctcaggtatactgatttgtgtgttttacgttgcagatccgggaggcacttatggcatgacatcattgggggagacggaatataggttgggtacaatcatgtgacttcagaatcatgatttatgatcaggtttcatgagcatggtcaagcgcgatttgcgaatacgtttcgtaaccatgggtcattgtctttgagtaattcattccattgacactcctatggtcccatggatgatttacattttt

SEQ ID NO: 5641 - DNA, 457 bp, Triticum aestivum
  Clone ID: LIB104-029-Q1-E1-G8
ttcccgggtcgaaggggttaggaattgtaaatatgcattgttgtatcgcgacctgaatgaatgaaataaacgaaataacgctcttgtacaaaaaaaaaaaaaaaaaaaaaaaaaaaaaaaaaaaaaaaaaaaaaaaaaaaaaaaaaaaaaaaaaaaaaaaaaaaaaaaaaaaaaaaaaaaaaaaaaaaaaaaaaaaaaaaaaaaaaaaaaaaaaaaaaaaaaaaaaaaaaggcccccaaaaaaaaaaaaaaaaaataaacccccaaaaaaaaaaaaaaaaccccctaaaaaggccccaaaaaaaaataaaatgggggcccttttaaaaaaaccttttaggaaaaaaaacccggatttaaaaaaaaaaaacctttaaaaaaaaaacccctttttaaaaaggttggaaaaaaaaaaaaagcccccaaaattatcccccaaaaaaaattttcccccaaaa

SEQ ID NO: 5642 - DNA, 458 bp, Triticum aestivum
  Clone ID: LIB104-029-Q1-E1-H5
cggtcaagaattcccgggccgacgggagagtggatacagaataacttcatccgcaggcacacctgaccaagctgcttttatcttgagcataccaaagaggaagccactggacgagacccaggaaacccttcgaacttctgccttccccagtaaccacgtgaaggaaaagtgggcgaagaacctgtacatcgcctcaatctgctgcgggcgaaccgcgtgttgacgacgtacttgagctcgacggcgaaatcacccgagttttaccactggagccagaagagagttcgagacggaacaaactcagcgtcaaccttattatctaggtttcgagcgcaattggctgggcgctgacactggcccggcctcttttggttggcggcacgctattccaattggtaagaatccttgcaaaaatccttggggtggttgtatcagtcctcatcggatggatatgaacc

SEQ ID NO: 5643 - DNA, 455 bp, Triticum aestivum
  Clone ID: LIB104-030-Q1-E1-A1
taccggtccagaattcccgggtcgacgggtacaaggtggaggagaaggagggctgcctgacgctggggtggcacacgcgcccgctgatcgccacctccgcatggcgcctggccgcgccgtgaccgcgagttttgaacgctgtaagtacacatcgtgagcatggaggacgacacaaccccggcggccgccccggctctccggcgcacgcacgcacgcacgctcttgaagaagaagaagaagctaaatgtcatgtcagtgaacgctgaattgcagcggccggccacgatcgaccgtccggcgtgaagagacggacgacgacgaattccgagccgaccatcccaccggcatgtagtaatgtaatcccttcttcgtccccagttctccaccgcctccatgatcaaccgttaaactcccaagccctacaactactactactactactactactactatca

SEQ ID NO: 5644 - DNA, 422 bp, Triticum aestivum
  Clone ID: LIB104-030-Q1-E1-A10
ttcccgggtcgacgggcaagaaaaaatttagggaacttagtcagtcacgtccagtcaaggctgttcagggcagattttacacgccatctaacaaatttatttggaagacagcgattacttttgtcttgcttggagtgcttacccttgttttccctactgaagaaggtccaactctccaggtcttaatctcttgtgcggcaaatatctatttcctttatcagcggcttaaaagtggatggaaatcattcttttatgggttcggctccttctttgcttcctggtttcttgccacattcttgatggtatcggtaattccgcctatactgcctggtccaagaaacttggaagtgagcacggcatgtgttgcttacgcattcctttttgtatcatcaaccttcctgaaattaccaaagtttggtttt

SEQ ID NO: 5645 - DNA, 444 bp, Triticum aestivum
  Clone ID: LIB104-030-Q1-E1-A2
attcccagggtcgacgggttctacgagaataaatagtgtgccgaatccattgattgtcatcaatttaaattggtgaaggataagcataatgtaattcttattcttgtttcatcgactaaattcaattccttattccggagcctcatcaaaattctcggtttcaattgtttcatcttctcttcccgcaattccaagctctctcaattatatcatcacaaagatccatccaagtcactacaaggattcaccttgtgctttcaacttctctttctttttgtttgatcattctttcattaccggagttcttcatgaaggttctacatgatggtttcatcaaggatttaatttgttctcgaagtgttcatcaagattcttttcagaggagttcaagcattcttcatcttgctatccggagtgcaatttcttctacagtatcatcggagg

SEQ ID NO: 5646 - DNA, 393 bp, Triticum aestivum
  Clone ID: LIB104-030-Q1-E1-A4
gacggggcttcccatgatactaattagtacaatatggtataaggatatacatgcgtcatggagatatcttattactgagtttgatcacttatgcatatttatatggagtagatgtttgtgacaatagaaacaatgtcatatgatgacccctcgtgtgcttatactatatatttatttaagcaacatagtatatatgtacattggtcggagattacaaatatgtaatgatacttattttatgtttatttttacccctctgtatctaaaaggaagtataaagaaaggtcttatattttaaaaaaaaaaaaaacaaaaaaaaaaaaaaaaaaaaaaaaaaggaaaaaaaaaaaaaaaagaaaaaaaaaaaaaagcggccgctctaaaggatccaag

SEQ ID NO: 5647 - DNA, 436 bp, Triticum aestivum
  Clone ID: LIB104-030-Q1-E1-A6
ccggtctaaaattcccgggccgacggggcagaagaaagtaaaagaagcattcgaacatgcatggtctggctaccgaaattatgcgctgggtcatgatgagcttatgcctttgagccgcagaggtgtagacggattaggaggtctaggtgctactgttgtggattctttagacactgcaataataatgggtgctgacgatattgtgtctgaagcatcaaaatggattgaagacaacctaatgaaaaagatcagcgagaaagggcaggttaacttatttgaaaccactatccgtgtcttgggagggcttcttagtgcgtatcacttgagtggtggagaccaagcaggaggaggtgattctgggatagcagtaacacctaacaagactaatccagatcgtcttctggcaatctcaaaggatttagcagacagattattg

SEQ ID NO: 5648 - DNA, 443 bp, Triticum aestivum
  Clone ID: LIB104-030-Q1-E1-A7
attcccgggccgacgggaatgacaacttattccctagtatttggaggtgaagccgttctacctttggaggtacaaatcacgtcattgagagtcgccacacatgaaaatttatcggaagaaaaatcagtacaattacgtctcgatgaattggatagactagaaggaaggcgacttgaagctttgcaaaatcttgaggcataccaagctaggatgtcgcgagcattcgacaaacgagtcaaaagaaggtcgttcaaacaaggagatctagtacttgcggtcatccgtcctatgaatatcacgcgacggatgaaaggaaaatttgaaccaaaatgggaaggtcccttcgtcataaaagaggtttattctagcggcgcatatagaatcatatcaccagatggggaatactcaccggcaccgataaatgagaaatccttaagcattac

SEQ ID NO: 5649 - DNA, 426 bp, Triticum aestivum
  Clone ID: LIB104-030-Q1-E1-B11
attcccgggtcgacgggaccatcaaatgcatgcatttatttgtgaacggcaccagtacgcaccacaatagatgttgtaggactcgtttgttcccatgcatctctcaccaaccatgtccctttccttcaaccaacgagcttcaaactggttgtatcctctcggttgctgcaggttacctccgacagccccttaagtatccaggaaaacagttttgtggtaagatttttgttttctgcggttacaacctttgcatttggaaatacaccatgaaactctccattacaaacaaccgtatccagtcgttcccgtggcctcatccttctccatgtaaactgatctccggtaaaccccctatcttcaactcacagtcaatcagagcatcacagaaatcttgcatcatgtgcatcggatgtggagctcgtccct

SEQ ID NO: 5650 - DNA, 437 bp, Triticum aestivum
  Clone ID: LIB104-030-Q1-E1-B4
attccagggtcgacgggtctccccgaggacccaaccatctgtgttccccaaaaagaaaaaaaaaacatggtagtagtaatgtaatgctgtaatggaattacccgagatgtgtactagctgttttgtggcgcgccgcggcgtcgctgtgagcgagtgtgtacgggctgttccgtggtgtgtgtgtctgtggatgattgtgtgttgcgttgccgtgggactggtgcaagtgtcgtgtgatgtggtatgcgttgtgtgtgggtgggtgctgtatatttgcgtacctctatgtgtactgaccgtgatgcgttgtttgtccgttttatctctctatatattgtccgttgtttgtccgttcggcatcccagctggtgcgtcccagccgagagatttggcacgcggagaggaggaagatccgcgatggacatggggatgcacga

SEQ ID NO: 5651 - DNA, 378 bp, Triticum aestivum
  unsure at all n locations
  Clone ID: LIB104-030-Q1-E1-B8
ttacaacaccctatagtgagtcgtattaggatggaggagcanaggatttcattctgaattatttttacatcagttattgattctgttaatacatattctacctcacatgacctcgtcagaaacaagtttgttttacgtatgccatgtactcaaaaaagttccccacagaaaaaagttccaaaatcccgggttcgccttttctgacaggcaattgagcatccttcactgaagttgtgtgtgtgctcaatcagtcttcagccgtgggacttcactgaacctggttcacagagctgttcatgtgaagactgccaacgtcgtgtgttcggttcctgggtgtgctgcttctaccgaatacatccacgacatgaatttgttcac

SEQ ID NO: 5652 - DNA, 425 bp, Triticum aestivum
  Clone ID: LIB104-030-Q1-E1-C10
gtctggaattcccgggtcgacgggttctgcgaaaggtaaactgcatctgcatctcttagatggagttcacagatttgctacctttaggttttcttcccgcaaatgaatctttctgaattaatagttaccagaacggtatttgctacaattgcttccttcttaagctgatcaggtgtttgtttttctccagggagatgtgataacaagtttcgacggtgtctcggtaggatgtgaaggaacagtaccatttcggtccactgagcggattgctttccgctacctcacaagtcaaaagtaagtgcttcctcacaagtaccatcattttcttaatcatcttgaagtgcttttcctaacctttttaatttatttatgttctgttctagggcagaacattttttgtcaccagtttctaatggtccggaaat

SEQ ID NO: 5653 - DNA, 393 bp, Triticum aestivum
  Clone ID: LIB104-030-Q1-E1-C3
aattccagggtcgacgggaatctcaacaatctcatctggagcagtgggatcagaagcgtgccccgtatggttcgcgtgaggattgcccgcaggaggaacgatgatgaggacgccaaggaggagctctactcactcgtcaccgttgccgacgtgcctgctgagggtttgaaggggctgggaaccaaggtcgtcgatgacactgagtagactcttttctttatctacatcgttagaatgagctgttatttggaattgcaccagcatgctttttgtatcccgcagaagttttggagtatggaatatctggagctatctattttccttcatctaaatcttgatgattggttttgtccttcatactgtgctcgttattggcgtcaatacacgatgtgc

SEQ ID NO: 5654 - DNA, 440 bp, Triticum aestivum
  Clone ID: LIB104-030-Q1-E1-C4
aattccagggtcgacggggtgggagatcctctcggtcttcaaaagcctctgtaacagttcagtctcgcaaaatctcgaaggttggtgatagcgtgttcattgaggaaatgcctgatattctaagggagccttcttctcctggtatcgtgaagacttgttcccctaatggaaaaagagtttcaccgccacataatgcactcagcatttcaccaaaccgaaaaggagggcggaagctgatactgaaatcgatcccctcctttccatcactggttggggacacgagcggtggatctgcaatatgcagctccgacagcacaacagctcttgctttaggtccatcgtaaaagctgggctgggcagccgattatccgcgaccggagtacgacttgtagtccgataatggtacctcgcatatgaactctgcggcaaggctcaaggta

SEQ ID NO: 5655 - DNA, 285 bp, Triticum aestivum
  Clone ID: LIB104-030-Q1-E1-C7
ttacaactccctatagtgagtcgtattactagcaccttgcccggagccctcaaaggaagataaaggggggaataatgaggtcgaaagcagggccccatcgctaccaattccaagcgagggagtgagcgcctccgtgaaggaggataaccaaggggaagaatctgaccttctctcgcttcgaggaatgaagaggactgcctctgaagatccggaaaccaatgtttccaaacacgagaagaactctccaccatagggttctgccttggacggtgctcttgccgcaca

SEQ ID NO: 5656 - DNA, 443 bp, Triticum aestivum
  Clone ID: LIB104-030-Q1-E1-C9
gtaacggtctagaattcccgggccgacgggataagtagctcataatcaagaaaatatgtataatttgaggatcacgagttcatgacatggtgcttaggacatgggtgcgattcagagtaaattgatctgactggcaatgttttcttttcataaaacttttgatctattcataacatcatggcagcataaagaacatcaaaaataataaaacatagtaagtaataacaattacattgagcatttcaatggaaaataaaattgttgccaatttagtaaggaatattaatgcccatgacaacgcctgggaaaaaatctagttcctatgaacaaagatagaacttggggtacgattcgagtaaattgatctaattgacaatattttcttatggaaaaagtttggttttattcatagcatcattctgataatctaaagcacattaaaa

SEQ ID NO: 5657 - DNA, 381 bp, Triticum aestivum
  Clone ID: LIB104-030-Q1-E1-D11
ccctatagtgagtcgtattatctgctgcgtcaagcagccgcctggcactcataagggtgcctactacgccatccatcacatgcgggcgattgtacgggaccagcatcaacttctgctatcgagtaaactcaaagattgggccgcgatcatgttggcaatccatgacgcggacatcagacaagaattctttcgcatctagtcggattttgcagaaatcatctatcaagatgtccttcgtacctcggggcagttctacctcagaaatcacgcgtcgaacagtgacatcgacacaatgctacatatgccggctgacaatgaccgttagttcatgactcccatgatctgaggggacctcatccacgcatccggtcccttgagtcc

SEQ ID NO: 5658 - DNA, 421 bp, Triticum aestivum
  Clone ID: LIB104-030-Q1-E1-D2
gtcgacgggccgtgcaatgccctttctcacattgagagtttgcgcaaactttgccggtgcatccaaaccccgtgatatgatacgctctttcacacataaacctccttatatcttcctcaaaacagccaccatacctacctattatggaatttccatagccattccaagatatattgccatgcaactttccatcattccattcatcatgacacattcattattgtcatattgcttagcatgatcatgtagttgacatagtatttgtggcaaagccaccgttcataattctttcatacatgtcactcttggtccattgcatatcccggtacaccgccggaggcattcatatagagtcatctttgtcctagtatcgagttgtaatcagtgagttgtaaataaatagaagtgtgatgatcatcat

SEQ ID NO: 5659 - DNA, 440 bp, Triticum aestivum
  unsure at all n locations
  Clone ID: LIB104-030-Q1-E1-D3
attccagggtcgacggggagttcagcgacatactggccgccgtggagcacgaccggcggaaccaggagggcgcgttccggcggatcctgcggcgggagtaccggccgtacctggtgatggccgtggcgttccccgtgttcctgaacctcaccggcgtgaccgtgtcggccttcttctcgccgatactcttccggaccatagggttcggtagcgacgccgcgctgatgggcgccatcatcctcggcctgatgaacatcggcggcatcatcgcctcgggcgtcgccatggaccgctacggccggaagctgctcttcgcgatctgcggcgcgctcatgttcacctgccaggtggcaatggcgagcatcgcggggacgcacctgnggcacgggagcaagatgcccaaggggtacgcngtggcggtgctggtgctgacgtgcgtc

SEQ ID NO: 5660 - DNA, 270 bp, Triticum aestivum
  Clone ID: LIB104-030-Q1-E1-D4
acaccctatagtgagtcgtattacgtggtgcaccagtggcggccaccaggaaggcgccttccggcagatcctgcggcgggagtaccggccatgcctgttgatggccatggcgtggggggtgttcctgagaggcatcgacgtgacgcgtgtcggccttcttctcaccgatactcttccggaccataaggttcggtagccactccgccctgacgggcaccatcatcctccgcctgatccaacatccgaggtagcaactcctccggcgtctcc

SEQ ID NO: 5661 - DNA, 419 bp, Triticum aestivum
  Clone ID: LIB104-030-Q1-E1-D6
ggtctagaattcccgggtcgaccaggcttttgttttcgttctggagcttttagccccatgaaatggccaattgcacgtgccactagcatcaacggtgagtcgtgtctggcatcactttctctattgctacttccatcgccctgcactgatctgcaaatgcagctcaacattcattttattgaactagtatatatattgaaaaagagacgacatcacaaagagtgtgctaacaagaatggaaaatcaatacactagtctgtcagtgagtgattgtgtgatggcctgtgctcacttatgtaccagccgttgtcatttgatcggagtaactatatcattgtgggacacttgcaacggtaggaacgtgtgttactatttttgggaccccctgtgaacatttgaacaaaaagagcaaatgtttc

SEQ ID NO: 5662 - DNA, 146 bp, Triticum aestivum
  unsure at all n locations
  Clone ID: LIB104-030-Q1-E1-D7
acaacaccctatagtgagtcgtattatctangccaatnacgaggcgtcctgcagctaatagctacagcgatcgtcgatcgtctcaggcatcaccatccccattgcgacagcgaacagggcacaaccataggcgcgggagcactaat

SEQ ID NO: 5663 - DNA, 438 bp, Triticum aestivum
  unsure at all n locations
  Clone ID: LIB104-030-Q1-E1-E1
attccagggtcgacggggcaccctcttggtgaagttgttcttgttggggaaggacttggccttgtctttgcgaatgagctttccaccattgtcttccctcttctcataggagaaatccaccataatgtggctcacattgccacaattatagcatgtactcacacgttgcttgcccttggagccacttgagttgttcttggagaagttgggccttgagtttctcttgttgccccaaaattgccttcatacaagagccatgtgctcatggtaagcatattttgtgtcttcggggcaactctcttcctcctcctcctcctcttcttcttcttcttcttcttcttcttcttcttccaggatagccttggccttcaaagctaggttgggtgaggatttttcgaccgttggacatgagctagagcgttgtcngcggtcttgttc

SEQ ID NO: 5664 - DNA, 424 bp, Triticum aestivum
  Clone ID: LIB104-030-Q1-E1-E10
ttcccgggccgacggtcgatctgtaacgacgaggtggaggttgtttttttgtttttggtttggttttgtgaatcggtcgtgaagttgaagttgacgaagaagacgaagaccctgccggagtgcggcggtggacggacgggcgggcggctagaggcgggagccgccattgttgttaattaaaagattagtagccaagtgaaatactactaggatcatccatgatattgcttttttttcctttcctttccttcctgttaattactccatgtttttcccctagtaattataagacttgattcattcttgatctgagcttgtccatggcaattggtcctccatgtttgtagtatgcttgtacccatccctctcctctctgcacacatttttcttgttctctgaagaagaagaagaagaagaagaagaa

SEQ ID NO: 5665 - DNA, 106 bp, Triticum aestivum
  Clone ID: LIB104-030-Q1-E1-E11
tggtaatcccaatagtgagtcgtattagaggcggcggcggcggcgagtcagggcagggccagcgagcagcaatggggttcgtctccgtcgtcgtggagggtccgct

SEQ ID NO: 5666 - DNA, 359 bp, Triticum aestivum
  unsure at all n locations
  Clone ID: LIB104-030-Q1-E1-E2
cgccgccaggtacggctccagaattccagggtcgacggggaagagttccgtcagcacgacggtgtggtgacgatcttgatgatctaccgtcgtagggcttcgcctaagcaccgctacaatattatcgaggattatggtggaggggggcaccgcacacggctaagagaacgatcacgaatatcaacttgtgtgtctagaggtgccccctgcccccgtatataaaggagcaagggggacgccggccggcccttgtgggcgcaccaaggaggagaagtcctcctcctggtaggagtaggactcccctctttcctactcctactangagggggaaaggaaggggaagagggagacggaaaggg

SEQ ID NO: 5667 - DNA, 440 bp, Triticum aestivum
  Clone ID: LIB104-030-Q1-E1-E3
aattccagggtcgacgggcctgcagtcggaggtcttcccgagccaggagtatgagccgccgagcaatgccggtagcccgagaggggggctgaacgacgccgagattaagaactagaaaaagctcatgggtcggctcatccattgagacgtaaggttttgatattgtaacccgcatttcgccgcctccattgtatgtatatttattctgtccgagttgctgttgttgcgtaaaactgtggcagcaatgtgagcagattgacatgtttgcgctgctgacctgagtggctgcgatgcacgtttcatcatcagcactggaaatgctgttgtttcgcagaaagttcaagtttgtgtgctggtttgtataaatttggctcattttctaattgggactcgtttggaagatatgttttatgttttttgcaccggtttcacatgaaaaa

SEQ ID NO: 5668 - DNA, 443 bp, Triticum aestivum
  unsure at all n locations
  Clone ID: LIB104-030-Q1-E1-E4
attccagggtcgacggggctctctttggtgtaccttgctgatctggttccgtcgccttttgccgctctttttgactctaatcgacttgtgttctctctctcgcatacctcgcgtgggggctaggcaggtgccctcgcaagtgtttttctttctccctgccttctgccaggtttttcgcgaggcccctcgttcgagcccacaagttggtgcatctctcctaatccgtgcccctccggtaccgcgatatgaagcgttgggtcaaggcttgggcgaacgataagtttcccggtgaagtttcctagcgagcttcctaacgaattttttctgcagttcctgagcgaccactaaggtcaagacgagcacgaggaaacaagtgcccagtgaagaagaagctaccccgaacgcgcaaagctaagttacctccacacanaataacgacacag

SEQ ID NO: 5669 - DNA, 236 bp, Triticum aestivum
  Clone ID: LIB104-030-Q1-E1-E6
cctacagtgagtcgtatgataaattccagggctatctttctcgcgaacgcgagaggctgaggcagcacgacagagccatgatgggcaagaactactgcagaccggggctcactttcgacgtgtcaccatgtgaactatacatggaacgaagtatctctatgagacatatcatacagattatcgctgccttccaatgccaccttttgcttctgccacccatcacatatcactgaccc

SEQ ID NO: 5670 - DNA, 173 bp, Triticum aestivum
  Clone ID: LIB104-030-Q1-E1-E7
acaacaccctatagtgagtcgtattatcatatcttgttctagctttgagttgtaattcttgagttgtaaatcaataaaagtgtgatgatcctcattactacagcattgtcggagtgagggaaaggatcatgaataccacgattcccccacaagttgggatcacacttcgatct

SEQ ID NO: 5671 - DNA, 254 bp, Triticum aestivum
  Clone ID: LIB104-030-Q1-E1-E8
attcccgggtcgacgggaggttcagggagagaagcgacggggttagaagttgtaaatatgcattgttgtatcgcgacctgaatgaaataaacgaaataatgctcttgttcaatcgtcaaaaaaaaaaaaaaaaaaaaaaaaaaaaaaaaaaaaaaaaaaaaaaaaaaaaaaacaaaaagaataaaaaaaaaaaaaaaaaataaaagaaaattcatacatcctatagaatgtaacctaaattcaattcaatggaa

SEQ ID NO: 5672 - DNA, 403 bp, Triticum aestivum
  Clone ID: LIB104-030-Q1-E1-F10
ttcccgggtcgacggggaggatatgtggtcttccagacataggaggtcatctcatgaaaataccgctggtggttttccaagttttgctttgtatgcggttggagggtacaccacctagcgctcgctacattccaatatttgctcttttctccccactatttattctacaaggagctggtgtccttttctcgataggaagattggtggagaaagttgttttgctattgcgtaatggaccagttagtccgaattaccttacagtatcatcaaaagtccgtgactgtttcgcttttcttcatcacgggtcaaggcttcttggttggtggtctattgatgaagggagcaaggaagagcaagctcggctgttttatactgaatctaacgggtacaatacattctctgg

SEQ ID NO: 5673 - DNA, 232 bp, Triticum aestivum
  Clone ID: LIB104-030-Q1-E1-F11
tcaacggttacggctgcaaaaaaacaacaaaatcaccggacggcgcccatatttgctacgcaactgagaacgtcagctaagctcaaagtgttggggcatttggaccacctgagtatgcgcttgtcccattctgacttcagtgggcgctagattaattagccgctctccatgattgaaacttacattgcatctgtccgacttccttacccgccgctcttgtcacctaaaatca

SEQ ID NO: 5674 - DNA, 265 bp, Triticum aestivum
  Clone ID: LIB104-030-Q1-E1-F2
atagtgagtcgtattaaaccgacggggttagaggttgtaagtatgcattgttgtatcgcgacctgaatgacataggctaaataatgctcttgttcaatcgtcacaacgggggaaggggagagtgcaggcaaagaagaaacaaaaagggcggacgcccaacagggtgaattgtctaagcgtggatgcaatgagagttcagccatcgtcaatcttgacttgtaacttctagtccatcgaaatcgctatcaaagcttcatgactggga

SEQ ID NO: 5675 - DNA, 452 bp, Triticum aestivum
  Clone ID: LIB104-030-Q1-E1-F5
aggtaccggtctagaattcccgggtcgacttagcgatatactgggatagtttcttctcagcttgtggatctgtttttttgcaactcaggttatgttactgcattgcaaattagtcgagataagcttgtgtaatcctacatttttctccttgggttcatgttctcggcagaatgatcaggaaagctgtgcacgttgtggtgcatttacaaagacagtgagatggacatttgttttttgtttagctcatgcattgcttgcatatcttttttggtgattgatctttatctgtggtttcgatgctatgagtgttcattcacattagctctgtttcttttaacatcactagcaaaagggcccgtgcgttgcaccaggagaacgaaatcacatgcccctaacccaataagaatcaatcttagaaatagtcatgtaataagagtcaatcggttacaccc

SEQ ID NO: 5676 - DNA, 287 bp, Triticum aestivum
  Clone ID: LIB104-030-Q1-E1-F6
attacaacaccctatagtgagtcgtattaaattggcttttgacttgcggtcttggatggtttgtcagaatattggacagtgaaggtattgggatgtaccagatggtctcccttggaatgggccagctgaaagagatgggccttactgccgtaggaccccggagaaaattgatacaagctattgacattatcagcaagcccggtcagttcgagatcttttcttgatctcaagtgtgtctccgttcgtttgttacatgtccttgttgctagtcagttcaatcactgcag

SEQ ID NO: 5677 - DNA, 203 bp, Triticum aestivum
  Clone ID: LIB104-030-Q1-E1-F8
cgcgttgtctgttgcaattcccaatagtgagtcgtattacaggatggcttattggtgtgggaacaactatggatgcaatttagactcgtgctgataagctggttgtccaggttctacgacgagggcatggggctctcggagttattcgtgtaacttgatatgcacttcttcctctctcataatgctgttgtgtcttatatcat

SEQ ID NO: 5678 - DNA, 443 bp, Triticum aestivum
  Clone ID: LIB104-030-Q1-E1-G1
attccagggtcgacggggcgatggacttttcctaccaatctatccccctaggggcatgcgtagtagtactttgcttcgagggataataaacttttgcaataagtatgtgagttctttattactaatgttgagtccatggattatacgcactctcacccttccatcattgctagcctctctagtatcgcgcaactttcggcgttaccacaaacccatcatataccttcctcaaaacagccaccatgcctacctatcatggcatttccatagccatactgagatatattgccatgcaacttccatcatcatcatatacatgacttgagcattcattgtcatattgctttgcatgatcgtaagatagctagcatgatgttttcatggcttgtccatttttttatgtcattgctacgctagatcatcgcacatctcagtacactgct

SEQ ID NO: 5679 - DNA, 388 bp, Triticum aestivum
  Clone ID: LIB104-030-Q1-E1-G2
attccagggtcgacggggctgagcagaatgaactccaatttgctgtgccaggagggcttattggtgtgggaacaaccatggatccaactttgactcgtgctgacaggctggttggccaggttctaggagaaatcggggcgctccctgacgtattcgtggagcttgagatcaacttcttccttctccgaaggctgctgggtgtcagaacaaagggtacagagaaggcaggtaaggtctccaagctcaccaagggggagatcctgatgcttaacatcggatccatgtccaccggcgcccgtgtggtcgccgtgaagaatgatctcgccaagctccagctcaccgcgcccgtctgcacaagcaaaggcgagaaggtcgcgttgagccgccg

SEQ ID NO: 5680 - DNA, 445 bp, Triticum aestivum
  Clone ID: LIB104-030-Q1-E1-G5
ccgccaggtaccggtctagaattcccgggtcgacggggcatctatggctaataaattagttaataaaccataaggaagttggaatacagtaggtttaacaccaaaataaataaataatgagtttgttacagtaccttatgtggtggttttgctttctttcactaacgaagcttatgagatttcctgctgagttttgtgttgtgaagttttcaagttttgggtaaagatttgatggactacggaataaggagtggcaaaagcataagcttggggattaccatggcatcccaagatattcaagaatagccaaaagcctaagcttggggatgccccgggaaggcatcccctctttcgtcttcattcattggtaactttacttggagctatatttttattcgccacatgatatgtgttctgcttggagcgtcgtgtatgataatagtat

SEQ ID NO: 5681 - DNA, 408 bp, Triticum aestivum
  Clone ID: LIB104-030-Q1-E1-G6
tcccgggtcgacggacgatggctaataattctttgcaataagtatgtgagttctttatgactaatgttgagtccatggatcatacgcactctcacccttccaccattgctagcctgtctagtaccgtgcaacttttgccggtgcattaaacccaccatatactgttcctcaaaacagccaccatagctacctattatggcatttccatagccattccgagatatattgccatgaaacttccaccgttccgtttattatgaaatgcaccatcattgtcatatggctttgcatgatcatgtagttggcatagtatttgtggcttgtccactgttcatatttttatacatgtcacgctagatcattgcacatcccgatacaccgctgaaggtattcatataaagtcatatc

SEQ ID NO: 5682 - DNA, 425 bp, Triticum aestivum
  Clone ID: LIB104-030-Q1-E1-G7
taccggtctagaattcccgggtcgacgggacactctgtcatcttctgccaacaattggactccttccaacgggggcggccacgcttcaggctactcaaaggaggctgacccaaccacagcttgaaagctgaagcactaaccacaacatcaacatccaacctttttgacatttgcaatcccagttttcacattaccatcctttcccacctctttttgcttgtggtgttttcggagtctgtagctatttagtactttctatgtcgtgggctaccagaggctccctagaggctgcaaattttgtcgctgagtagaagcaagggaacggacggagggtgctcccagtttctcctgagcctatatgcgtgtattaactgaaggccgtggaaggcaaaactcgtggggagctctctgagattttggactgt

SEQ ID NO: 5683 - DNA, 371 bp, Triticum aestivum
  Clone ID: LIB104-030-Q1-E1-G8
gcgttgtcagttgcaactccctatagtgagtcgtattacgctcatcatccggggcatcggcatcatgatggtcagcctcaacggtatcgccgtcggattcagtcgcatgatctatagccagagtgccgcaatggggggagctcctgggcagagtcttcttcaccttctgggtgctagctcacctgtatgcgttcgccaagggcctcatcgggcaccgctgccgctctagagcgatgtagcttacatacgcgtgcatgctacgtcagacctcttaaagattgtcactcaatttgaactcattgggggtccatttaaaatgtcatgattgggacaaaccctgactgttagtaatttaattggcttggactaaa

SEQ ID NO: 5684 - DNA, 390 bp, Triticum aestivum
  Clone ID: LIB104-030-Q1-E1-G9
ccgggtcgacgggaatgctgcagaaggatagagatatcaatgaagacgtgagccatcgaatcaaagccggatggatgaagtggtgccaagcttttggcgttctctatcacaagagagtgccacaaaagctaaaaggcaggttctataggatggccattcgacccgtaatgctgtatggcgctgaatgttggccgactaaaaggcaacattgttcataagttagggatagcggagatgcgcatgttgaggtggatgtgtgaccacacaggaaaggatcaggtccagaatgatgatatacgtgacagagtttgggtagcactgattgaagagaggcttgtctaacatcgtctgagatggttttgggcatattcagcgcagaccccaaaagct

SEQ ID NO: 5685 - DNA, 466 bp, Triticum aestivum
  Clone ID: LIB104-030-Q1-E1-H1
cgccggcaggtacggctccagaattccagggtcgacgggatcctagctgaggaaatccacaagacccccctggcaagcgccatgccggggacgactacaacgccatggcaagacccttgccgggcccccggcaagacccttgccgaaggcatcagcggggccactgccaggcccgcgccagccaaggctccgccaccgttcgcatacagctaccagcccaaccagctgggcaggcacctgcgtggcaacatgcggcttacaagccaactcaccaagcacctacgtggtggcatgcagatcttcgtgaaggccctgccatcgcgccacctcagcagcctgcctgcctacatggcactgcacacatcgctggcctgggcgcgtgtcgaagcgaggcggagcggcgacggatgggacgggcctcgttcccatccccgataaagctaatggacacctaagtagcgcattt

SEQ ID NO: 5686 - DNA, 444 bp, Triticum aestivum
  unsure at all n locations
  Clone ID: LIB104-030-Q1-E1-H3
attccagggtcgacggggaatttcatttgtttgggagcgggattttacttcagagaagggcgctgctttttctttgagaggagaaagagaaagagaagggcgctgctatcgcgacatgggccgacccagccgcgcgggatgcgatattaaccatgtacacaaaatgttacctcccaaaaaaaatgtacacaaaatgttaaaattgaccatgtacacaaaaaatgttgattctcaaaaaaaaaaagttaagaatgtattataaaaatatattacatatataccaaaatttacaatgtgtataaaaaaagtaaacataaaaaactaagttttaaaaatcatttatttcagaaatatttagcatttgtataaaaatgattctaatgtatatgaaaagtgttgaatactctctccatccggaattgcnttgtccagaaatggataata

SEQ ID NO: 5687 - DNA, 442 bp, Triticum aestivum
  Clone ID: LIB104-030-Q1-E1-H7
ggtctagaattcccgggtcgacgtcatggactcgatgggcacgcgcaacgtgaagctccaggtccgggatctcccgtgcctcatcagcagctcgggcagcagcagctgcttgcagctggaaggacacaattcataacacggtgaggaagtttaaagaaggatcatttgttgccctcaactgtgtcatactgcggtaggtgtagtctacgctgtgtagcaacagggtttggtagtctgtactgtacgcgtgtagcgtgttatgtagcggcaatggcgaacaggaagtgtagtgatcgtcgtgcaggcatgacggtgcaggcacgatgtcgtgcctgtgacgaaacggtgtcatggaggtccctgagaggatgtcatgacaataatctgttgtcatgaaggtctgcggtgcctggctgcaaatgtatcgaaaactcgaactcct

SEQ ID NO: 5688 - DNA, 445 bp, Triticum aestivum
  Clone ID: LIB104-030-Q1-E1-H8
ggtctagaattcccgggtcgacgggggcgggagctttgtaccaccacgctggtagaccttcttacccccctcaaccaacaagccctcgctatcactatcatcagaaaagctgtcctcgccaccatcagcaaggtcactagcctctagagcccattgggatgaagactttgggaccggagtctcctggggcaaaggctcggcggcccgagcctcgtcggtccgaggctcgtggaccggagtccgagacaggtccatgtcagacgggtccacctcagacggagcagtcctgtggtcgggagaatcatctgggggtggcggcaaggaaggtgcaccagccttcctacctctcccgctgccatgtccacctctagcacccctcttcgtcttccctcgacctttcctagccgaacaagaaacgcccaacggtggtgtctgcatactgtct

SEQ ID NO: 5689 - DNA, 353 bp, Triticum aestivum
  Clone ID: LIB104-030-Q1-E1-H9
cctatagtgagtcgtattaggagaaggaagatgatactcgccgtgctcttcgccaactccgagggcaacatcctcatcgagaggttccatggcgtccccgcggaggagcggctgcactggcgctccttcctcgtcaagctcggcgccgagaacctcaagggcgccaagtccgaggagctcctcgtcgcctcacacaagtcggtctccattgtgtataccatgatcggggacgtctgcctgtacattgttggcaaggattaatatgatgagcttgctttgttggaggtgatcttcgctgttacgtcagcggttaaggatgtgtgtgccataacacctaccgagcgcctcgtcct

SEQ ID NO: 5690 - DNA, 384 bp, Triticum aestivum
  Clone ID: LIB104-031-Q1-E1-A1
gggtcgacggggatcagcacctcgccgtcggaggagaacatgcgctacttcaatgtcatggtccttggccccgcgcagtcgccctacgaaggtggagtcttcaagcttgaacttttcttacccgaggaatatccgatggctgctcctaaagttaggtttctcacaaaaatataccatcccaacattgacaagcttggtagaatatgcctcgacatcctaaaggacaagtggagtccagctcttcagatacgcactgttcttcttagcattcaggcactgctgagcgccccaaacccagatgatcccctctcagaaaacgtcgcaaaacactggaaatccaatgaagctgaagctgttgagacagcgaaggaatggactcgtatg

SEQ ID NO: 5691 - DNA, 390 bp, Triticum aestivum
  Clone ID: LIB104-031-Q1-E1-A12
attcccgggtcgacggggcactgcatggagtagggtccaagtctcctggatcacgtttggttggaaaatcacgatcccgaaggtttcattccgcttggactccgtttgatattctgcaaaaaatagcaattctgggctgggcctccggttaatcggttagtcccaaaagtaatataaaagtggaaaataaagcctaatatagtccaaaacagtaggtaaagtagcatggagcaatcaaaaattatagatacgttggagacgtatcaggcatccccaagcttaattcctgctcgtcctcgagtaggtaaatgataaaaaagaatttttgatgcagagtgatactttggcataatttgaatgtaaatcttcttaattgtgatatgaatattt

SEQ ID NO: 5692 - DNA, 174 bp, Triticum aestivum
  Clone ID: LIB104-031-Q1-E1-A5
cgctctataggatccaagcttacatatgccttcatcctacgtcataactcttctacaggttcgggtagattcatctcacaggacggtgtcttacaccatgaccactgggaaaattctgaggatactcaggttcatgtccttgtagaccatggacgtatcgacacccgtgttttt

SEQ ID NO: 5693 - DNA, 383 bp, Triticum aestivum
  Clone ID: LIB104-031-Q1-E1-B5
gggtcgacggggtgccaaatagaaccgttgggaagacttggggaaagtctttttgatcctgctgtaaaaaacagaaactttagtgctcgcgagaattgatgccatttttttattggagagttctatttacttaattctttttgcatatgattaatagataaattcctcgcgtccagaaatttattttagaatttttggagttccataagtattataaacctacatattactacagactgttctgtttttgacagatactgtttttcgtgtgttgtttgcttattttgatgaatctatcactagtaacagagtttataaatcatagagaagttggaatacagtaggtttaacaccaatataaataaagaatgagttcattacag

SEQ ID NO: 5694 - DNA, 418 bp, Triticum aestivum
  Clone ID: LIB104-031-Q1-E1-B6
aattcgcgcgtcgacgggattagctagatggcgcataagctcgtgaacatcataacgcagatggatcccagggaccctttcagaatagagatgacggacatgctgatcgataagctgtataatatgggtgtaattccaacaaagaagagcttggttaaatgtgagaaactttcagtgagcgccttcgccaggcggagacttgcaacaattatggtgaagctcaagtttgctgaacaccttaaagaggctgtcacctacattgaacagggccatgtgcgtgtaggcccagagacggtcaccgatcctgccttccttgtgaccaggaacatggaggacttcatcacctgggtggattcctcaaagatcaagaagaagatcatggagtataatggtgcattggatgattatgatgccatga

SEQ ID NO: 5695 - DNA, 435 bp, Triticum aestivum
  unsure at all n locations
  Clone ID: LIB104-031-Q1-E1-B8
gtaccggtcaagcaattcgcgggtcgacggggaagacgtggatgatgacgacgatgatgcagacgaagagtatgaggaggaggatgatttgggagaggagatcgatgaggagggtgatgaagatgacactgttgttgaggtacttgacgtgcccagtagtgatgatgaggaggatggcatcgatgaggatgatgatgatgatgaggaggaggttgaggatgatggtgatggtgaggaggctgagccagagagtagtggaagggttgctatggcggtggggggtgttggagaagagattgatggacatgagcaaggtgaaggtgatgatgaggatgagaatggtgagatcggagaggaagatgaggaaagattggaggatagtanggtttatgaggaggacaacgatgatgacgatgctgatgatgaggatgaaga

SEQ ID NO: 5696 - DNA, 377 bp, Triticum aestivum
  Clone ID: LIB104-031-Q1-E1-C10
ccgggtcgacgggtattaggatgccaggcccggctgatccctggaggatggaacgccgatcgatcgattggccgatctgttggtttcttgcgtccttcaattggttgtgtacatatagttttaacgtctgattcagggttggcaccgccatgtagaccatcgatcgttttagatctctacttattgattgattctttcttcaaaaaaaaaaaaaaaaaaaaaaaaaaaaaaaaaaaaaaaaaaaaaaaaaaaaaaaaaaaaaaaaaataaataaaaaaaaaaaaaaaaaaaaaaaaaaaaaaaaaaaaaaaaaaaaaaacaataaaaaaaaaaaaaaaaaaaaaaaaaatgggccccccaaaaggttccaggcctaa

SEQ ID NO: 5697 - DNA, 418 bp, Triticum aestivum
  unsure at all n locations
  Clone ID: LIB104-031-Q1-E1-C12
attcccgggtcgacggggtacagccgtgccgacggtcgtactcctccgtctctcggaggcggaagctcggcggcggcgagaggccgtagttggtccacttcctcgccccgtccgaccggacgcgccgctcgcgctcggggtcgcttccgctgtcggatctgctcccgaagctgcgtctggagctccacatgcggccccacatggtggctggaggcggaaggtggtcgccggcggcgagaaatgtggagaagggggtgggaattgcgtggctcggcggcagcgggggatagggtttcgacccgcaaacgcgtcgtggaacagtagatatagtggtcggggcgtgcggtttgcgggccgcggcaaattttgttacgggccggacgagtatgtgggctctgttctgancgaaaaattgggt

SEQ ID NO: 5698 - DNA, 447 bp, Triticum aestivum
  unsure at all n locations
  Clone ID: LIB104-031-Q1-E1-C8
aattcgcgggtcgacggggaggttgagaagctgattggcaggatagtgaagtggctgaagcccggtgggcatattttcatcagggagtcctgcttccaccagtctggggattccaagaggaaagtgaacccgacgcactaccgggagccaaggttttacaccaaggtgtttaaggaatgccactcctatgaccaagatgggaattcctttgagctttctctggtaacttccaagtgcattggagcttatgtgaagagcaagaagaaccagaaccagatatgttggctatgggagaaggtcaagtgcacagaagacaaaggctttcagagattcctggacaatgtgcagtacaaatccactggaatcctgcgttatgagcgcgtgtttggggagggttatgtcagcaccggtggattcgagaacacaanaagattttgtggacaacct

SEQ ID NO: 5699 - DNA, 350 bp, Triticum aestivum
  Clone ID: LIB104-031-Q1-E1-D10
gtgagtcgtattacagtacgaatccgtacgtatggaaactcggtggactatacggtcatgtgctggtggtactccgtagatcggactggagctctcacgatgaagatggcaacttcttctgacgtgtgttatatattggtgagtgacatgatatgatatgatacaatgcagctcaggatatcagcgtgtggtttatttcaacttctatgtgagtttctctctatttgtagcagtgagattagcacgtgtactcctttttgattaaatcatttttgatgtacatttcttttccattttttctatatgatatggtaggacatattctacacaaggatctaccttgcattttc

SEQ ID NO: 5700 - DNA, 419 bp, Triticum aestivum
  Clone ID: LIB104-031-Q1-E1-D11
attcccgggtcgacggggctgacaacgccgtggagggcgccgaagaggttgatcctgcgctagaggagacggtcatggaggagaccatccgcgtgacacgcgccaagctaaggaggcgtgccgccgccgaggcgggcgcgtgaagcctagctgcaaaccattgttttattggcgcatggtgttgttgctcctattttttgagtcttttttagattgtcatgttgtctggtggagagaatatctgttggtcatccaattggtcgttctgtttcagaagttgtcatccgttcctttcttctttcctgtggctctcgctggcctgtttatgtgcctggaagttgtaaatatcaccgggcatgtgtatatacagattgttggcatgtgctacgacctacgaatgcatctatcctactgctctc

SEQ ID NO: 5701 - DNA, 409 bp, Triticum aestivum
  Clone ID: LIB104-031-Q1-E1-D12
ttcccgggtcgacatcttcgtccacgggactggaagcagcagcaacatcaccggcctttgtaagtatctcaaggagaagaaccccaacgcaagggtgaagctcattttgtttctgttatgttaagatgtaaattagatgatcctgtgatgggtttgatgtgaaggttgtttgtgtgcttcagttcaaacacatctttggatgatcctgttatcttgttgcttatttattgtttaaatcacacagttcaatctttgtgttctctgtaatatgggagaaggcgtggaacagaggaagcgtgccacgtgaatggatccagaaccgtgtactgctacaaacgttgaaggtactctcttctcttctccccctttctttgttttgtgcgcacttgatggcttggttcggttcatg

SEQ ID NO: 5702 - DNA, 346 bp, Triticum aestivum
  Clone ID: LIB104-031-Q1-E1-E8
gctattcactatagtgagtcgtattacacttcccctgtggtactcagtacgatagcttgtacaggaccgacaccatctttcagctgaagttcgagcgccttcgcgacagctggcaaggctgtctgcatggatatgtacgcatattgtgtatcccatgtgtcgtgtcagacacactgatcataagcggcacgttgggtcagatacttcgatctgccgttccctttgagtgtgacaggatcttcctgtgtcctcgagacttgcatagagatgcatatgcagtaacgtgacgtgcaatcaccgacttagagtagtgtcagtctgttatcattgcatacctgcctaaatc

SEQ ID NO: 5703 - DNA, 430 bp, Triticum aestivum
  Clone ID: LIB104-031-Q1-E1-F1
cgggtcgacgggttctgttattgactgattctgtttttcgtgtgttgtttgcttattttgatgcatctatggctagtattaagtggtatgaaccatagagaacttgaaatacagtaggtttaacgccaacataaataaagaatgagttcattacagtaccttatgtggtggttttgctttctttcactaacggagcttatgagatttcttgttgagttttgtgttgtgaagtttacaagctttgggtaaagatttgatggactatggaataaggagtggcaaaagtctaagcttggggatgcccatggcaccccaagatattcaagaatagccaaaagcctaagcttggggatgcccccagaaggcatcccctctttcgtctttgttcattggtaacttcacttggagctatatttttaatcgccacatg

SEQ ID NO: 5704 - DNA, 446 bp, Triticum aestivum
  unsure at all n locations
  Clone ID: LIB104-031-Q1-E1-F7
attcncgggtcgacgggaatccctagcggatcttgttactcttgggtgtttgagcatcctagacggttgaggtcaccgcgaagccatagtccattgtggtgaagcgtcatggtgtcgttgggagcctccaattgagttgtggagattgccccaacctcgtttgtaaaggttcggtcgccgcctccaagggcaccaatagtggaatcacggcatctcgcattgtgtgagggcgtgaggagattacggtggccgtagtggcttcttggggagcattgtgcctccacaccgctccaacggagacgtacttcctctcaaagggaaggaacttcggcaacacatcctcatctccaacgcctccactcttggttgtctcgtgcctttacttgtggaagcttatttgtttcatatatcttgcttgcttgtgttcctatccgtgttgcatcata

SEQ ID NO: 5705 - DNA, 422 bp, Triticum aestivum
  Clone ID: LIB104-031-Q1-E1-F9
attcccgggtcgacgggaaaccatagcaaggcacgcaaacatcgtctggcagtcgcagcgattgtggaggactacgtgaacttgcccagccactcagaacaacgcgacgacgacttgatatcatcgccaggacgaccgggcttcatgtaagaccgtatcataattgccacaccagtgaatgatcatcgtctaactcccattacacttctgtgatcacctctcctctactagcaccgcagcagcagcagcaagggatggagtaccgaacgcagcacgaaggcagcgtctactcggacctcatggagacgttcttggagtaacaacgcaacgcatgcatgcatgcgtcgatcgatcatcctcactacgacatgcgtaccgactttatgttttcttgttcccaccttttgttttgttccaaccaa

SEQ ID NO: 5706 - DNA, 394 bp, Triticum aestivum
  unsure at all n locations
  Clone ID: LIB104-031-Q1-E1-G5
attcgcgggtcgacggggaccacaaagagaagaaggacaagaagaagaagaaggacaagaagcacggcgagggccacaaggacgacgacgaccaccacaacaccatcatcgcatcccattagcattctaccattttcctcggagagaagtagccagaaacagcagcgccatggccggcatcatgcacaagatcgaggagaagctccacatgggtggcggcagcgacgagcacaagaaggacgaggagcacaagaaggcggaggagcacaagaagaaggacggggagcacaagaaggacggcgagcacaaggagggcatgatggagaagatcaaggacaagatcagcggcgacggccacggcgacggcaagaaggacggcgagcacanggagaag

SEQ ID NO: 5707 - DNA, 412 bp, Triticum aestivum
  Clone ID: LIB104-031-Q1-E1-G9
attcccgggtcgacgggtacaatgacgtcaggaagcactcgtcggaggcctacgtgatcatgtccaatcggttgtcatccccagacccgacggagctcctcgagtttgccggcgggttatccaagaccgtcatcgacgtgcactactatgtgttgttcaatagcatgtttgatactttcaccgtgcagcagaatatcgatttcatcaagaccaactactcaagcgctcttagcactgtcacgaagcagaacggtcctctcacctttgtaggtgaatgggtggctgagtggcaggtgcccaatgcaacgaaggaagagctccaaatgttagcaaatgcacaaatggatgtgtatgggaaggcaacgtttggatgggcttattggactctcaagaatgtaaacaaccactggag

SEQ ID NO: 5708 - DNA, 373 bp, Triticum aestivum
  Clone ID: LIB104-031-Q1-E1-H10
gctaaaccctagagtgagtcgtattacattgttgcataaacggcatatgcgacaccttcatagaatgatccagaggagccggaggcaaccgcataggcctttttggaggtcttggcctcgtctatgaaacctctttatgcgggtgcgacaatatctcagctggatgccatctcgcaactgattgcagtcaaggctgagtacggctgtatccacatatgcttcgaagcattcctgggagtatgggctaacagcctccctgagggtcatgaactgccgataagcatgtacgatacaacgataatcatgaaggcactctctatggattatgagaacatatatgtttgcccgaataattgtcttttgtttatgcact

SEQ ID NO: 5709 - DNA, 311 bp, Triticum aestivum
  Clone ID: LIB104-031-Q1-E1-H11
attcccgggtcgacggacaaatggacagagaagtacaatctaggcgtcatcattgacctacatgcagctcctgggtcgcaaaatccctttgagcacagctcctccaaggatggctcacaagactggggcaccaacgacactaacatcgcacaaactgtgcaagtggtatatttcctcgcatccaagtatgccaaaagcccaagcctcctcgcaattgaaccaatgaacgaaccgttggcgcccggggtatccctgtgagagaccataaacgtattatagcgacaggtatacagtcctctcgagacacacac

SEQ ID NO: 5710 - DNA, 422 bp, Triticum aestivum
  unsure at all n locations
  Clone ID: LIB104-031-Q1-E1-H2
aattctcgggtcgacaggcaaacaaacttcatcttcacctgcaactaacaacgctataagaggggctgagcaaaagcggtgacatagccaaacaacggttgctaggacaagttggttagagggttgacatggcaataggtangcatggtaaacaaaggcaggcagggctaacataacgaaagagcgagtactagcaagcaaagatagaagtgatatcgaaggtatgatcatcttgcctgcaaggttctcagagttgtcgaaggctggatcctcgttagcgtactcaacaggttcctcgttcacgtactcgtctcccggctctacccaaaataagaacacaagcaaggaaccacaataaatcacggtgcaatgcacaggcatcatgatgcaaaacatgtcatgatatgcgagaggtgatatgc

SEQ ID NO: 5711 - DNA, 458 bp, Triticum aestivum
  unsure at all n locations
  Clone ID: LIB104-032-Q1-E1-A1
taccggtctagaattcncgggtcgacggggattatatttataaaacttgtcatgattatgattacccttttctgaacattactcttttaatgtggaaacaatttttagtgttcaagtcttttatgatactcttactattctgaatgggaagaattttgcttgtagatcatgaaaagaatgctttaggtgctggttatattattgaattcattcatgatgctacttaaaattattatgagtgaggaatatatgcttgtaggaattgcaataatatcaagttccctccccacgtgcttaaaatcttgaagctatgcttgttttaccttcccatgctagttgattattgttcccctaagttgtttgctcacaaaatccctattcataggaagtgggttaggcttaaatgtgctagtcatatgcttcatgatgctcccgttatgtttcaattcttaaccttt

SEQ ID NO: 5712 - DNA, 434 bp, Triticum aestivum
  unsure at all n locations
  Clone ID: LIB104-032-Q1-E1-A6
attcncgggtcgacgggggcttctatgagcaatttgacacaaagaaaaaatgtcacggagattgttgctcggacaacttctcgggcgaggaatgcaacgcaaagagccaaatcggtggggtgtttgacgctcttcgtgtcactgatgacctgttgatgaggagggcatattttaggaagcagcagcttgacaacaaaacaacatcacctaactctaactgaagaggacagccggtgtgatttgctcttacattgatatcgcatgcgtatgaataatggtccaatggaattgggagcggagtaagaagctcatgttgcctttatgcatgtaataatcatgcctgcctgcatggcccgctagctgttggtccaatgcctggctgcctgcctgaactggcgtcaatttccagtttgtttttgtaatatataataact

SEQ ID NO: 5713 - DNA, 380 bp, Triticum aestivum
  Clone ID: LIB104-032-Q1-E1-A8
gacgcgctggtcgttgctacaccctatagtgagtcgtattagccgaggcgaatgaagacgaagcggcgtcctccaacgataaggacatctaggagatcaacgtggaggatgaccgtagtgtcgccagcgccgctgcctccgtgggcgtagtcaccaaggaggatgacagtatcatctcggccgatgctccggcgatagagaaggaccagatcgacacgttcgtgcctgcaccggcagtcaaggccaacgaggatgccggtgccaccttcctggctgccccggtggccggtgatgatgccagtgcctccttcgttgctgcgccggggcgcatcgacgacgaacttgtgtccatctcgtctgctccgttggtccgggacatt

SEQ ID NO: 5714 - DNA, 199 bp, Triticum aestivum
  Clone ID: LIB104-032-Q1-E1-B10
ggtcgacggcgttcaaaaaaaaaaaaaaaaaaaaaaaaaaaaaaaaaaaaaaaaaaaaaaaaaaaaaaaaaaaaaaaaaaaaaaaaaggaaaaaaaaaaaaaaaaaaaaaaaaaaaaagcggccgctcaaaaggatccaagctaacgtacgcgtgaatgcaacgtcaaagcccttcaaaagggtcaccaaaattcaatt

SEQ ID NO: 5715 - DNA, 396 bp, Triticum aestivum
  Clone ID: LIB104-032-Q1-E1-C10
gggtcgacgcggcgggtcattgggtgcgtcggatatggattccctttcgactgcctccaccccccgtgccacgaacgatgctgaggtgggatcccaggaagggatccaccatgaggaggaggccccggaggtgtcacaggacaaactcccggactttgcactggactcagccccggagcccacagtggctccggagtccggtgggcgaccccttcgtaagaagggcaagaccgtgacgccggctgcctccatccaaccggaggtgccggataatttgctagaggcgctcaacggtgcctccatcaaagaggaacaccgcactgttatgagtgcggtgattcagaaggttcagctcgccaagagcaagctgaccgaagcctgcagcagccttctaac

SEQ ID NO: 5716 - DNA, 374 bp, Triticum aestivum
  Clone ID: LIB104-032-Q1-E1-C8
ccctatagtgagtcgtattagttgatcctgctgaaaatcagaaacttttgcgcccagtaaattagttttgataattcacagaaacgtggttttgatctgattcattttgctctggatcggtacacacattgctcaggttttcctaatttggtaggatttttggagttacagaagtattcgagagttacaaattactacagactattctgtttttgacatattctgttttctatgtgttgtttgcttactttgatgaatccgtgagtagtatcggagggtatgaaccatagagaagttggaatacagtagatattacagcaatatagaagatcaatgagttcacaacagtaccaaccgtggtgatttattttctt

SEQ ID NO: 5717 - DNA, 452 bp, Triticum aestivum
  unsure at all n locations
  Clone ID: LIB104-032-Q1-E1-D3
gggtcgaggggcagtgtcagtagacgtcgctaggtggtctgcggacatgattgcattttttatttctgatgtgctttatactaccttgatagttgatgaatagatctgaagttttttcaaaaaaaaattaaaataaaatcttaagatgttgtgccgacccatctcgaaggtgctcatagggtaaaaaaaaatatattatcatactactcccttcgttcctaaatatttgtctttctaaagatttcaacaaatgattattccctccgttccgaaatacttgtctttctaggcatttcaaatgggcacaacatacggatgtatgtagacatttagagtatagattcactcattttgctttgtatgtagtcacttgttgaaatctctagaaagacanatatttgggaacggagggagtacatgtaaagcaaaatgagtgaatgtatactctaaaa

SEQ ID NO: 5718 - DNA, 328 bp, Triticum aestivum
  Clone ID: LIB104-032-Q1-E1-D5
accctatagtgagtcgtattacgcgagctgagcaccagatcaaatttcaactttaccggctcagtctcacaaagacgttcataacagtgagtacatatatgcgtacatgttctgaggaaaaaactcacagctccgaataaaacttgaccaagagttgtaaatactccaagttgctagctgtgatgcatgaacgctacgtggtagtcgatccaatgacctggttcagcggtactctgatcggctatgacatccgcggccggcccgtcttgacagccatcactccacgccatcgatggtgtcatgcacatccgatacaaaggagtgatac

SEQ ID NO: 5719 - DNA, 447 bp, Triticum aestivum
  unsure at all n locations
  Clone ID: LIB104-032-Q1-E1-D6
attcccgggtcgacctccgcggacaaggtgcagcgcatgatggcggagatcgacaccgatggtgacggcttcatcgacttcagcgagttcatctccttctgcaacgccaacccggggctcatgaaggacgtcgccaaggtcttctgaatcagttcatttcacctcagccgtccgatccaggagccgatccatctacgtacggcttcgtatatcaatttcatgcaactacctactccggtcccgatccagcctcagcttcacctgaggccggccctaattttgtttgatcaatttttttgctactagtagtaactagtgatgatcactgttgcaccatttatttattttatatcgtcacaactttccagtgtttcttttctttctctacctttttgtcgatcgtcggctccagctcgatcgaacgatccatgctgctaattgtntgtg

SEQ ID NO: 5720 - DNA, 352 bp, Triticum aestivum
  Clone ID: LIB104-032-Q1-E1-D7
ctatagtgagtcgtattactgtctgactctgcacgtatgggagctagttcaacaatatgaacatgtgccggtggttcaatgggctaggacagccgatctagcatgtcttcacaatagtctcattctttcatgctaatcgtatcacacgcttagggagcgcataagctaactgggctcaagtatctcccaatcagcataattaacgcccatcgcccttttgaaattaggacttaactactcatgccatatgcatgcattttgatagacagtgtttattgatctctctctcactcactctctctctctctctcactctataattagctcacatcgtcatagaattgacatgttt

SEQ ID NO: 5721 - DNA, 335 bp, Triticum aestivum
  Clone ID: LIB104-032-Q1-E1-D8
tgtaacaccctatagtgagtcgtattacagacttcatcgacaaggacaggatcatgtacaagacctcgatgatgacagccctcctcgggcggagcttcggaacaggccctaagacgggatctcgtggatacagaacgttgcagtggtggaattacatttgtggctccatatctgttcgtttgggggtacgtaggtatatatcggaggaagaagtatgtccgtggagctctgaggggcccacgatgcaagggggagcgcccgccatcctcttgaccgcctcttttgttccctgtcgtaaggtctacgtctcctgcatgacgttcagtgagaacatc

SEQ ID NO: 5722 - DNA, 145 bp, Triticum aestivum
  Clone ID: LIB104-032-Q1-E1-E10
atagtgagtcgtattagatggtgaagtggctgaagcccggtgggcatatctccatgagggagtcctgcgtccacgagtctggggactccgacacgaaagtgaacccgacgcactaccgggagccaaggttttacaccacggtgtc

SEQ ID NO: 5723 - DNA, 390 bp, Triticum aestivum
  Clone ID: LIB104-032-Q1-E1-E11
gggtcgacgggccggctgaagcgagcgagccgtccggtggctatttcggctggctgcactgctgcatcccggtctgggaagtgatagtcatggccgtggcgagcatcgcgggcttcctggccgggtttcttcttcatgatgcagtcgacaagatgagcaacaaggccaatttatctggttaagtttatctggttacactagtagtgaatagtgctctagaattatggttgtggtgtttagctcagcatatatatatatatattgctgaaagcatgtcgatcgatcgcctgtcgtggcatggcacgtactcttctgccggagttaagtacgtgtgagttcctgtgtttggttcatgtgctacagcttaaattgcgtagcatgatttagtgt

SEQ ID NO: 5724 - DNA, 65 bp, Triticum aestivum
  Clone ID: LIB104-032-Q1-E1-E5
cctatagtgagtcgtattaagtactacccagattggcagacgacacgagtgaaatggttgcttta

SEQ ID NO: 5725 - DNA, 292 bp, Triticum aestivum
  Clone ID: LIB104-032-Q1-E1-E7
tactacaccctatagtgagtcgtattaagtagaacttggtttgaataagttcttgaagtacatgattgcattattatgcagacgagtatgaggaagttctctgtaggaattttatgtggatgaagtgttcgactaatcaaaagagtctcaatatgagaacaaggaagaaaagcatgaagatcaagattgggatgcacacggcaaccaaggtgaatatgcagaggtactcaagcatcaagacatggagatgaagaagaaggcgtcgactcatacgacgacgaataacaataag

SEQ ID NO: 5726 - DNA, 390 bp, Triticum aestivum
  Clone ID: LIB104-032-Q1-E1-E8
cccaatagtgagtcgtagtattggttgtctgaacctgatggatatgaataaagttgtagcatacattcaaattcaaacatgcacacagtttggaaaagcagcaattaaattgcggtgaaattacgctctccaggctgtcacggcacacatggttggtaaaatacaaacatttgcgatttgcaccataatccgagacggttcacagacaggaaacgtttgcaagcatgcacacagttgccgtttgcaaagcatgtgctatgtcagacaatatcacaaacggtgcgggcaaactaaacgtttgtgttagttgccttatcgtacacgattcgcaaccatgaactgtttctgatgaagtatgcatcgtaaacgttgcaccacagaatagcgtgt

SEQ ID NO: 5727 - DNA, 269 bp, Triticum aestivum
  Clone ID: LIB104-032-Q1-E1-F10
cctatagtgagtcgtattacacgatcaaccttcttatgaatattaccactgtgtctgtcatacgtcttgtctattaatgaacatctcatcattggcctactgctctttgcatgatcatgtagatgtcatcgtacttgtagtatggccaacttcatgattttcatacatgtcgctcttgattcattgcattgcccggtgaatcgcccgatgcattcatatatagtcatatcttgttctagctttgggttgttaatccgtaaaagtgtgtt

SEQ ID NO: 5728 - DNA, 398 bp, Triticum aestivum
  Clone ID: LIB104-032-Q1-E1-F4
acaccctatagtaagtcgtattatgacgtacaaaacttaaactgcagctaaccgcatgcatgtttcacactaagctgattcttttgctacatagctcagtaaaagtgaattaaaccaccttctttttctgacagtcaataattagatgcaagggcctcttgctaggtttagttagacttaatgcaagtgtctcttacttttatttcaaggttggtgctatttttcgaagcaaacttccaagttctgcatactaaatagtctgatcaagtaactaaagtgtcctaaatacgtagcaaagtgggccagttcgcttctgtgacgatacaacacatcctggatactagtaaatatcattagtgccttctctttgtccagtttgtggacttatagaatttgag

SEQ ID NO: 5729 - DNA, 423 bp, Triticum aestivum
  Clone ID: LIB104-032-Q1-E1-F7
attcccgggtcgacgggtgctgagagccagaccacagaggaagaacttgaagtgtacatgcagaaccacaaaaaagttatggttgattccttgtggaagcttaatgttgctgacatagaagccaccatatcacatgtctgccagatggtgcttcaggaccccttggccaggaaggatgacctgcgtcttcgtgccaaaggactgaaaactttagggaaaattttccagggtgttaagctcaacagtggtgagggggaagggtcgcacatgaagaatatagataacatggatgacaatgccggtagctcccctgattcgtcaccaaaacgggagccatcattcaatcccattcctaaccctcctcttacccagagtccatatgtggaggctccccagtttggcggaacctattgttcgttcaac

SEQ ID NO: 5730 - DNA, 385 bp, Triticum aestivum
  Clone ID: LIB104-032-Q1-E1-F8
atagtgagtcgtattaaagaacctgagtcgtgaatgcagaagcacacaatggttacggttgattccatgtggaagcttactgctgctgacatataaaccagcatatcacatgtctgccacatggtgcttcaggagcccttggccaagaaggatgacctgcgtcttcatgccataggactgaaaactttagggaaaattttccagggtgttaagctcaacagtggtgagggggaagggtcgcacatgaagaatatagataacatggctgacaatgccggtagctcccctgagtcgtcaccagtacgggagccatcattcaatcccattcctaaccctcctcttactcagagtccatatgtggaggctccccagtttggcggaacct

SEQ ID NO: 5731 - DNA, 451 bp, Triticum aestivum
  unsure at all n locations
  Clone ID: LIB104-032-Q1-E1-G1
gggtcgactctttctacaaagaattaatcaaggaaattcaacaatacagccagcaggtttggtgttgtcccatgtacgatcactgggtgtgtttggaggttttgtggaaatcccttctctggaggaattcaaacatctgtgtgttctccacttgagccattgccaatcattggaagaacatcatcttgagaatatagtgaggttgccccagctaaggtacctgaacctcaaaaatacagaaataaggaagctcccagaacaaatcgggcgtttaggttgcctagagttgttggacctaagacacacttgtgtagaggaattgcctgcatctattgttaatctcaaaaaattgacgcatcttcttgttgactatggtgttaaatttcctgatggaattgangagatgcaagcattggagacattggaagaggtcaggttctccaaaacaaca

SEQ ID NO: 5732 - DNA, 445 bp, Triticum aestivum
  unsure at all n locations
  Clone ID: LIB104-032-Q1-E1-G2
tcgccattggaaccctaacaattgtactggctcctactcagaatagtgcaataagaatgttccatgctagcctcttgtatcttcctgctttgatggctggacttatattgcatcggctgcccaacgaacataacgagcataacaacattcatcacactagtgagatcgctggggttctccgcggcgccgatctgtgggacgaagaagaaagagctagacagaaacaggaagacctgaaacattctcgtcgtgctcaatcacgccctccaattgcctatgcttctgtaaccccattccccttcttgcctgtgcctgtgtacgtctctccagaagctcatgagttttgaaaatcttgtcncagcagccaaagctgcaatggtttcatcttccttcctttttgtctgttgtcagaaaattcttttccgctcttgacaggaaattttac

SEQ ID NO: 5733 - DNA, 443 bp, Triticum aestivum
  Clone ID: LIB104-032-Q1-E1-G7
attcccgggtcgacggggcaatcgacgccttcgtctccggcgccaccgtctatggctacagaggaaagagcattaagtctgccctcattggtggttctagcctggcattcacatctgccatcctggacgttggtggtaatactaccagagtggacaatggcaaagcgtaccatgcatacacaacggaaaagaagcccgagcctgcgcattgaccaaggttgtttacttgtagcacaaatcatgcaaaccagctcggtgaatttttgagctgatgcgtgctgttatgtctgttttgctgatgcacctagttcctttgcaaagctgtagtaacttgttttgctcgagggcaatacaacagacctggaataaatatcttgttttattttgcttcatcattggttatgataataatcacatgtgacacaatattgttaccccaaccc

SEQ ID NO: 5734 - DNA, 413 bp, Triticum aestivum
  Clone ID: LIB104-032-Q1-E1-G9
ttacaacaccctatagtgagtcgtattatgactcctgtcagcaaatgttcagtggtggtacatatggtacatgtgaagttatcatagacatcagtggtggcatagaatcctatgcaagtattgctgcggatggtatcggaagcggagcgctcttgatggcaatgaagtaccatgtcagtatatcaaatagtcctttgtgggattacatgccaatggttttctacatctgatcatctccgaaatttttgcaccgtacttcagccatgttatgccgcgtttcatcttttgcttgtaaagatagtacatcaaccctttatgtgggaaaagccgatagtggttagatgctgtgtagaaaataggcatacagggaacctaacaacgacattttccgcatcacggtctattccttgcag

SEQ ID NO: 5735 - DNA, 412 bp, Triticum aestivum
  Clone ID: LIB104-032-Q1-E1-H5
attcccgggccgacgggcatcttcaaggccgtagctccgaatttaatgaactttgtatgtaacatgactagaatttcgtgtagatcatcctggtgcatcttaacttgctgtttaacaacttgtacataatacttattcagatctggaccaatttcgaaatttgcttatgaggacttacccgatttgttacatgttgtttccggcctcatttaaacttgctttgatgtgttgctctagtatgtatcatatcttgccatgagtagcgtaaaatagcctttgtcatgcatcatgcttggttgtgcatcttgtcatgtttatgtgttgtgtgtttaccatgtggtttgctcctttccggttgtgcttcttctcgatagttcctgtttcgttgcgatcgtgaggattcgttctacta

SEQ ID NO: 5736 - DNA, 435 bp, Triticum aestivum
  Clone ID: LIB104-033-Q1-E1-A8
gtaccggacgtagaattcgcgggtcgacggggatttagaaggtactaagtaaaccacacctacatatgcaaactaagtgttgttttgacctcaaattgcatataaatcaaatactaccacatataattcctcccaaattactaaaacccacaaattaatcactatataaaccattgcaagagctaatctagcaatgagagatgaaaagacaaagttgctaacctttgtgaacatttgaatggatgggggccttcaaatcttgacaaaatttgggcagaatgtgtgatgagctcgaggaagaagggaagaacagagcacgggtggacgaagggtttatataggacggcctttagtaccggttcgacgcacgaaccggtactaaaggtgctggaggggccccagactgacaacatcctgccaccactctctttagta

SEQ ID NO: 5737 - DNA, 456 bp, Triticum aestivum
  Clone ID: LIB104-033-Q1-E1-B12
gtaccgatcccaaattcgcgggtcgacgggctgaacttaatgctggtgacgagaaaattagagagttgatatcagttttagaccaaaggaaggatgaatcaattgaacgcacatttaaaggagttgcaaggcacttccgcgaagtgttctctgaattggtgcaaggtggccacggatacttggttatgatgaagaaaaaggatggtgatgctggcgatgatgacatggatgaggacgcgcctcgtgaagcagatcctgaagggaggatagagaagtatattggtgtgaaggtcaaggtttccttcactggcaagggagaaactcagtccatgaagcagttgtctggaggacagaagacagtggtggcattaacactgatcttcgctatccaacgatgtgacccagctccgttctacctgtttgatgagattgatgctgctctggatcctcagtaca

SEQ ID NO: 5738 - DNA, 442 bp, Triticum aestivum
  Clone ID: LIB104-033-Q1-E1-B5
attcccgggtcgacgggaggcacccatagaggcaacaattcagtcaattcttgaaatgggtggtggaacatgggacagagacactgtgctgcgtgccctacgtgctgcattcaacaacccggagcgggctgttgagtatttatattctggtattcctgagccgatggagattcctgcaccaccaccaagtgcccagccagctgatcctgccctggcttcgcaagcagctcaacctgcagttgcctcttccggtcctaatgctagccccttggacctcttccctcaagccctgccaaatgcttcagcaaatgctgctggtgaaggaaatctggatgttttgcgtaacaatgcacaattccgaagcttactttctttagtgcaggccaaccctcaaatcttacagccattgcttcaagagctgggaaagcaaaaccctcagatt

SEQ ID NO: 5739 - DNA, 450 bp, Triticum aestivum
  unsure at all n locations
  Clone ID: LIB104-033-Q1-E1-B8
gtaccggacntgaattcgcgcgtcgacggggcgtattgaattatttgagtctttatttgttagttttccacaatcatccttgctgcacacccctttttgagagagacacacacgattcggaaattattagaatactctatgtgcttcacttatatcttttgagttatatagtttttgctctagtgcttcacttatatcttttagaacacatcggtggatttgttttatagaaaccattgttctctcatgcttcacttagattattttgagagtcctacaaacagtatggtaatttgctttaattatttgaggcattcaagattaaataaataaatttttcttatgagtgtgttgaatactatgagaagtttgaaacttgataattgttttgagatatggagattgtgatattagagtcgtgctagttgagtaattatgaatttgagaaat

SEQ ID NO: 5740 - DNA, 442 bp, Triticum aestivum
  Clone ID: LIB104-033-Q1-E1-C12
attcgcgggtcgacatcctcaaggcaggcaatgtcctccctggcatcaaggtggacaagggtaccattgagcttgctggaaccaacggtgagaccactacccagggctttgatgaccttggcaagcgctgcgccaagtactatgaggctggtgcccgcttcgccaagtggcgtgcagtcctcaagatcggcgccaccgagccatcgcagctctccatcgaccagaacgctcagggtctggctcgctatgccatcatctgcctggagaatggtctggtgcccattgtggagcctgagatccttgttgatggacctcatgacattgaccgctgtgcttacgtcaccgagatcgtccttgctgcctgctataaggccctcaacgaccagcatgtcctcctcgagggcactctcctgaagcccaacatggtcacccctggttctga

SEQ ID NO: 5741 - DNA, 411 bp, Triticum aestivum
  Clone ID: LIB104-033-Q1-E1-C7
taccgatcctagaattcccgggtcgacgggatcccggaagtcacgaggagttccggaatggtccggaggtaaagaattatatatgggaagttgagtttcggccattcggaaagtttcggggttcaccggtactgtaccgggaccaccggaagggtcccgggggtccaccgggtggggccacccatctcgaagggccccgtgggctgaagtgggaggggaaccagcccatagtgggctggtgcacccccctggtccccccctctgcgcctagggttgggaaccctaggggagggggcgcctccacttgccttggggggcaagtctccccccttggccggcgccccccctaggagatcccatctcctagggccggcgcccccctggggtccctatataaagaggggggttgga

SEQ ID NO: 5742 - DNA, 432 bp, Triticum aestivum
  Clone ID: LIB104-033-Q1-E1-D11
gggtcgacggcacagtggaactctcaatgaaagcaccaatgtcggtgtcaaaaccggcggatctcgggtagggggtcccgaactgtgcgtctaggatcgatggttacaagagacaggggacacgatgtttacccaggttcgggccctctctatggaggtaataccctacttcctgcttgattgatcttgatgaatatgagtattacaagagttgatctaccacgagatcgtaatggctaaaccctagaagcctagcctgtatgactatggtaatgtgtatatcctttccggactacaccccccagtttatataaacaccgggaggatctagggttacatagggtcggttacataggaaggaatcttcatagttgatcgctaagcttgccttccacgccaaggagagtcccatccggacacgggtacagtctt

SEQ ID NO: 5743 - DNA, 410 bp, Triticum aestivum
  Clone ID: LIB104-033-Q1-E1-E4
cgggtcggcctccgcggacgaggtacagcgcatgatggcggagatcgacaccgatggtgacggcttcatcgacttcagcgagttcatctccttctgcaacgccaacccggggctcatgaaggacgtcgccaaggtcttctgaatcagttcatttcacctcagccgtccgatccaggagccgatccatctacgtacggcttcgtatatcaatttcatgcaactacctactccggtcccgatccagcctcagcttcacctgaggccggccctaattttgtttgatcaatttttttgctactagtagtaactagtgatgatcactgttgcaccatttatttattttatatcgtcgaaaaaaaaaaagtcaaacgaaagaaaaaaagcgggcgctctagaggattcaagcttac

SEQ ID NO: 5744 - DNA, 187 bp, Triticum aestivum
  Clone ID: LIB104-033-Q1-E1-F4
gggtcgaccgggataggtaattcaagtcagcggaaagcaacaatcatcaggcaaacatggacatatgactgttcacaaaataaagttgtacaaaactaaaaaaacattcgggtgctcgacatgatccaatcttatctatgcttgcatgcaacattagctcgcttccacagtgtcacacatgataatt

SEQ ID NO: 5745 - DNA, 432 bp, Triticum aestivum
  Clone ID: LIB104-033-Q1-E1-F6
attcgcgggtcgacgggttcttattgttgaaaataggaattatgtgcccgtagacttcgttgttctcgatatagattgcaatcatacttgtcctattattcttggtaggccttcccttagaacgattggtgcaattattgatactaaagaaggaaatattagattccaatttccattaaggaagggcatggaacactttcctaggaagaaattaaattaccttatgaatctattatgagagccacttatggattgcataccaaagatgataatacctagatctactcttgtttttatgcctagctaggggcgttaaacgatagcgcttgttgggaggcagcccaattttatttttgcttcttgttttttgtttcccttttagtaataaataaatcatctatcctctgttatgattgtgtttcttatgtttta

SEQ ID NO: 5746 - DNA, 440 bp, Triticum aestivum
  Clone ID: LIB104-033-Q1-E1-G10
gggtcgacggcgtcaaggcaaagatccacgacaaggaaggtatccagccggaccagcagcgcctcatcttcgcggggaagcagctcgacgatggccgcaccctgaccgactacagcatccacaaggagtccacgatccacctcgcgctgcgcctcgtcggcggtggcaagggcgggttctaccccaccaggatggagcctaacctgcgcatgctcgcgctcaagtacaggcagcacaggcttgtgtgccgcaagtgctatgcacgcctgcccctcaggtctgccaactgccgcaagaagaagtgcggccacagcaatgacatcaggcccaaggagaagctgcgcccccactgaagcgttggaaacataactaggtgacatgcgatagctggattaactgggaattcaaagttcggttcgagtcttaatttcagttaaatg

SEQ ID NO: 5747 - DNA, 439 bp, Triticum aestivum
  Clone ID: LIB104-033-Q1-E1-G12
attcgcgggtcgacgggcaaggaggatcaccttatatttacccattgtatgggttgggtgagctgccacaggcttttgcacgtctaagtgctgtttatggtggcacttatatgttaaataagccagagtgcaaggttgaatttgatatggaggggaaagtgtgtggtgttacgtcagaaagtgaaactgctaagtgcaagaaggttgtctgtgatccttcttacttggccaacaaggtaaggaagattggaaaagttgcacgagcaattgctattatgagccacccaattccaaatgcaaatgattcccactcgattcagattattttaccacaaaagcaacttgggcgcaagtcagacatgtatgtcttctgttgctcgtacactcacaatgtcgcgccaaaagggaagttcattgcatttgtgtctgctgaagcaga

SEQ ID NO: 5748 - DNA, 196 bp, Triticum aestivum
  unsure at all n locations
  Clone ID: LIB104-033-Q1-E1-H7
attcgcgcggtcgacgcagctcacataaatcggcggccgctctgagagggattccaagcttacgtttacgcgttgcatgacgaacgttcatgagctcccttctgatagtgtcnnacctaaattcgaattcacntnnggccgtcagttttacanacgtctgctgactgaggaaaaannccctggcgtttttacccaa

SEQ ID NO: 5749 - DNA, 440 bp, Triticum aestivum
  Clone ID: LIB104-034-Q1-E1-A10
attcccaggtcgacgggtcggctgcatgcatggtctggcctccatccacgtctgatctggccgatgcggcctgctcgctgcgcgacggcggagatcgatggcagtcccgtgcacacgatgctggatggaggttcgtcgagcagatccgggtgaaaaccttgctctgggctagttgccaaggccggcaatggaaacgctcttttgtgtcgcccccttcttgaaggcatcgacatggagaagctccaaacctctatccgctacctccagggaaaaccctacaccagtcgattggatgatgtcggcgctcttgtgtcgtcctccctgggggcatcattcttggaggtgtgcattggctcgagggaccagtggacggtttcaatggtgaagcagcatttcatgtgacacatcaacgacgtggagtcttggcggcatggtgctgc

SEQ ID NO: 5750 - DNA, 421 bp, Triticum aestivum
  Clone ID: LIB104-034-Q1-E1-A4
aattccagggtcgacgggccaggaacattgataaacttttggttgatgttgattctcttaaacttagatcttctcctcctaagcatgatatcaataagtctctcaaagtaatgggaatttccattgatgagtgtaaggaaagaaccgctagattgcgtgctaaaaaagatagctttataaaagcgtgttcttctagtttccatgaaaataatgattaggatcttaaagttattgatgcgtctcttattagatctatgttttgcaatatgaattttgatgattatgggactgatgatgaatcaactttgcctataaggcgtcccaagaattcggagtctttagattttgatgcgaaatttggtaaaagtgagattggagaagtcacaactttaaataatattgaacccactagctcggaatt

SEQ ID NO: 5751 - DNA, 431 bp, Triticum aestivum
  Clone ID: LIB104-034-Q1-E1-A6
tacggtccagaattcccgggtcgacgggatcatccatgctgtacacaccttttgagagagactcacacaattgggaatttattagaatactctatgtgcttcacttatatcttttgagttatatagtttttgctctagtgcttcacttatatcttttagagcatggtggtggttttgttttatagaaactattgttctctcatgcttcgcttatattattttgagagtcttttagaacaacatggcaataataaaaactttcatacaagtgcattgaatactatgagaagtttgatacttgataattgttttgagatatggagatggtaatatcagagtcatgctagttgagtagttgtgaatttgagaaatacttgtgttaaagtttgtgattcccgtagcatgcacgtatggtgaaccgttatgtgatg

SEQ ID NO: 5752 - DNA, 417 bp, Triticum aestivum
  Clone ID: LIB104-034-Q1-E1-A7
cgggtatcagcaactccggcaagttctgcagggccacaagaggccgatggtgatggcgacgtgatcagccaaccagcagcttgctggatccttctctctggatgcctaaaatcagtatgtccatgtaatgtaaacatccctttccctttcccctttcttcatgtagcttcggtctactccttagtagtcctggtaaaagcttgtgctctgtagttgcttcagctactggtaccctatgatgtgtgtggtgtaatatattatggatcattgtggcattcctttttcaatcaatctgcctgttgccgcgagtctgaagatgatcgctgtgtttgttctctcaaatcctgacgaacttgattgctgaaaaaaaaaaaataaaaaaaaaaaaaaaagcggccgctctaaaggatccaagct

SEQ ID NO: 5753 - DNA, 451 bp, Triticum aestivum
  Clone ID: LIB104-034-Q1-E1-A9
taccggtccagaattcccgggtcgacgggataaaatagcggtagatcgatagatgcaaataacgacaaataaaactcagcgaggtattttttgggtttttgataatatagatctgaaaataaaagatgcaaataaagaaaaaggcaaatagcaatatagatctgcaaatatatgatgggaaaatagacccgggagccgtagatttcactagtggcttctctcaagaaatagcatatgatgggtaaacatattactgttgggcaattgataaaacatcgagtaattatgccgatatccagacaatgatcattatataggcatcatgttcaagattagtagactgactcctgcctgcatctactactattactccacacatcgaccgctatccagcatgcatctagtgtattaagttcatggaaaacataataatgcaataagaatgatgaca

SEQ ID NO: 5754 - DNA, 411 bp, Triticum aestivum
  unsure at all n locations
  Clone ID: LIB104-034-Q1-E1-B12
attcncaggtcgacgggtgctcaaagatgttgataagctcatcaggaggaaccgcaggaacgacctcttggtcgctggtgctggcttaagttttggagggattgtcatgtcatatttggctcgactcaccagtcgaagtgatgactggctcaccaagtgaaatgatgaatgtaaatctatcctgcactgcaagtttaactgtctatcctgcactgcatctttaactggccagttgtatgattcctggcttgtcttgtgtgagagcactctatatatgatgagggttctatgttcggtggaatctacttgtgatgagaatttaagttctgtgatggcatgtgagatgtaagagcactcatatatttatgtggatcctatatataaccgggtgatttatctattgtgttctgc

SEQ ID NO: 5755 - DNA, 420 bp, Triticum aestivum
  Clone ID: LIB104-034-Q1-E1-B2
attccagggtcgacctccgcggacgaggtgcagcgcatgatggcagagatcgacaccgacggtgacggcttcatcgacttcagcgagttcatctccttctgcaacgccaacccggggctcatgaaggacgtcgccaaggtcttctgaatcagttcatttcacctcagccgtccgttccaggagccgatccatctacgtacggcttcgtatatcaatttcatgcaactacctactccggtcccgatccagcctcagcttcacctgaggccggccctaaatttgtttgatcaattcttttgctactagtagtaactagtgatgatcactgttgcatcatttatttatttattttatatatcatcacaagtttcctgtgattcttttctttctatacctttttgtcgatcgtcggctccagct

SEQ ID NO: 5756 - DNA, 425 bp, Triticum aestivum
  Clone ID: LIB104-034-Q1-E1-B5
ggtcaagaattcccgggtcgacctccgcggacgaggtgcagcgcatgatggcggagatcgacaccgatggtgacggcttcatcgacttcagcgagttcatctccttctgcaacgccaacccggggctcatgaaggacgtcgccaaggtcttctgaatcagttcatttcacctcagccgtccgatccaggagccgatccatctacgtacggcttcgtatatcaatttcatgcaactacctactccggtcccgatccagcctcagcttcacctgaggccggccctaattttgtttgatcaatttttttgctactagtagtaactagtgatgatcactgttgcaccatttatttattttatatcgtcacaactttccagtgtttcttttctttctctacctttttgtcgatcgtccgctccagctcga

SEQ ID NO: 5757 - DNA, 417 bp, Triticum aestivum
  Clone ID: LIB104-034-Q1-E1-B6
ccgggtcgacgggacagtcaaaaacatgcattaagattaaccaacaattagtgcaagcatgagtaggatataaatcaccaagaatataaatatcgtgaaggctatgttgattttgtttcaactacatgcgtgaacatgtgccaagtcaagccacttgaatcattgaaaggaggataccaccctatcataccacatcacaaccattttaatagcatgttggcacgcaagataaaccattataagctcctagctaattaagcatggcatgagcaactataatctctaattgtcattgtaaatatgttttcatccgtaataagttgaatcaggaacaatgaactaatcatttttacaaaaacaagataggtcgagttcataccagcttctctcatcttaatcatttcatcatatatcgtc

SEQ ID NO: 5758 - DNA, 455 bp, Triticum aestivum
  Clone ID: LIB104-034-Q1-E1-C10
attcccaggtcgacggggcggcgggcggcgctagggttgggccgcgggtggctggcttcggctgggcctccccccggcttataaagcctagtgggccgggagtccgagtcggacacgacccctaggtcggttagtttttttttaaattattccgctcggaagaaaaataaaaagaaatactaaacggactccaaaaattccgaaataaattttcacgggcttctaaaatcaagccgcacaaggtgaacatttatttgggacctaaatgcaatttcgaaaaacgcacatttttcctaaattcaaataaaacaccaaaaaaatcttatttgatttttattattaaatcctcaatatttctttattttgggaaagtcattttattccctctctcatatttttgtaatagaaataattgatgataaaataaataaaatgaaatgattctattctcaaaa

SEQ ID NO: 5759 - DNA, 431 bp, Triticum aestivum
  Clone ID: LIB104-034-Q1-E1-C5
ggtcaaagattcccgggtcgacgggaacccgaaagtgtacgcgagcctccttggggttctgtggtcttccgtggcaaacaggtggcacctggagatgccagacattatagatggctcgatttcgatcatgtcaaggaccggccttgggatcggaatgtttaacacgggcctgttcataggtctacaggacaagctcgtcgtgtgccggcctggacttacggcgttgggcatggcgatgaggttcgtcgctgctccggcagccaccgcggtcggagcgctacttttgggactgcgtggtgaccttttgcgtgttgccatcttacaggctgcactgcctcagtctgtcggagcatttatcttcgcgctagagtatgacctgcacgctgatgtactcagtaccgtggtaatagtcggcacgctggcttcgctgc

SEQ ID NO: 5760 - DNA, 450 bp, Triticum aestivum
  Clone ID: LIB104-034-Q1-E1-C6
aacggtcaacaattcccgggtcgacggggtatcttagtatgctaagggtgtttataattactatgatgttcaacaaattgaggaatttgttgcttttaagggtgcttatgaaattgcttctttgattgaaaagtatgatgctactctttacaagtatgaaaattttgccatagttaaatattgctatgataattatgcttctaatgcctatgttaaaccttatatcaaggtctactccgctgtccaagaagagactaatattttgcaggagtctatgcaagaagaaattgatgagactgtgagctcattggatgaaaaagatgatgaggagagcaaagaacagaaggaggaagagcggattagctacccgtgcccaacttctaatgagagtaactcttcaactcatacattgtttaataacccttcgtgcttatcgaaggattaatgcca

SEQ ID NO: 5761 - DNA, 401 bp, Triticum aestivum
  Clone ID: LIB104-034-Q1-E1-C7
gggtcgacggggaggagcgagcagccgcgacgagtgcccctgctaccgcgacatgctcaccgccgggcccaggaagaggcccaagtgcccgtgatcctcgtcggtcgaccgtctgaacggaccaccggcttcaacccccatcctaccgagtaccgacaagagtaatggctgtgtgatattggacgcgcgtgcttatgtaacttccctgtgctgtgtgctcgtgctaaatattggtatgatacgtagacgtactctactagctgggatcctcgagtgagtgagtttgctgcctgtaaattaacaagtgtgtgtgtggctacctgtgtactcccatgtggttgtagcacgtactcgtagtagctgaaaaaaaaaaaaaaaaaaaaaaaaaaaaaagcggccgc

SEQ ID NO: 5762 - DNA, 408 bp, Triticum aestivum
  Clone ID: LIB104-034-Q1-E1-C8
taccggtcaagaattcccgggtcgacggggatccggaagacggaggcgaacgaggaggcgaagctgagctcgttccagcaggagatcgtgcagctggcggcggtgctgaacggcgaccaccagctaagcagcctgcaggagaggatcagggagaggatgaacgtgagggaaggcacctcctacatgaggagcgccgtgcggcgcttcttcgaggccggcatgtcggccaagaggatgggcctcgccgacgacgagcagatcgtcaagatgaggccctcccttaccaccagaatgacctcctcccctgcagatcaagatgatagtccgtagagagcaacgatgcatacatacataggatgaagattgatgttggaattaccaaaattcttagtactacacatacataca

SEQ ID NO: 5763 - DNA, 202 bp, Triticum aestivum
  Clone ID: LIB104-034-Q1-E1-D1
cgggtcgtttcaatttgacaaataaaaaaaaaaaaaaaacatcaaaataaagaaaaaacacaaaaaaaaagaaaaaaaataaaaaatgggaaataagaaaaaaataaaaaaaaaaaaaaaggggccagctcaaaaggatccaatcttacttacccctgaaagcaatgtcatagcccttcaatagggtcaccaaaattcaatt

SEQ ID NO: 5764 - DNA, 452 bp, Triticum aestivum
  Clone ID: LIB104-034-Q1-E1-D10
ttccaggtcgacgggtgttacttgcatgttttcaattataattgtccgttattattattgtttcgtcttaagtgagttaaccacatcaagtgttggtgcctggacacaaaagagagagaaagagagagagagagagagagagagagagagagagagagaggccaacagaaacagagtggtgctctgatggatacaacgctcgtggtataaaaaggtgcctggtccaattaaaagagtgcatccttatgattgtgtaaggtttggccaatggaaaatgaatgttttggtgtcatcatgatgatacagccatacaagaacaccatgaggggtgttacatgcacgtttccaattacaattgcatgttcattattatgttttactctaaagtgtgctgaaccacataaagcattagcgcctagatacacacacaagagatagatagatagagagag

SEQ ID NO: 5765 - DNA, 428 bp, Triticum aestivum
  unsure at all n locations
  Clone ID: LIB104-034-Q1-E1-D11
attcncaggtcgacggggtgccaagtagaacctataggataagctatgatgatagttggtttgattctgctgaaaaacagagactttgcgctcacgagaaaatattcaataaatcacagaaacgtgcttttgcattgattatttttgctgctgatcaataaacaaattttccagtactttatattttggtagaatttttagagttccataagtttgcgttagttacagattgctacagactgttctgtttttgacagattctgtttttcgtgtgttgtttgcttatttcaatgcatctatggccaataaattagtttataaaccataaggaagttggaatacggtaggtttaacaccactataaataaataatgagttcattacagtaccttaaagtagtcctttgttttctttcactaacggagctc

SEQ ID NO: 5766 - DNA, 425 bp, Triticum aestivum
  Clone ID: LIB104-034-Q1-E1-D2
attccagggtcgacgggtctaatataagaacacctaaaagccaaagcttggggatgccccagaaggcatcccctctttcgtctacttctatcggtaactttacttggagcaatatttttatttaccacatgatatgtgttttgcttggagcgtcttgtatgatttgagtctttgcttgttagtttaccacaatcatcctttctgtacacactttttgagagagccatacatgatttggaatttttagaatactctatgtgcttcgcttatatcttttgagttatataattttgctctagtgcttcacttatatcttttagagcacggtggtggatttgttttataggaactagtgatctctgatgcatcacttagattattttgaaagccttaatagcatgggaattttcttaaaatcctaaata

SEQ ID NO: 5767 - DNA, 443 bp, Triticum aestivum
  unsure at all n locations
  Clone ID: LIB104-034-Q1-E1-D5
ggtccaggatctccgggtcgacgggaagccggagggcacggtggggagcaccacctgcgccatcgagtccgactacttcgtggcgtacggcgtcgtgttcaagaacgacgcgccactggccaagccgggggccaagggcgggcaggcggtggcgctgcgtacgttcggcaccaagcaggccttctacaactgcaccatcgacggcgggcaggacacgctgtacgaccacaaggggctgcactacttcaaggactgcgtgatcaaagggagcgtggacttcatcttcgggtttgggaggtccttgtacgagaactgccgcatcgtgtccatcgtgaaggagatcgccgttctcacggcgcagcagcggaccaagaccatcgagggcgctatcgagagcgggttctcattcaagaactgcagcatcatgagccaaggcngggggg

SEQ ID NO: 5768 - DNA, 347 bp, Triticum aestivum
  Clone ID: LIB104-034-Q1-E1-D6
ttcccggggtcgacgggagctccgtagcctcgctcctcgcgacgccgctggacgggctgcccgccgcctctggtcgcctctggctgcactgcctagacgcccgatgggaactcttcttctctgtcacgtcgctcttctaggtctgtattcttctctgtttctctgttaacatctacgtgaatagattgatggatagatgcatgtattgatgaacaaatggtactgctaatgcattgatgtagttacggtcttttaatagcaaactagcccccctatgatactgtgtattatactttactgctatggtggttacacttttcctgtccgtaagatcggttaattacgat

SEQ ID NO: 5769 - DNA, 423 bp, Triticum aestivum
  Clone ID: LIB104-034-Q1-E1-D8
ggtccaggactcccgggtcgacgggaatatgacaatgatgaaatgtgtcataataaacgaaacagtggaaagttgcatggcaatatatctcggaatggctatggaaatgccataataggtaggtatggtgactgtcttgaggaaggtaaataatgggttcaataccagcgaaagttgcacggtaataagagaggcttgcaaaatggaagggtgagtgtgcgtatatccatggactcacattagtcataaagaactcatatacttattgcaaaagtctacttagcccttgaagcaaagtactacgatgcatgccccgagagggatatatttgtaggaaaagaccatcgctcgtccccgactgccactcataaggaagacaatcaaaagagcacctcatggaacaaatttgtcacacaactttta

SEQ ID NO: 5770 - DNA, 436 bp, Triticum aestivum
  Clone ID: LIB104-034-Q1-E1-E5
gtaccggtcctagaattcccgggtcgacgggatcgatgaagaacaaaacaacctcctctcgactagatcgagcgacttgggaggacagaatcaagcgtggctacgaacactggctcctcatctcttgtttttctccaacatttcatagtactcggttgattgatatggcatccgtgaataagtcttgaacaagctacacctgaacaggggtttttataagttcggcatcatggaattccttttgttcctcatgcgaacctcatttcatgaaaggttcagtctattttttttcttctctttttgtaagtggaaacgaaacatggaaatagaacgatcacatgattctgcagtgtatactctcgtgtgataaaactaaaagagatggtaagatggttttagaatgacttgttcaatacttatcacacatttagctaac

SEQ ID NO: 5771 - DNA, 387 bp, Triticum aestivum
  Clone ID: LIB104-034-Q1-E1-E6
gtaccggtccagaattcccgggtcgacgggtgaggcccggacatccaagctgggtgaaggctcaacaccaaagtgaagcaataatgctgcatcgctcatagctactggaagtaaattatatcgataatttaagcatcagtgctagtataagatgtctacttatgcacggtatgatgccactatatgatggccagtgttgaagtacgaggcccctatatgatgcctactgatgaagtatgaaaataggctaatgtgtatctatctgtagcctcctgatctaagggagcaccgtatgtgtaatctctgaatgagtagaagactattatagcgtcaactttgaaaaaaaaaaaaaaaaaaaaaaaaaaaaaaaaagaaaaaaaaaaagga

SEQ ID NO: 5772 - DNA, 432 bp, Triticum aestivum
  Clone ID: LIB104-034-Q1-E1-F10
attcccaggtcgacgggccataattgggcccaaatacgtagcaggccgttaacggtcttaaattgacgatgggctggaaactgtcaaatctagaattggcctttgatgggccaattctatgtaacttgtatgggccatgcttgtaaatgggcctgactcaagtaggccgctaatgggcaggcccgcttattttgatagtcccggccttttaacctgaatgggccactgttgggctgagacatgtgtcaacgtatcataggcgtgttccgtccattcgctggatgacaactgtccgaacgccgagccgacacatggatctgccggacaatgagaattttacacatggaaaatccccattggtctacgctgttaacgggttatcggatccaaaccggaacccgatagcttaatggcgaccagttacggtggatg

SEQ ID NO: 5773 - DNA, 381 bp, Triticum aestivum
  Clone ID: LIB104-034-Q1-E1-F3
gtaccgctccagaattccagggtcgacgggcgtcctttttaccccgtttcatccgttcgttaccggtctcatgtagtttttgctttgtttggtatgttcgttgtcggtccctcagaaaaaaacaatagtgagtgtacatggatttgaaccatggttgcgaggactcatgaaccaactcatccaaccaaagattctgcagaaagagagggagcttaaaccgtctcgccatatacgtggcattcatttacgttttggaaacatccatcatgtacgattcgttttttcaaacctcctccctatatgtatgttgtggaccacagttgcgggcgtgttgcgccaagggttggagctccagcggaaggagcgggagatggggctact

SEQ ID NO: 5774 - DNA, 405 bp, Triticum aestivum
  Clone ID: LIB104-034-Q1-E1-F6
ggtccagaattcccgggtcgacggggagcacaagaaggcggaggagcacaagaagaaggacggggagcacaagaaggacggcgagcacaaggagggcatgatggagaagatcaaggacaagatcagcggcgacggccacggcgacggcaagaaggacggcgaccacaaggagaagaaggacaagaagaagaagaaggacaagaagcacggcgagggccacaaggacgacgacggccacggcagcagcagcagcgacagcgacagcgactgagccagctccggccgcgctccggcagcagcgtgcagtgtaggcgagatcgatgaacgcttgggagaagtgtggcatacatatatgttgcagggtttggagcgtgtggtagcatatgtatgtaatgcgtgacatgt

SEQ ID NO: 5775 - DNA, 420 bp, Triticum aestivum
  Clone ID: LIB104-034-Q1-E1-F7
taccggtccagaattcccgggtcgacggggatgggtataataaaaactttcatatatagtacattgaatactatgagaagtttgatacttgatgattgttttgagatatggagatggtgatattagagtcatgctagttgagtagttgtgaatttgagaaatacttgtgttaaagtttttgattcccgtagcatccacgtatggtgaaccgttatgtgatgaagtcggagcatgatttatttattaattgtcttccttatgagtggcggtcggggatgagcgatggtattttcctaccaatctacccccctaggagcatgcatgtagtactttgtttcgataaataatagatttttgcaataagtatgtgagttctttatgactaatgttgagtccatggattatacacactctcaccct

SEQ ID NO: 5776 - DNA, 426 bp, Triticum aestivum
  unsure at all n locations
  Clone ID: LIB104-034-Q1-E1-F9
attcncaggtcgacgggggcaagagacgtctcaatgttgagaggactaaatatatgcaaaagattgtttgtggatgctcggggaaacctgagcagcagaatagcagatcttgccgttgcgagtgccctgcgatggtgaggttactaagagctgcagacaatggatggtacattgctgagcatcgggcaagccacaatcattcgctatctcttacatgcggggaaaaggttcactggccatcccacaaacacacagatgtgtacacaaaggatctcgtgaaacagcttagggaaaacaatctgaacctcaacaaggtgtatagcatagttgggagcttcttcggattaacacagagcgtgccttttacaaaaaggtcattgcgcaatctgtgcgggagaataagcagagaccaagttgatgatgatg

SEQ ID NO: 5777 - DNA, 414 bp, Triticum aestivum
  unsure at all n locations
  Clone ID: LIB104-034-Q1-E1-G5
ccggtccagaattcccgggtcgacggggataggcagcggcgatacaagaagcgcgacgacgacgacgatgatgagaggaagccacggcacaagaagcacgacgatgatgacgacgacgatggcgagaggaagccgcggtacaagaaacgtgacgacgacgatgatgatgaggatgacaggaagccgcgttacaagaagcgtgacgacgacgacgacgatgatagaaagccacgttacaagaagcacgacgacgatgacgacgacgacgatgagaggaagcagcgtcgcgggaacaaccgccgccgccatgattacgatgactgatcaaggcatcctgacatgagtttagctgacgctaaataagtatagtcgcggcggctttgcttcgatgaatcaccagttcgtanttttttt

SEQ ID NO: 5778 - DNA, 391 bp, Triticum aestivum
  Clone ID: LIB104-034-Q1-E1-G6
ggtccagaattcccgggtcgacgggtgatccgaatgatgattgtgatatcaagattaggagggtgaatgttagagctaatcttgatatttgtattagcatgtttgagttttgcatgtagtcaaatcaagtgtggtgttcgcccgacgaaggcttcaggtgagcgcgccaaggaggtgagatgccaggatgccgtgtgaggcggcaagcacggcgagatgccgatggtgctgcgtgagaagcggcaagacgtatcaaaggctggagccgtgatggactgcatcaaattgggtcgggtgaaccggccggtcgttctgtttgttggactagctgttcatgcgtgagttcgtttactcctagctgagagtatcgttgctaataattgatgcatgc

SEQ ID NO: 5779 - DNA, 457 bp, Triticum aestivum
  Clone ID: LIB104-034-Q1-E1-G7
taccggtccagaattcccgggtcgacgggcgctagttgggagataacccaattttatttgtgttttttgtttttgtttctgtttagtaataaattttgcatctaacttctgtttagatgtgtttttatgttttaattagtgtttgtgccaagtagaacatataggataacctatggtgatagttaatttgattctactgaaaaacagaaactttgcacgcacgaaattagttttgttatatcacataaacgtgcttttgcgttgattctttttgctgctgatcaatagacaaattgtccaggacttactattttggtaggagttttagagttccaaaagtttgcattagttacagattgctacagactgttctgtttttgacggattctgtttttcgtgtgttgtttgcttattttgatgcatctatggctagtattaagtggtatgaaccatagag

SEQ ID NO: 5780 - DNA, 339 bp, Triticum aestivum
  Clone ID: LIB104-034-Q1-E1-G9
cgggctttcagtttagagcagcaatttctgtacatttttattgatatattcggttgattgatcacacttgctgatcaacgccaatctgatttgttctatgacctctgcatactttttacccctcagtaattcaggccattgtctcccatgtaagaacgagatgcttacagtaatgccctacagaaagtcagtgggcacataatcttggtgctcacgtgttggataaaaaaaaaaaaaaaaaaaaaaaaaaaaataaaaaaaaaaaaaaaaaaaaaacaaaaaaaaaaaaaaataaaaaaaaaaaaaaaagataacacaaaaggttaaaaattaaattaa

SEQ ID NO: 5781 - DNA, 412 bp, Triticum aestivum
  Clone ID: LIB104-034-Q1-E1-H5
gtaccggtccagaattcccgggtcgacggggaggatcaattgctaggaaaatcacatcgctcatcctacgaccgccagccatcactgacgcagcagaccagtgtaccgtcatgtatcccgtttagtgcatacctctcgacatctctgcagtccaccggattcaccatctctaacacacgcatccgcttaccttcactcaacagccatcaagcaaggcgtttaatatcataatctccacatcccagccaatctacctggtcgcacatttatcagaccatcatatcacattctatgagacattctatgagaccaatcctcaataccgacgattctatgcctaattctataatcatatcagatcacacgccgttcaaggttagtcttgtaatcagttgaatgcagtctccaagac

SEQ ID NO: 5782 - DNA, 465 bp, Triticum aestivum
  Clone ID: LIB104-034-Q1-E1-H6
ggtcaaggattcccgggtcgacgggttcccactcccaataatgggttgtgcttcaggtgtgaacaaccagggcatcgttctaaggaatgcaaccagaaccagaatcaaatggcccttccagcaactggccgtggaagcagtggtggcagcggcgtcggcggtgcggggcagtggcggtagcggcggtgcggggttcgagacagggcggctagggttttatcccaggacgggccggcggcttataaaggttgagcctggaggagtccgggcctagcacgacccgtaggtcggttcagttcttttgaaatagttacgctcagaaaaaaaaaggactactaaacggacttcaaaaatcctgaaataaattttccccggcttccaaaatcaagccgcataggatgaacatttaattggggcccaaatgcaattttgaaaaacatgcaattttcccaaattccaattaaa

SEQ ID NO: 5783 - DNA, 417 bp, Triticum aestivum
  Clone ID: LIB104-034-Q1-E1-H7
gtaccggtccagaattcccgggtcgacgggtcgtttccgttcagcgcattgcccttgacatccatgtatttttagaagttcatccaatcgtcattttgatcagcgatcacgtcatactgcatatcctctatcgaggtagatgcttggatggacacaatcagttgatctccgcaccttagcagattcaagcaacaagtgtgtattgccatcaaattgactttggagagatggcatgctcgtttaggccacccttccttcttccaggaccaaacacgttcttagtagaaataaactctctgttgttggggagcataattctgagacgatttatgactcttgccagatagcacaacaccatcagttgccttaccctgtttcaactaccaattcggtgaagccattgtaactcataatttc

SEQ ID NO: 5784 - DNA, 310 bp, Triticum aestivum
  unsure at all n locations
  Clone ID: LIB104-035-Q1-E1-A1
acggtctagaattcncgggtcgacgggtgattagagatgagaggttaaaataattcataaattcgcaaaatactagattcacaccataatcttttttaaaaggaggcactataccctcgcctactcatcgccccgacgagcatgccgaggagaccaggaggcacacatccaagggagtgggtgtgggctagggttcatcttctgatattgccaatcgtgtctaccgcccggtgaatgccaatcagacgtgcgcgacaaaccttacttgggcctgcagccagacattttgactgcagcaccgatttcacgc

SEQ ID NO: 5785 - DNA, 299 bp, Triticum aestivum
  Clone ID: LIB104-035-Q1-E1-A10
ggtcctgaaactcccgggtcgacggagtcctagagctagggatggatctcgaggttctggccggcgggagatccaggttctggccggcggactgacgttccgcgcggtggatcgcgacgagcggactgagaaccgggtactgaattgtcatgatttcaaatttcggaagggccttagctgtcaaattgacttgtctacaattccgcttcgcctgaagtcatctattaccgtccggagggagtactatccaatcacgtgatcacctaatatcattctttctctagcggcgcactcaagcc

SEQ ID NO: 5786 - DNA, 171 bp, Triticum aestivum
  Clone ID: LIB104-035-Q1-E1-A4
actccctatagtgagtcgtagtacaccggcagacaggaattgtccgatacaagcggctgagcatggaaatcccccgttgctcggtgagattcaagcgtgtgtcgtagggaaaatacaatccgttcgcgctatctagactctacaattgtgcaggatccaacgcctggggtc

SEQ ID NO: 5787 - DNA, 435 bp, Triticum aestivum
  Clone ID: LIB104-035-Q1-E1-A8
gggtcgcgttgtccgttacgactccctatagtgagtcgtatcatggccacgacggtgacggcgactcgttcctggccacgacggtgacggcgactcgctcctggccgcgacggcgacgctggccggcagtcgtgacctgaccgtgacggcgaaccgctcatcctcctccgctccgccaagaactgttaagagtgatttggaggattcaagattctgtgaagctcttttgacatttaaagctcagaactgaggttacattgtcataggttcaatatgacgcaaaatagggctaagtggacagcaaggtatgagaaaggtctcgtggaggtacttacagagtacaatctatctcattaccgtggtcaaaatgggtggactaccgaaggatggaatcaagttgtcaaggaactgaacagtttatatccagaggcaagg

SEQ ID NO: 5788 - DNA, 440 bp, Triticum aestivum
  Clone ID: LIB104-035-Q1-E1-B10
ggtccagaattcccgggtcgacgggagcatcctgggcggggtgaccgtcatctggttgttgttcgagggcatcggctaccacctcctcaccttcctctgccacttgctcgtcatcttcctcaccgtcagcttcgtctggtccaacgctgcgtccttcatcaacaggtctcctccaaagttccctgaggtcattttatctgaaacccaatgcctgataatagctcatgttctgaggaaagaaatcaatgaggctttcatcaccttgcaaagtgttgcttccggaaaagaccttaaaacatacctcaagtcaattggagtcctctggttcatttctataattgggggctgcttcagcttcctgactctgtcttacactattttcctgatggcatacacgctccccatgctctatgagaaatatgaagatgaagtcgatgttg

SEQ ID NO: 5789 - DNA, 115 bp, Triticum aestivum
  Clone ID: LIB104-035-Q1-E1-B11
cgttttacattgcaacaccctatagtgagtcgtattaagaatgggtgtcgcacgatggtatccggtaggacatcctcggcgtcttatgcaacctccgcttcacgttcgtcaccgt

SEQ ID NO: 5790 - DNA, 463 bp, Triticum aestivum
  Clone ID: LIB104-035-Q1-E1-B12
ggtccagaattcccgggtcgacgaggtcatcaggcaaatcttttgatgttccccctcgacgctgtctggcacccttccttactaatttctctgcagccatgaacttaaaactgaatggcttcaatatgttcaaaggcttcaagggcttttgcttgctggtcaaacaggaactagcttcaggagagttaatgtgttactgtaagaattctgcaaacaaatgcagactatgagaaccaagggattcttccacggacatgtacctgtggcagcattaaagatgcgatggaagggaagaggtcatatgcattctcagaagattttgaagataaatcagtttgaagacattgacctcatgttgcgaagacattcacttatgtgttgagtgttggttccagatttgtacgaatcaatgaataagtacaagtgaggaatctaactatatgtgaagcttaagtgaatatac

SEQ ID NO: 5791 - DNA, 461 bp, Triticum aestivum
  unsure at all n locations
  Clone ID: LIB104-035-Q1-E1-B2
gtacggctcaggaattcncaggtcgacggggcttagacgcgccgacgacggcgactcgttcctggccacgacggtgacggcgactcgttcctggccacgacggtgacggcgactcgctcctggccgcgacggcgacgctggccggcagtcgtgacctgaccgtgacggcgaaccgctcatcctcctccgctccgccaagaactgttaagagtgatttggaggattcaagattctgtgaagctcttttgacatttaaagctcagaactgaagttacattgtcataggttcaatatgacgcaaaatagggctaagtggacagcaaggtatgagaaaggtctcgtggaggtacttacagagtacaatctatctcattaccgtggtcaaaatgggtggactaccgaaggatggaatcaagttgtcaaggaactgaacaatttatatccagaggcaaggtttacca

SEQ ID NO: 5792 - DNA, 213 bp, Triticum aestivum
  Clone ID: LIB104-035-Q1-E1-B4
taccggctcagaattcccaggtcgacgggttcgagcacgggcactgcatgctcaccagcaagcatgaattgcgcgagacaggcggctagcatggatatctccctttgctctgttatcttcacgcgtgtgtcaaagggagaataccactcaatcgcgctatccagaccgtttatttgtacaggatccaacgcctggcatcagaccggccaaaac

SEQ ID NO: 5793 - DNA, 391 bp, Triticum aestivum
  Clone ID: LIB104-035-Q1-E1-B5
accggtcaggaattcccgggtcgacttccaccaaagcgaaatccatcatctcatcgaaagacgggacacctccgcctcgatcaagtggtatcagatttccaggttgctcggtgagattttacagtttttcgtagtttagatcgaatctgttcttcatacctacagtccacgagaaagccgcaaaaaaaacttagggttagttcatcatatccgaaccaatctgagcctttgcataatctttttagggttttgctttgttgaatttgcggttgcatcgtcgtgtctagttgctggtcttagagtctagtcttttagagtttcgagttctggtcataagttgtcatgccgccgccgcaccatcatcatcgtcgctaccatctatcaccaccgc

SEQ ID NO: 5794 - DNA, 393 bp, Triticum aestivum
  Clone ID: LIB104-035-Q1-E1-B7
cgcgggcagataccggtcaggaattcccgggtcgacgggtgctccaatggcgtcgggttcgctcgggcggctcgctccgctacacttccggcgacgaaacagggtcagacaagctcattgtggagaggggaaacgaggagagcaagcggtgcggctggagatccccttacggcagcgataacgttcggcggcgacggcggtctgtggcgcttccccgcgagatcggttttttcctaatcgaggcgtgcggcgagcggaagaatcgggagaaagggtgcggcgttcctcgcggagtcttgcccgtgtacggtgtctctgaggagcatgggatcgaacatgggcgcagatcaatctgggctccgctcggcctgttcgcgctgtgcgtccgtccca

SEQ ID NO: 5795 - DNA, 398 bp, Triticum aestivum
  Clone ID: LIB104-035-Q1-E1-B8
accggtctagaattcccgggtcgacgggaatgcttcaacagtctgccatacatgatatagaccgtagttctttttttttggcaaaaacaatgtgtattcaactgacattgagtggttttctctccaagaaaactgacaatgagtggttttgcgacatagagtactcaacgaagcagtacagagctccatgggagggatgcggcacgtgaaattttgttcactacgagtgactttgtatggccggagcatggtctagtttgtgcacaaagctttgtacccagcgatttagttactaagttcagtaattcattgaatcaacattgcttggaatccagggacttaatgctgtgaactcgtttcttccaaatgaatcaacgtggcttttttatttatatgat

SEQ ID NO: 5796 - DNA, 406 bp, Triticum aestivum
  Clone ID: LIB104-035-Q1-E1-B9
cggtccagaattcccgggtcgacgggcaaaaagaggcaaatagagaaagagagggaggatagagagagagggtgaataaaacggcaagggtgaagtgggggagaggaaaacgagaggcaaatggcaaataatgtaatgcgggagatagggattgtgatgggtacttggtatgttgacttttgcgcagaccccccggcaaccccgcaaaaaatcctcctggcaactccggaacactgccttgggattcccccaagaagaaaagaagattccaaaaagttaccttagttattccccaagtttttgaaaaccaaggtatcaatccagtaggaggctacgcgcgagtccctcgtacctacacaaaaacaataactcaatgcaaccaacgtgcttaaggattgtcaatccc

SEQ ID NO: 5797 - DNA, 455 bp, Triticum aestivum
  Clone ID: LIB104-035-Q1-E1-C11
ggtctagaattcccgggtcgacgggatctccctctcattacattatttgccatatgcctctcattttcctctcccccagttcacccttgccgttttattcgccctctctttcccgtctgtctccctctttcgcttgcctcttgtatgctcgttgtcatggccagctcggtcttcatcccttcgtctcccgacattgaagtccttcacttcaagcatagacaaggagaaaatttaaaagatgcttggtttaggatgctagaatcttatcgtggttgcaatatagaaggagatttcaaaattttacttcacaatttttacgttgggctaaccatatcccatagacaacttcttgattttgctgccaaagggagttttattgaaattgatcctagcttcgcttatgaaattataagggggatagtaggagtactccccctacaaaatgggtcaaccct

SEQ ID NO: 5798 - DNA, 480 bp, Triticum aestivum
  Clone ID: LIB104-035-Q1-E1-C12
ccggcaggtaccggtccagaactcccgggtcgacgggaggatcgactacagcgagttcgtggcgatgatgaggaaaggggcccccgagggggccaaccccaagaaacggcgcgacgtcatgctataggagacggcgggttggtggaggaagccgccggccgatcggcgacagaacagcaagcgatcgagcgcgcgtacgaggccgctcgcaacgacgacgacgatgggctcgtgtacatttttcacagaaggggtcgagtagcaaatgttcatatatataccgtgggattgggaatcgaaaatgttcgtacgctgtcgggcgctcatcttcttcttctctggttctgctggttcccttgacttgttagtatgtatacatcagttgagtaagttggcattttttagcctgaatttgtacacggtttcaggcttggaaatgtacaggtatgtaacttgagtgaactaacgagtgtgtttttg

SEQ ID NO: 5799 - DNA, 448 bp, Triticum aestivum
  unsure at all n locations
  Clone ID: LIB104-035-Q1-E1-C3
taccggccaagaattcncaggtcgacgggggctcttgccactccatgttccataatccatcaaatcttttacccaaaacttgaaaacttcacaacacaaaacttaacaaaaaatctcgtgagctccgttagcgaaagaaaacaaaacaccacttcaaggtaatgtaatgaactcactatttatttatatttgtgttaaacctactgtattccaacttctctatggtttataaactattttactagccatagattcatgaaaataagcaaacaacacacgaaaaacggaatctgtcaaaaacagaacaatctgtagtaatctgtaactaacgcaaacttctggaactccaaaaattcagccaaaataggacaacctagaaaatttgtttattgatcagcagcaattggaatanatattttatcacgttctggttatttttaacaattat

SEQ ID NO: 5800 - DNA, 455 bp, Triticum aestivum
  Clone ID: LIB104-035-Q1-E1-C4
gtaccgcgtcagaattccagggtcgacggggtagctttttcttgggatttgtttagttaaaagttagccattgcaacttcgtgtacttcgtttgtgtccaacgaccagaccaagaccgcttctggatccccaccattatcaatacctcatatatatttgcaatattcagattgctttatcatattcttgctcgttcttcgattgcttgcaggaatagaccttcgtggtcaggctgaccgtgcttccggcgtcgtcagtaacctcaggagattggtttagcgattgttaaggcgcaacgtcatgcacgtttgtagtcggattgtcaaagtcgtctccaccaaatcgatatttatcatctcatcgaaagatcgggacaccctcgcctctatcaagtggtatcagttttcaggttgctcggtgagaattttaagttttcgtagattagatttattttc

SEQ ID NO: 5801 - DNA, 450 bp, Triticum aestivum
  Clone ID: LIB104-035-Q1-E1-C7
cggtcaggaattcccgggtcgacgggaatggaccatctgatgaagcttctcacggcaatcaaactttacattccatagtgccactgggcgctgccaagcaagaggagctgtctgctaggaccccgttggttcttctagcgatgcagttactgcataacctagagaagaattcatttaggagagtactgccccgctttttcccgctgttgattgatctgattcgctgcgagcatagctctggagatgttcaacacgcgctgtataaaatcttcaaatcatcaataggccccatgatagaagtataatggcacattcctgtcctgttaggcgcacgattttgtgtcaacattctgacatcctgaatgagcccttcaagatcctggagttcaagtgcatattactagtccagatatcaggcataaagaggaaaatacatttttgcttacatcc

SEQ ID NO: 5802 - DNA, 397 bp, Triticum aestivum
  Clone ID: LIB104-035-Q1-E1-C8
ccggtcaggaattcccgggtcgacgggggcacgacccacgtaccgccgacgaggcagtggggccccgcggacccaaacaccatcctccgcgtcttgtgccaccgcgacgacgaggccgccaaccagttcttgaagcgcacgttccagctcgccaagcggcggtgatgtcggccaaatgctcgaagaatgagtctaggtgctactatacttttttagtcccattactgcaacaacaacagttgcggctacgtgggctgtatctgtgccagcccaagtgagcggcctatgtaatgcgttcaggtgtgagtgtgccttgttaaatagccgttgctaaagcgtgagggttgaggatccatgtactgccaagtgccaacttccctaaaaaaaatgtactatc

SEQ ID NO: 5803 - DNA, 433 bp, Triticum aestivum
  unsure at all n locations
  Clone ID: LIB104-035-Q1-E1-C9
ggtccagaattcccgggtcgacgggtactagagtgcatcactttgttacataaagttttacaaaaatattcgaaacgtttataaactacactctgggtttaaaagataaaatacattcaaacttggaaatcatatgaaaaaaaacatgagtgagtagaacatggcattgactctgccacaaactagctatggcaaaagctgtcagcattgatggaggaagtgcaaaatggggacgcatatgcatgtgtaaccaagtctcgaactagatgaacggctgcaccatgcatgggatatcccgtgcatgcagtggcggatccagggcccaggcccaggcctggggcgcggagaagatttccttcgtgtgctatagcagtatgtgcactgtagctgtactgtagcagagtgtancagcctggggcccggggctttgccc

SEQ ID NO: 5804 - DNA, 445 bp, Triticum aestivum
  Clone ID: LIB104-035-Q1-E1-D10
ggtctagaattcccgggtcgacgggctgctatgagcgggagcgactgcgagaggacgcccggttgcatgagcaagtgatggtgcggtggtgttgttgttcacggagttgctcccgatgaaactgggcaacgggaaatcatgtaccgtcttgtctggattttccttcgtccagttgatgatagctggaacgaagttagtagcgaaatcatttctgcaggcagttacagctgcattgactgcctgctgtagcaactcatttttctcctcggctgtttttttcgcgtcctcggctgcttttttctcgaccgcaagcttcaccttctcattgatgtccgcctgactaaacttctttttctgcttcttggcctccgggacctcgttgtaaaacaccttccatgtgacgccgtctccagcgccgtgcacacgaccgtattgcggccgctct

SEQ ID NO: 5805 - DNA, 444 bp, Triticum aestivum
  Clone ID: LIB104-035-Q1-E1-D12
ccggtccagaattcccgggtcgacggggatggccagatcaactactaagagttcgtcaagggcatgattgccagatgagctcggacccatgtgctccgaagacaggaggagaattgtgcattgcacagtcactttaacatgcaactcttagttgatcaatctccagttaagcagcctaactaggctgtagtgctaaaactgatcagacgactgcaattcctgctacgttctccagtgtgtttcaagacatcttgagttttatgtgaacttgtgtccactctgatgtaaccggaatgctgtttggcccgtatgtaatatatttcttcacctggatctgcttgactcatctatcatcaatgcaaaaccggtgttacgtatccgaatactcggtttgttcattcgccacacgtccctagcagaactaaactgcaaactttcccccac

SEQ ID NO: 5806 - DNA, 404 bp, Triticum aestivum
  unsure at all n locations
  Clone ID: LIB104-035-Q1-E1-D4
aattccagggtcgacgggtggatcatcctcgtgagtccctcatcataccggaaggaaaccaggaaagtcatggtcttgggtagacacgagcttgtccttagtccctcatcgagacgagtatgtccggtatggcatggtgaggtttgatgagtggtgatttattccactagtggtaatattgttggaggatacttggaccacctgactcggtcgtangccgagtcttgatcagtaccttccctatttgttggtaccaccacttgtccctgtcacagacagggtatggtttagtaagttgttaaccccttaccaaagcacacatcgtacagagaggccatggtggaagataccggaggcctccggtaggcatgccacctggtccggnggcatgggtgtttccggtt

SEQ ID NO: 5807 - DNA, 407 bp, Triticum aestivum
  Clone ID: LIB104-035-Q1-E1-D5
ccggtctagaattcccgggccgacgggtacccaaagctctgaccacctcaggcaggtgttttccactcagatgggtttgagtgaccaggacattgttgctctttctggtggtcacaccctgggaagatgccacaaggagaggtccggctttgagggagcctggactgccaaccctttgatcttcgacaactcttacttcactgagctcctttgtggggagaaggaaggccttcttcagttgccgaccgacaagaccctcctgactgacccggccttccgcccacttgtggacaaatatgctgcggatgaggatgctttctttgctgactacgctgaggcacacctcaagctatccgaattgggatttggcgaggctgttgacggctgctgctgattcaagctcggcg

SEQ ID NO: 5808 - DNA, 432 bp, Triticum aestivum
  Clone ID: LIB104-035-Q1-E1-D8
accggtcaggaattcccgggccgacggggggacaagtggcttattctgatgatgatgaaacgctggccaaacagcgtgaggaaataaagcgcatgactgctgagtttgatgcgagcatgctggagatccgcaagaatttggatgctatggatgaaattgagaggcggagtgcggaggactatgagaagttccgtaagaagctaaacaatattgagaaagcatgcaatgttgctttgatcgtgctggtgcctagcactgttctgctttttatgtcactgtagtatcatctctattagttggttataagaaacccttatttaactagtgggttaagaaaccctaccttcagaactctatgtgttgtagtgatccagctttggactttgcattgcatcttcatgaacgcataatggttagcagactcgttataag

SEQ ID NO: 5809 - DNA, 445 bp, Triticum aestivum
  Clone ID: LIB104-035-Q1-E1-D9
ggtctagaattcccgggtcgacgggcgtgtcggcaatccaggacgcggacctccgacaagaattctttcgcatccagtcggagtttgcggaaatcatccatcaagatgtccttcgttcctcggggcagttctacctcagaaatcaaccgtccaacagtgacatggacacaatgctacaaatgcaggctgacaacgaccgttatttcatgactcccacgatagacggcggcttcatccacgctccggtcccttgagtcgagtcgaaagtagtgatgctgtgtctagttctgaaacatcgattggctcatgttgtaattaaactttaatgaacttgtagtatgtctctttggtttcgagagtcgttcaacttagatgtaatcgatgctattaatgtcttgcttttctcttccaatcattctgttgcatacttatatattgcctaagt

SEQ ID NO: 5810 - DNA, 455 bp, Triticum aestivum
  unsure at all n locations
  Clone ID: LIB104-035-Q1-E1-E1
taccggctcagaattcncaggtcgacgggccctttcatcttcaaggaaaaccgacgcaagctcaagacgtagcaagaaggatttctggcaccattgtcggggaggtcttcgctcaagtcaagacattccaagtacccatcacaaactcatctccctcgcatttacattattttccatttgcctctcgttttcctctcccccacttcacccttgccgttttattcgccctctctttcccaatctcctcctctctttttcgcttgctttcttccaacttgcttttgtttgctgttatgttggaaattggggaaattatcgtcgatacgggcaataatgataacatggaaaattctgaggctccggctgaagaacccctatcttgcatactaaaaagtttcgaatcggtagtggtaacattattggaaaggatgttattcaagatttcattacttgta

SEQ ID NO: 5811 - DNA, 445 bp, Triticum aestivum
  Clone ID: LIB104-035-Q1-E1-E10
ggtccagaattcccgggtcgacgagcggcgaggagcgcatcatcatcttcaccaccaactacaaggaccgcctcgacccggcgctgctgcggccggggcgcatggacatgcacatctacatgggccactgctgctgggaggcgttcaagacgttggccgtaaattatcacctcgtggacgaccatgctctgttcccagagatacaggaactgcttgccgcggtggaggtgaaggtgacgccggccgaggtgtccgagatgctgctgcggagcgaagacgccgacgttgcgctacgggtgctgacggagttcctccaggacaagagaagcaaggcaagaaaagaggcaacagaaatcaagatcggcgtagcagagaaggcaatgtagcagtagtagtagtattcagtgtcagtatccccttcaacgggaccgttttattggaggag

SEQ ID NO: 5812 - DNA, 465 bp, Triticum aestivum
  unsure at all n locations
  Clone ID: LIB104-035-Q1-E1-E11
ggtccagaattcccgggtcgacggggaaggtggaggaaacagcggagtcagccatggggagggggagggtggagctgaagcggatcgagaacaagatcaaccgccaggtcaccttcgccaagcgcaggaacggcctgctcaagaaggcctacgagctctccgtgctgtgcgacgccgaggtcgcgctcatcgtcttctccaaccgcggcaagctctacgagttctgcagcacccagagcatgacgaagacactcgacaagtatcaaaaatgcagttatgcaggacctgaaactactgtgcagaaccgagaaaatgagcaactgaaaaacagccgcaatgagtacctgaaactaaaggcacgggttgataatttacagcgaacacaaaggaatttgcttggtgaagatcttgattcattangcataaaagagctcgagagccttgagaagcaactccaatcaacct

SEQ ID NO: 5813 - DNA, 454 bp, Triticum aestivum
  Clone ID: LIB104-035-Q1-E1-E12
ggtccagaactcccgggtcgacggggagcacaaaaaggcggaggagcacaagaagaaggacggggagcacaagaaggacggcgagcacaaggagggcatgatggagaagatcaaggacaagatcagcggcgacggccacggcgacggcaagaaggacggcgaccacaaggagaagaaggacaagaagaagaagaaggacgagaagcacggcgagggccacaaggacgacgacggccacggcagcagcagcagcgacagcgacagcgactgagccagctccggccgcgctccggcagcagcgtgcagtgtaggcgggatcgatgaacgcttgggagaagtgtggcatacatatatgttgcagggtttggagcgtgtggtagcatatgtatgtaatgcgtgacatgtctcatggatcctgtgatgtataataattacccggctgcactgcactgca

SEQ ID NO: 5814 - DNA, 449 bp, Triticum aestivum
  Clone ID: LIB104-035-Q1-E1-E2
aattccagggtcgacgggtccatcgccgtcgaggtcggcggcgtggagatcgggcaggggttatataccaaggtgaagcagatgacggcgttcgggctggctgagctctgctccgacgccgacgagctcctcgacaaggtgcgtgtcatccaggccgacacgctgagcatgatccagggcggcttcaccggcgggagcaccacctccgagaccagctgcgaggcggtccggctgtcgtgcgccacgcttgtggagcggctcaagcccatcaaggagagcatcgagtccaagtccggcgcccctgcgccatggaaggccttgattacccaggcgaccatggcgagcgtgaacctgtcggcgcaggcgtactggacgcctgacccagccttcgtgaagtacatcaactacggacccgccgtcagcgaggtggaaatcgacgtgctgaccgg

SEQ ID NO: 5815 - DNA, 390 bp, Triticum aestivum
  Clone ID: LIB104-035-Q1-E1-E5
cggtctagaattcccgggccgacgggaaagaaagataaaactttactggaagctcctacattcaacacattctgggaaaaggatgttgcagagtctgtgcgccagggagatgcgcagccatttgtcgaggaagctgtgctgcaagtatctgattggggtttcagcttgtcagatattcaaatgcagaagaaagaggatcagggagtatttgaatttatgaagtctctgttcagtcaggctgaacgagagtgggggggatttctgggcccaatccacatttggcagggaatggatgaccgggtggtgcccccgtcggtgaccgagtttgccaggaggatggttccaggagccactgtccacaagcttctcgacgaaggccacttctcatac

SEQ ID NO: 5816 - DNA, 452 bp, Triticum aestivum
  Clone ID: LIB104-035-Q1-E1-E6
ccggtcaggacttcccgggtcgacgggcgtatgattaaagttgtgtcacaaatttgaaacatgaagtgtacctggcttgtgcatccttatgagtggcggtcggggacgagcgatggtattttcctaccattctatccccctaggagcatgcgcgtagtacttgatttttgatgacttctaaagttttgcaataagtatatgagttcttttgactaatgttgagtccatggattatacacacttttacctttccgcctttgctagcctctacggtaccgtgcatttccctttctcaccttgagagttggtgcaagcttcgccggtgcatccaaacccccgtgatacgatacgctctatcacacataaacctccttatatcttcctcaaaacagccaacagtacctacctatccatggcattttccatagccattccgagatatattgccatgc

SEQ ID NO: 5817 - DNA, 434 bp, Triticum aestivum
  Clone ID: LIB104-035-Q1-E1-E8
cggtctagaattcccgggccgacaggaaccagtgcagacataagcacatcagttcttgttcaataatgctgctgcaacaatctcatcgatcttacaaaaaactagcaaaagggtctgtgtgttacaacagcagaaaaaaaatcataatctccaaaggccatagcaacattttgctgcaacaccgataacattttcacgaacattctgttcaattttattaacattttaatacacaaacttttaaaaaaaatcatgaacatggtttgatttttcaaacatttgttttcaaatttgcaaacattttcttgatatggaagattttttataaaattataaacatttttttaacccacaaacattttatgatttattgagcattttacttaaaaattctccttttaaattatttgaagttacaaatttattaaaggagg

SEQ ID NO: 5818 - DNA, 462 bp, Triticum aestivum
  unsure at all n locations
  Clone ID: LIB104-035-Q1-E1-E9
ggtccagaattcccgggtcgacgggatgctttatgttttcgtttctgtttagtaataaatttttcatctaccttctgtttagatgtgtttttatgttttaattagtgcttgtgccaagtagaacctataggataacctatggtgatagttaatttgattctgctgaaaaacagaaactttggcgcacgaaattagtttttttaaatcacatatacctgattttgtgttgattctttttgctgctgatcaatagacaaagtttccaggacttcctattttggtaggatttttagagttccagaagtttgcgttagttacagattgctacagactaatctgtttttgacagattctgtttttcgtgtgttgtttgcttattttgatgcatctatggctattattaagtggtatgaaccatanagaacttggaatacagtaggtttagcaccaaaattaattaag

SEQ ID NO: 5819 - DNA, 388 bp, Triticum aestivum
  Clone ID: LIB104-035-Q1-E1-F2
aattccagggtcgacgggcgatgttgctgttgaccatatctggacgcgttcacaagttacggcaccagtttcacgtactagtagcactagtcaatgtgtacgtgcaatgcacgttaatttggaactatattaagtgcatgcagatattaagtaggatattatttgtgtgttattatgtgattagcactatttttggcatgaaattaactacacgctaaacgtgttgagcgctcgacattgaatcagtctaggtcattggatgagaaggaatacatgcggcttgatgacgttttatatttaatttgatatggatctagcagaacattcaatcatcacaccatagatttcattcagtctgactccgactttacattcatacgatgatcga

SEQ ID NO: 5820 - DNA, 439 bp, Triticum aestivum
  Clone ID: LIB104-035-Q1-E1-F4
tcgacgggtcccacaatcatccatgctgtacacaccttttgggataagcctacttgattaggatttattagaatatgctatgagcttcacttatatcttttgagcttgatagtttttgctctagtgcttcacttatatcttttagagcacggcggtggcttaattttgtagaaattgctagtctctcattcttcacttatattattttgagagtcttttagaacggcatggtatttgctatggttataaaattggtcctagaatggtaggcatccaagttgggtataataaaaactatcataggaagtgaattggatgctatgatcaacttgatacttgataattgttttgagatatggaggtagtgatattaaagtcatgccagttgggttgatatgaatttaaagaatgcttgtgttgaagttagcaagtcccgtag

SEQ ID NO: 5821 - DNA, 449 bp, Triticum aestivum
  unsure at all n locations
  Clone ID: LIB104-035-Q1-E1-F5
accggtcaggaattcccgggccgacgggggagaagaaggtgctgcaagcagagaaatggggcctaaacacgagggaacgcacactgaaagtcagagagatgaacgaccgcttgaccgcttgatgatggcagagcgagccttcaccaacagagaagggctcgcagggagaccgtggtacaaacacatgatttatgcgtcgtcggaccaggacgactggggcaccaaggcgttccccggcatcgtctcggccatggccaacgcacagaagctcaacacgtcggagtcttggcggctgttgcagcatgagatttacaggggtgcaagggccgtgtccaaggcctctgcagtcctggatggaaggctaacatgatgccggagtagacatcagcacagcacancacagcacggaatttaccggtgcaaataagtagggaaagggaaaaagaatc

SEQ ID NO: 5822 - DNA, 388 bp, Triticum aestivum
  Clone ID: LIB104-035-Q1-E1-F6
ggtcaggaattcccgggccgacgggatggccatccatgtgacctcggagatgggctagctcgccaataatcacgcaagtagctagtccccgaagacaaccacttcatgtgtgtggcccaaacatatgtatggagaggtgtgtttttgagtaacaatggaacaactttgatgtggcaccatgatttcaaactagaaatccccacactgagtgagggttaggttgacgatgcatatgtatgttacaccacacttcaagccagtgacggggattcatgcatgcatgcgtgcatagtatatacggtcaaacttaaggtttgaatctcaccgtgacctatactacgataacacgaaccaaatgaagaatccgccatggttacctatcttgttg

SEQ ID NO: 5823 - DNA, 435 bp, Triticum aestivum
  Clone ID: LIB104-035-Q1-E1-F9
ggtccagaattcccgggtcgacgggaagcggcagtcgatcttaggccactgacgatggaggacctgaggcaggccaaaaatcaggtcgccgcgagcttcgccgcggagggcgctgtcatgaacgagctgaagcagtggaacgacctctacggcgaaggagggtcgaggaataaggagcagctgacctactttttgtagaaccggaaggatggtggatgtgtcgtgttgggcaaatcgctgaagccttggcagagcatgagcatacatatgttggtgggaaaaggagagaggatttcctgtgagcaaccgtgagttaggatcttggagtgaatggactccttgagatgtgtggcagggggcattggatcatgtacgattcttttatacgaacaagtattgtagttattcattattatatatgttgtagctggtttg

SEQ ID NO: 5824 - DNA, 381 bp, Triticum aestivum
  Clone ID: LIB104-035-Q1-E1-G10
ggtccagaattcccgggtcgacggggacggcggagaggaagggcaggacggcggaagagagggggagcaggctgaggaacaagtgaagcgtagtaacttgcaaggagcttagaattgatggccatggatgaactcccgaggagcgtgcatggccaacttcttgcttccgatcccttcccaatttgttggcatgcatacctgtggttcttgatcatttttcttactcgtattggtttcagtgcatcccattttttggtgggagatgtggggtgggcgtcatggttgagagaggggtacatttttgtaattaaattaatggatggaggaataataatcaagtggctataatcatatacaatctatgggtatctcactaatcac

SEQ ID NO: 5825 - DNA, 442 bp, Triticum aestivum
  Clone ID: LIB104-035-Q1-E1-G6
ccggtcaggacttcccgggccgacgagggttgtcaacattgagacgtgtgactgcacctgtcgaaagtggaatatttctgggttgccatgcatgcatgcaattgcagtatttgagcgcactgggaggtatgcatatgacttctgtgtggagtatttcacgacgaaacggtaccgctcgacctattcaatgtccataaatccgatacctgatgttaccttaacggacaattctcagagtccagcgacattaccattcccaattcaaactcgtcgacgggttggcaggccgaaagagaaaccagctgatccgcgcatcacaattaaaagggcagtgcgctgcagcagatgtaaaggttatggtcacaacaaagcaacttgcaaaattcctatcagtggcgaagccttgcccgccttgccaccagctgacctctccgatgtacac

SEQ ID NO: 5826 - DNA, 442 bp, Triticum aestivum
  unsure at all n locations
  Clone ID: LIB104-035-Q1-E1-G8
cccgggccgacaggccgagaggggaaaggacacatattatggttacatagtggacatatgagaacttgactacggacatgattttaaggtccctttgtttaagtgcaaatgggtcaatctgtcaggaggcggggtacaggtagacccacagtagggaatgacaacagtggatctcaacaatcttgcgtatgcagacgaaccgttcgtcctagccaatgatgtggcacaggttatctatgtgaaggacatgtctaccaaaccgagaaaaagaaaagataaggaagcgaatacatcatacgatgagccaaagcgccacatagttctttcaggaaaaagggacatcgtgggagtggaggtcaagacagacatgtctgaagattatgaaaagtttcatgaaattcctcncttcaaagtcaaggctgacccaagcatcctgataaac

SEQ ID NO: 5827 - DNA, 459 bp, Triticum aestivum
  Clone ID: LIB104-035-Q1-E1-H11
ggtccagaattcccgggtcgacgggttgacaagaggagtgtaaccactttctttgaatcatttgcctcgtctctataattgcccgttttagttagtgaaaaaaatcacctaaaaaaagttagtgaaaaaaaaacaagtgaaaaccgtcacggcaattcatagggcaacgctggccgatctgactacccgcgtaaagagatacacgttgtcaagaagagaacatcgttgtttcgttgagattgtcatgaagtgtcactgtcgtcacttctccacgaggcaacggctccgacttcaccattgacaaccgtcaacggaacccttactgaaacaaacgagactttgacaatgagccttgcaagagaaaaatggaagaaatgcccaattttttattaagtttgatattttggatgtcaatatttttctgcttacattgtaccacaaaattgcatcgtgtcaaaa

SEQ ID NO: 5828 - DNA, 347 bp, Triticum aestivum
  unsure at all n locations
  Clone ID: LIB104-035-Q1-E1-H12
tcgtattatattataatancntatagtgagtcgtattatacgttgagtcatttgcctcgtctctatacttgcccgttgtagccagtgtataccctcagctctgcaaacttgatgtcgaccccacacctcacgaccctctcggcatttcatagggcagctctgttcgctctgactacgctcgtacatacatccctgttgtcactaacagaacatcgttgttgccctgagattctcatgaactgtcattgtcatcacttctccatgacgcaaccgctccgacttcacgattgacaaccgtcactggatcccttactgacggactaccgacttttgacactgacccttgc

SEQ ID NO: 5829 - DNA, 410 bp, Triticum aestivum
  Clone ID: LIB104-035-Q1-E1-H5
ggtcaggaattcccgggccgacgggagagcttagatagtagagttgggaaatccaaaacggtggatgttcctgaaaagccacgaatgagctcagatgacgttgacaagtttaggaggagaagatgcttggtttggtgatctatgatatgacgtctgcacagttcatggagtagtttccgaacaccatggaatggggatcaagcaactgtgtcatactgtatagcgaggaacaacgccgacagttcccgcagtagagggataatagctgtgttaaatgtgggagaagaagaatgaggacgctggtgaataagctgttatttatcaaagagggtacgtctcaacatggtaactttctcggttaattaacctgtattgcaacccccagtggtggtaggatttcatcatgtaaa

SEQ ID NO: 5830 - DNA, 330 bp, Triticum aestivum
  Clone ID: LIB104-036-Q1-E1-A10
ccctatagtgagtcgtattagggactagacgtggtagatcggactcagctctccttcattccgccaaggaaaaatcccatccgcgagcacctccccatacgcacaagaaagcgcacctcccttgtgtcatgcaggaggaaaagatcgtcctcctcccgaacccgtccccctcaaggatgatgcgctgcctacgagactgacgggcagacattctctttgaaagaccgacacgcgtcattgttgatcgagttcccccgtgcatcgtcaaatgagatgccgaaggagagcgccttaaggtcggtctggtcgagaggcaattgcgggaagagt

SEQ ID NO: 5831 - DNA, 244 bp, Triticum aestivum
  Clone ID: LIB104-036-Q1-E1-A11
tatagtgagtcgtattaaaacatacgactcacggaagggagtcctcgtcacttggctgactcacgctcgcgtctccgaagaaatcgaacgcacgcacacgacgtcgcaggacggatttctgggaccattgccagggaggtcttcgctcaagtcaagacagaccaggtacccatcacataggccatctccctcgcatttacaggagttgccatttgcctctcggttgcctcacccccacttcacc

SEQ ID NO: 5832 - DNA, 57 bp, Triticum aestivum
  Clone ID: LIB104-036-Q1-E1-A8
tgagtcgtattaaaaaatacgactcactatagggagtcgtattaagtggtacgactc

SEQ ID NO: 5833 - DNA, 369 bp, Triticum aestivum
  Clone ID: LIB104-036-Q1-E1-B10
tggtccaccctatagtgagtcgtattaaggaactgaatatctggtgcagccgcttggccgtgctgaagacgaagagcattccagtgacttcgagccagaagaagatggtgatggtgctgaggacgaggagattgacgatgacgatgctgaggatggtgaggatcctgtcaaggcgcaatcctcatcaaagaggaagaggtctggtggggaggatgaagatgatgaccacagtgatgatgatggtgatgatgatgagaagcctcgatcaaagcgatagtcaatttgttcgtgctgatctgtgatcttctctgcttgggccaagaaggaagataatcctcatggagaggattgttggtaaatgctgtagct

SEQ ID NO: 5834 - DNA, 399 bp, Triticum aestivum
  Clone ID: LIB104-036-Q1-E1-B11
accctatagtgagtcgtattagctgcgtggtgacaagtacagcactgattgcctcagcttgtacttatacctggatgcatcggatgagctccatctcgagtccaagatggtggttgtgatgactcggtccatcctggacgaagtgaatgggaaacacttgactgcaacttcaggtctcttagtgtttacgggtggatgcggctggggatgggctgatttccttggactcaagaatctcaaggacccgtcgggaggctatgttgtgggatcgagctgcgttgtgaaggccgatctcactatcgttggttcatccaatgatggttagatgtttacctcatggcctgatggagagataatgcccttacatcctacgtatgactagacttctatttgagataa

SEQ ID NO: 5835 - DNA, 338 bp, Triticum aestivum
  Clone ID: LIB104-036-Q1-E1-B12
gtgagtcgtattagatctcacgactcacggaaagacgtagcctacactttgctgcatcaccctcgccccttcgaggaaaaccaacgcaagctcaagacgtagcaagaaagatttctggcagcattgccagagaggtcttcgcgcaagtcaagacatagcaggtacccagcagaaacccatctccctcgcatttacattatttgcgatttgcctcgcgttttcctcgcgcccacttcagcattgccgttttattgaagctctctttccgaatctccgcctctcttttcgcttcccttcttttgtgtgctcgtttgcttgtttgaccttatgggcgcgcc

SEQ ID NO: 5836 - DNA, 443 bp, Triticum aestivum
  unsure at all n locations
  Clone ID: LIB104-036-Q1-E1-B7
ggtccagaattcccgggtcgacattgtgcaaagctggggatttggatggggcgttggaggtgcataagaagagtgggcagttcaagcatgtcctggtggatccgaggcagtacggtgtgttgatggagagcttgtgtgcaggtggtaagtgtgatggtgctgtgcaggtgctcgatgagcttctagagaagggcacactgcttagcccaaagagtccagtgatggaagcaccggcttataatccagtgattgagtatttgtgcgacaatgggaataccaacaaggccgagacgttcttcaggcagctgatgaagaaaggtgtggatgacaagtctgcattcaacagtcttatccgtgggcatgcaaaggaaggtgcgctanaggccgcaaaggagattcttgccattatgacacgccgtggcgtccctactgaccccactcgc

SEQ ID NO: 5837 - DNA, 459 bp, Triticum aestivum
  Clone ID: LIB104-036-Q1-E1-B8
ggtccagaattcccgggtcgacggggaagatcgtatggatctgatgagagctgtgattattggagcaagtggcacaccatatcaagatggtctgttcttctttgacttctatcttccacctgagtttccacgagctcctccgtcggcatactatcattctggcggcctgcgtgtaaatccaaacctttatgtggatgggaaggtttgtttaagcctcttaaatacttggactggcagagggaatgaagtatgggatccatcctcatctagcattctccaagtactagtttcactccaggggctggttctcaatgaaaagccctatttcaatgaagctggatatgagaagcaagtcggtactgttgaaggggagaagaatgcactgccatacaacgaaaacacatatctgctaagtgtgaaatccatgttgtatatcttgaggcgacctcctatgaattt

SEQ ID NO: 5838 - DNA, 461 bp, Triticum aestivum
  Clone ID: LIB104-036-Q1-E1-C3
attccagggtcgacggggcaatgaaacacccaatttttttgtgcagttccaccaaaatcgagcatccctgttggcacatatattgagagagtgagattactgtaatagtgggactacttgatgaaacatacactaacaaatagaagcaccgtcattatcttaatgggtaaagttagcaacatagtagtcttgcttaaagagaggtattagtttatttaatcagtgccaattagctcaacactcaaagcattaccatttatcataggttgcaaaactttaatgtgcaaagataaaggagtttctcatgacagtagcacgatacaaatagagatgacaacaaactaatatggatgaaggccttaggcccgtaacaacgtgagaaaaaaagcttattcatgtagtcccataagagatgataaagcactcactggaatcacactatagtatatatttttgtgcac

SEQ ID NO: 5839 - DNA, 436 bp, Triticum aestivum
  Clone ID: LIB104-036-Q1-E1-C7
gatgggaaaccctaaagtgagtcgtattattttataaaaattatagtattattgaaaccaaaattatataaaatttatgcaactaaaattatcaaagtattttctgttcaaaacattaaaagaaaaaagaattttcataaagaaattttttgttagaaactttaatagcagaaagaattatcataaagaattttctgttagaaactaaaataacaaaatatgtttttgaatataatgataaaacacagtaatatttaatagcatgaaaaaagaatcactcaaaaatctacttttatagtaaagctattcaaaaactagtgactcacacaaatttccaaaaattcaaatttaaactattcaaattagaaaacaaatggcactaacagaaagtttaaattttttagtacataaaagcaaaaggaatcactgaaaaact

SEQ ID NO: 5840 - DNA, 412 bp, Triticum aestivum
  Clone ID: LIB104-036-Q1-E1-D2
cctatagtgagtcataatatgagcgagacacctttgctaaaaaaaacaagcggcacattaacataaaattctttttccttatgtttgtttcatttttcttcactttagaaaatgttccagaaatatatgtttggacaagtattctcattaagggcttgtgtattctcatcatgcatctctaataagtgttcacctatttaaaaaataatcattaactaaaaagttgtcagtattgtcaaaaggctcacatcaataaaattttcctcggacatttccaaaaaaaaaaactctaagttgaatagtttctagatgaaaccgcaaacattttcacaagtacataataacattttcaaaaaacaaacaagaataacaattttgaaatacaccacatttttctaaaacaacaacatat

SEQ ID NO: 5841 - DNA, 447 bp, Triticum aestivum
  unsure at all n locations
  Clone ID: LIB104-036-Q1-E1-D5
tacggtcaacaattcccgggtcgacgggaggtagcattccacatcaaaaattctatttttatcatttacctactcgaggacgagcaggaattaagcttggggatgcttgatacgtctccaacgtatctataatttttgattgttccatgctattatattacctgttttgaatgattatgggctttattatacacttttatattacttttgggactaacctattaactggaggcccagcccatattgctgttttattgcctgtttcagtatttcgaagaaaaggaatatcaaacggagtccaaaaggaatgaaaccttcggcaatgtgattttttggaagaatatcatcttggagacgtggactccaagttagaagatactcgaggactccacgagataggagggcgcccccctgtanggcgcgccccctgtctcgtgggcccctcga

SEQ ID NO: 5842 - DNA, 321 bp, Triticum aestivum
  Clone ID: LIB104-036-Q1-E1-D6
ctcacgggtcgacgggactccatatagtgactcgtaatagcaggatcgcaagatgactgattcaaataagtcatacaacgtccttgttcaaccgtcatgctccagttcagtagagaactacactatgattttttgatctacaagagtaaacatatatgcatcatacggcggccgctcgatatgattcaaacgtaattagcatgtgctgaagatctcactcttcattagtggcagttacactccattcaatgggcgtcgtcatataacgtcttgactgggaaatccctgtagttcactcacgtaaacgccaagcatcacatc

SEQ ID NO: 5843 - DNA, 412 bp, Triticum aestivum
  unsure at all n locations
  Clone ID: LIB104-036-Q1-E1-D7
ggtccagaattcccgggtcgacgggaccggagagagagatggggaggagcagagcttcaccgtgggggtgttgctggagtcgtactaggtcgaggctgaccggggacggaggaggagggcgctgacagggacgccgccggttccgtgaagaagaggaagcagagaagcatacgacgaggaagaagccttcggggtcctcgtggtcgcgtgcgagggtgaggaagacgacgaagagggtcggggttctctccccgtggcagcaacgcagacgacggaggtgttcaggccggggacgagcttaagctctcctcatccagggcgacggctatggtgggcgacctacctggtggctgcagcagggagagggggaaatggagagaggagaggctanggtanggtttggagaagtttt

SEQ ID NO: 5844 - DNA, 144 bp, Triticum aestivum
  Clone ID: LIB104-036-Q1-E1-E11
ggtcgatggggctcgctaggatgaatcatgctacgacgaagccttctaagcgcaagaaagaagtcggtcgctcaagaagatccacgcttacgtacgcgagtatacgaggtcagagctctacgaaaatgtcaccgaacttcaatt

SEQ ID NO: 5845 - DNA, 377 bp, Triticum aestivum
  Clone ID: LIB104-036-Q1-E1-E12
aagtgagtcgtattactgctagcatatcccacactactcacgctaacaatgtcaattatgttctcgcaggagcttcccagctacacagcactcgtgctacttgttcttcccctgtactacttgtactccaaggctagttgtagattaaagaagcctgcagtgctccccacaaactggccaatattgcacatgttcccttccttcctggccagcctccacaagatgaatgactatttcaccctggtcctcgccggatcaggccccaacttcagggggcacggcccacccgggaccgggatgcggttgttcgtcacatgcgatgccgccagcatccgggacatcttcacgaagaactagaccaacgtttccaaaggggc

SEQ ID NO: 5846 - DNA, 314 bp, Triticum aestivum
  Clone ID: LIB104-036-Q1-E1-E6
ggtctagaattcacgggtcgacgggaataccaatagtcattcgaagtagaacaagcttatcatggatcaatggaagtttgcatctaacgtgcatgcagtccgctcaggcaggtcaatgtttcagaaaggcactgttcttgttcgcagctcatcttgctatataagcgtattcctactcagaacaatcatctgattccatcttgactgcgactacgctaaaggatccaaccttacatgcccgtgaatacaacctcatatcgcaactatagtgtaacaacgtttcaattcacaggactatcgttttacaatcatct

SEQ ID NO: 5847 - DNA, 81 bp, Triticum aestivum
  Clone ID: LIB104-036-Q1-E1-F12
tgcgacaccctatagtgagtcatattagtccagggatgtcgataagggcagtgttgtaatacctactctctcgatgccggt

SEQ ID NO: 5848 - DNA, 459 bp, Triticum aestivum
  Clone ID: LIB104-036-Q1-E1-F6
ggtctagaactcccgggtcgacgggtgtccaaagggtggcacgagggaaagatctacttcgcgccgacgtacaagtacaagctcaactccgacacctatgccggcgagacgaccaaatccaagaggaaaaggagaacaccctcatggtgcgaccggatactgtggcacggcaaggggatagagcagctgcagtacatcgggggggagcaccggttctccgaccaccggcccgtctgcagcgtcttcgtggtcgaggccgacgccaacaacgggagcaggatcaggaacggctactccaccctggactccagggttcattgcgagtcgccgttgccgataccgcagagacacagcttctatgacttttgacctgttatagtgatcctcttttgtcgatacttcttctatacgttacaaggatcagaaatgtctattgagacggggggctgaacgtttttc

SEQ ID NO: 5849 - DNA, 92 bp, Triticum aestivum
  Clone ID: LIB104-036-Q1-E1-F7
atagtgagtcgtattaaacaggaggtcgcaatcgatggagtcggcttcagcaacatcagccagttcatctctttatgcagcgtcaagcaggg

SEQ ID NO: 5850 - DNA, 215 bp, Triticum aestivum
  Clone ID: LIB104-036-Q1-E1-F8
atagtgagtcgtattaaggcgagacgatcatcacaggcacgaacacattagtcgcgccacgggctttgggcaagccacttgggctggaccaagaaagatgagagacgagaggttgctgcggccgagctagacatcgaaggagtgagttcagacatctggcgctgaaggagtgaggtccgtgcgcaggtgaggtcgtcggtgtgatcacgtcccac

SEQ ID NO: 5851 - DNA, 424 bp, Triticum aestivum
  Clone ID: LIB104-036-Q1-E1-G11
cctaaagtgagtcgtattatgctctaaaagatgtgcgagaggagttgacaattcatggccccagcgagtcaccaaccaatcccatcggttccaatgagtagcggagctaggcaggaatcatgggggcagtcaaaaaatggaacaactaagagggtaaaaaataatcttttccttatctaatctccacacagtaaaatttcttcactgttttgcctaaggctgggggtcggccccctcagacatgcactagccttcgccactggttccaatatatgtgcgagaacaacagcacatcggaaattcttagtctacgccttgtgcaagcgattgcccctacttccgcggatgtggtgcacatattttggaggaaacagtaaaatgcaaccaaaaaaattaaaaattaatatcaacttcatttgtggca

SEQ ID NO: 5852 - DNA, 269 bp, Triticum aestivum
  Clone ID: LIB104-036-Q1-E1-G4
atagtgagtcgtattagatatatcatggaggtatacccagatatataaatagtgctcgatccataatttatagctggatttcaacacttatatatctagatttacgcccctcaaaaaattatatatctagatctatgttattacagtagacacaatgtcatatatgacccacggtgattgtacttatactattcgtgcaatatatatgtatatatacattcgtgtaagcgtgcaaatatgtaatgatagctctattaaattatgttctc

SEQ ID NO: 5853 - DNA, 441 bp, Triticum aestivum
  unsure at all n locations
  Clone ID: LIB104-036-Q1-E1-G8
gggtcgacgggacatcacaccaaagccacgccttcattcgaatcatttttgactgtcccacctcagtgcgttttgcgaggcagtttccttggcacatcttgttgaagcagagatcatgtccccttatcacgggattctcatcaatacgggcgttggtaacccaaccgtgccaatgattacgggacttgggggaaaagcgagttttgccaggctggtggggacacatagccttatccgcccatataaggggataaggattcatccttttatccacgccttcttcctcctttgctcatccatcttcgcacactcgagctccagcgcccaagtccgcatttcccacctcaaccttctccaaccatgtccggagtgggaggcangtggatggtctcctccgtcacgganggaaacatcaagaagctgaggagagccggatacctg

SEQ ID NO: 5854 - DNA, 420 bp, Triticum aestivum
  Clone ID: LIB104-036-Q1-E1-H1
ccctatagtgagtcgtattagtccattggagctgatgtttctgatgctgagcagggaaaggcagttgaggtttctgatgctgagcagggaaaggcagctaaggtttctgatgctgagcagggcagggcagctggagatatcattttggaggaagatccagttgagggtgttgttgagactcgtggtagtgctgctgcaggccaggagaagtctcctgcagcagagccatcagttgatgttgatgctggttctccaactcttcctagtgctggagagccaatggtttttgttgtttcagattctccagctgctccagctgctggtggtgtccttcccgacaatgctgctatgtcaactggagatgatgatgaagagactgaaagcgatatctatgaagcccaaaaaaaaacaacccagggc

SEQ ID NO: 5855 - DNA, 245 bp, Triticum aestivum
  Clone ID: LIB104-036-Q1-E1-H11
ttgtaacaccctatagtgagtcgtattaagcgtcggaacaggataaactcgggaggggctacgtcgttgggaagctcgtctggtctgatgggacccactatgtgaggagccccatcgtggtaaatgccctggattgagattttcatttttgtggtgtgtagcccaagggaaggaagtgtcatgagtttaggaattttcttttttagtttactgagaatgagatgagtttataggttttagctcaa

SEQ ID NO: 5856 - DNA, 387 bp, Triticum aestivum
  Clone ID: LIB104-036-Q1-E1-H2
ccctagagtgagtcgtattacatcaagaactgcacgcatgcctgccccaagggactgaacccggcgaagcagatcgacacaataaagaagctgcagctcggagcctgagtgaggtctactaccccgtggagatgtggaaaattgtaatcagcctggcatttggtttgttttggctccgtggtgacaaataatgggtggaaacgcaggatattcccagcttgacgattccgtgtagttcgtgaataattgctaccagattttattcttttcgtgctgtatctagtttggtggttctccgttgatcatcttttgatgtccatgcatcaattaattcataaacttttggaaaaaaaaaaaagaaaactcaaaaaaaaaagcggccgctct

SEQ ID NO: 5857 - DNA, 435 bp, Triticum aestivum
  Clone ID: LIB104-036-Q1-E1-H5
ttcacgggtcgacggggtgtcatatagttgtaccaactgcaattttttctctaaaaaagaaaagggattctaggttgtgaagcaaaactaaagggatgtggataaagggagggatgatagaaagaaggaagaggaaataaataagatataggattccactatgtatggtctatgaattacatcataaaaggcaatgtgataaagcatcaatataataaaaataatagagaattaaaaattttaacttgaaacaagaactacaaatttaaagcaataataaagagccgcccgggttaataaaactgagaaaattaactcggaaagaaattttttggaagctccgttgcgggattcagacctaaccattcaaggagaagcagtgggaacgacagaacctatgattccataggattttattgaaaagaatcctaacac

SEQ ID NO: 5858 - DNA, 233 bp, Triticum aestivum
  Clone ID: LIB104-036-Q1-E1-H7
attcccgggtcgacgggaggagtttatctaaattaattgttgcccctttggttagccgcccatgctgctgagaaccactgtctacgaaacctgcagcagcgtacattgtgattttttttctcccctttcccccatttgtgatatctgttctttgttgcttagagtatattatgtccgaattgtatttatacacactgtgacaccgactatttatataaggcagctgttgcatc

SEQ ID NO: 5859 - DNA, 406 bp, Triticum aestivum
  Clone ID: LIB104-037-Q1-E1-A1
tcgtatgtcgatgcgactccctatagtgagtcgtattaaaccattccgagatatattgccatgcaactttccaccgtcctgtttattatgacacgccccatctgtcatattgcttttgcatgatcatttagttgacatcgtatttgtggcaaagccaccttgataattctttcatacatgtcactcttgattcattgcatatcccggtacaccgccggaggcatccacatagagtcatattttgttctaagtattgagttgtaattctttagttgtaagtaaatagaagtgtgatgatcttcgttattagagcattgtcccagtgaggaaaggatgatggagactatgattcccccacaagttgggatgagacttcggaccttataaaagaacagagttctccgtc

SEQ ID NO: 5860 - DNA, 187 bp, Triticum aestivum
  Clone ID: LIB104-037-Q1-E1-A10
attacaacaccctatagtgagtcgtattacggctccgctcgacaccgccaccacggtcgcaatccgcacgtctctcaccgatcacggaatgagggtagaaacaacagcaggatcagcagctcaattgggcatgtaccgtacgatacagtgaaatcacaccgtgtcccagtcatgtcatgtcgactgt

SEQ ID NO: 5861 - DNA, 417 bp, Triticum aestivum
  Clone ID: LIB104-037-Q1-E1-A11
gttggtcaataggataccctatagtgagtcgtattaattttcatgccttctacttcttgtgctaattttttggctttagattttatgaactatgcaagttacgcatctattcatgtgtcagatatggaaaaatcaagggaagtaaaaatgaatgacatatacatatacaacatgtacaccttgtctcttttgttaacgatatttcagattaagcaacgccgaggacggctttattttcaagaaggggaggatgatgaggacaggactaccttggatatgaccaataatattgcatatatgcatatttgtcaggtgatttctagtgcaaactattcaataatctacttatgttatccagaacacaaatacgtcacacacttttgtgttttgtacaattgcaggtgtatgggacatttg

SEQ ID NO: 5862 - DNA, 373 bp, Triticum aestivum
  Clone ID: LIB104-037-Q1-E1-A3
gctatagtgagtcgtaatagatctacgggttgtgctgatacattactatagcactacatggggaacctaagctacctaatcctcgtgtactttcgacatacgttcgtccagagtaagctctacgatgaaagcttgaacccgcttgtgatggagatgttattactgtggtgacctgaaatcttgagtcacagaggctttcaagcattatgcacagccactgaagaaatactcggacacatacacccataatccatcatgcgggactttgcctcagattcgtgaattacaggatgaatgatgtgatgttcaaactgctggatatggcttactgaagacgtaccacgcgaacaacgagtactgtccgttttcagat

SEQ ID NO: 5863 - DNA, 383 bp, Triticum aestivum
  Clone ID: LIB104-037-Q1-E1-A5
ctatagtgagtcgtattaggtttaaaaggggaaccaatttttgtaatgggttagtaggggggaggagacatggataattggtgctctacttactttgtgttgtggtcgggggtggtcgggtttgttcgcggagactgctgttattagtctgttggccgagttgtagagaactctctttgctgctgctgctgttacttccttctgatgttttttcgttttgttattatatagccggatgaagaaaagatgatgcagttttatctaaaaaaaaaaaaaaaaaaaaaaaaaaaaaaaaaaaaaaaaaaaaaaattaaaaaaaaaaaaaaaaaaaaaaaaaaaaaagcggccgctctaaaggatccaagcttacttacccttgcatg

SEQ ID NO: 5864 - DNA, 338 bp, Triticum aestivum
  Clone ID: LIB104-037-Q1-E1-A8
accctatagtgagtcgtattaaaatgacatgctgcaataagttgacaccgacaaagatggcaggcttaactacaaccagttcgtgtctattattaaaaccggcacatactggagaaaggcatcaccgcactacccgagaggcatattcaggagccttatcatgacgcttgtgacggacggttccgtcaaattggacgtgaattaaaagccatggtgttgacttgtgcatgtatgttacagcatttgggccccacgaatcaacagctcctttaatttttgtcatggtctttttgcgtggaaatttagatcagtggaaccccatcagattggctcacatg

SEQ ID NO: 5865 - DNA, 400 bp, Triticum aestivum
  Clone ID: LIB104-037-Q1-E1-B11
tatagtgagtcgtattataatttcccaccttcggttggggtcatgatcaggacctactgtatatcagtaccgtggccacctgattcattcattgggttatgaggattctcatatttgtgtgtcatgcactatcaattgaaatttccatggacgtacttctgggggcctcttttcagagattactgtcatcagagtagccatatcacacggcaattgccttggcgacagctcaagtattcatggcaattggacagcttcagctttgcaatgagtaggctcggcaaaatgtacattggcacattgcttatcgagctctggtactgcacccactgggcgatcgtgccagctgctgcctctgaactgtttggcgtgaagaatttcggagcagtgtacaacttcc

SEQ ID NO: 5866 - DNA, 380 bp, Triticum aestivum
  Clone ID: LIB104-037-Q1-E1-B12
gacgcgttgttcattacaataccctatagtgagtcgtattaaaagcctctgtacaagttcagtctcgcaaaatctcgaaggttggtgatagcgtgttcattgaggaaatgcctgatattctaagggagccttcttctcctggtatcgtgaagacttgttcccctaatggaaaaagagtttcaccgccacataatgcactcagcatttcagcaaaccgaaaaggagggcggaagctgatagtgaaatcgatggcctcctttccatcagtggttggggagacgagcggtggatctgcaatatgcagctccgacagcagaacagctcttgctttaggtccatcgtaaaagctgggctgggcagccgattatccgcgagcggag

SEQ ID NO: 5867 - DNA, 360 bp, Triticum aestivum
  Clone ID: LIB104-037-Q1-E1-B3
accctatagtgagtcgtattatgtcgccgtccaatggtcgggaactcgtccgaggatgagtacggcatgggaggcggcatggcatggtgtgcaaactggccggtctgtatcccgtgttctactcttccgcaacggagaccgcaccttcacttcacgggtcttgaaacccgcgcccgtacatacagatcgcagatggacgacgttggtcaccgccggtaaaatatgttcacgatcgggtttcgtttatctttctgtcccacaaaagtacgaactgtagtgacaatctggcgtgtctgacaaaagctcggctggtgtatatgaactttcacaatgctacacatattgtcagagtattaccaa

SEQ ID NO: 5868 - DNA, 360 bp, Triticum aestivum
  Clone ID: LIB104-037-Q1-E1-B8
gacaccctataatgagtcgtatcatgaatgaggagcggagtccactcccttgggaataacccacctagcatggaagatacaaatagacctagttgaaacatgagctgctcgagtatacaaaacagcatttcatttgaaggtttggagtttggcacatacaaatttaattgggacggaaggtaaataccgcatataggaaggtatggtggactcatatggaacaactttgaggtttatggagtttggatgcacaagcagtattcctgcttagtataggtgaaggctagcaaaagactgggaagcgaccaactgagagagcgacaatgctacgtcttgagcttgtgttggttttccccgaag

SEQ ID NO: 5869 - DNA, 406 bp, Triticum aestivum
  unsure at all n locations
  Clone ID: LIB104-037-Q1-E1-B9
gtaggacgttgggtgacccgatagtgagtcgtaatatgaagtgttctgtcgcgtagaatattctagtgttatggaacttcacatcgaattccaccttaacaggaacaagtactagattgtagcttggaagatcagtataagacataaaggttaaattagttactcctcgtacaacaattacagaatctagactacaacgaaacagattcaaaatccaacgatgcaataaattcactcacaagagacaatatgctcccatcagccccgaaggcatgtacagaacatcagctttctgcacagcatcggatntgatcagctggactcatagactcagcacagcaccagccggcgaagttcgtagagcgtccgataagccactccacaggatcagtaacagtcgatccaa

SEQ ID NO: 5870 - DNA, 393 bp, Triticum aestivum
  Clone ID: LIB104-037-Q1-E1-C1
gtcgatgggacaccctatagtgagtcgtattaaagcttgcgtatgtagcccttgattatgaccaggatctggatactgccaagagcagctcctcggttgagaagagctactcagcttcctgatggtcacgtgatcatcactggcgcacagaggttcaggtgccctgaggtcttcttcgagccatccatgatgagcattgagtcttctggaatccatgatacgacctatacctccatcacgaagtgtgacgtggatatcagtaaggacttgtatgagcaacattgtgctcaatggtggcacaagcatgttcacaggtatcgctgatcgtatgagtaatgatataaccgcccttgctccgaacaacatgaagattaagttctcgctccacctgat

SEQ ID NO: 5871 - DNA, 386 bp, Triticum aestivum
  Clone ID: LIB104-037-Q1-E1-C10
acgcgtaggacattacaacaccctatagtgagtcgtattaaactgggaaagatccaccaactctattacgtggaatcgttgttcgtaatacccttgtcacctatgaccgccacaatgaaaagattggattttggaaaactaactgttcagagttgtgggagagactccagagtgatggggctccttcaccagcaccttcgagtgatccaagttcacaagcagatttagcgcctgcgcctgctcgaggtggtttgccagaatatgatgttggtcgcagcgctgtttacatgtcgatagatgttacgtatccaaacctgagaccgcccctagatgagttggctgagctgttggctaaagcagctgagatagagtccagtcaggtccga

SEQ ID NO: 5872 - DNA, 435 bp, Triticum aestivum
  Clone ID: LIB104-037-Q1-E1-C11
ctcgtgggtcgatggggcacccgatagtgagtcgtattaataaaggagtctgtctaaggtgaactctttggacttccacgcgtggagacttcgatgtcattaatgatggttccccagctgaactcggtagtgttttactataagactaccacgtggtcatgtttgtctgggacagcgtgttcacatgtttgtagcaaaaccagctcatgttttggagcttactatcgtagttcagtccccgagaatcgcgcagcgttgtcccgtcgaattgtgttgcaaactttcatttttctgcctagactcgatgagtctggaatatcctgacagcaaccagatctgaatctcaggcatatatgatggtttggaacatttcccaagaactataatatcggtccctcgaataccggtaaagtggatgtcgtgggcaacatcacc

SEQ ID NO: 5873 - DNA, 89 bp, Triticum aestivum
  Clone ID: LIB104-037-Q1-E1-C12
tcattacaacaccctatagtgagtcgtattatgttcggatcatgagcatagggtttgttgccatcgtggctgtgccccaggttttcggc

SEQ ID NO: 5874 - DNA, 316 bp, Triticum aestivum
  Clone ID: LIB104-037-Q1-E1-C7
agtgagtcgtattaagtggtgagcgtcacctccctctctggcgtgctcaatggttccacgacagcctacctcggcggaatacgtccacaacatggccggtctataaggttcgtctgcctcgcccagatctaccgagtgggtaccaccatctaccactggctcgacataccctggctcaggcgctactacgacttcggcttcgaccactttggcatgtcttggcgcacagtcggtgtgtcaggcctacccagcctactcgctggcacctcgggaccgttcgccacacgagactggattctaccggacctcaccatcc

SEQ ID NO: 5875 - DNA, 137 bp, Triticum aestivum
  Clone ID: LIB104-037-Q1-E1-D12
gactcgtagtacgttataacaccctatagtgagtcgtattagcgacaccacaaaaggggcttaaaagaaccagagtgagtatccaggaggtagaaccgtccgagggagacgcaatagttcagagactgtaaatggtg

SEQ ID NO: 5876 - DNA, 222 bp, Triticum aestivum
  Clone ID: LIB104-037-Q1-E1-D2
gggccaccctatactgagtcgtaatatggcaggatcccggcctagtaaacgctccctgatcatgccaagactacgagacttcacacgcccgaccatgtcaatggcgactacaccgtcttcgccaacgccaggataaacagcaggaagatccataaggccacgtcctgaacatgtgacaggcttgaagcaacactgtgtgagcaattccacgccgtaggacac

SEQ ID NO: 5877 - DNA, 409 bp, Triticum aestivum
  Clone ID: LIB104-037-Q1-E1-D6
gatgggacaccctaaagtgagtcgtattacgagaaaaagcagggtacattatcccaaaatgttccatcttcctagaaaagtggattcgttccagaaaagttccagaagatgctaatggtaagcaggaggattgtttacgaagaaacaacagaaaaaattcatattctgatacagaggagttatataggaatcgaaatagtcgttgattttctttgtgaagaaaaaaaatggatttcattgaagtaataaaactactccaattcgaatagtagttgagaaagaatcgcaataaatgcaaagatggaacatcttggatacggtattgaaggagttgaaccaggatttccaaatggataggatagggtatttctatatgtgatagataatccaaatgcaaaaatttgtcttc

SEQ ID NO: 5878 - DNA, 207 bp, Triticum aestivum
  Clone ID: LIB104-037-Q1-E1-D9
ttaccctatattgagtcgtattagcatcgtcaggtgataaatttattcaatttttgtcagtagtccagtcatgctactcaatatacacttagtatagtgcttaccatcatatattcgttctatgtcataatgtaagcatctgtgcatccgctgtacagcatcagtctcactagtcccaatatgctcatatcgtcagtaacggatctg

SEQ ID NO: 5879 - DNA, 421 bp, Triticum aestivum
  Clone ID: LIB104-037-Q1-E1-E5
cgtacggtccagaagtcccgggtcgacgggatgacatagcaagattctcgggaaatgaactatgatagcaagctccaaaacatgagctggttctgctactcacatgtgaatacgttgtcccagacaaacattatcacatggtagtcttacaataaaacactaccgagttcaggtggggaaccatcattaatgacatcgaagtctccacgcgtggaagtccaaggagttcaccttagacagactcctttatctttgaacaactcaatcagtggcttggtgtgctaggatatacatatggaatgaagatgattactctaacagaccacagaattcttcgcacgagcatgactgacttgggatgactccaaaggaggtaaaacaagccttctcaaattcacgacggcaacttacatcaaatgca

SEQ ID NO: 5880 - DNA, 411 bp, Triticum aestivum
  Clone ID: LIB104-037-Q1-E1-E6
agtgagtcgtattaatacgcagaagatgccatgactcccatatctgaaaccttctcacttgacataaatgccaagctggatgtgtatgaatcttccaatttactgtgtgtttttatcgaaatatatggtactgatgctactatttgtctcttgataggcatacggtgggtacgataatgaccagagggcacagccgtattcctatatactctggaagaccaagcaatattatcggtcttatattggtgagtaagctgacattttcaagaattaactgcattgattgagatcacatctcattagttaggttcattctgctacatatgtttttacggcctccatgttatgagctctcactggcgaacatttttggagttgcactgttcagaccggtgtcctaacaagactttg

SEQ ID NO: 5881 - DNA, 240 bp, Triticum aestivum
  Clone ID: LIB104-037-Q1-E1-E8
cctagagtgagtcgtattacggcatgcaccagaagagctcccgcagcgtggaagtgctatcggcatcggtatcctgctcgtcgtcagtcctcatcatcatcatctcgatcgtgctcacgagtagctggaggaccaacagaaatcataacgagcggtagtaggaataggttgtgatgatatgatcctggcttgcatgcatgcttgctgggtgttgttgatcgcttattgtggaattttttg

SEQ ID NO: 5882 - DNA, 121 bp, Triticum aestivum
  Clone ID: LIB104-037-Q1-E1-F10
tcgtaggacattacaacaccctatagtgagtcgtattaggtcgtcaatttgattgatgacgggaagaaccccgatgagttcacgagggacgtgctcaacagctgcatcgccaagaggcaga

SEQ ID NO: 5883 - DNA, 439 bp, Triticum aestivum
  Clone ID: LIB104-037-Q1-E1-F6
ggtccagaattcccgggtcgacgggcccatataaagcgccacatgcgagtgagtgtcctatgacaaccaccgactgcatgtggcccaaacatgtatgtatggaagggttgtgtaatgttttaaataacaaattcatgactttgatgtggcacttgcatcacaaaagggccaatcctagacggtggttgacgacccatagtgtactggcagcccccctcccccccaacacacacaccgcacatccaccgcctctatgaggcatgttaaaattttctgctatgaacatatgtgaccaaaggagtgtcgtgttaaaatttgaaaaaaaaatcagagatcattcaaacacttttgtacattgattaatttcctagggatataatgtgcggaaatcaaattagagctacatgcacacgtgatagtgcaccaaaatggttagaaa

SEQ ID NO: 5884 - DNA, 411 bp, Triticum aestivum
  Clone ID: LIB104-037-Q1-E1-F8
ctatagtgagtcgtaataccttcgcggcagcacagccggccacgggaggcaggagcatgcggcacgaccgacgctgctttgggcggctggagcaagaaggccaaaggttgaagaagcactacggccgttggatggacatcgtacggtcagtggagctagaatcgttcatattgactaaagttgacaaaggcccccgtcccagtcaacttagtaggcccacaagtcagcctcccaccatggtgggtcccgactagcaggggaagtattcatttttttgtgcgtaataaggaggcacttccggtgggtccgagctgacagcggggggaacgtttttttttgcaaaatacgctggcccgtccggtgggtccgagcagtcagggggaaacatttttttcgcgaaataaagtggcc

SEQ ID NO: 5885 - DNA, 349 bp, Triticum aestivum
  Clone ID: LIB104-037-Q1-E1-G3
accctatagtgagtcgtattaaacaatgtcggtgtcaaaaccggcggatcttgggtagggggtcccgaactgtgcgtctaaggtcgatggtaacaggagacaggggacacgatatttacctaggttcaggccctctctatggaggtaataccctacgtcctgcttgattgatcttgatgaatatgagtattacaagagttgatctaccacgagatcgtaatgactaaaccctaaaagcctagtctggctatgattataaggattcggcctatctacggacctagacctccggtttatatagacatgggacggatctagggttacacaaagtccgttacagataaaggaa

SEQ ID NO: 5886 - DNA, 126 bp, Triticum aestivum
  Clone ID: LIB104-037-Q1-E1-G4
ctccctatagtgagtcgtattaagcgctttgctaaatcttgacggcagcaccataggatccaatcctacgtacgcatgcatgccacgtgataacgctgcaatgctgtcacgctaaattcaattctg

SEQ ID NO: 5887 - DNA, 402 bp, Triticum aestivum
  Clone ID: LIB104-037-Q1-E1-H1
tacattagaccaccctatagtgagtcgtattaatcaaagttatttactcaaatggccagctgggcatgggtacgatgaaattaggcagaatggcaaaatcagcagcatctactgtgaacacaaggcgaagagaaaagggattgcttcctcgtccggttcgagctggaattgttggatatccaaatgtcggtaaatcttccttgattaatcgcttgctaaaacgaagaatgtgtccagcagcacctagaccaggtgtcacaagagaactgaagtgggttcgttttgggaaggatctagagctattagactcacctggaattttgccaatgagaattagtgatcaggcagctgcacttaagcttgctatccgtgatgatattggagaaaggtcatatgattttg

SEQ ID NO: 5888 - DNA, 430 bp, Triticum aestivum
  Clone ID: LIB104-037-Q1-E1-H11
gacgcgtaggtcgttggaacaccctagagtgagtcgtactacggaggcaccgtgtcacaccgtgacggacaatgcgccgcacgaaccagcacgccgcatgaaccagcagacacttcgacctatgcccccccttcaagatgtttatgaaaattaaacgagccgaaggcgagcaggaggttccctcgtgcctgaggcgccgtgtcacaccgtgacggacaatgcgccgcacgaaccagcacgccgcacgaaccaacacgccgcacgaaccagcacacacttcgaccagcacacacttcgacctatgccccccccccttgcagatgtgtatgaaaattaaatgagccgacggcgagcaggacgttccctcacgccggaggcgcggtgtcacagcgtgacggaaaatgcgccgcacgagccagcacgccgcagg

SEQ ID NO: 5889 - DNA, 439 bp, Triticum aestivum
  Clone ID: LIB104-037-Q1-E1-H5
cccgggtcgacgggtctgcccatgatgtctgatactaactacatgggactgagcatgacagagctcgccgaaagctatgtcttctcccagctcaacgcgcgcagcgagggaccatgatccatccagcgaccacttcatgcaccatcctcttgtgcaatctgtctgtggaactacatgtggtagaatatgtgccctgaatcgtcaacgggtacaattcaccattgatttgcaggctacgattgacatgagactattgttgatgcttctcgacgcctcgcagtcatatgtaactgtctagagtaagttgttcttccacgtactagcgcaacttttaagcgtcagctttttatttcatggcctgttagaatgccaatgcaccttaatctcacctacacgcatggatcaacgtcgaattgagttatacgaaacttggaaaatt

SEQ ID NO: 5890 - DNA, 329 bp, Triticum aestivum
  Clone ID: LIB104-037-Q1-E1-H9
ctcgtgggtcgatggggaaccctagagtgagtcgtatgacgatcaatgtaacgcacgcctctacctgatcatacccaattggataaagtgtgtagagatcatgtccgtataccgtacgtgctactgaagtaaaagattgagtctgtgtctaagggtacttatataacaaatcaagttattcctaatatctacatccctcatcatgacagggtacggcataacccacaattatgaagttacctagcacatgagcaactatacatgacatcatcgcagtctcttacaccgtgtgtgggccccccctcgagagtgcactacatgatccatac

SEQ ID NO: 5891 - DNA, 214 bp, Triticum aestivum
  unsure at all n locations
  Clone ID: LIB104-038-Q1-E1-A1
taccggtccagaattcncgggtcgacgggatgtagcaaacaatgaatcgatggacatgcatctatcattttgtaaacataccagttgtctcggtgataaaagcataaatgtttcctcctttcagttagtgaatattctcctttggtcctggtttagtattttcggagtacatgcaagttactgtaacttgattgatagtgttgttaagagatat

SEQ ID NO: 5892 - DNA, 441 bp, Triticum aestivum
  Clone ID: LIB104-038-Q1-E1-A10
cggtccagacttcccgggtcgacggggcgtgacggaccgctaaacctagacaaatattgaggaaaatgaagtttgacggtcgagcttggagaggagaaaccttaagtagtgtggctcgggcattccatcgaacaccttgtgtgcataggaggtgagctagagcatcaccaagccctctccccctcggccagaaaaaacagagcagtgtgctctgctcttgcgtgagggggtatatataggcaccatcattggtcccggttggtggcatgaaccgggaccaaaggcatccgggaccaaaaggtccggacgaaccgggaccaatggcccacgtggcccggccggcccctgggctcacgaaccgggccaaatagcctcattggtcctggttctggattgaactgggactaatgggctgacctggcctggacaatagcccccttt

SEQ ID NO: 5893 - DNA, 413 bp, Triticum aestivum
  Clone ID: LIB104-038-Q1-E1-A11
accctaaagtgagtcgtattaacaaatattgaggagaatgacgtttgacggtcgagcttggagaggagaaaccttaagtagtgtggctcgggcattccatcaaacaccttgtgtgcataggaggtgagctagagcatcaccaagccctctccccctcggccagaaaaaacagagcagtgtgctctgctcttgcgtgagggggtatatataggcaccatcattggtcccggttggtggcatgaaccgggaccaaaggcatccgggaccaaaaggtccggacgaaacgggaccaatggcccacgtggcccggtcggcccctgggctcacgaaccgggccaaatagcctcattggtcctggttctggattgaactgggattaatgggctgacctggactggacaatatcccccttt

SEQ ID NO: 5894 - DNA, 435 bp, Triticum aestivum
  Clone ID: LIB104-038-Q1-E1-A2
taccggtcaagaattcccgagtcgacaggtaggcctaaacctgctgctcacttcatgggcatgcatcaaagcctcggtattcagctcgcacagcttgggaaggatgcttctgcagcaggagctgcacgcagaggtactactcagcggaagacagttgaggtcgagtctgttgcagctgcagggaagcaacaagctagagaagtagtgaagaaatctttccgtgccgagttcctcgagaagctgcacaaagatttggatgacgatatcgatgtgagagccttggcaaatggatttatatctgtcactcctctgaatgtgcacggccatgtcgagtctgaactcgaagctccagcgtcagactggctgtcagcagctgtgtctgtatccgaagaaaacgaagctccagcgacctaacagacactcagaaatgtacac

SEQ ID NO: 5895 - DNA, 465 bp, Triticum aestivum
  unsure at all n locations
  Clone ID: LIB104-038-Q1-E1-A4
cgccggcatgtaccggcccagaattcncgagtcgacggggacgcagaagatcgtgatcccgccgggcaacttcttggtggccgcgctggagctgtcaggcccctgcacctcctcgatcatcatccggctggacggaaacctcctcggaaccggcgacctcaccgcctacaataagaactggatcgaggtgatgcgcgtggacaacttcaccatcaacggccacggcaccatcgacggccatggccccctcgtgtgggacaagaaccagtgcagcaagccctacgactgcaagatcctctccaacagcctggtgctggactacgtgaacaacgcgacgatccgtggcatcacgcttaagaacgccaagttcttcaacctcaacctcttcaagtgcacgacggtactggtggaaaacgtggagatcactgcgccggtgaacagccccaacactgacggcatccacat

SEQ ID NO: 5896 - DNA, 447 bp, Triticum aestivum
  Clone ID: LIB104-038-Q1-E1-A6
accggtctagaattcccgggtcgacgggcaaagaggttatacagcagggttcacgatgcattcgttggagcattttgtcaaatgacttctcatgcagctcctagcttttcagttaagcatctctgtctattggaattcgcccaatgtatgtgcttgggctttgttttgattgatggaccttaaagctgaagcattaatgcatgaacttgctaaatggatggagcaacaggcatagaagaaatccacaaccaatttttcttggctgcgccatcttccgctgacagtaactctatacaacagcctgctaaggtacgtaagagtgatgataatgttacttaaaggaggccacaacttgcaccaaatatatgggcatgtgcaacggcaacttatgtaaatcgtttctaggtgatgctgatgaatcatgtaaggatggagcataactcacca

SEQ ID NO: 5897 - DNA, 446 bp, Triticum aestivum
  Clone ID: LIB104-038-Q1-E1-A8
accggtcaagaattcccgggtcgacggggcagttggtgcccctctcggagcagcagctggtggactgtgaccaatacgacggcgggtgcaaccgcgggtcctttcacagggcctacaattggattgtggagaatggcggccttaccacggcagcggattacccatacacggcggtgaggggcgcctgcaaccgcgccaagtccgcccatcacaccgtcaagatccttggcggcggcgtgatcccgcccaggaacgagcccgaaatgcaggtcgccgtctccgggcagcccatcggcgtggctatcgaggtcggcagcggcatgcagttctacaagagcggcgtctactcgggcccctgcgggacaaatcttgctcacgccgtcaccatcgtcggctacggcgtcgatgcccctactggggccaaatactggctcgtcaagaactca

SEQ ID NO: 5898 - DNA, 301 bp, Triticum aestivum
  Clone ID: LIB104-038-Q1-E1-B11
gcgtatgacattactacatcctaaagtgagtcgtattaaacggttagcgcgcgaacgagacaatttgtggccatccacgtgattggaatttccatttgtaggctttcaatagcaccacggtatgctagagataacagttggaggctttcagtgatagtttgtcttgcaatggggacataatatttctagtgagtaaaagacggacgtgggagagaggaatcagcgcagaggagatcggcgagtaaagaggcagtagaagtaaagaaaaaaagccggccgctccacaggttccaaccttagg

SEQ ID NO: 5899 - DNA, 412 bp, Triticum aestivum
  Clone ID: LIB104-038-Q1-E1-B2
aattcccgagtcgacgggactcttgaggtgcatgccgttgacggcgatgactgcctgattaagtatgacggtccagagtccatccggagtggagtgaatgcagccatcaaggataagttccccgacatcacgaacgtggtgttcacccagtgatctacaagtagcctggccggcttgatgccatcccagtgcactaagtggcgacatgtacgaaatgcagcgagattctgtatcatctacacacgagtttcgatgtatcgtttgggtatacaaagttgcagcacacacaaacactacaatgggaaatgacatggaataattcttgcctattggaagccgcctccagaactcaccatcctacgtgggccgcgtaaggttcttcaagaaggaactcctcaaagaacgggacttt

SEQ ID NO: 5900 - DNA, 441 bp, Triticum aestivum
  unsure at all n locations
  Clone ID: LIB104-038-Q1-E1-B4
attcncgagtcgacgggatgcgcgaacggtttaactagaccggccgcatgggcaacccgggaagaccggaaggaaccccttaccggcaaaaggtgtgtggcaatttggtccacaaagtggatgaggtgatcctggtcctcatcacaatcggcctgcttgcgctccaacctgctcccctgacggcctatcgtatctcctgctttctacagcaatgtcgctgatgcctcgagcatctttgtggtggacgcctgccgcttttgaaggtccatgaactcctgcacataatgaaggagcatgggactcctctcctccttgagctcacggagctccacgtccttggccctatgctccgcatccttggcctgcagctcctgtgtctggcgcttcacctcaaattccgtgatctgatgtgccgccatggcactaggtagaagcaatggg

SEQ ID NO: 5901 - DNA, 449 bp, Triticum aestivum
  Clone ID: LIB104-038-Q1-E1-B8
accggtctagcattcccgggccgacgggaggagaaaaggcggaaggagctgcctctcgagctgaagctgagggtatcgtatgagctcgtggggcggctgaacggcctatgggataacggcactgccatctagcaacgagaagctctggaatcatggcgtgttgagacgctaaaagatgcaaaaagtgcatctactcggaattcatcaaatttgggcctctccagtgaggaagcacgattgttaaagcgagccctggagttcaactggcatgcgctattggaggatattggtctttggatttcaccagaagtcccacacaccgagcatgatgacaaacctgagaatgaaccagaagaagaagaaataatagctggtccacctttgcatccacaatgcaacactgagctacatgccgattatggtggtgctgctgtgagatggggattaac

SEQ ID NO: 5902 - DNA, 384 bp, Triticum aestivum
  Clone ID: LIB104-038-Q1-E1-C10
ccggtccagcattcccgggtcgacagggacgacgacgtggatgtggacgagtcggatagaaagctcttagatgatgaaaagaaacccgatatcacgaaacgaccacacactcctattggagatgaggtggaatgcaagaagccaaagatagcagaaggctcaaggtgccaaggagaagaacctgaggctggagggataaagaattcctcctgggtctgatgacaggggaatgcagtaaacaccagaagcatcaaaactatgatctggaacagtatcctgaataaactattttctggattatgaatgaattctgaagcatggggctataagtgaattatgtaacatggatttgtaactatggtggatgttaagttaacgttctat

SEQ ID NO: 5903 - DNA, 419 bp, Triticum aestivum
  unsure at all n locations
  Clone ID: LIB104-038-Q1-E1-C3
attcccgggtcgacgccggccgccacctcaggatcaccccgcaccacgacttccgtcatggctcctgcagcagccacggctgcgccctcgccacctgccctcccaacatgtgcaagggcaaggtgatggatgcgatgctgcaagaactgtccgcggcggctgcggcagggacgaggaggccgagtagagtggtgtacctcggcgatggtaggggcgactactgccccaccctaaagctggccgagcgggactacatgatgcccaggaagggctaccccgtgtgggacctcatcgccggagaccggcgggccgtccgcgcagacgtgcgcgggtgggccgacttcaaggacctgnatacggtgctgcttgacatcatacacgaatgcgccgcggccgccatgatggaacaagacggcggc

SEQ ID NO: 5904 - DNA, 464 bp, Triticum aestivum
  Clone ID: LIB104-038-Q1-E1-C4
cgcctgcatgtaccggtcaagaattcccgagtcgacgggggtaatattcaaggacaaccaagagcctaagcttggggatgccccggaaggcatcccctctttcgtcttcgttcatcggtaactttacttggggatatatttttattcgccacatgatatgtgttttgcttggagcgtcattttattttgttagtttttgcttgatgttatttagattaatgttttgcatcattaggttcaataaaaaagtcaaggatagactttgccatgcttattttgctagtatacatgttggttgtttgaaaacagaaagtttaccgctgttgcaaaaattccctagaaaagttagagaatggtctaacattggatatttttgcatattaagatgtgataaatttactacagtgagaattttagttcataatttttggagttgggtatgtaagatgaatcttgcattcctt

SEQ ID NO: 5905 - DNA, 202 bp, Triticum aestivum
  Clone ID: LIB104-038-Q1-E1-C5
acggtctagcattcccgggtcgacggggggcacaaaaaaaaaaaaaaaaaaaaaaaaaaaaaaaaaaaaaaaaaaaaaaaaaaaaaaaaataaaaaaaaaaaaaaaaaaaaaaaaaaaaaagcggccgccctaaaggttccaagcttacttacgcttgcatgcaacttcatacctcttcaatagtgtcacctaatttcaatt

SEQ ID NO: 5906 - DNA, 450 bp, Triticum aestivum
  Clone ID: LIB104-038-Q1-E1-C6
accggtctggaattcccgggtcgacgggagagagtgtgtgagcatgtttgagagaccaccgacggagggtgaaactacacgtaaaagactgatgtacacattgagaaaaaacataaattgtatccaaacattaggatgggatcatgatatttgcaattcgcgtaaggaaaggtcattgatccatcagacatctagattctattgaatttgagcatgtctatgttattattcgacataattgatccacatagttagtattttgaactccagacaatgcatcgctttagcaatggaatataaacgtgagtataattcatgttgtgtgtgtaaagcacattatacatacgaaagttacacaatgaacattataaatagctagctaggaactagcatacatttgaattcaacttaaggtggtttaaaaaattcgaattcaacatgaagtccatt

SEQ ID NO: 5907 - DNA, 416 bp, Triticum aestivum
  Clone ID: LIB104-038-Q1-E1-C8
taccggtcaagaattcccgggtcgacggggttgctaaggctgattgcttggatgatttggcttttgcaattatgcaagagatgagcaaattatcatacagggttactgaagaggatgttattcgtgcacgcaatcagttgaaatcctccatccaactccaccttgatggctccactgctgttgttgaggatattggacgccagcaactcatctatggccgtagaattcccattcctgagctttttgctagaatagatacagttgatcccagcactattaggcgtgttgcaaaccgcttcatctttgaccaggatattgccatcgctgccatgggaccaattcagtctcttccagactacaactggttcagacgcaggacctacatgctccgttactagatgattcgaccagcggtg

SEQ ID NO: 5908 - DNA, 431 bp, Triticum aestivum
  unsure at all n locations
  Clone ID: LIB104-038-Q1-E1-D1
attcccgggtcgacggggtattgaaactcttgcattctttacagactgtactgttttggcagattgctggtatgtttgcgttgtttgcatatgttcgcttatttaatgattctatttgaggataggagtattaaatatgcagaggcatttagtattcaatgttgaataataattttggtgatttgttacagtagaatatgataaggttttgcattggtttatactaacctatctcacgagttcttgttgagtttgttgtgaatgaagtttttgataaaaagaaagaccatgatatgagaggaattaaggagacgcaaaagttcaagcttggggatgcccaaggcaccccaagatattatttcaagaagtctcaagcatctaagattggggatgccccggtaggcatcncacctttcttcttcaacaactat

SEQ ID NO: 5909 - DNA, 439 bp, Triticum aestivum
  Clone ID: LIB104-038-Q1-E1-D11
taccggtccagaattcccgggtcgacgggtacagaagacagacaaagaaaatgccgggtggaaagcttgttactttatcagatcaagatatattggagatggttttcttcccagtcgttaatgaggcatgcagggtcatggatgaaaatgtggtgatcagggctgctgatcttgatattgcatctgtccttgggatgggctttcccaagtacaggggtggcctcatcttctgggctgatacggttggagcatcctatatacattcaaagcttagcaagtgggctgaaatttacggtgacttcttcaaaccatcatcatacttggaggagagagcgaaaagcggccgaccactgggcgcgccgaagatggctcagcaagctccgacgaggtcacgcatgtgaggttcagcatatggcacggtttttgcttgaacagcatc

SEQ ID NO: 5910 - DNA, 462 bp, Triticum aestivum
  unsure at all n locations
  Clone ID: LIB104-038-Q1-E1-D2
cgcctgcatgtaccggtcaagaattcccgagtcgacggggaactacatagcgcagactgacagtctctcctctggcaaaacataagattanagcaacacgtgaagtacagaggtactcatcaagacttacatcagaactagctacatatgcatcggtatcaacaaggggggtggtggagtttaactgcagcaagccagctttgactcagtggctaacctgaactacgactgcaagcaactcttttgaggtggcgcacacgagtccacatattcaccattcaatacaacactatggaaccgctcccgtctccctacgagaaggccatccatagcactcacacttatcttgcgagttttagactatccactttcacttgtctatgaactatgcaaggggtccaagtttcacatccgaagaatccggctattcgaatagataatgataaccctgcacgggtgtac

SEQ ID NO: 5911 - DNA, 439 bp, Triticum aestivum
  Clone ID: LIB104-038-Q1-E1-D5
accggtccagcattcccgggccgacgggtcactctacttcgacgtgttggtagcactacgttatgccatcaaatctatcgtagacacatagaaagatcaaagaaatgtgagagaagaacatgaacgacatgagaacacatgggaatgtgagacatccggggtagtcgtggaacgagttgtcattctggcacttgacggcaccaaactactagatatcgagagagcaaggatactgtggcttcatttattttagctgatcgtatattcgcattcatctcgtttgtctttttgcaatccatagctcgagagttcgaaactaaattctagggcacaagaccctattcttcctccttttatggttgggcacgaataatttctaattctagcacatcacaatcataatcttctagcatattcattgttggcattgtgtcatccg

SEQ ID NO: 5912 - DNA, 445 bp, Triticum aestivum
  Clone ID: LIB104-038-Q1-E1-D6
accggtccagaattcccgggccgactaagtactcaatctgtacctttatatagtgtgtgtttcatcctgactacaataccaaggagtgtggtggcatgtgtactttggatcctcataggttgatcccctccaccaagtatgtccacatgcatgtgcccaacgatggaaacttcccaggcacacttccaacccagccaggggtattttcatccaaaactccaaccgtgcactacattgtggaactttgctagaaaaataaggcgcactacatagaggaatggagggaataaggtaacatgtgttgtagacgacattaagtcttggattatgtgttaagtcttcgaaaaatattccttctatgcgccatgggttcctcaatatggcaacacatacctgctacctcgcgtagagctgatgtcacgcccggataattaagctacagtag

SEQ ID NO: 5913 - DNA, 441 bp, Triticum aestivum
  Clone ID: LIB104-038-Q1-E1-D7
ggtctagaattcccgggccgacgggttttgcaaaaaaaaaccctgccgttttctcgaatcaacccagagtacaacacaacacttgaattaattctgtctgaatcttcagttaactagaaattctagccactaaatcaagctcacgtaagcgaccagctagccctacgcaacgctatcttctccatcgttgtgtttagttcgtgcctgcgttttagctgatggatctttcacgttttgatgaagctgctggacgaccgctgcgcccgcgtgaacaggcggcgcggccccggcgtcgtgacagccgcgtacgatttcctctacctgcccatggatttcaggtgattcatttcatgctcgctcttctctcacggtttgacagggtgatttcttgcctgcattttttcttgtgccgtaccggaacagaatagtcgcactatcatc

SEQ ID NO: 5914 - DNA, 440 bp, Triticum aestivum
  Clone ID: LIB104-038-Q1-E1-D8
taccggtctagcattcccgggtcgacggggaacgtgatgaccatcttcgaggaggaaggcgggcggccggacgccatcatgatcctgacggtgaagcgcgacaacatctgcagcttcatctcggagaccaaccccgggcacgtgcggtcgtgggagaccaaggacggccagctgacgatggtggcggacgacctgaagccgcgggcggtgctgacgtgcccggagaagaagatgatccagcaggtggtgttcgccagctacgggaacccgctggggatctgcggcaactacacgtttggcaactgccacacgcccaaggccaaggagattgtggagaaggcgtgcgtggggaagaggagctgcgtgctggccgtgtcgcacgaggtgtgcggcggggacctcaactgcccgggcaccacggccacgctggccgtgcaggc

SEQ ID NO: 5915 - DNA, 414 bp, Triticum aestivum
  Clone ID: LIB104-038-Q1-E1-E1
attcccgagtcgacggctgcaagaccaagactctgccgaggcctctccgcgccggcgccggcatgcccaccacgtcaggcccggtggtcgccgaccttccttcatccgagccggacccagatgacgcctttccttcatccgagccggacccagatgacgcccttccttcatccgagccggacccagatgatgcggtccgtgcgtcgtcagaggcgccggaacatcaggcgatggggccacgtacaccgttatcggagatccacgctgctcctccggcgtctgcgtgacaagaacacctcagcgtacggccgtgacagtcagcattggccgaccaatcgatatgtaagcgcgatcaccaggtgcggagggattagcgcatggccgcgtgctaatgggtgtacacgtattatttat

SEQ ID NO: 5916 - DNA, 329 bp, Triticum aestivum
  Clone ID: LIB104-038-Q1-E1-E11
taccggtccagaattcccgggtcgacgggcgtaccaggtttaccggagatcagggcgaaagaaaagggcacgtcgtcaatctgcgaggttgtaatgtccctcccgagctaacacattcatgacatacatggattgcacgaaacagggaatttgactagatgctgattatgtagcaaaacgatcacatctgcgtgtggaagtaactgaaactattgcatagaaaaccatgtctcaactcgggtcatgggacggtagcgctatacgatccacgcaaaagttgacgaccagccaatttacaacaccgactaaagtgtaagggaaaggcattc

SEQ ID NO: 5917 - DNA, 150 bp, Triticum aestivum
  Clone ID: LIB104-038-Q1-E1-E7
ttactactccctatagtgagtcgtattaaatctgcagtgtctctgacggcccaggtacgatttcttccggacatatagacgtcctcgtagtaagctttcaaagtatggggacactggcagcagatagtacgtaggaaagattgaagtacc

SEQ ID NO: 5918 - DNA, 441 bp, Triticum aestivum
  Clone ID: LIB104-038-Q1-E1-F10
accggtccagcattcccgggtcgacggggctctgtgaggataatgacccaatggacgtccttgtcctgatgcaggaacaagttgttcctggttgcttcctgcgtgcccgtgctattgggcttatgcctatgattgaccagggtgagaaagatgacaagatcatagctgtgtgtgctgatgatcctgagtaccgtcacttcagagacatcagtgaacttcccccgcatcgccttcaggagatccgtcgcttctttgaagactacaagaagaatgagaacaaggaggttgcagtgaatgatttcctcccagcagaagatgccatcaacgcaatcaagtactcgatggacctctacggttcgtacatcatggagggcttaaggaagtgatctccagttggtggactgcagatgctacgctatccgccctacggcttatcaatag

SEQ ID NO: 5919 - DNA, 462 bp, Triticum aestivum
  Clone ID: LIB104-038-Q1-E1-F12
taccggtcgagcattcccgggtcgacaacaagccataaccatggaatgaatgccgagcctctcagcattcattcattcactcaccgtgttatcacgaagcatcataatacgtcatcgccaatgatggagctggctgcaaaaaaaaaaaaaaaaaaaaaaaaaaaaaaaaaaaaaaaaaaaaaaaaaaaaaaaaaaaaaaaaaaaaaaaaaaaaaaaaaaaaaaaaaaaaaaaaaaaaaaaaaaaaaaaaaacaaaaaaaaaaaaaaaaaaaaaaaaaaaaaaaaaagggggcgccttaaaggataaaagtttaacaagcgggaaatgaaatcaaaaaactcttttaaaggggccccaaaattcaattaaaggggcctttttttaaaacagtagtatggggaaaacccgggggttacccaatttaacccccttggaaaaaaaaccccttttccaaaggggggg

SEQ ID NO: 5920 - DNA, 460 bp, Triticum aestivum
  unsure at all n locations
  Clone ID: LIB104-038-Q1-E1-F2
cgccggcatgtaccggtcaagaattcncgggtcgacggggacgctgctgatgaagtccaggctcgccggatgcggttttggctcaagctgcctccgcttgttggctgccttgccatccatctcaaccggcggtgacgcggtgtacacatgtgctggtgtgtgttgtgtgctgagtgtgcgcgagtgcgtccttctgtgcatgccactgcgcagtgctgaattgtgtgcgagtgcatccttcacgcggaagaagtgtgtcctcaatgcgccctcaatttactaacgtgcacggtgatatctactacgcaaccttctccttgtagacgttgttgggcctccaagtgcaaaagtttgtaagacagtagcaaatttccctcaagtggatgacctaaggtttatcaatccgtgggaagtgtangaataagatggtctatctcaaacaaccctgcaaccaaataac

SEQ ID NO: 5921 - DNA, 462 bp, Triticum aestivum
  unsure at all n locations
  Clone ID: LIB104-038-Q1-E1-F3
cgcctgcatgtaccggtcaagaattcccgagtcgacgggtccgcaaatgctatcttcttgaatctcatgtaggcatcatcatacgtattcaagccagtccggaaggtcgatcccaatggtggagaaggggtctaccggaatggccgcactgctgtggatgttgtgcaaaatgatggtggatccggtcggagatatgcaagccaatcttcattggcaccgacccagacctatatataagacggcgggcagcagagaaattacgggatggaaatggaataactaagtactacctgatcanactccattactgacctgctcatcggacaatatccgactacctctcaacgtcggcaactctagcggagtcaatgtgcaaccatggccaaggagcggtggactgttcgaaggattgtcccatagaagaaccttctcctcgaggacgtatggaagaccaacaagcat

SEQ ID NO: 5922 - DNA, 442 bp, Triticum aestivum
  Clone ID: LIB104-038-Q1-E1-F5
agtaccggtctagaattcccgggtcgacggggagaattgtcttatgaattctcccaattgcaatttttctgatagactaggagctatatcttcgcgaaacataaaccgccgcaaagtaagctttcaagaaatggggacagtggcaccaaatagtacttggaaaacattgaggtaccaggatcagttcgtgcattcaccagcaaggaaaagatattatccatacccacccgagcattactacagtccccacacaccagctatgaggagtcccctggcgccaagtaaaacgcctttcacatcgacaaccgcgaggcgcaagatgatcttctggaccgaggcagaggaggtggctctgagggaggcagtggcgaagtttgccccgaatggggaggccgcgaaggagaagaggtccatctcgtgggtgcgcatacacgagtactgc

SEQ ID NO: 5923 - DNA, 438 bp, Triticum aestivum
  Clone ID: LIB104-038-Q1-E1-F6
taccggtctagaattcccgggtcgacgggctccgtttgatattgatttcctgcgatgtaaaaaactagcaaaaaatagcaactggcacttggcactgggtccataggttagtcccaaaaaatgatataaagttgctataaaatgattgtaaaacatccaagaatgataaaataacaggatgaatacttcatatattatagatacgttggagacatatcagcatccccaagcttaattcctactcgtcctcgagtaggtaaatgataaaagaaataatttatgaagtgcgattgctagcaaagtgcataagtttgatcaatgataatttcaattacttttcctagcatcataacaacaattctttcttatgaaagttctcatgttatagtagcaaccaattcacatgttaaggttcaaacaatgaattctcttgaaact

SEQ ID NO: 5924 - DNA, 426 bp, Triticum aestivum
  Clone ID: LIB104-038-Q1-E1-F7
taccggtctagaattcccgggtcgacggggaatttcaagtttcccctagattaaatttattttcttaccaattgtccaagaaaaagctacaaaaagttagacctattcatcctttttgtccaagccagtctgagcctttgcaattttcttttcattgtttgcattattgaattatcggttgcatcgtcgtgtcgagttgctggtcttagtgtctagttcgtttagagtttcgagttctgttcacattagtcacatcgccgctgcatcgttatcctttccgctgtccaccaccccatccatcaatttccaccacgtgctacccatagttcattgtcacaatcatagttgaggtcgttcacatcttcgcttgatccaatctgcatcttatctagtttgtcttggaaagagggagagaaaaaaagacag

SEQ ID NO: 5925 - DNA, 270 bp, Triticum aestivum
  Clone ID: LIB104-038-Q1-E1-F8
attactacaccctatagtgagtcgtattaaaatttattttcctatcagttgtccagaactgtgctataggaagttatacatatgcatcatttttgtccagaccaatctgagccattgcaagtttcttttcattgtatgcatgacagaattatcggttgcatcgtcatgtcctgttgctgctcttatgatatagctcgattacaagttcctaattctgttcagactactcatatgttacagcagcatcgtgatcctttatgatgtgcaata

SEQ ID NO: 5926 - DNA, 380 bp, Triticum aestivum
  Clone ID: LIB104-038-Q1-E1-G10
accggtccagaattcccgggtcgacgggtgggataagaatgtcgaaagggaataccggtatttcactaccatgactatacccgacgccaagagagctaccgtgaacgtcattgcaaaaatgagccatgggtacacgctaagcatgtgacacaatgctttttcataaccgacccaagcaatcccagccgtgttgtcgtgaggagaggcaaaaggaacatcattggaatggatggagtctccaacgaggaggactacgaccagtacggcaaccctatgagggaagatgacgatgacgatgaagtatacgtcaaaagaagaatcagtactacattacctaagaaagatcatactccatggaaaaggaaaagccacaatgaagg

SEQ ID NO: 5927 - DNA, 409 bp, Triticum aestivum
  Clone ID: LIB104-038-Q1-E1-G11
cggtccagaattcccgggtcgacagggatcatcaactttcctttttacactttttcctttggcaagcactttgtgttggagtgataacccgcaagtatacgggatcgcaacagttttcgaaaagtaagagtgtcgaacccaacgaggagctaaaggtagaataaatattccctcaagttctatcgaccaccgatacaactctacgcacgcttgacgttcgctttacctagaacaagtatgaaactagaagtactttgtaggtgtgataggacagatttgcaagataataaagagcacgtaaacataaactaggggctgtttagataaagaagcaataaattacatattagtagagagctttttgttacgagaaaagttatttgtccaaggcaatcgataactagaccgg

SEQ ID NO: 5928 - DNA, 428 bp, Triticum aestivum
  Clone ID: LIB104-038-Q1-E1-G12
ttcccgggtcgacggggctattggtcagcttgcaaggctcctgtgggaagctgagaagtcggggcactaccagtacttcctctgtgtcactggagaccactctactcctgttgagtacggagaccacagctttgaacctgtcccgtttgcaatatgccgtctgagagatttcgtgggagcgattggggagggcaatgtgatgaataccccccttgacgatttcccgctgcctttggttaaatccggagaagatttaactgatgattcagaaccagcggaacacaagcctggggagcgtaaagcttttagcggcgatacagtgtgtgaatacaccgagattgctgctgcaaggggctgccttgggcggttccctggaagtgagatgatgggcatcatcaagaagttcatgaaagcaaagaacgattaac

SEQ ID NO: 5929 - DNA, 444 bp, Triticum aestivum
  Clone ID: LIB104-038-Q1-E1-G3
attcccgggtcgacgtttgtcgtcatatgctggtgtggaaatgtttcactatatgaatttgctaattctcgtctgacaaagtctcgtctactactacactacttgattaatcaaacaaaaaatataaaaaaatcaatacgaattaccgtgtaaaatccaacggtataggagttagatgagacatagttatttctcgagctagactagagctagacacacccctttactgtatatattctttgggtgacgttttgtttttgaagtctgatctttactcagctcaactattggcatctgggtgtgggccggtttagtcatttctcctgccagtgtcaatttactgttacctttaagcccgggcccgtgtgatgaatggtagtgtatcctggaacctctctgttgttcacatgcatttttcttgagatataaatattgataaacttt

SEQ ID NO: 5930 - DNA, 343 bp, Triticum aestivum
  Clone ID: LIB104-038-Q1-E1-G5
taccggtctagaattcccgggccgacggggagaagtctgtccttgttagagagctttcaagggcacttggttctaagacgcgtcctccgaattgatcaatactactggcgagtggctgttgtcgttgttgttgtaacctgtaagtccaccattatgaagctttcgcttgttttacgtgtctgccttgtctatatgtgtaaggctacaaggaacgaaatcaatgtacatatgttacccctatgttaaataaagcagggtttgccactctaaaaaaaataaaaaatataaaaaaaaaaaaaaaaaaaaaaaaaaataaaaatcaatattcaaaaaaaaactaaaa

SEQ ID NO: 5931 - DNA, 448 bp, Triticum aestivum
  unsure at all n locations
  Clone ID: LIB104-038-Q1-E1-G6
taccggtctagcattnccgggccgacgggattcttaacaagaagggagtggtcgtgttgcctgatatctatgctaatgctggtggtgtgatcgttagctattttgagtgggttcagaacattcaaggattcatgtgggaagaagaaaaggtgaacatggagctccataagtacatgaacagcgcgttccagaacatcaaggccatgtgcaagtctcaagattgcaaccttaggatgggagcattcaccttgggagtgaaccgggttgctcgcgccaccatcttgaggggctgggaggcatgaggaattccagattccttatcgaataatccatgcccgacaccgtggtggatgacagttcttatatccaccatcattgatttggtaaattcatcataagttgccggcatgccaggagtccaattgaaataattttcggtgtacatgac

SEQ ID NO: 5932 - DNA, 445 bp, Triticum aestivum
  Clone ID: LIB104-038-Q1-E1-G7
taccggtcaagaattcccgggtcgacgggttctgttattgctgcatagtttgcttgttttgatgaaactatcgatttctattagtggattaagccatggagaagttatattatagtagctacaatgcaaacatcaaatatgaattggtttgcaacagtacttagagtagcgatttgcttcattgtactaatgatcttaccaaactttctattaagttttgtgtgattgatgttttcaagttttcggagagatcacgatggatgaaggaataaggagtggcaagagcctaagattggggatgcccgaggcacaacaagtaaatattcaaggactcccaagcaaccaagcttggggatgccccggaaggcattccctctttcttctaacgatcatcggtaatttcacttggagctatattttattcgtcacatgatatgcgtaaatc

SEQ ID NO: 5933 - DNA, 429 bp, Triticum aestivum
  Clone ID: LIB104-038-Q1-E1-H1
cgcctgcatgtaccggtccagaattcccggatcgacgggagtcagtgaagtctcaagccggaaggacaagctctgtacacacaggtatactgtcatcgaaagaaagacagcaaacacgtacatatgacgtctcaagcccgacggacaagctctgtacgggcgaacctgagcgaaagatcagttatactggagatggatcatctcggtcccagaacccttgctgacaattgtctcagcacaccgatcgatgttcttgccgtctgtgacttatactgtactcgttgtgccggtcctgttctgtatcctgcgcaagtataatgcgattttggatggctccttattatacatgtgcaaaatatggcatacttggcgtcaacaggtgcatcacaccagtcatagttgttctttctttgttgttgtctcagctca

SEQ ID NO: 5934 - DNA, 439 bp, Triticum aestivum
  Clone ID: LIB104-038-Q1-E1-H10
ttcccgggtcgacgggggagaagaggccggacaaggtgaccggattgatcagcgcggagcaggccaaggaggccgagcgcagggaggccgaggagcgcaaggcggaggaggaggagggcggggccgcctgggccaagaacaagcacgtgtatcagttctgatcgatcgccgccgggcgccgcgcccggccgtgcatctcgcggcagatggtgttctgaacggaaaaagttcgcgagagatgatggtgtgcatgtatccaccgctcaccgtcacttggagattcgtgctacgttttcttgttttgtcaaaagcttgtcttgtttcagagtgttgcatgatgtttctctttttaaaaattatcgtgatgtttcgatgtgtatatcagtaaaataagagagtactcagttcaaataaaaattaaaattagagagtactcgac

SEQ ID NO: 5935 - DNA, 446 bp, Triticum aestivum
  Clone ID: LIB104-038-Q1-E1-H7
agtaccggtctagaattcccgggtcgacgatcaggtcgacgggccatcggcgtcgcgccgcccaatcctggtcttcttcgccggcggtgaccatggccccgttcggccactgctcctgcagcactggaagggcaaggacaccgacgtgcaggtgagcgagtacctgccccggggtgtgtcgtacatcaacgtgatgcggcggagcaagttctgcctgtgccccagcggctacgaggtggccagccccagggtggtggtggaggccatctacctcgagtgcgtgccggtggtcattggcgacgactacgtgctgcccttcagcgacgtgctcaactggcccgccttctcggtgcgggtcgccatggcggacatacccaacctcaagaccatcctcgccgccatgtcgccgcggcagtacatacggatgcagcgccgggtgaggaccg

SEQ ID NO: 5936 - DNA, 441 bp, Triticum aestivum
  Clone ID: LIB104-038-Q1-E1-H9
accggtccagaattcccgggtcgacgggtagctccatgccatgctttactttgccatgttcaggtcctgtagcatatagttttcatgctccgaagagggctacctgatctgaaattccagacaagtgttaatttcactaagtctgaaatctgtttgccaaatgcattttttccatgcttgtttgaacctgttaatggatgaattggccgtagctcagtgctagacttttgttaagcatcatgaatggattcttgccatgtattttgttgccatgtttgggtgttgtagcatgttcatcttgttgcatttagatggctacttgctgtaaatcgcagaacgtggtcatattggaatcgcttgccatttcgaaaccgtaactccgattccggcattctttatatcgttttcaagcgatttcatctcatatttccagtggtacac

SEQ ID NO: 5937 - DNA, 429 bp, Triticum aestivum
  Clone ID: LIB104-039-Q1-E1-B6
ccgggtcgacgggggttccgaagaagaaacaccaccaagcacccaccccgtgtagtagaaatagaaacaagtgcttcgaattgcgatccgcatccgccgacacgatgtttctcacgaggacggagtacgaccgtggggtcaacaccttctccccggaggggcggctgttccaggtcgagtacgccattgaggccatcaagttgggctccactgcaatcggcttgatgactaaggatggtgttgtactggctgttgagaaacgtgtcacctcaccgctgctggaaccaagcagtgtggagaaaatcatggaaattgatgagcatgtcggctgtgccatgagtggccttattgctgacgccagaacactggttgagcatgctcgtgttgagactcagaatcataggttctcatatggggagccaatgacag

SEQ ID NO: 5938 - DNA, 370 bp, Triticum aestivum
  Clone ID: LIB104-039-Q1-E1-B8
gggtcgacgggagtggtggagaaatggaggaagaagaaggaggaacgggcgtgcacagtgcagacgcctcggccccgtcgccttataaagggttgcttctgagtgactggcgcatgggaccagaaaatcctctcaaatcccgcaacagtcgcgcgcaatgtacgtggcaaaaaaggcagcacagaaatcgaggcatcgttgtttatccgctccgcccgcttcggcgctccccgtcccgcgcgcttccccgaaatttcttatcccgtgaaatccgggatacacagcagtcaatcgcgcccaagaccctgcgctctaatacaacactcggcgcatgatgccacaagttgagtcaacaactctctgaatgaat

SEQ ID NO: 5939 - DNA, 430 bp, Triticum aestivum
  unsure at all n locations
  Clone ID: LIB104-039-Q1-E1-C7
ggtcctaaattcccgggtcgacgggcacacttgaggtcgagtcctcggacacaattgacaatgtgaaggctaagatccaggacaaggaaggcatccctccggaccagcaacgtctcatctttgctggcaagcagctggaggatggccgcaccctggctgactacaacatccagaaggagtccaccctccacctggtgctccgccttcgtgggggcatgcaaatctttgtcaagaccctcaccggcaagaccatcaccctggaggttgagtcctctgacaccatcgacaatgtgaaggcgaaaatccaggacaaggagggcattcncccggaccagcaacgcctgatcttcgctggtaagcagcttgaggatggccgcaccctgncggactataacatccagaaggagtccacccttcacttggtgctccg

SEQ ID NO: 5940 - DNA, 437 bp, Triticum aestivum
  Clone ID: LIB104-039-Q1-E1-C8
ggtccagaattcccgggtcgacggggacgtttgagattttgagttcatgaatttttccgtttcctaaggtgtttcggctacttagggacgagtctccatcatcttggtttctacatcaagaacaccgctattcatcatcgtcggacggtaacctccatatcatcttggtatcgtggtaaccctccattgtatattccccttgccattgcattgttaacccctagcccattttgcgttacttgcctatcgagactagccatttgagtattgccggcaacgttacttgtgcacattactgatcatacttcccatagcatacataccatatcatcgtggtgcatatattggtatcatatcttgtgtcacaagtttgttcccgcatatacacaattgctatcttggtttgtgcattgtgcaaagttggccatacacaataa

SEQ ID NO: 5941 - DNA, 450 bp, Triticum aestivum
  Clone ID: LIB104-039-Q1-E1-D6
tcccgggtcgacggggttggcgtaggtgatgtctgtagtattttcgtcctcgccagtcacacaattcctaggttatgggactggatctccatttccaagattcttagctgataagtatattgtgcggaaaaatctctactgaatgacagatccaagcaatctggatacgccatgggacaaagttgaagctttgtacatcacttctctacctgtttattaatgtgtcttcatgtttggcagtgatctgggtttccatgtacttgatagatgcattccttatctttatgtgttccatctacgtagatatgtttctgcccataaatgtatttatgagcttgctccgtttttactgctttcctacgtcaatttgaaaagtaccctttattcacctaataagggctatacatgcatttagacgagtgcacattttctataaacataagcattgtc

SEQ ID NO: 5942 - DNA, 455 bp, Triticum aestivum
  Clone ID: LIB104-039-Q1-E1-D8
ggtccaggattcccgggtcgacgggggaggatgacgttgggttgctgttcagatacattacattgcttcagacctctggaactccgaagtggatttttgatgagcttctagccatctgcgagacgggattccactatcgagacaagagccctcctagcaattatgttgtcaatatttcgtcaaacatgcagatttttccaccagaagattggctgatcgcgtcgtctgtaccatcaaagttttcaccagatgctattcagaaggtgctaaatgaattgactacagagaatgttagaatattctgggagtcaaaattatttgaagggcatacagactttacagaaccttggtatggtacgtcatattgtgttgaagcagtgcctccttccattatgcagaaatgggtagaaaatgctcccaacgaagatttacacctgccaaaacctaatatcttc

SEQ ID NO: 5943 - DNA, 411 bp, Triticum aestivum
  unsure at all n locations
  Clone ID: LIB104-039-Q1-E1-E1
taccggcccgaaattcncgagtcgacgggcacagagagcggtccgtagcgctcaacagcgaaggcttgaggggtcagtacaacgggcaaagctgtaataatcacttggtggtacttttttcctggcatttggtcctctgattattgtcacggtttctctatttgctggtctttatctgtattttgggcaaagctttgtacacgacgggagcaagaaaccagtcgcgccaccaccatacattgatccatatgagctactggaagatgataggatctcccggccctcccttgatgtgttctgaatctccacgacaaaaaggatagtaatttgtagatagctcaaataattttcttgttttactagatatgtacctgtaaatgcaatagctgtanactgttattatccggaaat

SEQ ID NO: 5944 - DNA, 271 bp, Triticum aestivum
  Clone ID: LIB104-039-Q1-E1-E10
gggacgacgggccaccatcaattactgcggtgctagcttcagactcgatccagagatacctatgttgactatcgctatgtagagaggttatatgctgagagtgtacattatgtgtcactcactcgtgatgttctggaatgacggttctgtcgtatcacagagttctgcgtcataagtatcctccgagtgagcctttaactgatcatagttcaggtgatgttgatcttgaaagagctagacactctgaaacgctccaatagtgaaagggatg

SEQ ID NO: 5945 - DNA, 72 bp, Triticum aestivum
  Clone ID: LIB104-039-Q1-E1-E3
caaaaggttcaagcctaagttacccttgaaggcaacgtcatactcctccaatatggtcaccaaaattcaatt

SEQ ID NO: 5946 - DNA, 355 bp, Triticum aestivum
  Clone ID: LIB104-039-Q1-E1-E5
ggtcgagaattcccgggtcgacggggaagttgttgggaggtggctcgccaaattcaagtctgtcacctaagacggaggacgtgctgaacgacctggacgctgcagatcaacatggacatggacttttcactttctagagtaacacactgacatggcatagtagtaggcgacggttctttcattataacggcttataattatcatcagactcatactattatgcaaatgcttcctatgatttcattggttaaattgtataattgtgacaggttcatatatcaatgtcaagaaagagctgagcaaaaaaaaaaaaaaaaaaaaaaaaaaaaaaacggccgctctaaaggatccaagc

SEQ ID NO: 5947 - DNA, 445 bp, Triticum aestivum
  Clone ID: LIB104-039-Q1-E1-E6
ggtccaggattcccgggtcgacgggtctccaaactacactataacagagaagtttgcacttattatggattatattgatgggttgccttttaccgttgcacatgatgattttgatgaatataacatgcatgtgcttgctgctcctacttgcaattattatgagagaggaactacatctccacctctttatgtttccaacacgataaaattgcaagaaactgcttatgctatgtattgtcctttacttgatgtgcatgaattgttcttttatgatatgctgatgcataggcagagagttagacttcgtcattgcatgatatactttgctttgtgctcataactaaatgacaaatcattgttaattaaaattggctttgacataccttgggatccgggtggattcgttacttgagcactttatgcctagcttaatggccttaaagaa

SEQ ID NO: 5948 - DNA, 451 bp, Triticum aestivum
  unsure at all n locations
  Clone ID: LIB104-039-Q1-E1-E7
ggtccagaattcccgggtcgacgggtatctttttgagaacggtggtgaattattttgtagaaattgctagtctctcatgcttcaattatatctttttgagagtcttttataacagcatggtattttctatggttataaattggtcctagaatggtaggcatccaagttgggtataataaaaactatcataggaagtgaattggatgctatgatcaatttgatacttgataattgttttaagatatggaggtagtgatattaaagtcatgctagttgggtgattatgaatttaaagaatgcttgtgttgaagttaggaagtcccgtagcatgcacgtatggttaaagttgtgtaacaaatttgaaacaggaagtgtacctggcttgtgcatccttatgactggcggtcggggacgagtgatggtcttttcctacantctacccccctaggag

SEQ ID NO: 5949 - DNA, 446 bp, Triticum aestivum
  Clone ID: LIB104-039-Q1-E1-E8
ggtccagaattcccgggtcgacggggtggtatcagtttttaggttgctcggtgagaatttccagttttcctagattagatttattttcttacctattgtccaagaaaaatccacaaaaaagagttagatcgattcatccttggtccaagccagtctgagcctttgcaattttcttttcattgcttgcatagttgaattatcggttgcatcgtcgtgtcgagttgctggtcttagtgtctagttcctttagagttttgagttctgttcacattagtcacgcagccgctgcatcattatcccatctgctgtccaccaccccatccatgaatttccaccatgtgttacgcactgtttattgtcataattatagttgaggtcactcacatcgtcatctgatcgaatctgcatcttatctagtttgtcttggaaagagggagataaagaag

SEQ ID NO: 5950 - DNA, 469 bp, Triticum aestivum
  Clone ID: LIB104-039-Q1-E1-F11
acgcctgccattaccgggccgaaattcccggatcgacgggagtacgtttaacaccaatataaataaagaatgtgttcattacagtaccttatgtggtggttttgcgttcttgcactaacggtgcttatgagatttcctgttgagttttgtgttgtgaatttttcaagttttgggtaaagatttgatggactatggaataaggagtggcaagagcctaatcttggggatgcccatggaaccccaagatattcaagaatagccaaaggcctaagcttggggatgccccgggaaggcatcccctctttcgtcttggtttatcgataactttacttggagctatatttttattcgccacatgatatgtgttttgcttggagcgtcttgtatgatattagtaatttccttttagtttaccacaatcatccttggtgtacacaccttttgggagaaatccacttgattggaattt

SEQ ID NO: 5951 - DNA, 436 bp, Triticum aestivum
  unsure at all n locations
  Clone ID: LIB104-039-Q1-E1-F2
tcgacgcatttaggacgaagaagacaatcgacccccaagggaccataatgtattttcctangatgtctatacttattggtttgatcaatagatttgaggccttctgcaaacaataaaactaaaataggtcattgatgcatggtggccgtcggagagtacctcataataaaggaaaataattccgtctttgaaccaaagctaaattatcgtatttcggattgacgtaaacataaggaaatagtcggtatctgaaagtaccattcttctcccgagctcaaatgcacttgtcatgaacagtanaaaaataaaaattaagttaaaatataaaattttctgatttttcttgacagtaaacattgttgaatgttttacatacgtgcaattttcatgaagaaaaaacattcccagtgctctaaaaagaacaaagctccaacat

SEQ ID NO: 5952 - DNA, 439 bp, Triticum aestivum
  Clone ID: LIB104-039-Q1-E1-F4
tcgacgggaccatgggccgcaggcaggcaagtctgggaaccctcgttcccagaatgccgacaaacatgtccgtccatttatcgacctttttttcattgagataacttcaaaaaatgtagaacttatcaaaaacacaaacaactttgtatggtgccttgcattgttcatacaaggtcatgaacttttgaggggggggggggattttaaaagatgtcaagaaacaaagtgctctcagactgagtcttctggcctacccggacaccctccgttgaatattagctatttttagacattactaaaatgatcccaacttttacaagcaggtgggcatgtccatggtaagcaccaatgtgaggtttgaacgatatctgacaccgtctgtaagttgcgatagttagaccatttatcaccattttgatagagaaaactccagagaatg

SEQ ID NO: 5953 - DNA, 411 bp, Triticum aestivum
  Clone ID: LIB104-039-Q1-E1-F7
acgcctgtcggatacggtccagaattcccgggtcgacgggggtgctcgagaggtccacgagacagggggcgcgcctagtagggggagggggggcgcccccctatatcccgggctcctcgagtatcttctgacatggactccaagtctccaggatgataatcttccaaaaaaatcacgttgctgaaggtttcattccgtttggactccgtttgatattccttttcttcgaaatactgaaacatgcaataaaacagcaatatggttgggcctccggttaataggttagtccaaaagtaatataaaagtgtataataaagcccataatcattcaaaacagataataaaatagcatgaatgcttcataaattatagatacgttggagacgtatcaaacaatcaaaaattatagat

SEQ ID NO: 5954 - DNA, 431 bp, Triticum aestivum
  Clone ID: LIB104-039-Q1-E1-F8
ggtccagaattcccgggtcgacgggatatttattatagtaattaaagaaaaaggcaagttagttaggtggtgccacagaatgcaatgctcccttcatcatcatcatcatcataatgtgatcagagctgagacctgatcgatggcacatattagtacgtagatcagtactcctgctcacacaagtccagtaatgagatgcctcggttgcttcgcttcaaaaaaaacaaacaacaaaaaaaaaaaaaaagatgaaaaaaaggtaaaaaagttacaaaaaggaataatagaaaaatgtaaaataaagccacaataatcattcaaaatagacggttcagctagcatgaatgcttcagtcgattatagataccttggagacctagcacacaatcaggtattacagatacgacggtaacgtatcagcatccccaaag

SEQ ID NO: 5955 - DNA, 433 bp, Triticum aestivum
  Clone ID: LIB104-039-Q1-E1-G5
tacggtccagaattcccgggtcgacggggtcgatacatctggaagtggtgtcaagttaactgtggagcctgcagctggtggagagcagactgtcattgaggctgatgttgtccttgtatctgctggcagagtcccatacactgctggtattgggctggacgccattggtgttgagacagacaagggcggaagggtccttgttgacaatcgctttatgacaaatgttaagggcgtatacgcgattggagatgcgatacctggaccgatgcttgcacacaaggctgaggaggatggtgttgcatgtgttgaatttatcgcggggaaggagggccatgttgactatgacactgtacctggcgtggtgtacacacacccagaggtggcctccgttggcaagacggaggaacaagtcaaggcatctggtgtagcctac

SEQ ID NO: 5956 - DNA, 457 bp, Triticum aestivum
  Clone ID: LIB104-039-Q1-E1-G6
ggtccagaattcccgggtcgacggggcaggctaacatataggtgtagccatttttctgacataaaaataacagtaaagaagaccaagttaacatatgtatcaggttgcgtttacctgatcagaagaaacaggcaggtttacaatgttttgtgttgcacattgctactttggtaccttgatgcgaagtaataatgtctttaagctttattagcaccggaataacagcaacaaaagacagtttttaccactgcacttgcagagttctctgaacttctgataaccagacatcagggttctctaaaagaacagacattagctaacataattcagcacaagaataacagttcaaaatgccaaaagagtattagtacaccataagcaagtgttgtgtcgttagcagcgtcgaagtttctatttctgaacttgcagaacttcattgtcatgtaattcagattga

SEQ ID NO: 5957 - DNA, 453 bp, Triticum aestivum
  Clone ID: LIB104-039-Q1-E1-G7
ggtccagaattcccgggtcgacggggatcagcgcctcaccgtcggaggagaacatgcgctacttcaatgtcatggtccttggccccgcgcagtctccctacgaaggtggagtcttcaagcttgaacttttcttacccgaggaatatccgatggctgctcctaaagttaggtttctcacaaaaatataccatcccaacattgacaagcttggtagaatatgcctcgacatcctaaaggacaagtggagtccagctcttcagatacgcactgttcttctgagcattcaggcactgctgagcgccccaaacccagatgatcctctctcagaaaacgtcgcaaaacactggaaatccaatgaagctgaagctgttgagacagcgaaggaatggactcgtatgtatgccagtggcgcatgacaggctaacgctgttatggatgtaataacactgtgtc

SEQ ID NO: 5958 - DNA, 464 bp, Triticum aestivum
  unsure at all n locations
  Clone ID: LIB104-039-Q1-E1-G8
ggtccagaattnccgggtcgacgggcggccaaaggatataatccggctgtctggatacctcctaatccaggactccctcagtagcccctgaaccaggcttcaatgacgatgagtccgacgcgcagattgtcttcggcattgcaaggcgggttcctcctccgaatacttcatagaagattttgaacacgaggatcgtgtctggctctgcaaaacaagttccacatacaaccgtagagagaataatattttcacaaatctaatctgccgacgcattctgcagtgtgacatcacaccacagccaggttaccattcaaatcgtttttcacaaccaacctcagcgtgtttcgcgaggcggtttccttggcacgtcttgtcgaagcagagatcgtgtccccttattacgggattcctatcaatacggacatgggtaacccaaccgcgccatcaattactgtcacatccct

SEQ ID NO: 5959 - DNA, 394 bp, Triticum aestivum
  unsure at all n locations
  Clone ID: LIB104-039-Q1-E1-G9
accgggccgaaattcncggatcgacggggagcatgcagtcgccactgacaccacggtgctggagctctcaagggcctgcagtttcatcatgctcctcgcctacgtcgcctacctcttcttccagctcaagacgcatcgccagctcttcgagccgcaggagattgagggcggcgatgatgatgaggaagaggcggtcctcggctttgggagcgcgctcttctggctcatcctcatgaccatcataatcgccgtgctctccgagtacgttgtcggcaccatcgagccgacctcgcagtcgtggggtctctcggtgagcttcatcagcatcatcctgctccccatcgttggtaacgcggcggagcacgccggagccgtgatcttcgccctgaagaac

SEQ ID NO: 5960 - DNA, 444 bp, Triticum aestivum
  unsure at all n locations
  Clone ID: LIB104-039-Q1-E1-H11
cgcctgcctgtaccggtcctaaattcncggatcgacgggtggaccagaaaagattgataagccgcccgctcagccgcctgctgaaccgcccgctctgcctctgggcgtgtcctgtcctgatcaaccaagttaggggctccatcacgcgtcgggtcatgcccgcacggttggtcacggcgccgggcgttgcttgaaactgcagccgagtccatatgcctgctatagctcgggctccggcttgggcgaggggtcgaatgaatcctgtctcgactataagaatatgcttcctgctgtgccagagccgtctgaagaagttctgtgacccttcgcgtttcgaccgctgtcggagagtcgccttccactgggagagccgccaatcgtgccgccgcagcaatcatgttctccaacgggttagaataatgacccggaggtgtcggtacatac

SEQ ID NO: 5961 - DNA, 372 bp, Triticum aestivum
  Clone ID: LIB104-039-Q1-E1-H5
ggtccagaattcccgggtcgacgggtttggtgaaaatcccaaacgatgcatacattgccacagaatacatgcgacagctgaacaatcatctggtcaaattgttcgccgtgttgtgtgagcatatagcacttgtggccactttgtcatgactccagcacatgctgagagtttgatgctacaacaatttatctgagactacatgttacaatacttcagtactatcgacttattatgagattgattcagttgacactaaaaactaggttggttaatgttgcgaaaattactggatatggctcgtggaaattcaaggatcgcctttattcatatgtaatcatcatctccgtgaatgcaagagcaattgtgaatgtc

SEQ ID NO: 5962 - DNA, 459 bp, Triticum aestivum
  unsure at all n locations
  Clone ID: LIB104-039-Q1-E1-H6
ttcccgggtcgacaaaaaatgaagggcacaaaattgaggggcaccatcctggcctctcgctacttctcgtctggatagtgtactcaacgccacacaatactataccgtatgcaagcctgcaggtagctagctagcctgagagagacagaccgaatccgacagatatctcagaagaattttctttacgtgcccaatatcaatatgggctctgaaatgaggctaggggcgcgtttgttacctgcatcgttttttgccactttgcatacttgtcccaactgggcctggctgagcatatacaggataaaaaccaacatctgcatgttgattggttacctgcatcncctccagcctaaacgtgctaaaacgaaaggcctgatgtttgcttgcggactttgtttgaggggaaacacangtccggttgtttggttatgtacaggacagttgtgtggtaacctccta

SEQ ID NO: 5963 - DNA, 402 bp, Triticum aestivum
  Clone ID: LIB104-039-Q1-E1-H7
ggtccaggattcccgggtcgacgggatgcacgagttcttcgtccacttccacggacccaaagacagtatttaccagggtggtgtgtggaaggtcagggttgaactcaccgaagcttacccttacaaatccccttccattggcttcaccaacaagatctatcaccccaatgtcgatgagatgtctggttctgtctgcttggatgtgatcaatcagacatggagcccgatgtttgaccttgtgaatatctttgaggtgttcctgccccagcttctcctgtacccgaacccctcggaccccttgaacggcgaggcggcttcgctcatgatgcgcgacaagaatgcctatgaaaataaagtcaaagaatattgtgagagatatgccaagcctgaagatatatcccc

SEQ ID NO: 5964 - DNA, 368 bp, Triticum aestivum
  Clone ID: LIB104-040-Q1-E1-A1
acggtccagaattccgggtcgacgggagaaggtaacaccaaaggaaaagaaaacacgtacacacaaagtgaatatagaagtgttcaagactgtgaagcgggaggttcctggtatatctacgttcattgtacttagttaagttgatgttactgttgttttttctcgctgccgccatgccatgagcaggcgaggcaggcagcttctcaaacttgtgttgttgtaacttgtatgatgggagcttaagtacattactttgtttcgaaaaaaaaaaagagaagagaaaaaaaaaaagcggccgcccaaaaggttccagccttacttagccttgcatgcaacttcatagcccttcaaaagtgtcccccaaattc

SEQ ID NO: 5965 - DNA, 435 bp, Triticum aestivum
  Clone ID: LIB104-040-Q1-E1-A3
taccggtcaacaattcacgggtcgacgggtcctatgagaaccccttttaatagtatggatttcctacaaccaaataaattaaatgcatcggaaatgccgccttcgctcttttccatctggaggggtgcccaaccatcttgtgcctaataaagtatacatgcgtagcttaggcacgcgtttagtctgtaagttgcattgtcatcaacatcaaaacacttaaggaggaaaatgcccttccagtaatgtgccttgttaggcctttggcgttggaacccaagtccccacctatatttcaagataaagcatgcttatgtttaattcgtgacaaatatgtgttttcaaattaacgcaacaaaaagaatgttcaataaaagactagatgcttttcttcacagcttcttatgccaattggtccatcaatttaccttgtccaat

SEQ ID NO: 5966 - DNA, 415 bp, Triticum aestivum
  Clone ID: LIB104-040-Q1-E1-A6
tcaagaattcccgggtcgacgggtcaccacatgcttagatagccgattacattgggcgaagactaatgatcaacatttaacttgacaatgcgtattttttttagaagaacagggaggctcctccccggttccattatcaaatgaaacctaaagtgtcttacatcagctcactgagaggagcagttcaaaggaaggactgcggcgaaaccgactcaagtttaatgacaagcttacagaatcaaaagcggcaaagacacgggccataagcgcccacacacgcactacatgttttctaagtgcacttgataatgcgtatgtccaggtgaacctccttggagcccccgtgcaccgagtcggtgggtaaaggatggaattgatgccatgtgttttccaagtccacattggcgggataatc

SEQ ID NO: 5967 - DNA, 364 bp, Triticum aestivum
  Clone ID: LIB104-040-Q1-E1-A9
attcccgagtcgacgggagaccataatcatcctatgcctcctacggattgataaaccttcggttatccacttgagggaaatttgctactgtcctacaaacccttgcacttgcaggcccaacaacgtctacaagaagaaggttgtgtagtagacatcaagctcttttctggcgccgttgctggggaggtgagtgcttgaaggtatatctttagatcttgcaatcgaatctttttgtttcttgttttatcactagtttagtttataaaagaaaattacaaaaaaaatggagttaagtttgtctcatacgctttgtctttttaatatctttcgtgagtttgatggaaaggaaaattgtgctcaagtt

SEQ ID NO: 5968 - DNA, 382 bp, Triticum aestivum
  Clone ID: LIB104-040-Q1-E1-B7
tcccgggtcgacggggacagcgacaacaaggaacagttcaagagaagagaagatggcttcttcttcctcgtcggtgctgctggttgcggcggtggtggccgctgtggtgtgcggcgcgcacggcatccccaaggttccccctggccccaacatcacggcgtcgcctgcgagctacggcaacaagtggctggacgccaagaccacgtggtacggcaagccgacgggcgccgggcccaaggacaacggcggcgcctgcgggtacaaggaggtggacaaggcccccttccacggcatgacctcctgcggcaacatccccatcttcaaggatggccgcggctgcggctcctgctttgagctcaagttgcacaagcccggggcctgc

SEQ ID NO: 5969 - DNA, 382 bp, Triticum aestivum
  Clone ID: LIB104-040-Q1-E1-B8
attcccgggtcgacggggtccattagtttcgggcccaatgcgtggtagtagctgaatcatggatcacaaacacagaactcagttcctgaggacggctgcaatgagacaacccaccatgtactcctacatggcctctcaccgctacctttaccaaaacgtgttcacacacttagctcacacatagtaggacatgttcacacgcctctgattcatccccgatgaatcagacctgactcaactctaagcagtagcaggcaggacaaacaaacatgaatgagtaggcacatcagggctcaaacaactcctactcatgctagtgggtttcatctatttactgtggcaatgacaggtcatgcaaaggacaaaggggttcagctaccgc

SEQ ID NO: 5970 - DNA, 426 bp, Triticum aestivum
  Clone ID: LIB104-040-Q1-E1-C6
attcccgggtcgacgggctgaactacgtacttaagtagtcattgtcggtggtaccttaaggtggtggtttgttttcttatactaacggagctcatgagattttctgttgaagttttgtgttgtgaagttttcaagtttttgggtaaagatttgatggattttggctgaacttcgtacttaagtagtcatcgtcggtggtaccttaaggtggtggtttgttttcttatactaacggagctcatgagattttctgttgaagttttgtgttgtgaagttttcaagtttttgggtaaagatttgatggattttggaataaggagtggaaagagcctaatcttggggatgcccaaggtaccccaaggtaaaattcaaggacaaccaaaagcctaagcttggggaatgcccggaaagcatcccctctttcgt

SEQ ID NO: 5971 - DNA, 415 bp, Triticum aestivum
  Clone ID: LIB104-040-Q1-E1-C8
attcccgggtcgacggggaagataagattaggaaggttcaggagctgaaggcgaaagcgaaggctgctttggagaacggcgggtcgtcgtgcatgaatctggacaagctggtccaatccgtcgtctgaaaattagcgcagcatgtcggcccagaataaattctgctgctttcgttcattgatggacatattggggccgtttcttgcttgattggaagatcaagactatgttgcaactgttgtttagctgcaactgtgtctcatgccaactcagtctacaagtctcttgtttagcgctgcctgcctcgtaaaaaaagataacgaagccggcaggtgctctaccatttgaataaggaaagtctagagaatgtttacaagatagctgcttcgagaaccgacagaaaaatcacacaaag

SEQ ID NO: 5972 - DNA, 414 bp, Triticum aestivum
  unsure at all n locations
  Clone ID: LIB104-040-Q1-E1-D1
gggtcgacggctctatgacatgaagcacaccacacagttctgcaaaattccagctcggtggctccgtacttcgagcaatacaagaatattttacgctcggacaacccggggaagcctgaatcctggattagaaaggcccacatggagactttcggcagttggttgcgaaaacatttaatgaatgacaatgatgttggagatcagctgtacatgttggccaagaaaccatcttcgactataacgactttccaagggtacgagataaatgggaatacattttacaccatcgcccaagataaaaagagcaccaaccaaaacagtggtgtccgctttgatgcagcaaccgagaatgggcaaaaggtcacatattatggttacatanaggagatatgggaacttgactatggaccctcc

SEQ ID NO: 5973 - DNA, 414 bp, Triticum aestivum
  Clone ID: LIB104-040-Q1-E1-D7
attcccgggtcgacgggacctactattaaaattagaaccaaagatcatgaatactatgctttgtgtgatttgggtgctagtgtttccacgattccaaaacattgtgtgatttgctaggattccgtgaatttgatgattgttctttaaacttgcaccttgcggattccactattaagaaacctatggaaagaaataatgatgttcttatttttgcatataggaactatgtgcccgtagattccattgttcctgacatagattgcaatccttcatgtcctattattcttggtagacctttccttagaacgattgctgcaattattgatatgaaggaagggaatattagattccaaattccattaaggaaaggtatggaacactttcctagaaagaaaattaaattaccatatgaat

SEQ ID NO: 5974 - DNA, 426 bp, Triticum aestivum
  Clone ID: LIB104-040-Q1-E1-E11
attccagggtcgacgggacaataatagtgcggatggtgttgttcccgagagtggtcctgtcgaagatgaggagcatattgcttctctgaggcctaaaagatcaaagagactagtgaggagcacgggtgaggataaggaacccgttgctgcttgtgatgttgagaaacctgcagatgcagctgaaaacaatgacaacaatgatgcagaagagttgcaatcccagactccttcagcctagttgacctactgggttgacctgatgaaaacataagatgcgaatggcaagactctaatttgtggtgttgagtaggagcatcaaagatggcacccattggaggagctctggatctgcttaaggtgttacgcagttcaataagtattttaactgtgctgtgcaacctcttttcaaaagcctgggaccgcaac

SEQ ID NO: 5975 - DNA, 381 bp, Triticum aestivum
  Clone ID: LIB104-040-Q1-E1-E12
atcgactgggcgatcggtgccttcgtctccggcgcaactgtctatggctacagaggacagagcattaagtctgccctcaatggtggatcaagcctggcattcacatctgccatcctggacgttggtggtaatactaccagagtggacattggccaagcgtaccatgcatacacaacggaataagaagcccgagcctgcgcattgaccaacgttgtttacgtgtagcacacatcatgcaaaccagctcggtgaatttttgagctgatgcgtgctgttatgtctgttttgctgatgcacctagttcctttgcaaagctgtagtaacttgttttgctcgagggcaatacaacaagacctggaataaatatcttgttttattttg

SEQ ID NO: 5976 - DNA, 409 bp, Triticum aestivum
  Clone ID: LIB104-040-Q1-E1-E8
attcccgggtcgacgggggaagataagaagtgcaaaggtgaatccagattcccagcacaggtgaggatccgcattagaaggctttgcaaggccttggaagaggatgctttcaggccagtgctgcaccactatgatggtcctaaattccgcctcgagctctccatagcagagacactgtcactgctagacctgtgcaagacagaagacgcctgatctgcttcggaacatgtttgtggttgctctgtggttctttttagtaaatatcatccctgtaagttgtggaagatgttttcacaatgatctgtcccgtccgtcgtccatgaaagcgcaagctgttggttggtggttgcatttcccccagaaaggacctggtactcggaagaagtaggcctctaaagatgtgagcctg

SEQ ID NO: 5977 - DNA, 366 bp, Triticum aestivum
  Clone ID: LIB104-040-Q1-E1-F11
gtaggcgtcatgaattccagggtcgacgggctgcgtgaaggcccgattgtcctgttgacgagtgccatgcatggcagttggcagggaaacctcctcgttgttcacccttgtgttgtactactagttcatctccttgatacaatgctgcatacgtaagtaaaaatattgagtgaacaatgtgctgcattgagaaatctgagtaattaagtaaaaataagtagcaaaagtatcctgtaatcgactacataatcatctgtacgtgtgcagacgatatgcaacgaaccgtcaagcagtgccctgcccacgtacgtacagggtctcataaccatggcgtacgtgcatgactcgctcggccgggcgacagcc

SEQ ID NO: 5978 - DNA, 446 bp, Triticum aestivum
  Clone ID: LIB104-040-Q1-E1-F2
gggtcgacggcacgatgaaacaatgacattgtctggctattcatacaattctatacaagatgcaatggacgttgcagctgctcgagtaatgaaatatatggagaccatgcgtgccaaggtattgaaagactatagttacaacgagttgcaacaaacaaaggaaagagaactgcatctgattggtttgttaggacaaagaaaaagaaatcaaagaacaggctctgaagattagagaacttagcaaagactttgcagactacttatatcaggttaaaagcacttcttctgagattcaccgcccagctaaaggaagtgtatgctcagccaattccataagtggttgcgagctccacaaagcggctatagatattcataatgcaattgctcatcttggccagttgagtgaaaaccctatgcaaggtaaccaaaacacatcggtatatcca

SEQ ID NO: 5979 - DNA, 437 bp, Triticum aestivum
  Clone ID: LIB104-040-Q1-E1-F5
attcccgggtcgacgggggaatttatagaagcaaggcggactgctgcacttaacaatgccccttcctgtatgtggtctccagtaccacctcttgagttaaaaggcgtgaatgctgatgcacttgatgcaaatgctggttttgttacttttgttgttttccctcggcatgttgagggtagaaagctagacaaaacagtttggagtttgttaaccttccatgcttatgtaagctaccatgtaaagtgttctgaaggattcatgcacaccaggatgaggcgtagagttgagtctctgatccaggctttggaccgtgctaaatccgatgcagagaagctgaagaagttggtacatggcgggtcttttaggagactgagcatgaagcacgaaggcaactctaatcactgaaggaagactcaggcaaatatatgaaagttttg

SEQ ID NO: 5980 - DNA, 430 bp, Triticum aestivum
  Clone ID: LIB104-040-Q1-E1-F9
attccagggtcgacggggactcgccagtgatcaatccccatcactcgccggcgattggtctggacgcgaccaatggcagaaaccgcagcgatagcaccaccaccacaaccaatggcaccaccgcaaccagtggaggaaaacgcaacggcggcaccgtcacaaccaatggcaccaccgcaaccaatggcggaaaacgcaacggcagcaccaccgcaaccaatggcggaaagcgcaactgtcgttgtggtggtgccaccaccaccgccagacggcaccacgacattcctctgcctcatcctcgccttcttcatccctcccctcggcgttttcctcaagtacaaatgtgagattgaattctggatctgcctcatcctaacattcttggcctacgcgccgggcatcatccaagccgtccgggtgatcgtgaagt

SEQ ID NO: 5981 - DNA, 438 bp, Triticum aestivum
  Clone ID: LIB104-040-Q1-E1-G1
gggtcgagggcgaatcgaaagaacaaaagagcttgcgcaagaacacgttaaccttgcggtcaaagccatcgaatctctcccagacagtgacgatgaagatgttctgatttcaaggcgcgctcttattgatatcacacagagagtcatcacaaggacaaaatagcatgattatacacagggtggagaagataaggcggagtttcaccacaggtgtagtgttccgcttggaaatttttggtcgccttggtcattgcattctttccattgcccgggttttgtgtaacatttgatgagacttcagggtaaccattcctgggaatcatcctaagtcgcagctgtagtggttttagttactggtggcagcaaaatctgtgtattaatatcacgattggcgattgcacgaagacctgaccataagactgttacctttataatcca

SEQ ID NO: 5982 - DNA, 444 bp, Triticum aestivum
  Clone ID: LIB104-040-Q1-E1-H11
tagccgtcgagaattctcgggtcgacggggtattggacaattataattcataacctgcactaaaaaatactcaaaattttataataccaccgttactttaactataagaaaaatggctatttgtatcaaatcctaacattaaacattaaaaatagacgggcgcagcaacgccgccatcggtgatctagttgtgcactaaactactccaatttccatcttatgggagaatttcaagctagactcctgctatatgcagattttgtcttccaggttatggatatcacattgcatgtattcaccgttgtggtgtcatctaatgatactttctaactatatatacatcattgacagttcatatcttcagttgtgcaatattttacacacaacttgtccttctattgcgggaaacaccaatatatcttggcaaagctggactgagaatga

SEQ ID NO: 5983 - DNA, 401 bp, Triticum aestivum
  Clone ID: LIB104-040-Q1-E1-H5
ggtacaggtctagaattcccgggtcgacggggctcgttaatagacgaggagcattccatattagtaccactcctaccaagtttgtactcctaatactattatattactagtactaccactatacaactagtagatacgtgcacggcacaacatcgtaggaacaaaaaacgggaagatcttgttttgggtgatttatctttttttcaatcaacgtagtatgaataatatgatgtggggggcacccatgaagcttatgtggcttggttgcatggctacgaaaggttagagaaaaataaatagataatgtgtttagagtgcactccactaaatagatacactttggatccattgcaacagaccggcacatctatatctataccccctataaagtgtgtgaaaaa

SEQ ID NO: 5984 - DNA, 419 bp, Triticum aestivum
  Clone ID: LIB104-040-Q1-E1-H7
attcccgggtcgacggggaagaagaattttaacaagtcttctacttcctctcgcccaatctcctcacctgcccccgagaagagagagagagaaaagcagcgagacgcgaatcagcggcggcgatggctctcccggcgtccggctccaccctctcccgcttcctctcctcccgccgcatccagcccacggacatcaccgccctcgccacctggggcgtcttcgccggcagcgccgccatctacctcgtccagccattcgactggatcaagaagaccttctttgagaagcccgagccagaggcatgagtgtcatacattgcaacttttgatgcctacattttcaggacgattctctgagtttggatgacccagccaataatatacaagaccctcgtgttcccttgtttgatttcccatcca

SEQ ID NO: 5985 - DNA, 381 bp, Triticum aestivum
  Clone ID: LIB104-041-Q1-E1-A1
agtaccgcgtcgagaattcacgggtcgacggggtgtggcagcggcactggttctggaagaggttcttcgccgacgccgatgaggccaagattaataactgctacccagctgatgatgacgataatgcccggctttgctacacacacggaataatacggagttttacgggcctggacgcccaccccaccagttaaaatcagggggggcggttaagtaggtggagaagtttacttttgccaattacaacactaaaggtcagcgcgtccgtaaaacttgtgcgtgtgcggcacgtgtgtctagcatttttgcgataatgcctgtgtcctgaagtcgcacaagccttgcttccaagcaacatcacgagtactgaacacctttcct

SEQ ID NO: 5986 - DNA, 87 bp, Triticum aestivum
  Clone ID: LIB104-041-Q1-E1-A10
ccctatagtgagtcgtattacgcaggcaggtatgttctggtcactgccggctgcgcgatttcggacgacggcaatcgattggagtcc

SEQ ID NO: 5987 - DNA, 453 bp, Triticum aestivum
  Clone ID: LIB104-041-Q1-E1-A12
ggtctagaattcccgggtcgacgggattatatgtggccaagttcccaggaaaaataataaacttgtaatacgacaattattttaaaaaagtgttctcagaaacgagctatcacgtgtggagatcaatggctttcaggcgaaatgatcaatcttatggccacattcatggcatagtttgttcagatgatctcatattgtgcacaagggtgcatattggaatggcaaacaatgttgcctaaggaagttttcattttgtttggacgaaaaaaccattttccattcttcgagtgcccaaaaggaggtttttttgtgaaggacctcccaaataattgttgcataattgtaccaaatcatttttctaaaatactagtccatatttaatgcacaattaaccaaaatggttgggtgtaaaatgttttgatccacctctcgtgaaaaagacaaatttccgcc

SEQ ID NO: 5988 - DNA, 286 bp, Triticum aestivum
  Clone ID: LIB104-041-Q1-E1-A6
tcgtgggtcgatacggttccctatagtgagtcgtattagttgttcttgtacatgcattcgccgtgtcagcagccaggcgacgcggaggggatgaagggcatacagagaacatgtttctgtctaggtcatcctgcttacttaggggaggtggatggcccgacagaaggcatgcacatattgacgagggccgagactaatttgttaacggttatttttaaggtttattgtctgtttatttctattttacaacctgaatgacaaatgggacacacactgtaacagaaca

SEQ ID NO: 5989 - DNA, 379 bp, Triticum aestivum
  Clone ID: LIB104-041-Q1-E1-A8
gtctagaagtcccgggtcgacggggattccttggacgaggatgacctaacttgatcccaaacgtgcccagcgagatgcagagagaagcacaatcaatcgagtgactcaaactatgtgccgttgatgaacaggaaaggttgtaaaaacacattctgaattacatagaaacttgtaggctgcatctgtatcatggattgtgatccccttattttcgttgttttggatctgtgcacatacaccctacacctatactgttggtttgctgttgccacattcttatttgttcgattacctggacagtgttctgttatttgtatatacaccagcatatgctgaaggacaaacggattccaaaaaataaaatcgtgcataataaaac

SEQ ID NO: 5990 - DNA, 386 bp, Triticum aestivum
  Clone ID: LIB104-041-Q1-E1-B12
cgccggcaggttacggtctagaattcccgggtcgacgggagattctacatatattttctaaaagacatgtcacttggtcgaggccttgatcatggtgatatgtgtttattcgtccggtgactcagtagaacgataacctctgtgcacagtgatgtttcagtttctacattgatggtttcaagcataagaaggtttcaaaattaaatgagccttgtacaggactgataacaaattatgctttctgagtttcaagctactgaaagtaattgaagctttgccttcgctatgtaagaatggttgcatgtgttaattagtggtgcacattttttgagactgtccaaaattctattataaaatgcttatatgaaaaaaacggaacaaaaacg

SEQ ID NO: 5991 - DNA, 443 bp, Triticum aestivum
  Clone ID: LIB104-041-Q1-E1-B2
attcacgggtcgacggggaggttgagaagctgactggcaggatagtgaagtggctgaagcccggtgggcatattttcatcagggaatcgtgcttccaccagtctggggattccaagaggaaagtgaacccgacgcactaccgggagccgaggttctacaccaaggtgtttaaggaatgccactcctatgaccaagaggggaattcctttgagctttctctggtaacttccaagtgcattggagcttatgtgaaaagcaagaagaaccagaaccagatatgttggctgtgggagagggtcaagtgcacagaagacaaaggctttcagagattcctggacaatgtgcagtacaaatccactggaatcttgcgttatgagcgcgtgtttggggaggattatgttagcaccggtggattcgagaccacaaagggattttgtggacaa

SEQ ID NO: 5992 - DNA, 404 bp, Triticum aestivum
  Clone ID: LIB104-041-Q1-E1-B4
atagtgagtcgtaatatcaagattaggagggtgaatgttagagctaatcttgatatttgtattagcatgtttgagttttgcatgtagtctagtctagtgtggcgttcgtccgacgaaggcttcaggtgagcgcgccaaggaggtgagatgccaggatgccgtgtgaggcggcgagcacggcgagatgccgatggtgctgcgtgagaagcggcaagacgtatcagaggctggagccgtgatggactgcatcaaattgggtcgggtgaaccggccggtcgttctgtttgttggactagctgttcatgcgtgagttcgtttagtcctagccgagagtgtcgttgctagtagtttatgcatgcatgtagttggcctggtcacaagtggttaccgagtcgtgttcaacg

SEQ ID NO: 5993 - DNA, 437 bp, Triticum aestivum
  Clone ID: LIB104-041-Q1-E1-B7
ggtctagaattcacgggtcgacgggaaggtcaacatggtgtagcacgggcaccacaaaacaaccgtctgctgcgccctccatgacggggctgaaatggcaccctcagaagcagcactgccgctactcggcatggttctgtacatatctctgtcgattcgaacaacgcaccagggtgctcagctatattttcagcgcagtggcggctcgaggacaggcggttttaagatttgatttgctgtaatgctacgaccaagtgtaacaatgtacttatatgcactgcaacctttggaggctgcgcacaggtgatttgtatggttgcttacattgttggatatttaattgtgcacaacctaaatattatgcacacatcgccattggttccgcttggtaaatgcgacccataaatgtgttccaaaaaacaaactccttactggga

SEQ ID NO: 5994 - DNA, 431 bp, Triticum aestivum
  Clone ID: LIB104-041-Q1-E1-C12
ggtccagaattcccgggtcgacgggggtggttaaattttatagaaattattgatctctcatgcttcacttatattattttgggagttatttagaacaacatggtaatttgctttggctataaaattagtcctaatatgataggcatccaagatgggtataataaaaactttcatatagagtgtattgaatactatgagaagtttgatacttgattattgttttgagatatgaagatggtaatattagagtcatgctagttgagtaattgtgaatttgagaaatacttgtgttaaagtttgcaagtcccgtagcatgcacgtatggtaaccgttgtgtaacaaatttgaaacatgagttgttctttgattgtcatccttatgagtggcggtcggggacgagcgatggtcttttcctaccaatctgtccccct

SEQ ID NO: 5995 - DNA, 358 bp, Triticum aestivum
  Clone ID: LIB104-041-Q1-E1-C2
ccctagagtgagtcgtattatgtcaagtagtggacagataagccaaccactggatgtggttttcagggatttttgcagtgggatttgtagggtactatgctgcgctgtgtttgggatttgaaataaaacgatgggagatgtgccacgctcttaaatgccagtcttctgctctaatcttgctaaattacttgttgcattttgcagcttgtctacctttacagtgactaccttcttttggctgtgctcatttggcaaaacagtttgtctaattcacatctacttcgtgtctttttagacatttcaaatagacaacaacatacggatgtatgtagacatattttatagtgtagatccattc

SEQ ID NO: 5996 - DNA, 424 bp, Triticum aestivum
  Clone ID: LIB104-041-Q1-E1-C6
gttggtcattgcgacactctatagtgagtcgtactagggcaagaccatcacccttgaggtggagtcgtctgacaccatcgacaacgtcaaggccaagatccaggacaaggagggcattcccccggaccagcagcgccttatcttcgccggcaagcagctggaggacggccgcacccttgccgactacaacatccagaaggagtccactctccacctggtgctgcgcctgcgtggcggcatgcacatcttcgtgaagaccctcacaggcaagaccatcactctggaggttgagagctctgacaccatcgacaacgtcaaggccaagatccaggacaaggagggcatccccccggaccagcagcgccttatcttcgctggcaagcagctggaggatggtcgcacccttgccgactacaacatccag

SEQ ID NO: 5997 - DNA, 309 bp, Triticum aestivum
  Clone ID: LIB104-041-Q1-E1-C7
agtgagtcgtactatgcgatcgacgtcaaagttcttgtgcagtctacgtcatagcccgtccacgggccctcgttaatccacgtcatgggtggtagtttctcagcgtcacgcatgggaatcgcctggcgtcacatgtcggagtcgccatctggcgtattacccactcggcacctaacgatatccctatgcagcggttgctgatcgtgcttggcgacagggacgtaccctgaagcgccgcagggagctccacggttgcggtgcatgcacggagcttggtgtcgacgtgtcgccggcgcgcgagcgctcgag

SEQ ID NO: 5998 - DNA, 432 bp, Triticum aestivum
  Clone ID: LIB104-041-Q1-E1-C8
gtccagaattcccgggtcgacggggatgaaaaactacatgctgagtgggcagcagccaagctggccagcaaaaagcgcctagccaagcatgtattggatgtgactggtgttacaattgacccagatagcctttttgatatacaaattaaacgcatccacgaatacaagagacagctgatgaacattttgggagctgtgtacagatacaagaagttaaaggaaatgagcgcagcagacaggcagaaggttacaccgcgcactgtcatggtaggagggaaagcatttgcaacatacaccaacgccaaaagaatagtgaaattggtaaatgatgttggtgctgtggtgaacaacgatgctgacgtcaacaaatatctgaaggtggtgttcattccaaactacaatgtatcagtggctgaagtgctcattcctggc

SEQ ID NO: 5999 - DNA, 369 bp, Triticum aestivum
  Clone ID: LIB104-041-Q1-E1-C9
attacaacaccctatagtgagtcgtattaagcagcagccaagctggccagcaaaaagcgcctagccaagcatgtattggatgtgactggtgttacaattgacccagatagcctttttgatatacaaattaaacgcatccacgaatacaagagacagctgatgaacattttgggagctgtgtacagatacaagaagttaaaggaaatgagcgcagcagacaggcagaaggttacaccgcgcactgtcatggtaggagggaaagcatttgcaacatacaccaacgccaaaagaatagtgaaattggtaaatgatgttggtgctgtggtgaacaacgatgctgacgtcaaccaatatctgaaggtggtgttc

SEQ ID NO: 6000 - DNA, 218 bp, Triticum aestivum
  Clone ID: LIB104-041-Q1-E1-D12
ccctatagtgagtcgtattagacgtgtatggaagtcctaggccaggcgactatttcacggacagccgaagaggaattccgtcaatccgccaccgttttgactcttgagaacaactctatcaactcagtagatccttttaggacgccctcagtgaccacaggttgaacctaacgaagttagactgtgctatggctcgatattcacgcactagctgtacg

SEQ ID NO: 6001 - DNA, 425 bp, Triticum aestivum
  Clone ID: LIB104-041-Q1-E1-D5
ctcgttggtcaatgggagaccctatagtgagtcgtattaggcagcagagcagacggccggcgacgaaccaatccagccagccgaactcgtcagcgcgcagccgcccttcccgcgagataaaccatgggtggggtacttggtttgatacagattgatcaatcaacagtagccatcaaggagacttttgggaagtttgatgcgatcctgcaacctggatgccactgcttgccatggtgcctagggcagcagattgctggatatctttctctgcgtgtgcagcagcttgacgtccgatgcgaaaccaagaccaaggataatgtctttgtcaacgttgtggcatctgtgcagtaccgtgctcttgctgacaaggcatctgatgccttttacaggcttagcaacaccagggagcaaatccagtcctaagt

SEQ ID NO: 6002 - DNA, 408 bp, Triticum aestivum
  Clone ID: LIB104-041-Q1-E1-D6
aattcccgggtcgacgggtcaggaggcatgcacgaatgatgaggggggatgatgtggctgtggtaagcagacgtaactacataggaagatcaatcgccctttgttagagaaaggagagacataacttgtgaggtacgtcgatcgatgggggggtagttaaagtcgatctaggtatatgttgggagatcaatcggtatacatgcatgtgtgtgttagaagcaaatgaggcacgaggagaaggatagagagagagagagggatgcatgtaggaggtggtacgagaggcatactatatcgagggtggaggagtgtgcgagtacgagaatgatgaaaagagtggtgggagtgaggcatggatggtgacaagagaagaggggaagcttgtgtttgtgctaggcacacctggct

SEQ ID NO: 6003 - DNA, 360 bp, Triticum aestivum
  Clone ID: LIB104-041-Q1-E1-D7
tacgggagaagaagaagaaggagcagaagatgaagaagaagaaggaggagaagaaaaagaagaagaagaagaaacagaagaagatgaagaagaagatgaataagaagcagaataaggaagaaggataagaagaagaagaagaacatgaagatgacgggaagacaagtaagaaggataaaaaggagaaggatgagaaaaagaaagaagatggcgaaggctcagaaaaggagaaggccatgaaagggaaagataagaagagcgagagcaaagagaaggataaaaatagcgtcaaggagactggagctgatgcagatgacagtagccccaagaacaaaaagaaggagaaggacaaggcaaaga

SEQ ID NO: 6004 - DNA, 411 bp, Triticum aestivum
  Clone ID: LIB104-041-Q1-E1-D9
tcgtttgtcattacaactccctatagtgagtcgtattacatcaaggtcacaagcactcaggtacctctttgtgcgttggggcctgcccgtgggcaacatgtacattgtcctcggggaacatggcgacaccgaccgtgaggagatgctttcaggactacacaagacggtgattgttaaaggcgtcaccgagaaaggctcagaggacctgctgaggagctcagggagttaccacaaggaagacgttgtcccgtccgatagcccattggctaccaccacgcgcggtgatctgaagtcggatgagatcctgcgggctctcaaggaggtctccaaggcttccagcggctgatcggttgcccggaagctcgatgatgccgaacatcttcactcatgctatttaatatcttccgcttg

SEQ ID NO: 6005 - DNA, 87 bp, Triticum aestivum
  Clone ID: LIB104-041-Q1-E1-E12
ccctatagtgagtcgtattaattgtatcgcgacttggatggatgagatcgacgatctaactgctcatggtcagtcgtcatgagggtg

(The sequence listing continues in the following parts.)
